United States Patent Application Publication US 2024/0252682 A1 - sequence listing, part 2

SEQ ID NO: 476 - protein, 2174 aa, synthetic construct
MPAAKRVKLDGGDKKYSIGLDIGTNSVGWAVITDEYKVPSKKFKVLGNTDRHSIKKNLIGALLFDSGETAEATRLKRTARRRYTRRKNRICYLQEIFSNEMAKVDDSFFHRLEESFLVEEDKKHERHPIFGNIVDEVAYHEKYPTIYHLRKKLVDSTDKADLRLIYLALAHMIKFRGHFLIEGDLNPDNSDVDKLFIQLVQTYNQLFEENPINASGVDAKAILSARLSKSRRLENLIAQLPGEKKNGLFGNLIALSLGLTPNFKSNFDLAEDAKLQLSKDTYDDDLDNLLAQIGDQYADLFLAAKNLSDAILLSDILRVNTEITKAPLSASMIKRYDEHHQDLTLLKALVRQQLPEKYKEIFFDQSKNGYAGYIDGGASQEEFYKFIKPILEKMDGTEELLVKLNREDLLRKQRTFDNGSIPHQIHLGELHAILRRQEDFYPFLKDNREKIEKILTFRIPYYVGPLARGNSRFAWMTRKSEETITPWNFEEVVDKGASAQSFIERMTNFDKNLPNEKVLPKHSLLYEYFTVYNELTKVKYVTEGMRKPAFLSGEQKKAIVDLLFKTNRKVTVKQLKEDYFKKIECFDSVEISGVEDRFNASLGTYHDLLKIIKDKDFLDNEENEDILEDIVLTLTLFEDREMIEERLKTYAHLFDDKVMKQLKRRRYTGWGRLSRKLINGIRDKQSGKTILDFLKSDGFANRNFMQLIHDDSLTFKEDIQKAQVSGQGDSLHEHIANLAGSPAIKKGILQTVKVVDELVKVMGRHKPENIVIEMARENQTTQKGQKNSRERMKRIEEGIKELGSQILKEHPVENTQLQNEKLYLYYLQNGRDMYVDQELDINRLSDYDVDHIVPQSFLKDDSIDNKVLTRSDKARGKSDNVPSEEVVKKMKNYWRQLLNAKLITQRKFDNLTKAERGGLSELDKAGFIKRQLVETRQITKHVAQILDSRMNTKYDENDKLIREVKVITLKSKLVSDFRKDFQFYKVREINNYHHAHDAYLNAVVGTALIKKYPKLESEFVYGDYKVYDVRKMIAKSEQEIGKATAKYFFYSNIMNFFKTEITLANGEIRKRPLIETNGETGEIVWDKGRDFATVRKVLSMPQVNIVKKTEVQTGGFSKESILPKRNSDKLIARKKDWDPKKYGGFDSPTVAYSVLVVAKVEKGKSKKLKSVKELLGITIMERSSFEKNPIDFLEAKGYKEVKKDLIIKLPKYSLFELENGRKRMLASAGELQKGNELALPSKYVNFLYLASHYEKLKGSPEDNEQKQLFVEQHKHYLDEIIEQISEFSKRVILADANLDKVLSAYNKHRDKPIREQAENIIHLFTLTNLGAPAAFKYFDTTIDRKRYTSTKEVLDATLIHQSITGLYETRIDLSQLGGDGGGSSGGGGGSGGMDPLQLLQPLEAEIKGTKLKAHWNSGATITCVPEAFLEDERPIQTMLIKTIHGEKQQDVYYLTFKVQGRKVEAEVLASPYDYILLNPSDVPWLMKKPLQLTVLVPLHEYQERLLQQTALPKEQKELLQKLFLKYDALWQHWENQVGHRRIKPHNIATGTLAPRPQKQYPINPKAKPSIQIVIDDLLKQGVLIQQNSTMNTPVYPVPKPDGKWRMVLDYREVNKTIPLIAAQNQHSAGILSSIYRGKYKTTLDLTNGFWAHPITPESYWLTAFTWQGKQYCWTRLPQGFLNSPALFNADVVDLLKEIPNVQAYVDDIYISHDDPQEHLEQLEKIFSILLNAGYVVSLKKSEIAQREVEFLGFNITKEGRGLTDTFKQKLLNITPPKDLKQLQSILGLLNFARNFIPNYSELVKPLYTIVAPANGKFISWTEDNSNQLQHIISVLNQADNLEERNPETRLIIKVNSSPSAGYIRYYNEGSKRPIMYVNYIFSKAEAKFTQTEKLLTTMHKGLIKAMDLAMGQEILVYSPIVSMTKIQRTPLPERKALPVRWITWMTYLEDPRIQFHYDKSLPELQQIPNVTEDVIAKTKHPSEFAMVFYTDGSAIKHPDVNKSHSAGMGIAQVQFIPEYKIVHQWSIPLGDHTAQLAEIAAVEFACKKALKISGPVLIVTDSFYVAESANKELPYWKSNGFLNNKKKPLRHVSKWKSIAECLQLKPDIIIMHEKGHQQPMTTLHTEGNNLADKLATQGSYVVHAGKRTADGSEFEKRTADGSEFESPKKKAKVE

SEQ ID NO: 477 - protein, 2171 aa, synthetic construct
MPAAKRVKLDGGDKKYSIGLDIGTNSVGWAVITDEYKVPSKKFKVLGNTDRHSIKKNLIGALLFDSGETAEATRLKRTARRRYTRRKNRICYLQEIFSNEMAKVDDSFFHRLEESFLVEEDKKHERHPIFGNIVDEVAYHEKYPTIYHLRKKLVDSTDKADLRLIYLALAHMIKFRGHFLIEGDLNPDNSDVDKLFIQLVQTYNQLFEENPINASGVDAKAILSARLSKSRRLENLIAQLPGEKKNGLFGNLIALSLGLTPNFKSNFDLAEDAKLQLSKDTYDDDLDNLLAQIGDQYADLFLAAKNLSDAILLSDILRVNTEITKAPLSASMIKRYDEHHQDLTLLKALVRQQLPEKYKEIFFDQSKNGYAGYIDGGASQEEFYKFIKPILEKMDGTEELLVKLNREDLLRKQRTFDNGSIPHQIHLGELHAILRRQEDFYPFLKDNREKIEKILTFRIPYYVGPLARGNSRFAWMTRKSEETITPWNFEEVVDKGASAQSFIERMTNFDKNLPNEKVLPKHSLLYEYFTVYNELTKVKYVTEGMRKPAFLSGEQKKAIVDLLFKTNRKVTVKQLKEDYFKKIECFDSVEISGVEDRFNASLGTYHDLLKIIKDKDFLDNEENEDILEDIVLTLTLFEDREMIEERLKTYAHLFDDKVMKQLKRRRYTGWGRLSRKLINGIRDKQSGKTILDFLKSDGFANRNFMQLIHDDSLTFKEDIQKAQVSGQGDSLHEHIANLAGSPAIKKGILQTVKVVDELVKVMGRHKPENIVIEMARENQTTQKGQKNSRERMKRIEEGIKELGSQILKEHPVENTQLQNEKLYLYYLQNGRDMYVDQELDINRLSDYDVDHIVPQSFLKDDSIDNKVLTRSDKARGKSDNVPSEEVVKKMKNYWRQLLNAKLITQRKFDNLTKAERGGLSELDKAGFIKRQLVETRQITKHVAQILDSRMNTKYDENDKLIREVKVITLKSKLVSDFRKDFQFYKVREINNYHHAHDAYLNAVVGTALIKKYPKLESEFVYGDYKVYDVRKMIAKSEQEIGKATAKYFFYSNIMNFFKTEITLANGEIRKRPLIETNGETGEIVWDKGRDFATVRKVLSMPQVNIVKKTEVQTGGFSKESILPKRNSDKLIARKKDWDPKKYGGFDSPTVAYSVLVVAKVEKGKSKKLKSVKELLGITIMERSSFEKNPIDFLEAKGYKEVKKDLIIKLPKYSLFELENGRKRMLASAGELQKGNELALPSKYVNFLYLASHYEKLKGSPEDNEQKQLFVEQHKHYLDEIIEQISEFSKRVILADANLDKVLSAYNKHRDKPIREQAENIIHLFTLTNLGAPAAFKYFDTTIDRKRYTSTKEVLDATLIHQSITGLYETRIDLSQLGGDGGGSSPAPGGMDPLQLLQPLEAEIKGTKLKAHWNSGATITCVPEAFLEDERPIQTMLIKTIHGEKQQDVYYLTFKVQGRKVEAEVLASPYDYILLNPSDVPWLMKKPLQLTVLVPLHEYQERLLQQTALPKEQKELLQKLFLKYDALWQHWENQVGHRRIKPHNIATGTLAPRPQKQYPINPKAKPSIQIVIDDLLKQGVLIQQNSTMNTPVYPVPKPDGKWRMVLDYREVNKTIPLIAAQNQHSAGILSSIYRGKYKTTLDLTNGFWAHPITPESYWLTAFTWQGKQYCWTRLPQGFLNSPALFNADVVDLLKEIPNVQAYVDDIYISHDDPQEHLEQLEKIFSILLNAGYVVSLKKSEIAQREVEFLGFNITKEGRGLTDTFKQKLLNITPPKDLKQLQSILGLLNFARNFIPNYSELVKPLYTIVAPANGKFISWTEDNSNQLQHIISVLNQADNLEERNPETRLIIKVNSSPSAGYIRYYNEGSKRPIMYVNYIFSKAEAKFTQTEKLLTTMHKGLIKAMDLAMGQEILVYSPIVSMTKIQRTPLPERKALPVRWITWMTYLEDPRIQFHYDKSLPELQQIPNVTEDVIAKTKHPSEFAMVFYTDGSAIKHPDVNKSHSAGMGIAQVQFIPEYKIVHQWSIPLGDHTAQLAEIAAVEFACKKALKISGPVLIVTDSFYVAESANKELPYWKSNGFLNNKKKPLRHVSKWKSIAECLQLKPDIIIMHEKGHQQPMTTLHTEGNNLADKLATQGSYVVHAGKRTADGSEFEKRTADGSEFESPKKKAKVE

SEQ ID NO: 478 - protein, 2178 aa, synthetic construct
MPAAKRVKLDGGDKKYSIGLDIGTNSVGWAVITDEYKVPSKKFKVLGNTDRHSIKKNLIGALLFDSGETAEATRLKRTARRRYTRRKNRICYLQEIFSNEMAKVDDSFFHRLEESFLVEEDKKHERHPIFGNIVDEVAYHEKYPTIYHLRKKLVDSTDKADLRLIYLALAHMIKFRGHFLIEGDLNPDNSDVDKLFIQLVQTYNQLFEENPINASGVDAKAILSARLSKSRRLENLIAQLPGEKKNGLFGNLIALSLGLTPNFKSNFDLAEDAKLQLSKDTYDDDLDNLLAQIGDQYADLFLAAKNLSDAILLSDILRVNTEITKAPLSASMIKRYDEHHQDLTLLKALVRQQLPEKYKEIFFDQSKNGYAGYIDGGASQEEFYKFIKPILEKMDGTEELLVKLNREDLLRKQRTFDNGSIPHQIHLGELHAILRRQEDFYPFLKDNREKIEKILTFRIPYYVGPLARGNSRFAWMTRKSEETITPWNFEEVVDKGASAQSFIERMTNFDKNLPNEKVLPKHSLLYEYFTVYNELTKVKYVTEGMRKPAFLSGEQKKAIVDLLFKTNRKVTVKQLKEDYFKKIECFDSVEISGVEDRFNASLGTYHDLLKIIKDKDFLDNEENEDILEDIVLTLTLFEDREMIEERLKTYAHLFDDKVMKQLKRRRYTGWGRLSRKLINGIRDKQSGKTILDFLKSDGFANRNFMQLIHDDSLTFKEDIQKAQVSGQGDSLHEHIANLAGSPAIKKGILQTVKVVDELVKVMGRHKPENIVIEMARENQTTQKGQKNSRERMKRIEEGIKELGSQILKEHPVENTQLQNEKLYLYYLQNGRDMYVDQELDINRLSDYDVDHIVPQSFLKDDSIDNKVLTRSDKARGKSDNVPSEEVVKKMKNYWRQLLNAKLITQRKFDNLTKAERGGLSELDKAGFIKRQLVETRQITKHVAQILDSRMNTKYDENDKLIREVKVITLKSKLVSDFRKDFQFYKVREINNYHHAHDAYLNAVVGTALIKKYPKLESEFVYGDYKVYDVRKMIAKSEQEIGKATAKYFFYSNIMNFFKTEITLANGEIRKRPLIETNGETGEIVWDKGRDFATVRKVLSMPQVNIVKKTEVQTGGFSKESILPKRNSDKLIARKKDWDPKKYGGFDSPTVAYSVLVVAKVEKGKSKKLKSVKELLGITIMERSSFEKNPIDFLEAKGYKEVKKDLIIKLPKYSLFELENGRKRMLASAGELQKGNELALPSKYVNFLYLASHYEKLKGSPEDNEQKQLFVEQHKHYLDEIIEQISEFSKRVILADANLDKVLSAYNKHRDKPIREQAENIIHLFTLTNLGAPAAFKYFDTTIDRKRYTSTKEVLDATLIHQSITGLYETRIDLSQLGGDGGPAPAPAPAPAPAPGGMDPLQLLQPLEAEIKGTKLKAHWNSGATITCVPEAFLEDERPIQTMLIKTIHGEKQQDVYYLTFKVQGRKVEAEVLASPYDYILLNPSDVPWLMKKPLQLTVLVPLHEYQERLLQQTALPKEQKELLQKLFLKYDALWQHWENQVGHRRIKPHNIATGTLAPRPQKQYPINPKAKPSIQIVIDDLLKQGVLIQQNSTMNTPVYPVPKPDGKWRMVLDYREVNKTIPLIAAQNQHSAGILSSIYRGKYKTTLDLTNGFWAHPITPESYWLTAFTWQGKQYCWTRLPQGFLNSPALFNADVVDLLKEIPNVQAYVDDIYISHDDPQEHLEQLEKIFSILLNAGYVVSLKKSEIAQREVEFLGFNITKEGRGLTDTFKQKLLNITPPKDLKQLQSILGLLNFARNFIPNYSELVKPLYTIVAPANGKFISWTEDNSNQLQHIISVLNQADNLEERNPETRLIIKVNSSPSAGYIRYYNEGSKRPIMYVNYIFSKAEAKFTQTEKLLTTMHKGLIKAMDLAMGQEILVYSPIVSMTKIQRTPLPERKALPVRWITWMTYLEDPRIQFHYDKSLPELQQIPNVTEDVIAKTKHPSEFAMVFYTDGSAIKHPDVNKSHSAGMGIAQVQFIPEYKIVHQWSIPLGDHTAQLAEIAAVEFACKKALKISGPVLIVTDSFYVAESANKELPYWKSNGFLNNKKKPLRHVSKWKSIAECLQLKPDIIIMHEKGHQQPMTTLHTEGNNLADKLATQGSYVVHAGKRTADGSEFEKRTADGSEFESPKKKAKVE

SEQ ID NO: 479 - protein, 2170 aa, synthetic construct
MPAAKRVKLDGGDKKYSIGLDIGTNSVGWAVITDEYKVPSKKFKVLGNTDRHSIKKNLIGALLFDSGETAEATRLKRTARRRYTRRKNRICYLQEIFSNEMAKVDDSFFHRLEESFLVEEDKKHERHPIFGNIVDEVAYHEKYPTIYHLRKKLVDSTDKADLRLIYLALAHMIKFRGHFLIEGDLNPDNSDVDKLFIQLVQTYNQLFEENPINASGVDAKAILSARLSKSRRLENLIAQLPGEKKNGLFGNLIALSLGLTPNFKSNFDLAEDAKLQLSKDTYDDDLDNLLAQIGDQYADLFLAAKNLSDAILLSDILRVNTEITKAPLSASMIKRYDEHHQDLTLLKALVRQQLPEKYKEIFFDQSKNGYAGYIDGGASQEEFYKFIKPILEKMDGTEELLVKLNREDLLRKQRTFDNGSIPHQIHLGELHAILRRQEDFYPFLKDNREKIEKILTFRIPYYVGPLARGNSRFAWMTRKSEETITPWNFEEVVDKGASAQSFIERMTNFDKNLPNEKVLPKHSLLYEYFTVYNELTKVKYVTEGMRKPAFLSGEQKKAIVDLLFKTNRKVTVKQLKEDYFKKIECFDSVEISGVEDRFNASLGTYHDLLKIIKDKDFLDNEENEDILEDIVLTLTLFEDREMIEERLKTYAHLFDDKVMKQLKRRRYTGWGRLSRKLINGIRDKQSGKTILDFLKSDGFANRNFMQLIHDDSLTFKEDIQKAQVSGQGDSLHEHIANLAGSPAIKKGILQTVKVVDELVKVMGRHKPENIVIEMARENQTTQKGQKNSRERMKRIEEGIKELGSQILKEHPVENTQLQNEKLYLYYLQNGRDMYVDQELDINRLSDYDVDHIVPQSFLKDDSIDNKVLTRSDKARGKSDNVPSEEVVKKMKNYWRQLLNAKLITQRKFDNLTKAERGGLSELDKAGFIKRQLVETRQITKHVAQILDSRMNTKYDENDKLIREVKVITLKSKLVSDFRKDFQFYKVREINNYHHAHDAYLNAVVGTALIKKYPKLESEFVYGDYKVYDVRKMIAKSEQEIGKATAKYFFYSNIMNFFKTEITLANGEIRKRPLIETNGETGEIVWDKGRDFATVRKVLSMPQVNIVKKTEVQTGGFSKESILPKRNSDKLIARKKDWDPKKYGGFDSPTVAYSVLVVAKVEKGKSKKLKSVKELLGITIMERSSFEKNPIDFLEAKGYKEVKKDLIIKLPKYSLFELENGRKRMLASAGELQKGNELALPSKYVNFLYLASHYEKLKGSPEDNEQKQLFVEQHKHYLDEIIEQISEFSKRVILADANLDKVLSAYNKHRDKPIREQAENIIHLFTLTNLGAPAAFKYFDTTIDRKRYTSTKEVLDATLIHQSITGLYETRIDLSQLGGDGGGGGGGGGMDPLQLLQPLEAEIKGTKLKAHWNSGATITCVPEAFLEDERPIQTMLIKTIHGEKQQDVYYLTFKVQGRKVEAEVLASPYDYILLNPSDVPWLMKKPLQLTVLVPLHEYQERLLQQTALPKEQKELLQKLFLKYDALWQHWENQVGHRRIKPHNIATGTLAPRPQKQYPINPKAKPSIQIVIDDLLKQGVLIQQNSTMNTPVYPVPKPDGKWRMVLDYREVNKTIPLIAAQNQHSAGILSSIYRGKYKTTLDLTNGFWAHPITPESYWLTAFTWQGKQYCWTRLPQGFLNSPALFNADVVDLLKEIPNVQAYVDDIYISHDDPQEHLEQLEKIFSILLNAGYVVSLKKSEIAQREVEFLGFNITKEGRGLTDTFKQKLLNITPPKDLKQLQSILGLLNFARNFIPNYSELVKPLYTIVAPANGKFISWTEDNSNQLQHIISVLNQADNLEERNPETRLIIKVNSSPSAGYIRYYNEGSKRPIMYVNYIFSKAEAKFTQTEKLLTTMHKGLIKAMDLAMGQEILVYSPIVSMTKIQRTPLPERKALPVRWITWMTYLEDPRIQFHYDKSLPELQQIPNVTEDVIAKTKHPSEFAMVFYTDGSAIKHPDVNKSHSAGMGIAQVQFIPEYKIVHQWSIPLGDHTAQLAEIAAVEFACKKALKISGPVLIVTDSFYVAESANKELPYWKSNGFLNNKKKPLRHVSKWKSIAECLQLKPDIIIMHEKGHQQPMTTLHTEGNNLADKLATQGSYVVHAGKRTADGSEFEKRTADGSEFESPKKKAKVE

SEQ ID NO: 480 - protein, 2211 aa, synthetic construct
MPAAKRVKLDGGDKKYSIGLDIGTNSVGWAVITDEYKVPSKKFKVLGNTDRHSIKKNLIGALLFDSGETAEATRLKRTARRRYTRRKNRICYLQEIFSNEMAKVDDSFFHRLEESFLVEEDKKHERHPIFGNIVDEVAYHEKYPTIYHLRKKLVDSTDKADLRLIYLALAHMIKFRGHFLIEGDLNPDNSDVDKLFIQLVQTYNQLFEENPINASGVDAKAILSARLSKSRRLENLIAQLPGEKKNGLFGNLIALSLGLTPNFKSNFDLAEDAKLQLSKDTYDDDLDNLLAQIGDQYADLFLAAKNLSDAILLSDILRVNTEITKAPLSASMIKRYDEHHQDLTLLKALVRQQLPEKYKEIFFDQSKNGYAGYIDGGASQEEFYKFIKPILEKMDGTEELLVKLNREDLLRKQRTFDNGSIPHQIHLGELHAILRRQEDFYPFLKDNREKIEKILTFRIPYYVGPLARGNSRFAWMTRKSEETITPWNFEEVVDKGASAQSFIERMTNFDKNLPNEKVLPKHSLLYEYFTVYNELTKVKYVTEGMRKPAFLSGEQKKAIVDLLFKTNRKVTVKQLKEDYFKKIECFDSVEISGVEDRFNASLGTYHDLLKIIKDKDFLDNEENEDILEDIVLTLTLFEDREMIEERLKTYAHLFDDKVMKQLKRRRYTGWGRLSRKLINGIRDKQSGKTILDFLKSDGFANRNFMQLIHDDSLTFKEDIQKAQVSGQGDSLHEHIANLAGSPAIKKGILQTVKVVDELVKVMGRHKPENIVIEMARENQTTQKGQKNSRERMKRIEEGIKELGSQILKEHPVENTQLQNEKLYLYYLQNGRDMYVDQELDINRLSDYDVDHIVPQSFLKDDSIDNKVLTRSDKARGKSDNVPSEEVVKKMKNYWRQLLNAKLITQRKFDNLTKAERGGLSELDKAGFIKRQLVETRQITKHVAQILDSRMNTKYDENDKLIREVKVITLKSKLVSDFRKDFQFYKVREINNYHHAHDAYLNAVVGTALIKKYPKLESEFVYGDYKVYDVRKMIAKSEQEIGKATAKYFFYSNIMNFFKTEITLANGEIRKRPLIETNGETGEIVWDKGRDFATVRKVLSMPQVNIVKKTEVQTGGFSKESILPKRNSDKLIARKKDWDPKKYGGFDSPTVAYSVLVVAKVEKGKSKKLKSVKELLGITIMERSSFEKNPIDFLEAKGYKEVKKDLIIKLPKYSLFELENGRKRMLASAGELQKGNELALPSKYVNFLYLASHYEKLKGSPEDNEQKQLFVEQHKHYLDEIIEQISEFSKRVILADANLDKVLSAYNKHRDKPIREQAENIIHLFTLTNLGAPAAFKYFDTTIDRKRYTSTKEVLDATLIHQSITGLYETRIDLSQLGGDGGAEAAAKEAAAKEAAAKEAAAKALEAEAAAKEAAAKEAAAKEAAAKAGGMDPLQLLQPLEAEIKGTKLKAHWNSGATITCVPEAFLEDERPIQTMLIKTIHGEKQQDVYYLTFKVQGRKVEAEVLASPYDYILLNPSDVPWLMKKPLQLTVLVPLHEYQERLLQQTALPKEQKELLQKLFLKYDALWQHWENQVGHRRIKPHNIATGTLAPRPQKQYPINPKAKPSIQIVIDDLLKQGVLIQQNSTMNTPVYPVPKPDGKWRMVLDYREVNKTIPLIAAQNQHSAGILSSIYRGKYKTTLDLTNGFWAHPITPESYWLTAFTWQGKQYCWTRLPQGFLNSPALFNADVVDLLKEIPNVQAYVDDIYISHDDPQEHLEQLEKIFSILLNAGYVVSLKKSEIAQREVEFLGFNITKEGRGLTDTFKQKLLNITPPKDLKQLQSILGKLNFARNFIPNYSELVKPLYTIVAPANGKFISWTEDNSNQLQHIISVLNQADNLEERNPETRLIIKVNSSPSAGYIRYYNEGSKRPIMYVNYIFSKAEAKFTQTEKLLTTMHKGLIKAMDLAMGQEILVYSPIVSMTKIQRTPLPERKALPVRWITWMTYLEDPRIQFHYDKSLPELQQIPNVTEDVIAKTKHPSEFAMVFYTDGSAIKHPDVNKSHSAGMGIAQVQFIPEYKIVHQWSIPLGDHTAQLAEIAAVEFACKKALKISGPVLIVTDSFYVAESANKELPYWKSNGFLNNKKKPLRHVSKWKSIAECLQLKPDIIIMHEKGHQQPMTTLHTEGNNLADKLATQGSYVVHAGKRTADGSEFEKRTADGSEFESPKKKAKVE

SEQ ID NO: 481 - protein, 2195 aa, synthetic construct
MPAAKRVKLDGGDKKYSIGLDIGTNSVGWAVITDEYKVPSKKFKVLGNTDRHSIKKNLIGALLFDSGETAEATRLKRTARRRYTRRKNRICYLQEIFSNEMAKVDDSFFHRLEESFLVEEDKKHERHPIFGNIVDEVAYHEKYPTIYHLRKKLVDSTDKADLRLIYLALAHMIKFRGHFLIEGDLNPDNSDVDKLFIQLVQTYNQLFEENPINASGVDAKAILSARLSKSRRLENLIAQLPGEKKNGLFGNLIALSLGLTPNFKSNFDLAEDAKLQLSKDTYDDDLDNLLAQIGDQYADLFLAAKNLSDAILLSDILRVNTEITKAPLSASMIKRYDEHHQDLTLLKALVRQQLPEKYKEIFFDQSKNGYAGYIDGGASQEEFYKFIKPILEKMDGTEELLVKLNREDLLRKQRTFDNGSIPHQIHLGELHAILRRQEDFYPFLKDNREKIEKILTFRIPYYVGPLARGNSRFAWMTRKSEETITPWNFEEVVDKGASAQSFIERMTNFDKNLPNEKVLPKHSLLYEYFTVYNELTKVKYVTEGMRKPAFLSGEQKKAIVDLLFKTNRKVTVKQLKEDYFKKIECFDSVEISGVEDRFNASLGTYHDLLKIIKDKDFLDNEENEDILEDIVLTLTLFEDREMIEERLKTYAHLFDDKVMKQLKRRRYTGWGRLSRKLINGIRDKQSGKTILDFLKSDGFANRNFMQLIHDDSLTFKEDIQKAQVSGQGDSLHEHIANLAGSPAIKKGILQTVKVVDELVKVMGRHKPENIVIEMARENQTTQKGQKNSRERMKRIEEGIKELGSQILKEHPVENTQLQNEKLYLYYLQNGRDMYVDQELDINRLSDYDVDHIVPQSFLKDDSIDNKVLTRSDKARGKSDNVPSEEVVKKMKNYWRQLLNAKLITQRKFDNLTKAERGGLSELDKAGFIKRQLVETRQITKHVAQILDSRMNTKYDENDKLIREVKVITLKSKLVSDFRKDFQFYKVREINNYHHAHDAYLNAVVGTALIKKYPKLESEFVYGDYKVYDVRKMIAKSEQEIGKATAKYFFYSNIMNFFKTEITLANGEIRKRPLIETNGETGEIVWDKGRDFATVRKVLSMPQVNIVKKTEVQTGGFSKESILPKRNSDKLIARKKDWDPKKYGGFDSPTVAYSVLVVAKVEKGKSKKLKSVKELLGITIMERSSFEKNPIDFLEAKGYKEVKKDLIIKLPKYSLFELENGRKRMLASAGELQKGNELALPSKYVNFLYLASHYEKLKGSPEDNEQKQLFVEQHKHYLDEIIEQISEFSKRVILADANLDKVLSAYNKHRDKPIREQAENIIHLFTLTNLGAPAAFKYFDTTIDRKRYTSTKEVLDATLIHQSITGLYETRIDLSQLGGDGGEAAAKEAAAKEAAAKEAAAKEAAAKEAAAKGGMDPLQLLQPLEAEIKGTKLKAHWNSGATITCVPEAFLEDERPIQTMLIKTIHGEKQQDVYYLTFKVQGRKVEAEVLASPYDYILLNPSDVPWLMKKPLQLTVLVPLHEYQERLLQQTALPKEQKELLQKLFLKYDALWQHWENQVGHRRIKPHNIATGTLAPRPQKQYPINPKAKPSIQIVIDDLLKQGVLIQQNSTMNTPVYPVPKPDGKWRMVLDYREVNKTIPLIAAQNQHSAGILSSIYRGKYKTTLDLTNGFWAHPITPESYWLTAFTWQGKQYCWTRLPQGFLNSPALFNADVVDLLKEIPNVQAYVDDIYISHDDPQEHLEQLEKIFSILLNAGYVVSLKKSEIAQREVEFLGFNITKEGRGLTDTFKQKLLNITPPKDLKQLQSILGKLNFARNFIPNYSELVKPLYTIVAPANGKFISWTEDNSNQLQHIISVLNQADNLEERNPETRLIIKVNSSPSAGYIRYYNEGSKRPIMYVNYIFSKAEAKFTQTEKLLTTMHKGLIKAMDLAMGQEILVYSPIVSMTKIQRTPLPERKALPVRWITWMTYLEDPRIQFHYDKSLPELQQIPNVTEDVIAKTKHPSEFAMVFYTDGSAIKHPDVNKSHSAGMGIAQVQFIPEYKIVHQWSIPLGDHTAQLAEIAAVEFACKKALKISGPVLIVTDSFYVAESANKELPYWKSNGFLNNKKKPLRHVSKWKSIAECLQLKPDIIIMHEKGHQQPMTTLHTEGNNLADKLATQGSYVVHAGKRTADGSEFEKRTADGSEFESPKKKAKVE

SEQ ID NO: 482 - protein, 2176 aa, synthetic construct
MPAAKRVKLDGGDKKYSIGLDIGTNSVGWAVITDEYKVPSKKFKVLGNTDRHSIKKNLIGALLFDSGETAEATRLKRTARRRYTRRKNRICYLQEIFSNEMAKVDDSFFHRLEESFLVEEDKKHERHPIFGNIVDEVAYHEKYPTIYHLRKKLVDSTDKADLRLIYLALAHMIKFRGHFLIEGDLNPDNSDVDKLFIQLVQTYNQLFEENPINASGVDAKAILSARLSKSRRLENLIAQLPGEKKNGLFGNLIALSLGLTPNFKSNFDLAEDAKLQLSKDTYDDDLDNLLAQIGDQYADLFLAAKNLSDAILLSDILRVNTEITKAPLSASMIKRYDEHHQDLTLLKALVRQQLPEKYKEIFFDQSKNGYAGYIDGGASQEEFYKFIKPILEKMDGTEELLVKLNREDLLRKQRTFDNGSIPHQIHLGELHAILRRQEDFYPFLKDNREKIEKILTFRIPYYVGPLARGNSRFAWMTRKSEETITPWNFEEVVDKGASAQSFIERMTNFDKNLPNEKVLPKHSLLYEYFTVYNELTKVKYVTEGMRKPAFLSGEQKKAIVDLLFKTNRKVTVKQLKEDYFKKIECFDSVEISGVEDRFNASLGTYHDLLKIIKDKDFLDNEENEDILEDIVLTLTLFEDREMIEERLKTYAHLFDDKVMKQLKRRRYTGWGRLSRKLINGIRDKQSGKTILDFLKSDGFANRNFMQLIHDDSLTFKEDIQKAQVSGQGDSLHEHIANLAGSPAIKKGILQTVKVVDELVKVMGRHKPENIVIEMARENQTTQKGQKNSRERMKRIEEGIKELGSQILKEHPVENTQLQNEKLYLYYLQNGRDMYVDQELDINRLSDYDVDHIVPQSFLKDDSIDNKVLTRSDKARGKSDNVPSEEVVKKMKNYWRQLLNAKLITQRKFDNLTKAERGGLSELDKAGFIKRQLVETRQITKHVAQILDSRMNTKYDENDKLIREVKVITLKSKLVSDFRKDFQFYKVREINNYHHAHDAYLNAVVGTALIKKYPKLESEFVYGDYKVYDVRKMIAKSEQEIGKATAKYFFYSNIMNFFKTEITLANGEIRKRPLIETNGETGEIVWDKGRDFATVRKVLSMPQVNIVKKTEVQTGGFSKESILPKRNSDKLIARKKDWDPKKYGGFDSPTVAYSVLVVAKVEKGKSKKLKSVKELLGITIMERSSFEKNPIDFLEAKGYKEVKKDLIIKLPKYSLFELENGRKRMLASAGELQKGNELALPSKYVNFLYLASHYEKLKGSPEDNEQKQLFVEQHKHYLDEIIEQISEFSKRVILADANLDKVLSAYNKHRDKPIREQAENIIHLFTLTNLGAPAAFKYFDTTIDRKRYTSTKEVLDATLIHQSITGLYETRIDLSQLGGDGGEAAAKGGSPAPGGMDPLQLLQPLEAEIKGTKLKAHWNSGATITCVPEAFLEDERPIQTMLIKTIHGEKQQDVYYLTFKVQGRKVEAEVLASPYDYILLNPSDVPWLMKKPLQLTVLVPLHEYQERLLQQTALPKEQKELLQKLFLKYDALWQHWENQVGHRRIKPHNIATGTLAPRPQKQYPINPKAKPSIQIVIDDLLKQGVLIQQNSTMNTPVYPVPKPDGKWRMVLDYREVNKTIPLIAAQNQHSAGILSSIYRGKYKTTLDLTNGFWAHPITPESYWLTAFTWQGKQYCWTRLPQGFLNSPALFNADVVDLLKEIPNVQAYVDDIYISHDDPQEHLEQLEKIFSILLNAGYVVSLKKSEIAQREVEFLGFNITKEGRGLTDTFKQKLLNITPPKDLKQLQSILGKLNFARNFIPNYSELVKPLYTIVAPANGKFISWTEDNSNQLQHIISVLNQADNLEERNPETRLIIKVNSSPSAGYIRYYNEGSKRPIMYVNYIFSKAEAKFTQTEKLLTTMHKGLIKAMDLAMGQEILVYSPIVSMTKIQRTPLPERKALPVRWITWMTYLEDPRIQFHYDKSLPELQQIPNVTEDVIAKTKHPSEFAMVFYTDGSAIKHPDVNKSHSAGMGIAQVQFIPEYKIVHQWSIPLGDHTAQLAEIAAVEFACKKALKISGPVLIVTDSFYVAESANKELPYWKSNGFLNNKKKPLRHVSKWKSIAECLQLKPDIIIMHEKGHQQPMTTLHTEGNNLADKLATQGSYVVHAGKRTADGSEFEKRTADGSEFESPKKKAKVE

SEQ ID NO: 483 - protein, 2174 aa, synthetic construct
MPAAKRVKLDGGDKKYSIGLDIGTNSVGWAVITDEYKVPSKKFKVLGNTDRHSIKKNLIGALLFDSGETAEATRLKRTARRRYTRRKNRICYLQEIFSNEMAKVDDSFFHRLEESFLVEEDKKHERHPIFGNIVDEVAYHEKYPTIYHLRKKLVDSTDKADLRLIYLALAHMIKFRGHFLIEGDLNPDNSDVDKLFIQLVQTYNQLFEENPINASGVDAKAILSARLSKSRRLENLIAQLPGEKKNGLFGNLIALSLGLTPNFKSNFDLAEDAKLQLSKDTYDDDLDNLLAQIGDQYADLFLAAKNLSDAILLSDILRVNTEITKAPLSASMIKRYDEHHQDLTLLKALVRQQLPEKYKEIFFDQSKNGYAGYIDGGASQEEFYKFIKPILEKMDGTEELLVKLNREDLLRKQRTFDNGSIPHQIHLGELHAILRRQEDFYPFLKDNREKIEKILTFRIPYYVGPLARGNSRFAWMTRKSEETITPWNFEEVVDKGASAQSFIERMTNFDKNLPNEKVLPKHSLLYEYFTVYNELTKVKYVTEGMRKPAFLSGEQKKAIVDLLFKTNRKVTVKQLKEDYFKKIECFDSVEISGVEDRFNASLGTYHDLLKIIKDKDFLDNEENEDILEDIVLTLTLFEDREMIEERLKTYAHLFDDKVMKQLKRRRYTGWGRLSRKLINGIRDKQSGKTILDFLKSDGFANRNFMQLIHDDSLTFKEDIQKAQVSGQGDSLHEHIANLAGSPAIKKGILQTVKVVDELVKVMGRHKPENIVIEMARENQTTQKGQKNSRERMKRIEEGIKELGSQILKEHPVENTQLQNEKLYLYYLQNGRDMYVDQELDINRLSDYDVDHIVPQSFLKDDSIDNKVLTRSDKARGKSDNVPSEEVVKKMKNYWRQLLNAKLITQRKFDNLTKAERGGLSELDKAGFIKRQLVETRQITKHVAQILDSRMNTKYDENDKLIREVKVITLKSKLVSDFRKDFQFYKVREINNYHHAHDAYLNAVVGTALIKKYPKLESEFVYGDYKVYDVRKMIAKSEQEIGKATAKYFFYSNIMNFFKTEITLANGEIRKRPLIETNGETGEIVWDKGRDFATVRKVLSMPQVNIVKKTEVQTGGFSKESILPKRNSDKLIARKKDWDPKKYGGFDSPTVAYSVLVVAKVEKGKSKKLKSVKELLGITIMERSSFEKNPIDFLEAKGYKEVKKDLIIKLPKYSLFELENGRKRMLASAGELQKGNELALPSKYVNFLYLASHYEKLKGSPEDNEQKQLFVEQHKHYLDEIIEQISEFSKRVILADANLDKVLSAYNKHRDKPIREQAENIIHLFTLTNLGAPAAFKYFDTTIDRKRYTSTKEVLDATLIHQSITGLYETRIDLSQLGGDGGGGSGSSPAPGGMDPLQLLQPLEAEIKGTKLKAHWNSGATITCVPEAFLEDERPIQTMLIKTIHGEKQQDVYYLTFKVQGRKVEAEVLASPYDYILLNPSDVPWLMKKPLQLTVLVPLHEYQERLLQQTALPKEQKELLQKLFLKYDALWQHWENQVGHRRIKPHNIATGTLAPRPQKQYPINPKAKPSIQIVIDDLLKQGVLIQQNSTMNTPVYPVPKPDGKWRMVLDYREVNKTIPLIAAQNQHSAGILSSIYRGKYKTTLDLTNGFWAHPITPESYWLTAFTWQGKQYCWTRLPQGFLNSPALFNADVVDLLKEIPNVQAYVDDIYISHDDPQEHLEQLEKIFSILLNAGYVVSLKKSEIAQREVEFLGFNITKEGRGLTDTFKQKLLNITPPKDLKQLQSILGKLNFARNFIPNYSELVKPLYTIVAPANGKFISWTEDNSNQLQHIISVLNQADNLEERNPETRLIIKVNSSPSAGYIRYYNEGSKRPIMYVNYIFSKAEAKFTQTEKLLTTMHKGLIKAMDLAMGQEILVYSPIVSMTKIQRTPLPERKALPVRWITWMTYLEDPRIQFHYDKSLPELQQIPNVTEDVIAKTKHPSEFAMVFYTDGSAIKHPDVNKSHSAGMGIAQVQFIPEYKIVHQWSIPLGDHTAQLAEIAAVEFACKKALKISGPVLIVTDSFYVAESANKELPYWKSNGFLNNKKKPLRHVSKWKSIAECLQLKPDIIIMHEKGHQQPMTTLHTEGNNLADKLATQGSYVVHAGKRTADGSEFEKRTADGSEFESPKKKAKVE

SEQ ID NO: 484 - protein, 2171 aa, synthetic construct
MPAAKRVKLDGGDKKYSIGLDIGTNSVGWAVITDEYKVPSKKFKVLGNTDRHSIKKNLIGALLFDSGETAEATRLKRTARRRYTRRKNRICYLQEIFSNEMAKVDDSFFHRLEESFLVEEDKKHERHPIFGNIVDEVAYHEKYPTIYHLRKKLVDSTDKADLRLIYLALAHMIKFRGHFLIEGDLNPDNSDVDKLFIQLVQTYNQLFEENPINASGVDAKAILSARLSKSRRLENLIAQLPGEKKNGLFGNLIALSLGLTPNFKSNFDLAEDAKLQLSKDTYDDDLDNLLAQIGDQYADLFLAAKNLSDAILLSDILRVNTEITKAPLSASMIKRYDEHHQDLTLLKALVRQQLPEKYKEIFFDQSKNGYAGYIDGGASQEEFYKFIKPILEKMDGTEELLVKLNREDLLRKQRTFDNGSIPHQIHLGELHAILRRQEDFYPFLKDNREKIEKILTFRIPYYVGPLARGNSRFAWMTRKSEETITPWNFEEVVDKGASAQSFIERMTNFDKNLPNEKVLPKHSLLYEYFTVYNELTKVKYVTEGMRKPAFLSGEQKKAIVDLLFKTNRKVTVKQLKEDYFKKIECFDSVEISGVEDRFNASLGTYHDLLKIIKDKDFLDNEENEDILEDIVLTLTLFEDREMIEERLKTYAHLFDDKVMKQLKRRRYTGWGRLSRKLINGIRDKQSGKTILDFLKSDGFANRNFMQLIHDDSLTFKEDIQKAQVSGQGDSLHEHIANLAGSPAIKKGILQTVKVVDELVKVMGRHKPENIVIEMARENQTTQKGQKNSRERMKRIEEGIKELGSQILKEHPVENTQLQNEKLYLYYLQNGRDMYVDQELDINRLSDYDVDHIVPQSFLKDDSIDNKVLTRSDKARGKSDNVPSEEVVKKMKNYWRQLLNAKLITQRKFDNLTKAERGGLSELDKAGFIKRQLVETRQITKHVAQILDSRMNTKYDENDKLIREVKVITLKSKLVSDFRKDFQFYKVREINNYHHAHDAYLNAVVGTALIKKYPKLESEFVYGDYKVYDVRKMIAKSEQEIGKATAKYFFYSNIMNFFKTEITLANGEIRKRPLIETNGETGEIVWDKGRDFATVRKVLSMPQVNIVKKTEVQTGGFSKESILPKRNSDKLIARKKDWDPKKYGGFDSPTVAYSVLVVAKVEKGKSKKLKSVKELLGITIMERSSFEKNPIDFLEAKGYKEVKKDLIIKLPKYSLFELENGRKRMLASAGELQKGNELALPSKYVNFLYLASHYEKLKGSPEDNEQKQLFVEQHKHYLDEIIEQISEFSKRVILADANLDKVLSAYNKHRDKPIREQAENIIHLFTLTNLGAPAAFKYFDTTIDRKRYTSTKEVLDATLIHQSITGLYETRIDLSQLGGDGGGGGGGGGGMDPLQLLQPLEAEIKGTKLKAHWNSGATITCVPEAFLEDERPIQTMLIKTIHGEKQQDVYYLTFKVQGRKVEAEVLASPYDYILLNPSDVPWLMKKPLQLTVLVPLHEYQERLLQQTALPKEQKELLQKLFLKYDALWQHWENQVGHRRIKPHNIATGTLAPRPQKQYPINPKAKPSIQIVIDDLLKQGVLIQQNSTMNTPVYPVPKPDGKWRMVLDYREVNKTIPLIAAQNQHSAGILSSIYRGKYKTTLDLTNGFWAHPITPESYWLTAFTWQGKQYCWTRLPQGFLNSPALFNADVVDLLKEIPNVQAYVDDIYISHDDPQEHLEQLEKIFSILLNAGYVVSLKKSEIAQREVEFLGFNITKEGRGLTDTFKQKLLNITPPKDLKQLQSILGKLNFARNFIPNYSELVKPLYTIVAPANGKFISWTEDNSNQLQHIISVLNQADNLEERNPETRLIIKVNSSPSAGYIRYYNEGSKRPIMYVNYIFSKAEAKFTQTEKLLTTMHKGLIKAMDLAMGQEILVYSPIVSMTKIQRTPLPERKALPVRWITWMTYLEDPRIQFHYDKSLPELQQIPNVTEDVIAKTKHPSEFAMVFYTDGSAIKHPDVNKSHSAGMGIAQVQFIPEYKIVHQWSIPLGDHTAQLAEIAAVEFACKKALKISGPVLIVTDSFYVAESANKELPYWKSNGFLNNKKKPLRHVSKWKSIAECLQLKPDIIIMHEKGHQQPMTTLHTEGNNLADKLATQGSYVVHAGKRTADGSEFEKRTADGSEFESPKKKAKVE

SEQ ID NO: 485 - protein, 2176 aa, synthetic construct
MPAAKRVKLDGGDKKYSIGLDIGTNSVGWAVITDEYKVPSKKFKVLGNTDRHSIKKNLIGALLFDSGETAEATRLKRTARRRYTRRKNRICYLQEIFSNEMAKVDDSFFHRLEESFLVEEDKKHERHPIFGNIVDEVAYHEKYPTIYHLRKKLVDSTDKADLRLIYLALAHMIKFRGHFLIEGDLNPDNSDVDKLFIQLVQTYNQLFEENPINASGVDAKAILSARLSKSRRLENLIAQLPGEKKNGLFGNLIALSLGLTPNFKSNFDLAEDAKLQLSKDTYDDDLDNLLAQIGDQYADLFLAAKNLSDAILLSDILRVNTEITKAPLSASMIKRYDEHHQDLTLLKALVRQQLPEKYKEIFFDQSKNGYAGYIDGGASQEEFYKFIKPILEKMDGTEELLVKLNREDLLRKQRTFDNGSIPHQIHLGELHAILRRQEDFYPFLKDNREKIEKILTFRIPYYVGPLARGNSRFAWMTRKSEETITPWNFEEVVDKGASAQSFIERMTNFDKNLPNEKVLPKHSLLYEYFTVYNELTKVKYVTEGMRKPAFLSGEQKKAIVDLLFKTNRKVTVKQLKEDYFKKIECFDSVEISGVEDRFNASLGTYHDLLKIIKDKDFLDNEENEDILEDIVLTLTLFEDREMIEERLKTYAHLFDDKVMKQLKRRRYTGWGRLSRKLINGIRDKQSGKTILDFLKSDGFANRNFMQLIHDDSLTFKEDIQKAQVSGQGDSLHEHIANLAGSPAIKKGILQTVKVVDELVKVMGRHKPENIVIEMARENQTTQKGQKNSRERMKRIEEGIKELGSQILKEHPVENTQLQNEKLYLYYLQNGRDMYVDQELDINRLSDYDVDHIVPQSFLKDDSIDNKVLTRSDKARGKSDNVPSEEVVKKMKNYWRQLLNAKLITQRKFDNLTKAERGGLSELDKAGFIKRQLVETRQITKHVAQILDSRMNTKYDENDKLIREVKVITLKSKLVSDFRKDFQFYKVREINNYHHAHDAYLNAVVGTALIKKYPKLESEFVYGDYKVYDVRKMIAKSEQEIGKATAKYFFYSNIMNFFKTEITLANGEIRKRPLIETNGETGEIVWDKGRDFATVRKVLSMPQVNIVKKTEVQTGGFSKESILPKRNSDKLIARKKDWDPKKYGGFDSPTVAYSVLVVAKVEKGKSKKLKSVKELLGITIMERSSFEKNPIDFLEAKGYKEVKKDLIIKLPKYSLFELENGRKRMLASAGELQKGNELALPSKYVNFLYLASHYEKLKGSPEDNEQKQLFVEQHKHYLDEIIEQISEFSKRVILADANLDKVLSAYNKHRDKPIREQAENIIHLFTLTNLGAPAAFKYFDTTIDRKRYTSTKEVLDATLIHQSITGLYETRIDLSQLGGDGGGSSGGGEAAAKGGMDPLQLLQPLEAEIKGTKLKAHWNSGATITCVPEAFLEDERPIQTMLIKTIHGEKQQDVYYLTFKVQGRKVEAEVLASPYDYILLNPSDVPWLMKKPLQLTVLVPLHEYQERLLQQTALPKEQKELLQKLFLKYDALWQHWENQVGHRRIKPHNIATGTLAPRPQKQYPINPKAKPSIQIVIDDLLKQGVLIQQNSTMNTPVYPVPKPDGKWRMVLDYREVNKTIPLIAAQNQHSAGILSSIYRGKYKTTLDLTNGFWAHPITPESYWLTAFTWQGKQYCWTRLPQGFLNSPALFNADVVDLLKEIPNVQAYVDDIYISHDDPQEHLEQLEKIFSILLNAGYVVSLKKSEIAQREVEFLGFNITKEGRGLTDTFKQKLLNITPPKDLKQLQSILGKLNFARNFIPNYSELVKPLYTIVAPANGKFISWTEDNSNQLQHIISVLNQADNLEERNPETRLIIKVNSSPSAGYIRYYNEGSKRPIMYVNYIFSKAEAKFTQTEKLLTTMHKGLIKAMDLAMGQEILVYSPIVSMTKIQRTPLPERKALPVRWITWMTYLEDPRIQFHYDKSLPELQQIPNVTEDVIAKTKHPSEFAMVFYTDGSAIKHPDVNKSHSAGMGIAQVQFIPEYKIVHQWSIPLGDHTAQLAEIAAVEFACKKALKISGPVLIVTDSFYVAESANKELPYWKSNGFLNNKKKPLRHVSKWKSIAECLQLKPDIIIMHEKGHQQPMTTLHTEGNNLADKLATQGSYVVHAGKRTADGSEFEKRTADGSEFESPKKKAKVE

SEQ ID NO: 486 - protein, 2176 aa, synthetic construct
MPAAKRVKLDGGDKKYSIGLDIGTNSVGWAVITDEYKVPSKKFKVLGNTDRHSIKKNLIGALLFDSGETAEATRLKRTARRRYTRRKNRICYLQEIFSNEMAKVDDSFFHRLEESFLVEEDKKHERHPIFGNIVDEVAYHEKYPTIYHLRKKLVDSTDKADLRLIYLALAHMIKFRGHFLIEGDLNPDNSDVDKLFIQLVQTYNQLFEENPINASGVDAKAILSARLSKSRRLENLIAQLPGEKKNGLFGNLIALSLGLTPNFKSNFDLAEDAKLQLSKDTYDDDLDNLLAQIGDQYADLFLAAKNLSDAILLSDILRVNTEITKAPLSASMIKRYDEHHQDLTLLKALVRQQLPEKYKEIFFDQSKNGYAGYIDGGASQEEFYKFIKPILEKMDGTEELLVKLNREDLLRKQRTFDNGSIPHQIHLGELHAILRRQEDFYPFLKDNREKIEKILTFRIPYYVGPLARGNSRFAWMTRKSEETITPWNFEEVVDKGASAQSFIERMTNFDKNLPNEKVLPKHSLLYEYFTVYNELTKVKYVTEGMRKPAFLSGEQKKAIVDLLFKTNRKVTVKQLKEDYFKKIECFDSVEISGVEDRFNASLGTYHDLLKIIKDKDFLDNEENEDILEDIVLTLTLFEDREMIEERLKTYAHLFDDKVMKQLKRRRYTGWGRLSRKLINGIRDKQSGKTILDFLKSDGFANRNFMQLIHDDSLTFKEDIQKAQVSGQGDSLHEHIANLAGSPAIKKGILQTVKVVDELVKVMGRHKPENIVIEMARENQTTQKGQKNSRERMKRIEEGIKELGSQILKEHPVENTQLQNEKLYLYYLQNGRDMYVDQELDINRLSDYDVDHIVPQSFLKDDSIDNKVLTRSDKARGKSDNVPSEEVVKKMKNYWRQLLNAKLITQRKFDNLTKAERGGLSELDKAGFIKRQLVETRQITKHVAQILDSRMNTKYDENDKLIREVKVITLKSKLVSDFRKDFQFYKVREINNYHHAHDAYLNAVVGTALIKKYPKLESEFVYGDYKVYDVRKMIAKSEQEIGKATAKYFFYSNIMNFFKTEITLANGEIRKRPLIETNGETGEIVWDKGRDFATVRKVLSMPQVNIVKKTEVQTGGFSKESILPKRNSDKLIARKKDWDPKKYGGFDSPTVAYSVLVVAKVEKGKSKKLKSVKELLGITIMERSSFEKNPIDFLEAKGYKEVKKDLIIKLPKYSLFELENGRKRMLASAGELQKGNELALPSKYVNFLYLASHYEKLKGSPEDNEQKQLFVEQHKHYLDEIIEQISEFSKRVILADANLDKVLSAYNKHRDKPIREQAENIIHLFTLTNLGAPAAFKYFDTTIDRKRYTSTKEVLDATLIHQSITGLYETRIDLSQLGGDGGPAPAPAPAPAPGGMDPLQLLQPLEAEIKGTKLKAHWNSGATITCVPEAFLEDERPIQTMLIKTIHGEKQQDVYYLTFKVQGRKVEAEVLASPYDYILLNPSDVPWLMKKPLQLTVLVPLHEYQERLLQQTALPKEQKELLQKLFLKYDALWQHWENQVGHRRIKPHNIATGTLAPRPQKQYPINPKAKPSIQIVIDDLLKQGVLIQQNSTMNTPVYPVPKPDGKWRMVLDYREVNKTIPLIAAQNQHSAGILSSIYRGKYKTTLDLTNGFWAHPITPESYWLTAFTWQGKQYCWTRLPQGFLNSPALFNADVVDLLKEIPNVQAYVDDIYISHDDPQEHLEQLEKIFSILLNAGYVVSLKKSEIAQREVEFLGFNITKEGRGLTDTFKQKLLNITPPKDLKQLQSILGKLNFARNFIPNYSELVKPLYTIVAPANGKFISWTEDNSNQLQHIISVLNQADNLEERNPETRLIIKVNSSPSAGYIRYYNEGSKRPIMYVNYIFSKAEAKFTQTEKLLTTMHKGLIKAMDLAMGQEILVYSPIVSMTKIQRTPLPERKALPVRWITWMTYLEDPRIQFHYDKSLPELQQIPNVTEDVIAKTKHPSEFAMVFYTDGSAIKHPDVNKSHSAGMGIAQVQFIPEYKIVHQWSIPLGDHTAQLAEIAAVEFACKKALKISGPVLIVTDSFYVAESANKELPYWKSNGFLNNKKKPLRHVSKWKSIAECLQLKPDIIIMHEKGHQQPMTTLHTEGNNLADKLATQGSYVVHAGKRTADGSEFEKRTADGSEFESPKKKAKVE

SEQ ID NO: 487 - protein, 2177 aa, synthetic construct
MPAAKRVKLDGGDKKYSIGLDIGTNSVGWAVITDEYKVPSKKFKVLGNTDRHSIKKNLIGALLFDSGETAEATRLKRTARRRYTRRKNRICYLQEIFSNEMAKVDDSFFHRLEESFLVEEDKKHERHPIFGNIVDEVAYHEKYPTIYHLRKKLVDSTDKADLRLIYLALAHMIKFRGHFLIEGDLNPDNSDVDKLFIQLVQTYNQLFEENPINASGVDAKAILSARLSKSRRLENLIAQLPGEKKNGLFGNLIALSLGLTPNFKSNFDLAEDAKLQLSKDTYDDDLDNLLAQIGDQYADLFLAAKNLSDAILLSDILRVNTEITKAPLSASMIKRYDEHHQDLTLLKALVRQQLPEKYKEIFFDQSKNGYAGYIDGGASQEEFYKFIKPILEKMDGTEELLVKLNREDLLRKQRTFDNGSIPHQIHLGELHAILRRQEDFYPFLKDNREKIEKILTFRIPYYVGPLARGNSRFAWMTRKSEETITPWNFEEVVDKGASAQSFIERMTNFDKNLPNEKVLPKHSLLYEYFTVYNELTKVKYVTEGMRKPAFLSGEQKKAIVDLLFKTNRKVTVKQLKEDYFKKIECFDSVEISGVEDRFNASLGTYHDLLKIIKDKDFLDNEENEDILEDIVLTLTLFEDREMIEERLKTYAHLFDDKVMKQLKRRRYTGWGRLSRKLINGIRDKQSGKTILDFLKSDGFANRNFMQLIHDDSLTFKEDIQKAQVSGQGDSLHEHIANLAGSPAIKKGILQTVKVVDELVKVMGRHKPENIVIEMARENQTTQKGQKNSRERMKRIEEGIKELGSQILKEHPVENTQLQNEKLYLYYLQNGRDMYVDQELDINRLSDYDVDHIVPQSFLKDDSIDNKVLTRSDKARGKSDNVPSEEVVKKMKNYWRQLLNAKLITQRKFDNLTKAERGGLSELDKAGFIKRQLVETRQITKHVAQILDSRMNTKYDENDKLIREVKVITLKSKLVSDFRKDFQFYKVREINNYHHAHDAYLNAVVGTALIKKYPKLESEFVYGDYKVYDVRKMIAKSEQEIGKATAKYFFYSNIMNFFKTEITLANGEIRKRPLIETNGETGEIVWDKGRDFATVRKVLSMPQVNIVKKTEVQTGGFSKESILPKRNSDKLIARKKDWDPKKYGGFDSPTVAYSVLVVAKVEKGKSKKLKSVKELLGITIMERSSFEKNPIDFLEAKGYKEVKKDLIIKLPKYSLFELENGRKRMLASAGELQKGNELALPSKYVNFLYLASHYEKLKGSPEDNEQKQLFVEQHKHYLDEIIEQISEFSKRVILADANLDKVLSAYNKHRDKPIREQAENIIHLFTLTNLGAPAAFKYFDTTIDRKRYTSTKEVLDATLIHQSITGLYETRIDLSQLGGDGGGGSGGSGGSGGSGGMDPLQLLQPLEAEIKGTKLKAHWNSGATITCVPEAFLEDERPIQTMLIKTIHGEKQQDVYYLTFKVQGRKVEAEVLASPYDYILLNPSDVPWLMKKPLQLTVLVPLHEYQERLLQQTALPKEQKELLQKLFLKYDALWQHWENQVGHRRIKPHNIATGTLAPRPQKQYPINPKAKPSIQIVIDDLLKQGVLIQQNSTMNTPVYPVPKPDGKWRMVLDYREVNKTIPLIAAQNQHSAGILSSIYRGKYKTTLDLTNGFWAHPITPESYWLTAFTWQGKQYCWTRLPQGFLNSPALFNADVVDLLKEIPNVQAYVDDIYISHDDPQEHLEQLEKIFSILLNAGYVVSLKKSEIAQREVEFLGFNITKEGRGLTDTFKQKLLNITPPKDLKQLQSILGKLNFARNFIPNYSELVKPLYTIVAPANGKFISWTEDNSNQLQHIISVLNQADNLEERNPETRLIIKVNSSPSAGYIRYYNEGSKRPIMYVNYIFSKAEAKFTQTEKLLTTMHKGLIKAMDLAMGQEILVYSPIVSMTKIQRTPLPERKALPVRWITWMTYLEDPRIQFHYDKSLPELQQIPNVTEDVIAKTKHPSEFAMVFYTDGSAIKHPDVNKSHSAGMGIAQVQFIPEYKIVHQWSIPLGDHTAQLAEIAAVEFACKKALKISGPVLIVTDSFYVAESANKELPYWKSNGFLNNKKKPLRHVSKWKSIAECLQLKPDIIIMHEKGHQQPMTTLHTEGNNLADKLATQGSYVVHAGKRTADGSEFEKRTADGSEFESPKKKAKVE

SEQ ID NO: 488 - protein, 2171 aa, synthetic construct
MPAAKRVKLDGGDKKYSIGLDIGTNSVGWAVITDEYKVPSKKFKVLGNTDRHSIKKNLIGALLFDSGETAEATRLKRTARRRYTRRKNRICYLQEIFSNEMAKVDDSFFHRLEESFLVEEDKKHERHPIFGNIVDEVAYHEKYPTIYHLRKKLVDSTDKADLRLIYLALAHMIKFRGHFLIEGDLNPDNSDVDKLFIQLVQTYNQLFEENPINASGVDAKAILSARLSKSRRLENLIAQLPGEKKNGLFGNLIALSLGLTPNFKSNFDLAEDAKLQLSKDTYDDDLDNLLAQIGDQYADLFLAAKNLSDAILLSDILRVNTEITKAPLSASMIKRYDEHHQDLTLLKALVRQQLPEKYKEIFFDQSKNGYAGYIDGGASQEEFYKFIKPILEKMDGTEELLVKLNREDLLRKQRTFDNGSIPHQIHLGELHAILRRQEDFYPFLKDNREKIEKILTFRIPYYVGPLARGNSRFAWMTRKSEETITPWNFEEVVDKGASAQSFIERMTNFDKNLPNEKVLPKHSLLYEYFTVYNELTKVKYVTEGMRKPAFLSGEQKKAIVDLLFKTNRKVTVKQLKEDYFKKIECFDSVEISGVEDRFNASLGTYHDLLKIIKDKDFLDNEENEDILEDIVLTLTLFEDREMIEERLKTYAHLFDDKVMKQLKRRRYTGWGRLSRKLINGIRDKQSGKTILDFLKSDGFANRNFMQLIHDDSLTFKEDIQKAQVSGQGDSLHEHIANLAGSPAIKKGILQTVKVVDELVKVMGRHKPENIVIEMARENQTTQKGQKNSRERMKRIEEGIKELGSQILKEHPVENTQLQNEKLYLYYLQNGRDMYVDQELDINRLSDYDVDHIVPQSFLKDDSIDNKVLTRSDKARGKSDNVPSEEVVKKMKNYWRQLLNAKLITQRKFDNLTKAERGGLSELDKAGFIKRQLVETRQITKHVAQILDSRMNTKYDENDKLIREVKVITLKSKLVSDFRKDFQFYKVREINNYHHAHDAYLNAVVGTALIKKYPKLESEFVYGDYKVYDVRKMIAKSEQEIGKATAKYFFYSNIMNFFKTEITLANGEIRKRPLIETNGETGEIVWDKGRDFATVRKVLSMPQVNIVKKTEVQTGGFSKESILPKRNSDKLIARKKDWDPKKYGGFDSPTVAYSVLVVAKVEKGKSKKLKSVKELLGITIMERSSFEKNPIDFLEAKGYKEVKKDLIIKLPKYSLFELENGRKRMLASAGELQKGNELALPSKYVNFLYLASHYEKLKGSPEDNEQKQLFVEQHKHYLDEIIEQISEFSKRVILADANLDKVLSAYNKHRDKPIREQAENIIHLFTLTNLGAPAAFKYFDTTIDRKRYTSTKEVLDATLIHQSITGLYETRIDLSQLGGDGGGGGGGSGGMDPLQLLQPLEAEIKGTKLKAHWNSGATITCVPEAFLEDERPIQTMLIKTIHGEKQQDVYYLTFKVQGRKVEAEVLASPYDYILLNPSDVPWLMKKPLQLTVLVPLHEYQERLLQQTALPKEQKELLQKLFLKYDALWQHWENQVGHRRIKPHNIATGTLAPRPQKQYPINPKAKPSIQIVIDDLLKQGVLIQQNSTMNTPVYPVPKPDGKWRMVLDYREVNKTIPLIAAQNQHSAGILSSIYRGKYKTTLDLTNGFWAHPITPESYWLTAFTWQGKQYCWTRLPQGFLNSPALFNADVVDLLKEIPNVQAYVDDIYISHDDPQEHLEQLEKIFSILLNAGYVVSLKKSEIAQREVEFLGFNITKEGRGLTDTFKQKLLNITPPKDLKQLQSILGKLNFARNFIPNYSELVKPLYTIVAPANGKFISWTEDNSNQLQHIISVLNQADNLEERNPETRLIIKVNSSPSAGYIRYYNEGSKRPIMYVNYIFSKAEAKFTQTEKLLTTMHKGLIKAMDLAMGQEILVYSPIVSMTKIQRTPLPERKALPVRWITWMTYLEDPRIQFHYDKSLPELQQIPNVTEDVIAKTKHPSEFAMVFYTDGSAIKHPDVNKSHSAGMGIAQVQFIPEYKIVHQWSIPLGDHTAQLAEIAAVEFACKKALKISGPVLIVTDSFYVAESANKELPYWKSNGFLNNKKKPLRHVSKWKSIAECLQLKPDIIIMHEKGHQQPMTTLHTEGNNLADKLATQGSYVVHAGKRTADGSEFEKRTADGSEFESPKKKAKVE

SEQ ID NO: 489 - protein, 2211 aa, synthetic construct
MPAAKRVKLDGGDKKYSIGLDIGTNSVGWAVITDEYKVPSKKFKVLGNTDRHSIKKNLIGALLFDSGETAEATRLKRTARRRYTRRKNRICYLQEIFSNEMAKVDDSFFHRLEESFLVEEDKKHERHPIFGNIVDEVAYHEKYPTIYHLRKKLVDSTDKADLRLIYLALAHMIKFRGHFLIEGDLNPDNSDVDKLFIQLVQTYNQLFEENPINASGVDAKAILSARLSKSRRLENLIAQLPGEKKNGLFGNLIALSLGLTPNFKSNFDLAEDAKLQLSKDTYDDDLDNLLAQIGDQYADLFLAAKNLSDAILLSDILRVNTEITKAPLSASMIKRYDEHHQDLTLLKALVRQQLPEKYKEIFFDQSKNGYAGYIDGGASQEEFYKFIKPILEKMDGTEELLVKLNREDLLRKQRTFDNGSIPHQIHLGELHAILRRQEDFYPFLKDNREKIEKILTFRIPYYVGPLARGNSRFAWMTRKSEETITPWNFEEVVDKGASAQSFIERMTNFDKNLPNEKVLPKHSLLYEYFTVYNELTKVKYVTEGMRKPAFLSGEQKKAIVDLLFKTNRKVTVKQLKEDYFKKIECFDSVEISGVEDRFNASLGTYHDLLKIIKDKDFLDNEENEDILEDIVLTLTLFEDREMIEERLKTYAHLFDDKVMKQLKRRRYTGWGRLSRKLINGIRDKQSGKTILDFLKSDGFANRNFMQLIHDDSLTFKEDIQKAQVSGQGDSLHEHIANLAGSPAIKKGILQTVKVVDELVKVMGRHKPENIVIEMARENQTTQKGQKNSRERMKRIEEGIKELGSQILKEHPVENTQLQNEKLYLYYLQNGRDMYVDQELDINRLSDYDVDHIVPQSFLKDDSIDNKVLTRSDKARGKSDNVPSEEVVKKMKNYWRQLLNAKLITQRKFDNLTKAERGGLSELDKAGFIKRQLVETRQITKHVAQILDSRMNTKYDENDKLIREVKVITLKSKLVSDFRKDFQFYKVREINNYHHAHDAYLNAVVGTALIKKYPKLESEFVYGDYKVYDVRKMIAKSEQEIGKATAKYFFYSNIMNFFKTEITLANGEIRKRPLIETNGETGEIVWDKGRDFATVRKVLSMPQVNIVKKTEVQTGGFSKESILPKRNSDKLIARKKDWDPKKYGGFDSPTVAYSVLVVAKVEKGKSKKLKSVKELLGITIMERSSFEKNPIDFLEAKGYKEVKKDLIIKLPKYSLFELENGRKRMLASAGELQKGNELALPSKYVNFLYLASHYEKLKGSPEDNEQKQLFVEQHKHYLDEIIEQISEFSKRVILADANLDKVLSAYNKHRDKPIREQAENIIHLFTLTNLGAPAAFKYFDTTIDRKRYTSTKEVLDATLIHQSITGLYETRIDLSQLGGDGGAEAAAKEAAAKEAAAKEAAAKALEAEAAAKEAAAKEAAAKEAAAKAGGMDPLQLLQPLEAEIKGTKLKAHWNSGATITCVPQAFLEEEVPIKNIWIKTIHGEKEQPVYYLTFKIQGRKVEAEVISSPYDYILVSPSDIPWLMKKPLQLTTLVPLQEYEERLLKQTMLTGSYKEKLQSLFLKYDALWQHWENQVGHRRIKPHHIATGTVNPRPQKQYPINPKAKASIQTVINDLLKQGVLIQQNSIMNTPVYPVPKPDGKWRMVLDYREVNKTIPLIAAQNQHSAGILSSIFRGKYKTTLDLSNGFWAHSITPESYWLTAFTWLGQQYCWTRLPQGFLNSPALFTADVVDLLKEVPNVQVYVDDIYISHDDPREHLEQLEKVFSLLLNAGYVVSLKKSEIAQHEVEFLGFNITKEGRGLTETFKQKLLNITPPRDLKQLQSILGLLNFARNFIPNFSELVKPLYNIIATANGKYITWTTDNSQQLQNIISMLNSAENLEERNPEVRLIMKVNTSPSAGYIRFYNEFAKRPIMYLNYVYTKAEVKFTNTEKLLTTIHKGLIKALDLGMGQEILVYSPIVSMTKIQKTPLPERKALPIRWITWMSYLEDPRIQFHYDKTLPELQQVPTVTDDIIAKIKHPSEFSMVFYTDGSAIKHPNVNKSHNAGMGIAQVQFKPEFTVINTWSIPLGDHTAQLAEVAAVEFACKKALKIDGPVLIVTDSFYVAESVNKELPYWQSNGFFNNKKKPLKHVSKWKSIADCIQLKPDIIIIHEKGHQPTASTFHTEGNNLADKLATQGSYVVNAGKRTADGSEFEKRTADGSEFESPKKKAKVE

SEQ ID NO: 490 - protein, 2190 aa, synthetic construct
MPAAKRVKLDGGDKKYSIGLDIGTNSVGWAVITDEYKVPSKKFKVLGNTDRHSIKKNLIGALLFDSGETAEATRLKRTARRRYTRRKNRICYLQEIFSNEMAKVDDSFFHRLEESFLVEEDKKHERHPIFGNIVDEVAYHEKYPTIYHLRKKLVDSTDKADLRLIYLALAHMIKFRGHFLIEGDLNPDNSDVDKLFIQLVQTYNQLFEENPINASGVDAKAILSARLSKSRRLENLIAQLPGEKKNGLFGNLIALSLGLTPNFKSNFDLAEDAKLQLSKDTYDDDLDNLLAQIGDQYADLFLAAKNLSDAILLSDILRVNTEITKAPLSASMIKRYDEHHQDLTLLKALVRQQLPEKYKEIFFDQSKNGYAGYIDGGASQEEFYKFIKPILEKMDGTEELLVKLNREDLLRKQRTFDNGSIPHQIHLGELHAILRRQEDFYPFLKDNREKIEKILTFRIPYYVGPLARGNSRFAWMTRKSEETITPWNFEEVVDKGASAQSFIERMTNFDKNLPNEKVLPKHSLLYEYFTVYNELTKVKYVTEGMRKPAFLSGEQKKAIVDLLFKTNRKVTVKQLKEDYFKKIECFDSVEISGVEDRFNASLGTYHDLLKIIKDKDFLDNEENEDILEDIVLTLTLFEDREMIEERLKTYAHLFDDKVMKQLKRRRYTGWGRLSRKLINGIRDKQSGKTILDFLKSDGFANRNFMQLIHDDSLTFKEDIQKAQVSGQGDSLHEHIANLAGSPAIKKGILQTVKVVDELVKVMGRHKPENIVIEMARENQTTQKGQKNSRERMKRIEEGIKELGSQILKEHPVENTQLQNEKLYLYYLQNGRDMYVDQELDINRLSDYDVDHIVPQSFLKDDSIDNKVLTRSDKARGKSDNVPSEEVVKKMKNYWRQLLNAKLITQRKFDNLTKAERGGLSELDKAGFIKRQLVETRQITKHVAQILDSRMNTKYDENDKLIREVKVITLKSKLVSDFRKDFQFYKVREINNYHHAHDAYLNAVVGTALIKKYPKLESEFVYGDYKVYDVRKMIAKSEQEIGKATAKYFFYSNIMNFFKTEITLANGEIRKRPLIETNGETGEIVWDKGRDFATVRKVLSMPQVNIVKKTEVQTGGFSKESILPKRNSDKLIARKKDWDPKKYGGFDSPTVAYSVLVVAKVEKGKSKKLKSVKELLGITIMERSSFEKNPIDFLEAKGYKEVKKDLIIKLPKYSLFELENGRKRMLASAGELQKGNELALPSKYVNFLYLASHYEKLKGSPEDNEQKQLFVEQHKHYLDEIIEQISEFSKRVILADANLDKVLSAYNKHRDKPIREQAENIIHLFTLTNLGAPAAFKYFDTTIDRKRYTSTKEVLDATLIHQSITGLYETRIDLSQLGGDGGEAAAKEAAAKEAAAKEAAAKEAAAKGGMDPLQLLQPLEAEIKGTKLKAHWNSGATITCVPQAFLEEEVPIKNIWIKTIHGEKEQPVYYLTFKIQGRKVEAEVISSPYDYILVSPSDIPWLMKKPLQLTTLVPLQEYEERLLKQTMLTGSYKEKLQSLFLKYDALWQHWENQVGHRRIKPHHIATGTVNPRPQKQYPINPKAKASIQTVINDLLKQGVLIQQNSIMNTPVYPVPKPDGKWRMVLDYREVNKTIPLIAAQNQHSAGILSSIFRGKYKTTLDLSNGFWAHSITPESYWLTAFTWLGQQYCWTRLPQGFLNSPALFTADVVDLLKEVPNVQVYVDDIYISHDDPREHLEQLEKVFSLLLNAGYVVSLKKSEIAQHEVEFLGFNITKEGRGLTETFKQKLLNITPPRDLKQLQSILGLLNFARNFIPNFSELVKPLYNIIATANGKYITWTTDNSQQLQNIISMLNSAENLEERNPEVRLIMKVNTSPSAGYIRFYNEFAKRPIMYLNYVYTKAEVKFTNTEKLLTTIHKGLIKALDLGMGQEILVYSPIVSMTKIQKTPLPERKALPIRWITWMSYLEDPRIQFHYDKTLPELQQVPTVTDDIIAKIKHPSEFSMVFYTDGSAIKHPNVNKSHNAGMGIAQVQFKPEFTVINTWSIPLGDHTAQLAEVAAVEFACKKALKIDGPVLIVTDSFYVAESVNKELPYWQSNGFFNNKKKPLKHVSKWKSIADCIQLKPDIIIIHEKGHQPTASTFHTEGNNLADKLATQGSYVVNAGKRTADGSEFEKRTADGSEFESPKKKAKVE

SEQ ID NO: 491 - protein, 2176 aa, synthetic construct
MPAAKRVKLDGGDKKYSIGLDIGTNSVGWAVITDEYKVPSKKFKVLGNTDRHSIKKNLIGALLFDSGETAEATRLKRTARRRYTRRKNRICYLQEIFSNEMAKVDDSFFHRLEESFLVEEDKKHERHPIFGNIVDEVAYHEKYPTIYHLRKKLVDSTDKADLRLIYLALAHMIKFRGHFLIEGDLNPDNSDVDKLFIQLVQTYNQLFEENPINASGVDAKAILSARLSKSRRLENLIAQLPGEKKNGLFGNLIALSLGLTPNFKSNFDLAEDAKLQLSKDTYDDDLDNLLAQIGDQYADLFLAAKNLSDAILLSDILRVNTEITKAPLSASMIKRYDEHHQDLTLLKALVRQQLPEKYKEIFFDQSKNGYAGYIDGGASQEEFYKFIKPILEKMDGTEELLVKLNREDLLRKQRTFDNGSIPHQIHLGELHAILRRQEDFYPFLKDNREKIEKILTFRIPYYVGPLARGNSRFAWMTRKSEETITPWNFEEVVDKGASAQSFIERMTNFDKNLPNEKVLPKHSLLYEYFTVYNELTKVKYVTEGMRKPAFLSGEQKKAIVDLLFKTNRKVTVKQLKEDYFKKIECFDSVEISGVEDRFNASLGTYHDLLKIIKDKDFLDNEENEDILEDIVLTLTLFEDREMIEERLKTYAHLFDDKVMKQLKRRRYTGWGRLSRKLINGIRDKQSGKTILDFLKSDGFANRNFMQLIHDDSLTFKEDIQKAQVSGQGDSLHEHIANLAGSPAIKKGILQTVKVVDELVKVMGRHKPENIVIEMARENQTTQKGQKNSRERMKRIEEGIKELGSQILKEHPVENTQLQNEKLYLYYLQNGRDMYVDQELDINRLSDYDVDHIVPQSFLKDDSIDNKVLTRSDKARGKSDNVPSEEVVKKMKNYWRQLLNAKLITQRKFDNLTKAERGGLSELDKAGFIKRQLVETRQITKHVAQILDSRMNTKYDENDKLIREVKVITLKSKLVSDFRKDFQFYKVREINNYHHAHDAYLNAVVGTALIKKYPKLESEFVYGDYKVYDVRKMIAKSEQEIGKATAKYFFYSNIMNFFKTEITLANGEIRKRPLIETNGETGEIVWDKGRDFATVRKVLSMPQVNIVKKTEVQTGGFSKESILPKRNSDKLIARKKDWDPKKYGGFDSPTVAYSVLVVAKVEKGKSKKLKSVKELLGITIMERSSFEKNPIDFLEAKGYKEVKKDLIIKLPKYSLFELENGRKRMLASAGELQKGNELALPSKYVNFLYLASHYEKLKGSPEDNEQKQLFVEQHKHYLDEIIEQISEFSKRVILADANLDKVLSAYNKHRDKPIREQAENIIHLFTLTNLGAPAAFKYFDTTIDRKRYTSTKEVLDATLIHQSITGLYETRIDLSQLGGDGGEAAAKGGGPAPGGMDPLQLLQPLEAEIKGTKLKAHWNSGATITCVPQAFLEEEVPIKNIWIKTIHGEKEQPVYYLTFKIQGRKVEAEVISSPYDYILVSPSDIPWLMKKPLQLTTLVPLQEYEERLLKQTMLTGSYKEKLQSLFLKYDALWQHWENQVGHRRIKPHHIATGTVNPRPQKQYPINPKAKASIQTVINDLLKQGVLIQQNSIMNTPVYPVPKPDGKWRMVLDYREVNKTIPLIAAQNQHSAGILSSIFRGKYKTTLDLSNGFWAHSITPESYWLTAFTWLGQQYCWTRLPQGFLNSPALFTADVVDLLKEVPNVQVYVDDIYISHDDPREHLEQLEKVFSLLLNAGYVVSLKKSEIAQHEVEFLGFNITKEGRGLTETFKQKLLNITPPRDLKQLQSILGLLNFARNFIPNFSELVKPLYNIIATANGKYITWTTDNSQQLQNIISMLNSAENLEERNPEVRLIMKVNTSPSAGYIRFYNEFAKRPIMYLNYVYTKAEVKFTNTEKLLTTIHKGLIKALDLGMGQEILVYSPIVSMTKIQKTPLPERKALPIRWITWMSYLEDPRIQFHYDKTLPELQQVPTVTDDIIAKIKHPSEFSMVFYTDGSAIKHPNVNKSHNAGMGIAQVQFKPEFTVINTWSIPLGDHTAQLAEVAAVEFACKKALKIDGPVLIVTDSFYVAESVNKELPYWQSNGFFNNKKKPLKHVSKWKSIADCIQLKPDIIIIHEKGHQPTASTFHTEGNNLADKLATQGSYVVNAGKRTADGSEFEKRTADGSEFESPKKKAKVE

SEQ ID NO: 492 - protein, 2180 aa, synthetic construct
MPAAKRVKLDGGDKKYSIGLDIGTNSVGWAVITDEYKVPSKKFKVLGNTDRHSIKKNLIGALLFDSGETAEATRLKRTARRRYTRRKNRICYLQEIFSNEMAKVDDSFFHRLEESFLVEEDKKHERHPIFGNIVDEVAYHEKYPTIYHLRKKLVDSTDKADLRLIYLALAHMIKFRGHFLIEGDLNPDNSDVDKLFIQLVQTYNQLFEENPINASGVDAKAILSARLSKSRRLENLIAQLPGEKKNGLFGNLIALSLGLTPNFKSNFDLAEDAKLQLSKDTYDDDLDNLLAQIGDQYADLFLAAKNLSDAILLSDILRVNTEITKAPLSASMIKRYDEHHQDLTLLKALVRQQLPEKYKEIFFDQSKNGYAGYIDGGASQEEFYKFIKPILEKMDGTEELLVKLNREDLLRKQRTFDNGSIPHQIHLGELHAILRRQEDFYPFLKDNREKIEKILTFRIPYYVGPLARGNSRFAWMTRKSEETITPWNFEEVVDKGASAQSFIERMTNFDKNLPNEKVLPKHSLLYEYFTVYNELTKVKYVTEGMRKPAFLSGEQKKAIVDLLFKTNRKVTVKQLKEDYFKKIECFDSVEISGVEDRFNASLGTYHDLLKIIKDKDFLDNEENEDILEDIVLTLTLFEDREMIEERLKTYAHLFDDKVMKQLKRRRYTGWGRLSRKLINGIRDKQSGKTILDFLKSDGFANRNFMQLIHDDSLTFKEDIQKAQVSGQGDSLHEHIANLAGSPAIKKGILQTVKVVDELVKVMGRHKPENIVIEMARENQTTQKGQKNSRERMKRIEEGIKELGSQILKEHPVENTQLQNEKLYLYYLQNGRDMYVDQELDINRLSDYDVDHIVPQSFLKDDSIDNKVLTRSDKARGKSDNVPSEEVVKKMKNYWRQLLNAKLITQRKFDNLTKAERGGLSELDKAGFIKRQLVETRQITKHVAQILDSRMNTKYDENDKLIREVKVITLKSKLVSDFRKDFQFYKVREINNYHHAHDAYLNAVVGTALIKKYPKLESEFVYGDYKVYDVRKMIAKSEQEIGKATAKYFFYSNIMNFFKTEITLANGEIRKRPLIETNGETGEIVWDKGRDFATVRKVLSMPQVNIVKKTEVQTGGFSKESILPKRNSDKLIARKKDWDPKKYGGFDSPTVAYSVLVVAKVEKGKSKKLKSVKELLGITIMERSSFEKNPIDFLEAKGYKEVKKDLIIKLPKYSLFELENGRKRMLASAGELQKGNELALPSKYVNFLYLASHYEKLKGSPEDNEQKQLFVEQHKHYLDEIIEQISEFSKRVILADANLDKVLSAYNKHRDKPIREQAENIIHLFTLTNLGAPAAFKYFDTTIDRKRYTSTKEVLDATLIHQSITGLYETRIDLSQLGGDGGGSSGSSGSSGSSGSSGGMDPLQLLQPLEAEIKGTKLKAHWNSGATITCVPQAFLEEEVPIKNIWIKTIHGEKEQPVYYLTFKIQGRKVEAEVISSPYDYILVSPSDIPWLMKKPLQLTTLVPLQEYEERLLKQTMLTGSYKEKLQSLFLKYDALWQHWENQVGHRRIKPHHIATGTVNPRPQKQYPINPKAKASIQTVINDLLKQGVLIQQNSIMNTPVYPVPKPDGKWRMVLDYREVNKTIPLIAAQNQHSAGILSSIFRGKYKTTLDLSNGFWAHSITPESYWLTAFTWLGQQYCWTRLPQGFLNSPALFTADVVDLLKEVPNVQVYVDDIYISHDDPREHLEQLEKVFSLLLNAGYVVSLKKSEIAQHEVEFLGFNITKEGRGLTETFKQKLLNITPPRDLKQLQSILGLLNFARNFIPNFSELVKPLYNIIATANGKYITWTTDNSQQLQNIISMLNSAENLEERNPEVRLIMKVNTSPSAGYIRFYNEFAKRPIMYLNYVYTKAEVKFTNTEKLLTTIHKGLIKALDLGMGQEILVYSPIVSMTKIQKTPLPERKALPIRWITWMSYLEDPRIQFHYDKTLPELQQVPTVTDDIIAKIKHPSEFSMVFYTDGSAIKHPNVNKSHNAGMGIAQVQFKPEFTVINTWSIPLGDHTAQLAEVAAVEFACKKALKIDGPVLIVTDSFYVAESVNKELPYWQSNGFFNNKKKPLKHVSKWKSIADCIQLKPDIIIIHEKGHQPTASTFHTEGNNLADKLATQGSYVVNAGKRTADGSEFEKRTADGSEFESPKKKAKVE

SEQ ID NO: 493 - protein, 2176 aa, synthetic construct
MPAAKRVKLDGGDKKYSIGLDIGTNSVGWAVITDEYKVPSKKFKVLGNTDRHSIKKNLIGALLFDSGETAEATRLKRTARRRYTRRKNRICYLQEIFSNEMAKVDDSFFHRLEESFLVEEDKKHERHPIFGNIVDEVAYHEKYPTIYHLRKKLVDSTDKADLRLIYLALAHMIKFRGHFLIEGDLNPDNSDVDKLFIQLVQTYNQLFEENPINASGVDAKAILSARLSKSRRLENLIAQLPGEKKNGLFGNLIALSLGLTPNFKSNFDLAEDAKLQLSKDTYDDDLDNLLAQIGDQYADLFLAAKNLSDAILLSDILRVNTEITKAPLSASMIKRYDEHHQDLTLLKALVRQQLPEKYKEIFFDQSKNGYAGYIDGGASQEEFYKFIKPILEKMDGTEELLVKLNREDLLRKQRTFDNGSIPHQIHLGELHAILRRQEDFYPFLKDNREKIEKILTFRIPYYVGPLARGNSRFAWMTRKSEETITPWNFEEVVDKGASAQSFIERMTNFDKNLPNEKVLPKHSLLYEYFTVYNELTKVKYVTEGMRKPAFLSGEQKKAIVDLLFKTNRKVTVKQLKEDYFKKIECFDSVEISGVEDRFNASLGTYHDLLKIIKDKDFLDNEENEDILEDIVLTLTLFEDREMIEERLKTYAHLFDDKVMKQLKRRRYTGWGRLSRKLINGIRDKQSGKTILDFLKSDGFANRNFMQLIHDDSLTFKEDIQKAQVSGQGDSLHEHIANLAGSPAIKKGILQTVKVVDELVKVMGRHKPENIVIEMARENQTTQKGQKNSRERMKRIEEGIKELGSQILKEHPVENTQLQNEKLYLYYLQNGRDMYVDQELDINRLSDYDVDHIVPQSFLKDDSIDNKVLTRSDKARGKSDNVPSEEVVKKMKNYWRQLLNAKLITQRKFDNLTKAERGGLSELDKAGFIKRQLVETRQITKHVAQILDSRMNTKYDENDKLIREVKVITLKSKLVSDFRKDFQFYKVREINNYHHAHDAYLNAVVGTALIKKYPKLESEFVYGDYKVYDVRKMIAKSEQEIGKATAKYFFYSNIMNFFKTEITLANGEIRKRPLIETNGETGEIVWDKGRDFATVRKVLSMPQVNIVKKTEVQTGGFSKESILPKRNSDKLIARKKDWDPKKYGGFDSPTVAYSVLVVAKVEKGKSKKLKSVKELLGITIMERSSFEKNPIDFLEAKGYKEVKKDLIIKLPKYSLFELENGRKRMLASAGELQKGNELALPSKYVNFLYLASHYEKLKGSPEDNEQKQLFVEQHKHYLDEIIEQISEFSKRVILADANLDKVLSAYNKHRDKPIREQAENIIHLFTLTNLGAPAAFKYFDTTIDRKRYTSTKEVLDATLIHQSITGLYETRIDLSQLGGDGGEAAAKGGSPAPGGMDPLQLLQPLEAEIKGTKLKAHWNSGATITCVPQAFLEEEVPIKNIWIKTIHGEKEQPVYYLTFKIQGRKVEAEVISSPYDYILVSPSDIPWLMKKPLQLTTLVPLQEYEERLLKQTMLTGSYKEKLQSLFLKYDALWQHWENQVGHRRIKPHHIATGTVNPRPQKQYPINPKAKASIQTVINDLLKQGVLIQQNSIMNTPVYPVPKPDGKWRMVLDYREVNKTIPLIAAQNQHSAGILSSIFRGKYKTTLDLSNGFWAHSITPESYWLTAFTWLGQQYCWTRLPQGFLNSPALFTADVVDLLKEVPNVQVYVDDIYISHDDPREHLEQLEKVFSLLLNAGYVVSLKKSEIAQHEVEFLGFNITKEGRGLTETFKQKLLNITPPRDLKQLQSILGLLNFARNFIPNFSELVKPLYNIIATANGKYITWTTDNSQQLQNIISMLNSAENLEERNPEVRLIMKVNTSPSAGYIRFYNEFAKRPIMYLNYVYTKAEVKFTNTEKLLTTIHKGLIKALDLGMGQEILVYSPIVSMTKIQKTPLPERKALPIRWITWMSYLEDPRIQFHYDKTLPELQQVPTVTDDIIAKIKHPSEFSMVFYTDGSAIKHPNVNKSHNAGMGIAQVQFKPEFTVINTWSIPLGDHTAQLAEVAAVEFACKKALKIDGPVLIVTDSFYVAESVNKELPYWQSNGFFNNKKKPLKHVSKWKSIADCIQLKPDIIIIHEKGHQPTASTFHTEGNNLADKLATQGSYVVNAGKRTADGSEFEKRTADGSEFESPKKKAKVE

SEQ ID NO: 494 - protein, 2181 aa, synthetic construct
MPAAKRVKLDGGDKKYSIGLDIGTNSVGWAVITDEYKVPSKKFKVLGNTDRHSIKKNLIGALLFDSGETAEATRLKRTARRRYTRRKNRICYLQEIFSNEMAKVDDSFFHRLEESFLVEEDKKHERHPIFGNIVDEVAYHEKYPTIYHLRKKLVDSTDKADLRLIYLALAHMIKFRGHFLIEGDLNPDNSDVDKLFIQLVQTYNQLFEENPINASGVDAKAILSARLSKSRRLENLIAQLPGEKKNGLFGNLIALSLGLTPNFKSNFDLAEDAKLQLSKDTYDDDLDNLLAQIGDQYADLFLAAKNLSDAILLSDILRVNTEITKAPLSASMIKRYDEHHQDLTLLKALVRQQLPEKYKEIFFDQSKNGYAGYIDGGASQEEFYKFIKPILEKMDGTEELLVKLNREDLLRKQRTFDNGSIPHQIHLGELHAILRRQEDFYPFLKDNREKIEKILTFRIPYYVGPLARGNSRFAWMTRKSEETITPWNFEEVVDKGASAQSFIERMTNFDKNLPNEKVLPKHSLLYEYFTVYNELTKVKYVTEGMRKPAFLSGEQKKAIVDLLFKTNRKVTVKQLKEDYFKKIECFDSVEISGVEDRFNASLGTYHDLLKIIKDKDFLDNEENEDILEDIVLTLTLFEDREMIEERLKTYAHLFDDKVMKQLKRRRYTGWGRLSRKLINGIRDKQSGKTILDFLKSDGFANRNFMQLIHDDSLTFKEDIQKAQVSGQGDSLHEHIANLAGSPAIKKGILQTVKVVDELVKVMGRHKPENIVIEMARENQTTQKGQKNSRERMKRIEEGIKELGSQILKEHPVENTQLQNEKLYLYYLQNGRDMYVDQELDINRLSDYDVDHIVPQSFLKDDSIDNKVLTRSDKARGKSDNVPSEEVVKKMKNYWRQLLNAKLITQRKFDNLTKAERGGLSELDKAGFIKRQLVETRQITKHVAQILDSRMNTKYDENDKLIREVKVITLKSKLVSDFRKDFQFYKVREINNYHHAHDAYLNAVVGTALIKKYPKLESEFVYGDYKVYDVRKMIAKSEQEIGKATAKYFFYSNIMNFFKTEITLANGEIRKRPLIETNGETGEIVWDKGRDFATVRKVLSMPQVNIVKKTEVQTGGFSKESILPKRNSDKLIARKKDWDPKKYGGFDSPTVAYSVLVVAKVEKGKSKKLKSVKELLGITIMERSSFEKNPIDFLEAKGYKEVKKDLIIKLPKYSLFELENGRKRMLASAGELQKGNELALPSKYVNFLYLASHYEKLKGSPEDNEQKQLFVEQHKHYLDEIIEQISEFSKRVILADANLDKVLSAYNKHRDKPIREQAENIIHLFTLTNLGAPAAFKYFDTTIDRKRYTSTKEVLDATLIHQSITGLYETRIDLSQLGGDGGSGSETPGTSESATPESGGMDPLQLLQPLEAEIKGTKLKAHWNSGATITCVPQAFLEEEVPIKNIWIKTIHGEKEQPVYYLTFKIQGRKVEAEVISSPYDYILVSPSDIPWLMKKPLQLTTLVPLQEYEERLLKQTMLTGSYKEKLQSLFLKYDALWQHWENQVGHRRIKPHHIATGTVNPRPQKQYPINPKAKASIQTVINDLLKQGVLIQQNSIMNTPVYPVPKPDGKWRMVLDYREVNKTIPLIAAQNQHSAGILSSIFRGKYKTTLDLSNGFWAHSITPESYWLTAFTWLGQQYCWTRLPQGFLNSPALFTADVVDLLKEVPNVQVYVDDIYISHDDPREHLEQLEKVFSLLLNAGYVVSLKKSEIAQHEVEFLGFNITKEGRGLTETFKQKLLNITPPRDLKQLQSILGLLNFARNFIPNFSELVKPLYNIIATANGKYITWTTDNSQQLQNIISMLNSAENLEERNPEVRLIMKVNTSPSAGYIRFYNEFAKRPIMYLNYVYTKAEVKFTNTEKLLTTIHKGLIKALDLGMGQEILVYSPIVSMTKIQKTPLPERKALPIRWITWMSYLEDPRIQFHYDKTLPELQQVPTVTDDIIAKIKHPSEFSMVFYTDGSAIKHPNVNKSHNAGMGIAQVQFKPEFTVINTWSIPLGDHTAQLAEVAAVEFACKKALKIDGPVLIVTDSFYVAESVNKELPYWQSNGFFNNKKKPLKHVSKWKSIADCIQLKPDIIIIHEKGHQPTASTFHTEGNNLADKLATQGSYVVNAGKRTADGSEFEKRTADGSEFESPKKKAKVE

SEQ ID NO: 495 - protein, 2176 aa, synthetic construct
MPAAKRVKLDGGDKKYSIGLDIGTNSVGWAVITDEYKVPSKKFKVLGNTDRHSIKKNLIGALLFDSGETAEATRLKRTARRRYTRRKNRICYLQEIFSNEMAKVDDSFFHRLEESFLVEEDKKHERHPIFGNIVDEVAYHEKYPTIYHLRKKLVDSTDKADLRLIYLALAHMIKFRGHFLIEGDLNPDNSDVDKLFIQLVQTYNQLFEENPINASGVDAKAILSARLSKSRRLENLIAQLPGEKKNGLFGNLIALSLGLTPNFKSNFDLAEDAKLQLSKDTYDDDLDNLLAQIGDQYADLFLAAKNLSDAILLSDILRVNTEITKAPLSASMIKRYDEHHQDLTLLKALVRQQLPEKYKEIFFDQSKNGYAGYIDGGASQEEFYKFIKPILEKMDGTEELLVKLNREDLLRKQRTFDNGSIPHQIHLGELHAILRRQEDFYPFLKDNREKIEKILTFRIPYYVGPLARGNSRFAWMTRKSEETITPWNFEEVVDKGASAQSFIERMTNFDKNLPNEKVLPKHSLLYEYFTVYNELTKVKYVTEGMRKPAFLSGEQKKAIVDLLFKTNRKVTVKQLKEDYFKKIECFDSVEISGVEDRFNASLGTYHDLLKIIKDKDFLDNEENEDILEDIVLTLTLFEDREMIEERLKTYAHLFDDKVMKQLKRRRYTGWGRLSRKLINGIRDKQSGKTILDFLKSDGFANRNFMQLIHDDSLTFKEDIQKAQVSGQGDSLHEHIANLAGSPAIKKGILQTVKVVDELVKVMGRHKPENIVIEMARENQTTQKGQKNSRERMKRIEEGIKELGSQILKEHPVENTQLQNEKLYLYYLQNGRDMYVDQELDINRLSDYDVDHIVPQSFLKDDSIDNKVLTRSDKARGKSDNVPSEEVVKKMKNYWRQLLNAKLITQRKFDNLTKAERGGLSELDKAGFIKRQLVETRQITKHVAQILDSRMNTKYDENDKLIREVKVITLKSKLVSDFRKDFQFYKVREINNYHHAHDAYLNAVVGTALIKKYPKLESEFVYGDYKVYDVRKMIAKSEQEIGKATAKYFFYSNIMNFFKTEITLANGEIRKRPLIETNGETGEIVWDKGRDFATVRKVLSMPQVNIVKKTEVQTGGFSKESILPKRNSDKLIARKKDWDPKKYGGFDSPTVAYSVLVVAKVEKGKSKKLKSVKELLGITIMERSSFEKNPIDFLEAKGYKEVKKDLIIKLPKYSLFELENGRKRMLASAGELQKGNELALPSKYVNFLYLASHYEKLKGSPEDNEQKQLFVEQHKHYLDEIIEQISEFSKRVILADANLDKVLSAYNKHRDKPIREQAENIIHLFTLTNLGAPAAFKYFDTTIDRKRYTSTKEVLDATLIHQSITGLYETRIDLSQLGGDGGEAAAKPAPGSSGGMDPLQLLQPLEAEIKGTKLKAHWNSGATITCVPQAFLEEEVPIKNIWIKTIHGEKEQPVYYLTFKIQGRKVEAEVISSPYDYILVSPSDIPWLMKKPLQLTTLVPLQEYEERLLKQTMLTGSYKEKLQSLFLKYDALWQHWENQVGHRRIKPHHIATGTVNPRPQKQYPINPKAKASIQTVINDLLKQGVLIQQNSIMNTPVYPVPKPDGKWRMVLDYREVNKTIPLIAAQNQHSAGILSSIFRGKYKTTLDLSNGFWAHSITPESYWLTAFTWLGQQYCWTRLPQGFLNSPALFTADVVDLLKEVPNVQVYVDDIYISHDDPREHLEQLEKVFSLLLNAGYVVSLKKSEIAQHEVEFLGFNITKEGRGLTETFKQKLLNITPPRDLKQLQSILGLLNFARNFIPNFSELVKPLYNIIATANGKYITWTTDNSQQLQNIISMLNSAENLEERNPEVRLIMKVNTSPSAGYIRFYNEFAKRPIMYLNYVYTKAEVKFTNTEKLLTTIHKGLIKALDLGMGQEILVYSPIVSMTKIQKTPLPERKALPIRWITWMSYLEDPRIQFHYDKTLPELQQVPTVTDDIIAKIKHPSEFSMVFYTDGSAIKHPNVNKSHNAGMGIAQVQFKPEFTVINTWSIPLGDHTAQLAEVAAVEFACKKALKIDGPVLIVTDSFYVAESVNKELPYWQSNGFFNNKKKPLKHVSKWKSIADCIQLKPDIIIIHEKGHQPTASTFHTEGNNLADKLATQGSYVVNAGKRTADGSEFEKRTADGSEFESPKKKAKVE

SEQ ID NO: 496 - protein, 2176 aa, synthetic construct
MPAAKRVKLDGGDKKYSIGLDIGTNSVGWAVITDEYKVPSKKFKVLGNTDRHSIKKNLIGALLFDSGETAEATRLKRTARRRYTRRKNRICYLQEIFSNEMAKVDDSFFHRLEESFLVEEDKKHERHPIFGNIVDEVAYHEKYPTIYHLRKKLVDSTDKADLRLIYLALAHMIKFRGHFLIEGDLNPDNSDVDKLFIQLVQTYNQLFEENPINASGVDAKAILSARLSKSRRLENLIAQLPGEKKNGLFGNLIALSLGLTPNFKSNFDLAEDAKLQLSKDTYDDDLDNLLAQIGDQYADLFLAAKNLSDAILLSDILRVNTEITKAPLSASMIKRYDEHHQDLTLLKALVRQQLPEKYKEIFFDQSKNGYAGYIDGGASQEEFYKFIKPILEKMDGTEELLVKLNREDLLRKQRTFDNGSIPHQIHLGELHAILRRQEDFYPFLKDNREKIEKILTFRIPYYVGPLARGNSRFAWMTRKSEETITPWNFEEVVDKGASAQSFIERMTNFDKNLPNEKVLPKHSLLYEYFTVYNELTKVKYVTEGMRKPAFLSGEQKKAIVDLLFKTNRKVTVKQLKEDYFKKIECFDSVEISGVEDRFNASLGTYHDLLKIIKDKDFLDNEENEDILEDIVLTLTLFEDREMIEERLKTYAHLFDDKVMKQLKRRRYTGWGRLSRKLINGIRDKQSGKTILDFLKSDGFANRNFMQLIHDDSLTFKEDIQKAQVSGQGDSLHEHIANLAGSPAIKKGILQTVKVVDELVKVMGRHKPENIVIEMARENQTTQKGQKNSRERMKRIEEGIKELGSQILKEHPVENTQLQNEKLYLYYLQNGRDMYVDQELDINRLSDYDVDHIVPQSFLKDDSIDNKVLTRSDKARGKSDNVPSEEVVKKMKNYWRQLLNAKLITQRKFDNLTKAERGGLSELDKAGFIKRQLVETRQITKHVAQILDSRMNTKYDENDKLIREVKVITLKSKLVSDFRKDFQFYKVREINNYHHAHDAYLNAVVGTALIKKYPKLESEFVYGDYKVYDVRKMIAKSEQEIGKATAKYFFYSNIMNFFKTEITLANGEIRKRPLIETNGETGEIVWDKGRDFATVRKVLSMPQVNIVKKTEVQTGGFSKESILPKRNSDKLIARKKDWDPKKYGGFDSPTVAYSVLVVAKVEKGKSKKLKSVKELLGITIMERSSFEKNPIDFLEAKGYKEVKKDLIIKLPKYSLFELENGRKRMLASAGELQKGNELALPSKYVNFLYLASHYEKLKGSPEDNEQKQLFVEQHKHYLDEIIEQISEFSKRVILADANLDKVLSAYNKHRDKPIREQAENIIHLFTLTNLGAPAAFKYFDTTIDRKRYTSTKEVLDATLIHQSITGLYETRIDLSQLGGDGGEAAAKGSSPAPGGMDPLQLLQPLEAEIKGTKLKAHWNSGATITCVPQAFLEEEVPIKNIWIKTIHGEKEQPVYYLTFKIQGRKVEAEVISSPYDYILVSPSDIPWLMKKPLQLTTLVPLQEYEERLLKQTMLTGSYKEKLQSLFLKYDALWQHWENQVGHRRIKPHHIATGTVNPRPQKQYPINPKAKASIQTVINDLLKQGVLIQQNSIMNTPVYPVPKPDGKWRMVLDYREVNKTIPLIAAQNQHSAGILSSIFRGKYKTTLDLSNGFWAHSITPESYWLTAFTWLGQQYCWTRLPQGFLNSPALFTADVVDLLKEVPNVQVYVDDIYISHDDPREHLEQLEKVFSLLLNAGYVVSLKKSEIAQHEVEFLGFNITKEGRGLTETFKQKLLNITPPRDLKQLQSILGLLNFARNFIPNFSELVKPLYNIIATANGKYITWTTDNSQQLQNIISMLNSAENLEERNPEVRLIMKVNTSPSAGYIRFYNEFAKRPIMYLNYVYTKAEVKFTNTEKLLTTIHKGLIKALDLGMGQEILVYSPIVSMTKIQKTPLPERKALPIRWITWMSYLEDPRIQFHYDKTLPELQQVPTVTDDIIAKIKHPSEFSMVFYTDGSAIKHPNVNKSHNAGMGIAQVQFKPEFTVINTWSIPLGDHTAQLAEVAAVEFACKKALKIDGPVLIVTDSFYVAESVNKELPYWQSNGFFNNKKKPLKHVSKWKSIADCIQLKPDIIIIHEKGHQPTASTFHTEGNNLADKLATQGSYVVNAGKRTADGSEFEKRTADGSEFESPKKKAKVE

SEQ ID NO: 497 - protein, 2176 aa, synthetic construct
MPAAKRVKLDGGDKKYSIGLDIGTNSVGWAVITDEYKVPSKKFKVLGNTDRHSIKKNLIGALLFDSGETAEATRLKRTARRRYTRRKNRICYLQEIFSNEMAKVDDSFFHRLEESFLVEEDKKHERHPIFGNIVDEVAYHEKYPTIYHLRKKLVDSTDKADLRLIYLALAHMIKFRGHFLIEGDLNPDNSDVDKLFIQLVQTYNQLFEENPINASGVDAKAILSARLSKSRRLENLIAQLPGEKKNGLFGNLIALSLGLTPNFKSNFDLAEDAKLQLSKDTYDDDLDNLLAQIGDQYADLFLAAKNLSDAILLSDILRVNTEITKAPLSASMIKRYDEHHQDLTLLKALVRQQLPEKYKEIFFDQSKNGYAGYIDGGASQEEFYKFIKPILEKMDGTEELLVKLNREDLLRKQRTFDNGSIPHQIHLGELHAILRRQEDFYPFLKDNREKIEKILTFRIPYYVGPLARGNSRFAWMTRKSEETITPWNFEEVVDKGASAQSFIERMTNFDKNLPNEKVLPKHSLLYEYFTVYNELTKVKYVTEGMRKPAFLSGEQKKAIVDLLFKTNRKVTVKQLKEDYFKKIECFDSVEISGVEDRFNASLGTYHDLLKIIKDKDFLDNEENEDILEDIVLTLTLFEDREMIEERLKTYAHLFDDKVMKQLKRRRYTGWGRLSRKLINGIRDKQSGKTILDFLKSDGFANRNFMQLIHDDSLTFKEDIQKAQVSGQGDSLHEHIANLAGSPAIKKGILQTVKVVDELVKVMGRHKPENIVIEMARENQTTQKGQKNSRERMKRIEEGIKELGSQILKEHPVENTQLQNEKLYLYYLQNGRDMYVDQELDINRLSDYDVDHIVPQSFLKDDSIDNKVLTRSDKARGKSDNVPSEEVVKKMKNYWRQLLNAKLITQRKFDNLTKAERGGLSELDKAGFIKRQLVETRQITKHVAQILDSRMNTKYDENDKLIREVKVITLKSKLVSDFRKDFQFYKVREINNYHHAHDAYLNAVVGTALIKKYPKLESEFVYGDYKVYDVRKMIAKSEQEIGKATAKYFFYSNIMNFFKTEITLANGEIRKRPLIETNGETGEIVWDKGRDFATVRKVLSMPQVNIVKKTEVQTGGFSKESILPKRNSDKLIARKKDWDPKKYGGFDSPTVAYSVLVVAKVEKGKSKKLKSVKELLGITIMERSSFEKNPIDFLEAKGYKEVKKDLIIKLPKYSLFELENGRKRMLASAGELQKGNELALPSKYVNFLYLASHYEKLKGSPEDNEQKQLFVEQHKHYLDEIIEQISEFSKRVILADANLDKVLSAYNKHRDKPIREQAENIIHLFTLTNLGAPAAFKYFDTTIDRKRYTSTKEVLDATLIHQSITGLYETRIDLSQLGGDGGPAPGGGEAAAKGGMDPLQLLQPLEAEIKGTKLKAHWNSGATITCVPQAFLEEEVPIKNIWIKTIHGEKEQPVYYLTFKIQGRKVEAEVISSPYDYILVSPSDIPWLMKKPLQLTTLVPLQEYEERLLKQTMLTGSYKEKLQSLFLKYDALWQHWENQVGHRRIKPHHIATGTVNPRPQKQYPINPKAKASIQTVINDLLKQGVLIQQNSIMNTPVYPVPKPDGKWRMVLDYREVNKTIPLIAAQNQHSAGILSSIFRGKYKTTLDLSNGFWAHSITPESYWLTAFTWLGQQYCWTRLPQGFLNSPALFTADVVDLLKEVPNVQVYVDDIYISHDDPREHLEQLEKVFSLLLNAGYVVSLKKSEIAQHEVEFLGFNITKEGRGLTETFKQKLLNITPPRDLKQLQSILGLLNFARNFIPNFSELVKPLYNIIATANGKYITWTTDNSQQLQNIISMLNSAENLEERNPEVRLIMKVNTSPSAGYIRFYNEFAKRPIMYLNYVYTKAEVKFTNTEKLLTTIHKGLIKALDLGMGQEILVYSPIVSMTKIQKTPLPERKALPIRWITWMSYLEDPRIQFHYDKTLPELQQVPTVTDDIIAKIKHPSEFSMVFYTDGSAIKHPNVNKSHNAGMGIAQVQFKPEFTVINTWSIPLGDHTAQLAEVAAVEFACKKALKIDGPVLIVTDSFYVAESVNKELPYWQSNGFFNNKKKPLKHVSKWKSIADCIQLKPDIIIIHEKGHQPTASTFHTEGNNLADKLATQGSYVVNAGKRTADGSEFEKRTADGSEFESPKKKAKVE

SEQ ID NO: 498 - protein, 2180 aa, synthetic construct
MPAAKRVKLDGGDKKYSIGLDIGTNSVGWAVITDEYKVPSKKFKVLGNTDRHSIKKNLIGALLFDSGETAEATRLKRTARRRYTRRKNRICYLQEIFSNEMAKVDDSFFHRLEESFLVEEDKKHERHPIFGNIVDEVAYHEKYPTIYHLRKKLVDSTDKADLRLIYLALAHMIKFRGHFLIEGDLNPDNSDVDKLFIQLVQTYNQLFEENPINASGVDAKAILSARLSKSRRLENLIAQLPGEKKNGLFGNLIALSLGLTPNFKSNFDLAEDAKLQLSKDTYDDDLDNLLAQIGDQYADLFLAAKNLSDAILLSDILRVNTEITKAPLSASMIKRYDEHHQDLTLLKALVRQQLPEKYKEIFFDQSKNGYAGYIDGGASQEEFYKFIKPILEKMDGTEELLVKLNREDLLRKQRTFDNGSIPHQIHLGELHAILRRQEDFYPFLKDNREKIEKILTFRIPYYVGPLARGNSRFAWMTRKSEETITPWNFEEVVDKGASAQSFIERMTNFDKNLPNEKVLPKHSLLYEYFTVYNELTKVKYVTEGMRKPAFLSGEQKKAIVDLLFKTNRKVTVKQLKEDYFKKIECFDSVEISGVEDRFNASLGTYHDLLKIIKDKDFLDNEENEDILEDIVLTLTLFEDREMIEERLKTYAHLFDDKVMKQLKRRRYTGWGRLSRKLINGIRDKQSGKTILDFLKSDGFANRNFMQLIHDDSLTFKEDIQKAQVSGQGDSLHEHIANLAGSPAIKKGILQTVKVVDELVKVMGRHKPENIVIEMARENQTTQKGQKNSRERMKRIEEGIKELGSQILKEHPVENTQLQNEKLYLYYLQNGRDMYVDQELDINRLSDYDVDHIVPQSFLKDDSIDNKVLTRSDKARGKSDNVPSEEVVKKMKNYWRQLLNAKLITQRKFDNLTKAERGGLSELDKAGFIKRQLVETRQITKHVAQILDSRMNTKYDENDKLIREVKVITLKSKLVSDFRKDFQFYKVREINNYHHAHDAYLNAVVGTALIKKYPKLESEFVYGDYKVYDVRKMIAKSEQEIGKATAKYFFYSNIMNFFKTEITLANGEIRKRPLIETNGETGEIVWDKGRDFATVRKVLSMPQVNIVKKTEVQTGGFSKESILPKRNSDKLIARKKDWDPKKYGGFDSPTVAYSVLVVAKVEKGKSKKLKSVKELLGITIMERSSFEKNPIDFLEAKGYKEVKKDLIIKLPKYSLFELENGRKRMLASAGELQKGNELALPSKYVNFLYLASHYEKLKGSPEDNEQKQLFVEQHKHYLDEIIEQISEFSKRVILADANLDKVLSAYNKHRDKPIREQAENIIHLFTLTNLGAPAAFKYFDTTIDRKRYTSTKEVLDATLIHQSITGLYETRIDLSQLGGDGGEAAAKEAAAKEAAAKGGMDPLQLLQPLEAEIKGTKLKAHWNSGATITCVPQAFLEEEVPIKNIWIKTIHGEKEQPVYYLTFKIQGRKVEAEVISSPYDYILVSPSDIPWLMKKPLQLTTLVPLQEYEERLLKQTMLTGSYKEKLQSLFLKYDALWQHWENQVGHRRIKPHHIATGTVNPRPQKQYPINPKAKASIQTVINDLLKQGVLIQQNSIMNTPVYPVPKPDGKWRMVLDYREVNKTIPLIAAQNQHSAGILSSIFRGKYKTTLDLSNGFWAHSITPESYWLTAFTWLGQQYCWTRLPQGFLNSPALFTADVVDLLKEVPNVQVYVDDIYISHDDPREHLEQLEKVFSLLLNAGYVVSLKKSEIAQHEVEFLGFNITKEGRGLTETFKQKLLNITPPRDLKQLQSILGLLNFARNFIPNFSELVKPLYNIIATANGKYITWTTDNSQQLQNIISMLNSAENLEERNPEVRLIMKVNTSPSAGYIRFYNEFAKRPIMYLNYVYTKAEVKFTNTEKLLTTIHKGLIKALDLGMGQEILVYSPIVSMTKIQKTPLPERKALPIRWITWMSYLEDPRIQFHYDKTLPELQQVPTVTDDIIAKIKHPSEFSMVFYTDGSAIKHPNVNKSHNAGMGIAQVQFKPEFTVINTWSIPLGDHTAQLAEVAAVEFACKKALKIDGPVLIVTDSFYVAESVNKELPYWQSNGFFNNKKKPLKHVSKWKSIADCIQLKPDIIIIHEKGHQPTASTFHTEGNNLADKLATQGSYVVNAGKRTADGSEFEKRTADGSEFESPKKKAKVE

SEQ ID NO: 499 - protein, 2176 aa, synthetic construct
MPAAKRVKLDGGDKKYSIGLDIGTNSVGWAVITDEYKVPSKKFKVLGNTDRHSIKKNLIGALLFDSGETAEATRLKRTARRRYTRRKNRICYLQEIFSNEMAKVDDSFFHRLEESFLVEEDKKHERHPIFGNIVDEVAYHEKYPTIYHLRKKLVDSTDKADLRLIYLALAHMIKFRGHFLIEGDLNPDNSDVDKLFIQLVQTYNQLFEENPINASGVDAKAILSARLSKSRRLENLIAQLPGEKKNGLFGNLIALSLGLTPNFKSNFDLAEDAKLQLSKDTYDDDLDNLLAQIGDQYADLFLAAKNLSDAILLSDILRVNTEITKAPLSASMIKRYDEHHQDLTLLKALVRQQLPEKYKEIFFDQSKNGYAGYIDGGASQEEFYKFIKPILEKMDGTEELLVKLNREDLLRKQRTFDNGSIPHQIHLGELHAILRRQEDFYPFLKDNREKIEKILTFRIPYYVGPLARGNSRFAWMTRKSEETITPWNFEEVVDKGASAQSFIERMTNFDKNLPNEKVLPKHSLLYEYFTVYNELTKVKYVTEGMRKPAFLSGEQKKAIVDLLFKTNRKVTVKQLKEDYFKKIECFDSVEISGVEDRFNASLGTYHDLLKIIKDKDFLDNEENEDILEDIVLTLTLFEDREMIEERLKTYAHLFDDKVMKQLKRRRYTGWGRLSRKLINGIRDKQSGKTILDFLKSDGFANRNFMQLIHDDSLTFKEDIQKAQVSGQGDSLHEHIANLAGSPAIKKGILQTVKVVDELVKVMGRHKPENIVIEMARENQTTQKGQKNSRERMKRIEEGIKELGSQILKEHPVENTQLQNEKLYLYYLQNGRDMYVDQELDINRLSDYDVDHIVPQSFLKDDSIDNKVLTRSDKARGKSDNVPSEEVVKKMKNYWRQLLNAKLITQRKFDNLTKAERGGLSELDKAGFIKRQLVETRQITKHVAQILDSRMNTKYDENDKLIREVKVITLKSKLVSDFRKDFQFYKVREINNYHHAHDAYLNAVVGTALIKKYPKLESEFVYGDYKVYDVRKMIAKSEQEIGKATAKYFFYSNIMNFFKTEITLANGEIRKRPLIETNGETGEIVWDKGRDFATVRKVLSMPQVNIVKKTEVQTGGFSKESILPKRNSDKLIARKKDWDPKKYGGFDSPTVAYSVLVVAKVEKGKSKKLKSVKELLGITIMERSSFEKNPIDFLEAKGYKEVKKDLIIKLPKYSLFELENGRKRMLASAGELQKGNELALPSKYVNFLYLASHYEKLKGSPEDNEQKQLFVEQHKHYLDEIIEQISEFSKRVILADANLDKVLSAYNKHRDKPIREQAENIIHLFTLTNLGAPAAFKYFDTTIDRKRYTSTKEVLDATLIHQSITGLYETRIDLSQLGGDGGEAAAKPAPGGSGGMDPLQLLQPLEAEIKGTKLKAHWNSGATITCVPQAFLEEEVPIKNIWIKTIHGEKEQPVYYLTFKIQGRKVEAEVISSPYDYILVSPSDIPWLMKKPLQLTTLVPLQEYEERLLKQTMLTGSYKEKLQSLFLKYDALWQHWENQVGHRRIKPHHIATGTVNPRPQKQYPINPKAKASIQTVINDLLKQGVLIQQNSIMNTPVYPVPKPDGKWRMVLDYREVNKTIPLIAAQNQHSAGILSSIFRGKYKTTLDLSNGFWAHSITPESYWLTAFTWLGQQYCWTRLPQGFLNSPALFTADVVDLLKEVPNVQVYVDDIYISHDDPREHLEQLEKVFSLLLNAGYVVSLKKSEIAQHEVEFLGFNITKEGRGLTETFKQKLLNITPPRDLKQLQSILGLLNFARNFIPNFSELVKPLYNIIATANGKYITWTTDNSQQLQNIISMLNSAENLEERNPEVRLIMKVNTSPSAGYIRFYNEFAKRPIMYLNYVYTKAEVKFTNTEKLLTTIHKGLIKALDLGMGQEILVYSPIVSMTKIQKTPLPERKALPIRWITWMSYLEDPRIQFHYDKTLPELQQVPTVTDDIIAKIKHPSEFSMVFYTDGSAIKHPNVNKSHNAGMGIAQVQFKPEFTVINTWSIPLGDHTAQLAEVAAVEFACKKALKIDGPVLIVTDSFYVAESVNKELPYWQSNGFFNNKKKPLKHVSKWKSIADCIQLKPDIIIIHEKGHQPTASTFHTEGNNLADKLATQGSYVVNAGKRTADGSEFEKRTADGSEFESPKKKAKVE

SEQ ID NO: 500 - protein, 2178 aa, synthetic construct
MPAAKRVKLDGGDKKYSIGLDIGTNSVGWAVITDEYKVPSKKFKVLGNTDRHSIKKNLIGALLFDSGETAEATRLKRTARRRYTRRKNRICYLQEIFSNEMAKVDDSFFHRLEESFLVEEDKKHERHPIFGNIVDEVAYHEKYPTIYHLRKKLVDSTDKADLRLIYLALAHMIKFRGHFLIEGDLNPDNSDVDKLFIQLVQTYNQLFEENPINASGVDAKAILSARLSKSRRLENLIAQLPGEKKNGLFGNLIALSLGLTPNFKSNFDLAEDAKLQLSKDTYDDDLDNLLAQIGDQYADLFLAAKNLSDAILLSDILRVNTEITKAPLSASMIKRYDEHHQDLTLLKALVRQQLPEKYKEIFFDQSKNGYAGYIDGGASQEEFYKFIKPILEKMDGTEELLVKLNREDLLRKQRTFDNGSIPHQIHLGELHAILRRQEDFYPFLKDNREKIEKILTFRIPYYVGPLARGNSRFAWMTRKSEETITPWNFEEVVDKGASAQSFIERMTNFDKNLPNEKVLPKHSLLYEYFTVYNELTKVKYVTEGMRKPAFLSGEQKKAIVDLLFKTNRKVTVKQLKEDYFKKIECFDSVEISGVEDRFNASLGTYHDLLKIIKDKDFLDNEENEDILEDIVLTLTLFEDREMIEERLKTYAHLFDDKVMKQLKRRRYTGWGRLSRKLINGIRDKQSGKTILDFLKSDGFANRNFMQLIHDDSLTFKEDIQKAQVSGQGDSLHEHIANLAGSPAIKKGILQTVKVVDELVKVMGRHKPENIVIEMARENQTTQKGQKNSRERMKRIEEGIKELGSQILKEHPVENTQLQNEKLYLYYLQNGRDMYVDQELDINRLSDYDVDHIVPQSFLKDDSIDNKVLTRSDKARGKSDNVPSEEVVKKMKNYWRQLLNAKLITQRKFDNLTKAERGGLSELDKAGFIKRQLVETRQITKHVAQILDSRMNTKYDENDKLIREVKVITLKSKLVSDFRKDFQFYKVREINNYHHAHDAYLNAVVGTALIKKYPKLESEFVYGDYKVYDVRKMIAKSEQEIGKATAKYFFYSNIMNFFKTEITLANGEIRKRPLIETNGETGEIVWDKGRDFATVRKVLSMPQVNIVKKTEVQTGGFSKESILPKRNSDKLIARKKDWDPKKYGGFDSPTVAYSVLVVAKVEKGKSKKLKSVKELLGITIMERSSFEKNPIDFLEAKGYKEVKKDLIIKLPKYSLFELENGRKRMLASAGELQKGNELALPSKYVNFLYLASHYEKLKGSPEDNEQKQLFVEQHKHYLDEIIEQISEFSKRVILADANLDKVLSAYNKHRDKPIREQAENIIHLFTLTNLGAPAAFKYFDTTIDRKRYTSTKEVLDATLIHQSITGLYETRIDLSQLGGDGGPAPAPAPAPAPAPGGMDPLQLLQPLEAEIKGTKLKAHWNSGATITCVPQAFLEEEVPIKNIWIKTIHGEKEQPVYYLTFKIQGRKVEAEVISSPYDYILVSPSDIPWLMKKPLQLTTLVPLQEYEERLLKQTMLTGSYKEKLQSLFLKYDALWQHWENQVGHRRIKPHHIATGTVNPRPQKQYPINPKAKASIQTVINDLLKQGVLIQQNSIMNTPVYPVPKPDGKWRMVLDYREVNKTIPLIAAQNQHSAGILSSIFRGKYKTTLDLSNGFWAHSITPESYWLTAFTWLGQQYCWTRLPQGFLNSPALFTADVVDLLKEVPNVQVYVDDIYISHDDPREHLEQLEKVFSLLLNAGYVVSLKKSEIAQHEVEFLGFNITKEGRGLTETFKQKLLNITPPRDLKQLQSILGLLNFARNFIPNFSELVKPLYNIIATANGKYITWTTDNSQQLQNIISMLNSAENLEERNPEVRLIMKVNTSPSAGYIRFYNEFAKRPIMYLNYVYTKAEVKFTNTEKLLTTIHKGLIKALDLGMGQEILVYSPIVSMTKIQKTPLPERKALPIRWITWMSYLEDPRIQFHYDKTLPELQQVPTVTDDIIAKIKHPSEFSMVFYTDGSAIKHPNVNKSHNAGMGIAQVQFKPEFTVINTWSIPLGDHTAQLAEVAAVEFACKKALKIDGPVLIVTDSFYVAESVNKELPYWQSNGFFNNKKKPLKHVSKWKSIADCIQLKPDIIIIHEKGHQPTASTFHTEGNNLADKLATQGSYVVNAGKRTADGSEFEKRTADGSEFESPKKKAKVE

SEQ ID NO: 501 - protein, 2176 aa, synthetic construct
MPAAKRVKLDGGDKKYSIGLDIGTNSVGWAVITDEYKVPSKKFKVLGNTDRHSIKKNLIGALLFDSGETAEATRLKRTARRRYTRRKNRICYLQEIFSNEMAKVDDSFFHRLEESFLVEEDKKHERHPIFGNIVDEVAYHEKYPTIYHLRKKLVDSTDKADLRLIYLALAHMIKFRGHFLIEGDLNPDNSDVDKLFIQLVQTYNQLFEENPINASGVDAKAILSARLSKSRRLENLIAQLPGEKKNGLFGNLIALSLGLTPNFKSNFDLAEDAKLQLSKDTYDDDLDNLLAQIGDQYADLFLAAKNLSDAILLSDILRVNTEITKAPLSASMIKRYDEHHQDLTLLKALVRQQLPEKYKEIFFDQSKNGYAGYIDGGASQEEFYKFIKPILEKMDGTEELLVKLNREDLLRKQRTFDNGSIPHQIHLGELHAILRRQEDFYPFLKDNREKIEKILTFRIPYYVGPLARGNSRFAWMTRKSEETITPWNFEEVVDKGASAQSFIERMTNFDKNLPNEKVLPKHSLLYEYFTVYNELTKVKYVTEGMRKPAFLSGEQKKAIVDLLFKTNRKVTVKQLKEDYFKKIECFDSVEISGVEDRFNASLGTYHDLLKIIKDKDFLDNEENEDILEDIVLTLTLFEDREMIEERLKTYAHLFDDKVMKQLKRRRYTGWGRLSRKLINGIRDKQSGKTILDFLKSDGFANRNFMQLIHDDSLTFKEDIQKAQVSGQGDSLHEHIANLAGSPAIKKGILQTVKVVDELVKVMGRHKPENIVIEMARENQTTQKGQKNSRERMKRIEEGIKELGSQILKEHPVENTQLQNEKLYLYYLQNGRDMYVDQELDINRLSDYDVDHIVPQSFLKDDSIDNKVLTRSDKARGKSDNVPSEEVVKKMKNYWRQLLNAKLITQRKFDNLTKAERGGLSELDKAGFIKRQLVETRQITKHVAQILDSRMNTKYDENDKLIREVKVITLKSKLVSDFRKDFQFYKVREINNYHHAHDAYLNAVVGTALIKKYPKLESEFVYGDYKVYDVRKMIAKSEQEIGKATAKYFFYSNIMNFFKTEITLANGEIRKRPLIETNGETGEIVWDKGRDFATVRKVLSMPQVNIVKKTEVQTGGFSKESILPKRNSDKLIARKKDWDPKKYGGFDSPTVAYSVLVVAKVEKGKSKKLKSVKELLGITIMERSSFEKNPIDFLEAKGYKEVKKDLIIKLPKYSLFELENGRKRMLASAGELQKGNELALPSKYVNFLYLASHYEKLKGSPEDNEQKQLFVEQHKHYLDEIIEQISEFSKRVILADANLDKVLSAYNKHRDKPIREQAENIIHLFTLTNLGAPAAFKYFDTTIDRKRYTSTKEVLDATLIHQSITGLYETRIDLSQLGGDGGGGGEAAAKGGSGGMDPLQLLQPLEAEIKGTKLKAHWNSGATITCVPQAFLEEEVPIKNIWIKTIHGEKEQPVYYLTFKIQGRKVEAEVISSPYDYILVSPSDIPWLMKKPLQLTTLVPLQEYEERLLKQTMLTGSYKEKLQSLFLKYDALWQHWENQVGHRRIKPHHIATGTVNPRPQKQYPINPKAKASIQTVINDLLKQGVLIQQNSIMNTPVYPVPKPDGKWRMVLDYREVNKTIPLIAAQNQHSAGILSSIFRGKYKTTLDLSNGFWAHSITPESYWLTAFTWLGQQYCWTRLPQGFLNSPALFTADVVDLLKEVPNVQVYVDDIYISHDDPREHLEQLEKVFSLLLNAGYVVSLKKSEIAQHEVEFLGFNITKEGRGLTETFKQKLLNITPPRDLKQLQSILGLLNFARNFIPNFSELVKPLYNIIATANGKYITWTTDNSQQLQNIISMLNSAENLEERNPEVRLIMKVNTSPSAGYIRFYNEFAKRPIMYLNYVYTKAEVKFTNTEKLLTTIHKGLIKALDLGMGQEILVYSPIVSMTKIQKTPLPERKALPIRWITWMSYLEDPRIQFHYDKTLPELQQVPTVTDDIIAKIKHPSEFSMVFYTDGSAIKHPNVNKSHNAGMGIAQVQFKPEFTVINTWSIPLGDHTAQLAEVAAVEFACKKALKIDGPVLIVTDSFYVAESVNKELPYWQSNGFFNNKKKPLKHVSKWKSIADCIQLKPDIIIIHEKGHQPTASTFHTEGNNLADKLATQGSYVVNAGKRTADGSEFEKRTADGSEFESPKKKAKVE

SEQ ID NO: 502 - protein, 2176 aa, synthetic construct
MPAAKRVKLDGGDKKYSIGLDIGTNSVGWAVITDEYKVPSKKFKVLGNTDRHSIKKNLIGALLFDSGETAEATRLKRTARRRYTRRKNRICYLQEIFSNEMAKVDDSFFHRLEESFLVEEDKKHERHPIFGNIVDEVAYHEKYPTIYHLRKKLVDSTDKADLRLIYLALAHMIKFRGHFLIEGDLNPDNSDVDKLFIQLVQTYNQLFEENPINASGVDAKAILSARLSKSRRLENLIAQLPGEKKNGLFGNLIALSLGLTPNFKSNFDLAEDAKLQLSKDTYDDDLDNLLAQIGDQYADLFLAAKNLSDAILLSDILRVNTEITKAPLSASMIKRYDEHHQDLTLLKALVRQQLPEKYKEIFFDQSKNGYAGYIDGGASQEEFYKFIKPILEKMDGTEELLVKLNREDLLRKQRTFDNGSIPHQIHLGELHAILRRQEDFYPFLKDNREKIEKILTFRIPYYVGPLARGNSRFAWMTRKSEETITPWNFEEVVDKGASAQSFIERMTNFDKNLPNEKVLPKHSLLYEYFTVYNELTKVKYVTEGMRKPAFLSGEQKKAIVDLLFKTNRKVTVKQLKEDYFKKIECFDSVEISGVEDRFNASLGTYHDLLKIIKDKDFLDNEENEDILEDIVLTLTLFEDREMIEERLKTYAHLFDDKVMKQLKRRRYTGWGRLSRKLINGIRDKQSGKTILDFLKSDGFANRNFMQLIHDDSLTFKEDIQKAQVSGQGDSLHEHIANLAGSPAIKKGILQTVKVVDELVKVMGRHKPENIVIEMARENQTTQKGQKNSRERMKRIEEGIKELGSQILKEHPVENTQLQNEKLYLYYLQNGRDMYVDQELDINRLSDYDVDHIVPQSFLKDDSIDNKVLTRSDKARGKSDNVPSEEVVKKMKNYWRQLLNAKLITQRKFDNLTKAERGGLSELDKAGFIKRQLVETRQITKHVAQILDSRMNTKYDENDKLIREVKVITLKSKLVSDFRKDFQFYKVREINNYHHAHDAYLNAVVGTALIKKYPKLESEFVYGDYKVYDVRKMIAKSEQEIGKATAKYFFYSNIMNFFKTEITLANGEIRKRPLIETNGETGEIVWDKGRDFATVRKVLSMPQVNIVKKTEVQTGGFSKESILPKRNSDKLIARKKDWDPKKYGGFDSPTVAYSVLVVAKVEKGKSKKLKSVKELLGITIMERSSFEKNPIDFLEAKGYKEVKKDLIIKLPKYSLFELENGRKRMLASAGELQKGNELALPSKYVNFLYLASHYEKLKGSPEDNEQKQLFVEQHKHYLDEIIEQISEFSKRVILADANLDKVLSAYNKHRDKPIREQAENIIHLFTLTNLGAPAAFKYFDTTIDRKRYTSTKEVLDATLIHQSITGLYETRIDLSQLGGDGGGGSPAPEAAAKGGMDPLQLLQPLEAEIKGTKLKAHWNSGATITCVPQAFLEEEVPIKNIWIKTIHGEKEQPVYYLTFKIQGRKVEAEVISSPYDYILVSPSDIPWLMKKPLQLTTLVPLQEYEERLLKQTMLTGSYKEKLQSLFLKYDALWQHWENQVGHRRIKPHHIATGTVNPRPQKQYPINPKAKASIQTVINDLLKQGVLIQQNSIMNTPVYPVPKPDGKWRMVLDYREVNKTIPLIAAQNQHSAGILSSIFRGKYKTTLDLSNGFWAHSITPESYWLTAFTWLGQQYCWTRLPQGFLNSPALFTADVVDLLKEVPNVQVYVDDIYISHDDPREHLEQLEKVFSLLLNAGYVVSLKKSEIAQHEVEFLGFNITKEGRGLTETFKQKLLNITPPRDLKQLQSILGLLNFARNFIPNFSELVKPLYNIIATANGKYITWTTDNSQQLQNIISMLNSAENLEERNPEVRLIMKVNTSPSAGYIRFYNEFAKRPIMYLNYVYTKAEVKFTNTEKLLTTIHKGLIKALDLGMGQEILVYSPIVSMTKIQKTPLPERKALPIRWITWMSYLEDPRIQFHYDKTLPELQQVPTVTDDIIAKIKHPSEFSMVFYTDGSAIKHPNVNKSHNAGMGIAQVQFKPEFTVINTWSIPLGDHTAQLAEVAAVEFACKKALKIDGPVLIVTDSFYVAESVNKELPYWQSNGFFNNKKKPLKHVSKWKSIADCIQLKPDIIIIHEKGHQPTASTFHTEGNNLADKLATQGSYVVNAGKRTADGSEFEKRTADGSEFESPKKKAKVE

SEQ ID NO: 503 - protein, 2174 aa, synthetic construct
MPAAKRVKLDGGDKKYSIGLDIGTNSVGWAVITDEYKVPSKKFKVLGNTDRHSIKKNLIGALLFDSGETAEATRLKRTARRRYTRRKNRICYLQEIFSNEMAKVDDSFFHRLEESFLVEEDKKHERHPIFGNIVDEVAYHEKYPTIYHLRKKLVDSTDKADLRLIYLALAHMIKFRGHFLIEGDLNPDNSDVDKLFIQLVQTYNQLFEENPINASGVDAKAILSARLSKSRRLENLIAQLPGEKKNGLFGNLIALSLGLTPNFKSNFDLAEDAKLQLSKDTYDDDLDNLLAQIGDQYADLFLAAKNLSDAILLSDILRVNTEITKAPLSASMIKRYDEHHQDLTLLKALVRQQLPEKYKEIFFDQSKNGYAGYIDGGASQEEFYKFIKPILEKMDGTEELLVKLNREDLLRKQRTFDNGSIPHQIHLGELHAILRRQEDFYPFLKDNREKIEKILTFRIPYYVGPLARGNSRFAWMTRKSEETITPWNFEEVVDKGASAQSFIERMTNFDKNLPNEKVLPKHSLLYEYFTVYNELTKVKYVTEGMRKPAFLSGEQKKAIVDLLFKTNRKVTVKQLKEDYFKKIECFDSVEISGVEDRFNASLGTYHDLLKIIKDKDFLDNEENEDILEDIVLTLTLFEDREMIEERLKTYAHLFDDKVMKQLKRRRYTGWGRLSRKLINGIRDKQSGKTILDFLKSDGFANRNFMQLIHDDSLTFKEDIQKAQVSGQGDSLHEHIANLAGSPAIKKGILQTVKVVDELVKVMGRHKPENIVIEMARENQTTQKGQKNSRERMKRIEEGIKELGSQILKEHPVENTQLQNEKLYLYYLQNGRDMYVDQELDINRLSDYDVDHIVPQSFLKDDSIDNKVLTRSDKARGKSDNVPSEEVVKKMKNYWRQLLNAKLITQRKFDNLTKAERGGLSELDKAGFIKRQLVETRQITKHVAQILDSRMNTKYDENDKLIREVKVITLKSKLVSDFRKDFQFYKVREINNYHHAHDAYLNAVVGTALIKKYPKLESEFVYGDYKVYDVRKMIAKSEQEIGKATAKYFFYSNIMNFFKTEITLANGEIRKRPLIETNGETGEIVWDKGRDFATVRKVLSMPQVNIVKKTEVQTGGFSKESILPKRNSDKLIARKKDWDPKKYGGFDSPTVAYSVLVVAKVEKGKSKKLKSVKELLGITIMERSSFEKNPIDFLEAKGYKEVKKDLIIKLPKYSLFELENGRKRMLASAGELQKGNELALPSKYVNFLYLASHYEKLKGSPEDNEQKQLFVEQHKHYLDEIIEQISEFSKRVILADANLDKVLSAYNKHRDKPIREQAENIIHLFTLTNLGAPAAFKYFDTTIDRKRYTSTKEVLDATLIHQSITGLYETRIDLSQLGGDGGPAPAPAPAPGGMDPLQLLQPLEAEIKGTKLKAHWNSGATITCVPQAFLEEEVPIKNIWIKTIHGEKEQPVYYLTFKIQGRKVEAEVISSPYDYILVSPSDIPWLMKKPLQLTTLVPLQEYEERLLKQTMLTGSYKEKLQSLFLKYDALWQHWENQVGHRRIKPHHIATGTVNPRPQKQYPINPKAKASIQTVINDLLKQGVLIQQNSIMNTPVYPVPKPDGKWRMVLDYREVNKTIPLIAAQNQHSAGILSSIFRGKYKTTLDLSNGFWAHSITPESYWLTAFTWLGQQYCWTRLPQGFLNSPALFTADVVDLLKEVPNVQVYVDDIYISHDDPREHLEQLEKVFSLLLNAGYVVSLKKSEIAQHEVEFLGFNITKEGRGLTETFKQKLLNITPPRDLKQLQSILGLLNFARNFIPNFSELVKPLYNIIATANGKYITWTTDNSQQLQNIISMLNSAENLEERNPEVRLIMKVNTSPSAGYIRFYNEFAKRPIMYLNYVYTKAEVKFTNTEKLLTTIHKGLIKALDLGMGQEILVYSPIVSMTKIQKTPLPERKALPIRWITWMSYLEDPRIQFHYDKTLPELQQVPTVTDDIIAKIKHPSEFSMVFYTDGSAIKHPNVNKSHNAGMGIAQVQFKPEFTVINTWSIPLGDHTAQLAEVAAVEFACKKALKIDGPVLIVTDSFYVAESVNKELPYWQSNGFFNNKKKPLKHVSKWKSIADCIQLKPDIIIIHEKGHQPTASTFHTEGNNLADKLATQGSYVVNAGKRTADGSEFEKRTADGSEFESPKKKAKVE

SEQ ID NO: 504 - protein, 2176 aa, synthetic construct
MPAAKRVKLDGGDKKYSIGLDIGTNSVGWAVITDEYKVPSKKFKVLGNTDRHSIKKNLIGALLFDSGETAEATRLKRTARRRYTRRKNRICYLQEIFSNEMAKVDDSFFHRLEESFLVEEDKKHERHPIFGNIVDEVAYHEKYPTIYHLRKKLVDSTDKADLRLIYLALAHMIKFRGHFLIEGDLNPDNSDVDKLFIQLVQTYNQLFEENPINASGVDAKAILSARLSKSRRLENLIAQLPGEKKNGLFGNLIALSLGLTPNFKSNFDLAEDAKLQLSKDTYDDDLDNLLAQIGDQYADLFLAAKNLSDAILLSDILRVNTEITKAPLSASMIKRYDEHHQDLTLLKALVRQQLPEKYKEIFFDQSKNGYAGYIDGGASQEEFYKFIKPILEKMDGTEELLVKLNREDLLRKQRTFDNGSIPHQIHLGELHAILRRQEDFYPFLKDNREKIEKILTFRIPYYVGPLARGNSRFAWMTRKSEETITPWNFEEVVDKGASAQSFIERMTNFDKNLPNEKVLPKHSLLYEYFTVYNELTKVKYVTEGMRKPAFLSGEQKKAIVDLLFKTNRKVTVKQLKEDYFKKIECFDSVEISGVEDRFNASLGTYHDLLKIIKDKDFLDNEENEDILEDIVLTLTLFEDREMIEERLKTYAHLFDDKVMKQLKRRRYTGWGRLSRKLINGIRDKQSGKTILDFLKSDGFANRNFMQLIHDDSLTFKEDIQKAQVSGQGDSLHEHIANLAGSPAIKKGILQTVKVVDELVKVMGRHKPENIVIEMARENQTTQKGQKNSRERMKRIEEGIKELGSQILKEHPVENTQLQNEKLYLYYLQNGRDMYVDQELDINRLSDYDVDHIVPQSFLKDDSIDNKVLTRSDKARGKSDNVPSEEVVKKMKNYWRQLLNAKLITQRKFDNLTKAERGGLSELDKAGFIKRQLVETRQITKHVAQILDSRMNTKYDENDKLIREVKVITLKSKLVSDFRKDFQFYKVREINNYHHAHDAYLNAVVGTALIKKYPKLESEFVYGDYKVYDVRKMIAKSEQEIGKATAKYFFYSNIMNFFKTEITLANGEIRKRPLIETNGETGEIVWDKGRDFATVRKVLSMPQVNIVKKTEVQTGGFSKESILPKRNSDKLIARKKDWDPKKYGGFDSPTVAYSVLVVAKVEKGKSKKLKSVKELLGITIMERSSFEKNPIDFLEAKGYKEVKKDLIIKLPKYSLFELENGRKRMLASAGELQKGNELALPSKYVNFLYLASHYEKLKGSPEDNEQKQLFVEQHKHYLDEIIEQISEFSKRVILADANLDKVLSAYNKHRDKPIREQAENIIHLFTLTNLGAPAAFKYFDTTIDRKRYTSTKEVLDATLIHQSITGLYETRIDLSQLGGDGGGGGEAAAKGSSGGMDPLQLLQPLEAEIKGTKLKAHWNSGATITCVPQAFLEEEVPIKNIWIKTIHGEKEQPVYYLTFKIQGRKVEAEVISSPYDYILVSPSDIPWLMKKPLQLTTLVPLQEYEERLLKQTMLTGSYKEKLQSLFLKYDALWQHWENQVGHRRIKPHHIATGTVNPRPQKQYPINPKAKASIQTVINDLLKQGVLIQQNSIMNTPVYPVPKPDGKWRMVLDYREVNKTIPLIAAQNQHSAGILSSIFRGKYKTTLDLSNGFWAHSITPESYWLTAFTWLGQQYCWTRLPQGFLNSPALFTADVVDLLKEVPNVQVYVDDIYISHDDPREHLEQLEKVFSLLLNAGYVVSLKKSEIAQHEVEFLGFNITKEGRGLTETFKQKLLNITPPRDLKQLQSILGLLNFARNFIPNFSELVKPLYNIIATANGKYITWTTDNSQQLQNIISMLNSAENLEERNPEVRLIMKVNTSPSAGYIRFYNEFAKRPIMYLNYVYTKAEVKFTNTEKLLTTIHKGLIKALDLGMGQEILVYSPIVSMTKIQKTPLPERKALPIRWITWMSYLEDPRIQFHYDKTLPELQQVPTVTDDIIAKIKHPSEFSMVFYTDGSAIKHPNVNKSHNAGMGIAQVQFKPEFTVINTWSIPLGDHTAQLAEVAAVEFACKKALKIDGPVLIVTDSFYVAESVNKELPYWQSNGFFNNKKKPLKHVSKWKSIADCIQLKPDIIIIHEKGHQPTASTFHTEGNNLADKLATQGSYVVNAGKRTADGSEFEKRTADGSEFESPKKKAKVE

SEQ ID NO: 505 - protein, 2176 aa, synthetic construct
MPAAKRVKLDGGDKKYSIGLDIGTNSVGWAVITDEYKVPSKKFKVLGNTDRHSIKKNLIGALLFDSGETAEATRLKRTARRRYTRRKNRICYLQEIFSNEMAKVDDSFFHRLEESFLVEEDKKHERHPIFGNIVDEVAYHEKYPTIYHLRKKLVDSTDKADLRLIYLALAHMIKFRGHFLIEGDLNPDNSDVDKLFIQLVQTYNQLFEENPINASGVDAKAILSARLSKSRRLENLIAQLPGEKKNGLFGNLIALSLGLTPNFKSNFDLAEDAKLQLSKDTYDDDLDNLLAQIGDQYADLFLAAKNLSDAILLSDILRVNTEITKAPLSASMIKRYDEHHQDLTLLKALVRQQLPEKYKEIFFDQSKNGYAGYIDGGASQEEFYKFIKPILEKMDGTEELLVKLNREDLLRKQRTFDNGSIPHQIHLGELHAILRRQEDFYPFLKDNREKIEKILTFRIPYYVGPLARGNSRFAWMTRKSEETITPWNFEEVVDKGASAQSFIERMTNFDKNLPNEKVLPKHSLLYEYFTVYNELTKVKYVTEGMRKPAFLSGEQKKAIVDLLFKTNRKVTVKQLKEDYFKKIECFDSVEISGVEDRFNASLGTYHDLLKIIKDKDFLDNEENEDILEDIVLTLTLFEDREMIEERLKTYAHLFDDKVMKQLKRRRYTGWGRLSRKLINGIRDKQSGKTILDFLKSDGFANRNFMQLIHDDSLTFKEDIQKAQVSGQGDSLHEHIANLAGSPAIKKGILQTVKVVDELVKVMGRHKPENIVIEMARENQTTQKGQKNSRERMKRIEEGIKELGSQILKEHPVENTQLQNEKLYLYYLQNGRDMYVDQELDINRLSDYDVDHIVPQSFLKDDSIDNKVLTRSDKARGKSDNVPSEEVVKKMKNYWRQLLNAKLITQRKFDNLTKAERGGLSELDKAGFIKRQLVETRQITKHVAQILDSRMNTKYDENDKLIREVKVITLKSKLVSDFRKDFQFYKVREINNYHHAHDAYLNAVVGTALIKKYPKLESEFVYGDYKVYDVRKMIAKSEQEIGKATAKYFFYSNIMNFFKTEITLANGEIRKRPLIETNGETGEIVWDKGRDFATVRKVLSMPQVNIVKKTEVQTGGFSKESILPKRNSDKLIARKKDWDPKKYGGFDSPTVAYSVLVVAKVEKGKSKKLKSVKELLGITIMERSSFEKNPIDFLEAKGYKEVKKDLIIKLPKYSLFELENGRKRMLASAGELQKGNELALPSKYVNFLYLASHYEKLKGSPEDNEQKQLFVEQHKHYLDEIIEQISEFSKRVILADANLDKVLSAYNKHRDKPIREQAENIIHLFTLTNLGAPAAFKYFDTTIDRKRYTSTKEVLDATLIHQSITGLYETRIDLSQLGGDGGEAAAKGGSGSSGGMDPLQLLQPLEAEIKGTKLKAHWNSGATITCVPQAFLEEEVPIKNIWIKTIHGEKEQPVYYLTFKIQGRKVEAEVISSPYDYILVSPSDIPWLMKKPLQLTTLVPLQEYEERLLKQTMLTGSYKEKLQSLFLKYDALWQHWENQVGHRRIKPHHIATGTVNPRPQKQYPINPKAKASIQTVINDLLKQGVLIQQNSIMNTPVYPVPKPDGKWRMVLDYREVNKTIPLIAAQNQHSAGILSSIFRGKYKTTLDLSNGFWAHSITPESYWLTAFTWLGQQYCWTRLPQGFLNSPALFTADVVDLLKEVPNVQVYVDDIYISHDDPREHLEQLEKVFSLLLNAGYVVSLKKSEIAQHEVEFLGFNITKEGRGLTETFKQKLLNITPPRDLKQLQSILGLLNFARNFIPNFSELVKPLYNIIATANGKYITWTTDNSQQLQNIISMLNSAENLEERNPEVRLIMKVNTSPSAGYIRFYNEFAKRPIMYLNYVYTKAEVKFTNTEKLLTTIHKGLIKALDLGMGQEILVYSPIVSMTKIQKTPLPERKALPIRWITWMSYLEDPRIQFHYDKTLPELQQVPTVTDDIIAKIKHPSEFSMVFYTDGSAIKHPNVNKSHNAGMGIAQVQFKPEFTVINTWSIPLGDHTAQLAEVAAVEFACKKALKIDGPVLIVTDSFYVAESVNKELPYWQSNGFFNNKKKPLKHVSKWKSIADCIQLKPDIIIIHEKGHQPTASTFHTEGNNLADKLATQGSYVVNAGKRTADGSEFEKRTADGSEFESPKKKAKVE

SEQ ID NO: 506 - protein, 2176 aa, synthetic construct
MPAAKRVKLDGGDKKYSIGLDIGTNSVGWAVITDEYKVPSKKFKVLGNTDRHSIKKNLIGALLFDSGETAEATRLKRTARRRYTRRKNRICYLQEIFSNEMAKVDDSFFHRLEESFLVEEDKKHERHPIFGNIVDEVAYHEKYPTIYHLRKKLVDSTDKADLRLIYLALAHMIKFRGHFLIEGDLNPDNSDVDKLFIQLVQTYNQLFEENPINASGVDAKAILSARLSKSRRLENLIAQLPGEKKNGLFGNLIALSLGLTPNFKSNFDLAEDAKLQLSKDTYDDDLDNLLAQIGDQYADLFLAAKNLSDAILLSDILRVNTEITKAPLSASMIKRYDEHHQDLTLLKALVRQQLPEKYKEIFFDQSKNGYAGYIDGGASQEEFYKFIKPILEKMDGTEELLVKLNREDLLRKQRTFDNGSIPHQIHLGELHAILRRQEDFYPFLKDNREKIEKILTFRIPYYVGPLARGNSRFAWMTRKSEETITPWNFEEVVDKGASAQSFIERMTNFDKNLPNEKVLPKHSLLYEYFTVYNELTKVKYVTEGMRKPAFLSGEQKKAIVDLLFKTNRKVTVKQLKEDYFKKIECFDSVEISGVEDRFNASLGTYHDLLKIIKDKDFLDNEENEDILEDIVLTLTLFEDREMIEERLKTYAHLFDDKVMKQLKRRRYTGWGRLSRKLINGIRDKQSGKTILDFLKSDGFANRNFMQLIHDDSLTFKEDIQKAQVSGQGDSLHEHIANLAGSPAIKKGILQTVKVVDELVKVMGRHKPENIVIEMARENQTTQKGQKNSRERMKRIEEGIKELGSQILKEHPVENTQLQNEKLYLYYLQNGRDMYVDQELDINRLSDYDVDHIVPQSFLKDDSIDNKVLTRSDKARGKSDNVPSEEVVKKMKNYWRQLLNAKLITQRKFDNLTKAERGGLSELDKAGFIKRQLVETRQITKHVAQILDSRMNTKYDENDKLIREVKVITLKSKLVSDFRKDFQFYKVREINNYHHAHDAYLNAVVGTALIKKYPKLESEFVYGDYKVYDVRKMIAKSEQEIGKATAKYFFYSNIMNFFKTEITLANGEIRKRPLIETNGETGEIVWDKGRDFATVRKVLSMPQVNIVKKTEVQTGGFSKESILPKRNSDKLIARKKDWDPKKYGGFDSPTVAYSVLVVAKVEKGKSKKLKSVKELLGITIMERSSFEKNPIDFLEAKGYKEVKKDLIIKLPKYSLFELENGRKRMLASAGELQKGNELALPSKYVNFLYLASHYEKLKGSPEDNEQKQLFVEQHKHYLDEIIEQISEFSKRVILADANLDKVLSAYNKHRDKPIREQAENIIHLFTLTNLGAPAAFKYFDTTIDRKRYTSTKEVLDATLIHQSITGLYETRIDLSQLGGDGGGSSEAAAKPAPGGMDPLQLLQPLEAEIKGTKLKAHWNSGATITCVPQAFLEEEVPIKNIWIKTIHGEKEQPVYYLTFKIQGRKVEAEVISSPYDYILVSPSDIPWLMKKPLQLTTLVPLQEYEERLLKQTMLTGSYKEKLQSLFLKYDALWQHWENQVGHRRIKPHHIATGTVNPRPQKQYPINPKAKASIQTVINDLLKQGVLIQQNSIMNTPVYPVPKPDGKWRMVLDYREVNKTIPLIAAQNQHSAGILSSIFRGKYKTTLDLSNGFWAHSITPESYWLTAFTWLGQQYCWTRLPQGFLNSPALFTADVVDLLKEVPNVQVYVDDIYISHDDPREHLEQLEKVFSLLLNAGYVVSLKKSEIAQHEVEFLGFNITKEGRGLTETFKQKLLNITPPRDLKQLQSILGLLNFARNFIPNFSELVKPLYNIIATANGKYITWTTDNSQQLQNIISMLNSAENLEERNPEVRLIMKVNTSPSAGYIRFYNEFAKRPIMYLNYVYTKAEVKFTNTEKLLTTIHKGLIKALDLGMGQEILVYSPIVSMTKIQKTPLPERKALPIRWITWMSYLEDPRIQFHYDKTLPELQQVPTVTDDIIAKIKHPSEFSMVFYTDGSAIKHPNVNKSHNAGMGIAQVQFKPEFTVINTWSIPLGDHTAQLAEVAAVEFACKKALKIDGPVLIVTDSFYVAESVNKELPYWQSNGFFNNKKKPLKHVSKWKSIADCIQLKPDIIIIHEKGHQPTASTFHTEGNNLADKLATQGSYVVNAGKRTADGSEFEKRTADGSEFESPKKKAKVE

SEQ ID NO: 507 - protein, 2176 aa, synthetic construct
MPAAKRVKLDGGDKKYSIGLDIGTNSVGWAVITDEYKVPSKKFKVLGNTDRHSIKKNLIGALLFDSGETAEATRLKRTARRRYTRRKNRICYLQEIFSNEMAKVDDSFFHRLEESFLVEEDKKHERHPIFGNIVDEVAYHEKYPTIYHLRKKLVDSTDKADLRLIYLALAHMIKFRGHFLIEGDLNPDNSDVDKLFIQLVQTYNQLFEENPINASGVDAKAILSARLSKSRRLENLIAQLPGEKKNGLFGNLIALSLGLTPNFKSNFDLAEDAKLQLSKDTYDDDLDNLLAQIGDQYADLFLAAKNLSDAILLSDILRVNTEITKAPLSASMIKRYDEHHQDLTLLKALVRQQLPEKYKEIFFDQSKNGYAGYIDGGASQEEFYKFIKPILEKMDGTEELLVKLNREDLLRKQRTFDNGSIPHQIHLGELHAILRRQEDFYPFLKDNREKIEKILTFRIPYYVGPLARGNSRFAWMTRKSEETITPWNFEEVVDKGASAQSFIERMTNFDKNLPNEKVLPKHSLLYEYFTVYNELTKVKYVTEGMRKPAFLSGEQKKAIVDLLFKTNRKVTVKQLKEDYFKKIECFDSVEISGVEDRFNASLGTYHDLLKIIKDKDFLDNEENEDILEDIVLTLTLFEDREMIEERLKTYAHLFDDKVMKQLKRRRYTGWGRLSRKLINGIRDKQSGKTILDFLKSDGFANRNFMQLIHDDSLTFKEDIQKAQVSGQGDSLHEHIANLAGSPAIKKGILQTVKVVDELVKVMGRHKPENIVIEMARENQTTQKGQKNSRERMKRIEEGIKELGSQILKEHPVENTQLQNEKLYLYYLQNGRDMYVDQELDINRLSDYDVDHIVPQSFLKDDSIDNKVLTRSDKARGKSDNVPSEEVVKKMKNYWRQLLNAKLITQRKFDNLTKAERGGLSELDKAGFIKRQLVETRQITKHVAQILDSRMNTKYDENDKLIREVKVITLKSKLVSDFRKDFQFYKVREINNYHHAHDAYLNAVVGTALIKKYPKLESEFVYGDYKVYDVRKMIAKSEQEIGKATAKYFFYSNIMNFFKTEITLANGEIRKRPLIETNGETGEIVWDKGRDFATVRKVLSMPQVNIVKKTEVQTGGFSKESILPKRNSDKLIARKKDWDPKKYGGFDSPTVAYSVLVVAKVEKGKSKKLKSVKELLGITIMERSSFEKNPIDFLEAKGYKEVKKDLIIKLPKYSLFELENGRKRMLASAGELQKGNELALPSKYVNFLYLASHYEKLKGSPEDNEQKQLFVEQHKHYLDEIIEQISEFSKRVILADANLDKVLSAYNKHRDKPIREQAENIIHLFTLTNLGAPAAFKYFDTTIDRKRYTSTKEVLDATLIHQSITGLYETRIDLSQLGGDGGGGGPAPEAAAKGGMDPLQLLQPLEAEIKGTKLKAHWNSGATITCVPQAFLEEEVPIKNIWIKTIHGEKEQPVYYLTFKIQGRKVEAEVISSPYDYILVSPSDIPWLMKKPLQLTTLVPLQEYEERLLKQTMLTGSYKEKLQSLFLKYDALWQHWENQVGHRRIKPHHIATGTVNPRPQKQYPINPKAKASIQTVINDLLKQGVLIQQNSIMNTPVYPVPKPDGKWRMVLDYREVNKTIPLIAAQNQHSAGILSSIFRGKYKTTLDLSNGFWAHSITPESYWLTAFTWLGQQYCWTRLPQGFLNSPALFTADVVDLLKEVPNVQVYVDDIYISHDDPREHLEQLEKVFSLLLNAGYVVSLKKSEIAQHEVEFLGFNITKEGRGLTETFKQKLLNITPPRDLKQLQSILGLLNFARNFIPNFSELVKPLYNIIATANGKYITWTTDNSQQLQNIISMLNSAENLEERNPEVRLIMKVNTSPSAGYIRFYNEFAKRPIMYLNYVYTKAEVKFTNTEKLLTTIHKGLIKALDLGMGQEILVYSPIVSMTKIQKTPLPERKALPIRWITWMSYLEDPRIQFHYDKTLPELQQVPTVTDDIIAKIKHPSEFSMVFYTDGSAIKHPNVNKSHNAGMGIAQVQFKPEFTVINTWSIPLGDHTAQLAEVAAVEFACKKALKIDGPVLIVTDSFYVAESVNKELPYWQSNGFFNNKKKPLKHVSKWKSIADCIQLKPDIIIIHEKGHQPTASTFHTEGNNLADKLATQGSYVVNAGKRTADGSEFEKRTADGSEFESPKKKAKVE

SEQ ID NO: 508 - protein, 2174 aa, synthetic construct
MPAAKRVKLDGGDKKYSIGLDIGTNSVGWAVITDEYKVPSKKFKVLGNTDRHSIKKNLIGALLFDSGETAEATRLKRTARRRYTRRKNRICYLQEIFSNEMAKVDDSFFHRLEESFLVEEDKKHERHPIFGNIVDEVAYHEKYPTIYHLRKKLVDSTDKADLRLIYLALAHMIKFRGHFLIEGDLNPDNSDVDKLFIQLVQTYNQLFEENPINASGVDAKAILSARLSKSRRLENLIAQLPGEKKNGLFGNLIALSLGLTPNFKSNFDLAEDAKLQLSKDTYDDDLDNLLAQIGDQYADLFLAAKNLSDAILLSDILRVNTEITKAPLSASMIKRYDEHHQDLTLLKALVRQQLPEKYKEIFFDQSKNGYAGYIDGGASQEEFYKFIKPILEKMDGTEELLVKLNREDLLRKQRTFDNGSIPHQIHLGELHAILRRQEDFYPFLKDNREKIEKILTFRIPYYVGPLARGNSRFAWMTRKSEETITPWNFEEVVDKGASAQSFIERMTNFDKNLPNEKVLPKHSLLYEYFTVYNELTKVKYVTEGMRKPAFLSGEQKKAIVDLLFKTNRKVTVKQLKEDYFKKIECFDSVEISGVEDRFNASLGTYHDLLKIIKDKDFLDNEENEDILEDIVLTLTLFEDREMIEERLKTYAHLFDDKVMKQLKRRRYTGWGRLSRKLINGIRDKQSGKTILDFLKSDGFANRNFMQLIHDDSLTFKEDIQKAQVSGQGDSLHEHIANLAGSPAIKKGILQTVKVVDELVKVMGRHKPENIVIEMARENQTTQKGQKNSRERMKRIEEGIKELGSQILKEHPVENTQLQNEKLYLYYLQNGRDMYVDQELDINRLSDYDVDHIVPQSFLKDDSIDNKVLTRSDKARGKSDNVPSEEVVKKMKNYWRQLLNAKLITQRKFDNLTKAERGGLSELDKAGFIKRQLVETRQITKHVAQILDSRMNTKYDENDKLIREVKVITLKSKLVSDFRKDFQFYKVREINNYHHAHDAYLNAVVGTALIKKYPKLESEFVYGDYKVYDVRKMIAKSEQEIGKATAKYFFYSNIMNFFKTEITLANGEIRKRPLIETNGETGEIVWDKGRDFATVRKVLSMPQVNIVKKTEVQTGGFSKESILPKRNSDKLIARKKDWDPKKYGGFDSPTVAYSVLVVAKVEKGKSKKLKSVKELLGITIMERSSFEKNPIDFLEAKGYKEVKKDLIIKLPKYSLFELENGRKRMLASAGELQKGNELALPSKYVNFLYLASHYEKLKGSPEDNEQKQLFVEQHKHYLDEIIEQISEFSKRVILADANLDKVLSAYNKHRDKPIREQAENIIHLFTLTNLGAPAAFKYFDTTIDRKRYTSTKEVLDATLIHQSITGLYETRIDLSQLGGDGGGSSGGGGGSGGMDPLQLLQPLEAEIKGTKLKAHWNSGATITCVPQAFLEEEVPIKNIWIKTIHGEKEQPVYYLTFKIQGRKVEAEVISSPYDYILVSPSDIPWLMKKPLQLTTLVPLQEYEERLLKQTMLTGSYKEKLQSLFLKYDALWQHWENQVGHRRIKPHHIATGTVNPRPQKQYPINPKAKASIQTVINDLLKQGVLIQQNSIMNTPVYPVPKPDGKWRMVLDYREVNKTIPLIAAQNQHSAGILSSIFRGKYKTTLDLSNGFWAHSITPESYWLTAFTWLGQQYCWTRLPQGFLNSPALFTADVVDLLKEVPNVQVYVDDIYISHDDPREHLEQLEKVFSLLLNAGYVVSLKKSEIAQHEVEFLGFNITKEGRGLTETFKQKLLNITPPRDLKQLQSILGLLNFARNFIPNFSELVKPLYNIIATANGKYITWTTDNSQQLQNIISMLNSAENLEERNPEVRLIMKVNTSPSAGYIRFYNEFAKRPIMYLNYVYTKAEVKFTNTEKLLTTIHKGLIKALDLGMGQEILVYSPIVSMTKIQKTPLPERKALPIRWITWMSYLEDPRIQFHYDKTLPELQQVPTVTDDIIAKIKHPSEFSMVFYTDGSAIKHPNVNKSHNAGMGIAQVQFKPEFTVINTWSIPLGDHTAQLAEVAAVEFACKKALKIDGPVLIVTDSFYVAESVNKELPYWQSNGFFNNKKKPLKHVSKWKSIADCIQLKPDIIIIHEKGHQPTASTFHTEGNNLADKLATQGSYVVNAGKRTADGSEFEKRTADGSEFESPKKKAKVE

SEQ ID NO: 509 - protein, 2183 aa, synthetic construct
MPAAKRVKLDGGDKKYSIGLDIGTNSVGWAVITDEYKVPSKKFKVLGNTDRHSIKKNLIGALLFDSGETAEATRLKRTARRRYTRRKNRICYLQEIFSNEMAKVDDSFFHRLEESFLVEEDKKHERHPIFGNIVDEVAYHEKYPTIYHLRKKLVDSTDKADLRLIYLALAHMIKFRGHFLIEGDLNPDNSDVDKLFIQLVQTYNQLFEENPINASGVDAKAILSARLSKSRRLENLIAQLPGEKKNGLFGNLIALSLGLTPNFKSNFDLAEDAKLQLSKDTYDDDLDNLLAQIGDQYADLFLAAKNLSDAILLSDILRVNTEITKAPLSASMIKRYDEHHQDLTLLKALVRQQLPEKYKEIFFDQSKNGYAGYIDGGASQEEFYKFIKPILEKMDGTEELLVKLNREDLLRKQRTFDNGSIPHQIHLGELHAILRRQEDFYPFLKDNREKIEKILTFRIPYYVGPLARGNSRFAWMTRKSEETITPWNFEEVVDKGASAQSFIERMTNFDKNLPNEKVLPKHSLLYEYFTVYNELTKVKYVTEGMRKPAFLSGEQKKAIVDLLFKTNRKVTVKQLKEDYFKKIECFDSVEISGVEDRFNASLGTYHDLLKIIKDKDFLDNEENEDILEDIVLTLTLFEDREMIEERLKTYAHLFDDKVMKQLKRRRYTGWGRLSRKLINGIRDKQSGKTILDFLKSDGFANRNFMQLIHDDSLTFKEDIQKAQVSGQGDSLHEHIANLAGSPAIKKGILQTVKVVDELVKVMGRHKPENIVIEMARENQTTQKGQKNSRERMKRIEEGIKELGSQILKEHPVENTQLQNEKLYLYYLQNGRDMYVDQELDINRLSDYDVDHIVPQSFLKDDSIDNKVLTRSDKARGKSDNVPSEEVVKKMKNYWRQLLNAKLITQRKFDNLTKAERGGLSELDKAGFIKRQLVETRQITKHVAQILDSRMNTKYDENDKLIREVKVITLKSKLVSDFRKDFQFYKVREINNYHHAHDAYLNAVVGTALIKKYPKLESEFVYGDYKVYDVRKMIAKSEQEIGKATAKYFFYSNIMNFFKTEITLANGEIRKRPLIETNGETGEIVWDKGRDFATVRKVLSMPQVNIVKKTEVQTGGFSKESILPKRNSDKLIARKKDWDPKKYGGFDSPTVAYSVLVVAKVEKGKSKKLKSVKELLGITIMERSSFEKNPIDFLEAKGYKEVKKDLIIKLPKYSLFELENGRKRMLASAGELQKGNELALPSKYVNFLYLASHYEKLKGSPEDNEQKQLFVEQHKHYLDEIIEQISEFSKRVILADANLDKVLSAYNKHRDKPIREQAENIIHLFTLTNLGAPAAFKYFDTTIDRKRYTSTKEVLDATLIHQSITGLYETRIDLSQLGGDGGGSSGSSGSSGSSGSSGSSGGMDPLQLLQPLEAEIKGTKLKAHWNSGATITCVPQAFLEEEVPIKNIWIKTIHGEKEQPVYYLTFKIQGRKVEAEVISSPYDYILVSPSDIPWLMKKPLQLTTLVPLQEYEERLLKQTMLTGSYKEKLQSLFLKYDALWQHWENQVGHRRIKPHHIATGTVNPRPQKQYPINPKAKASIQTVINDLLKQGVLIQQNSIMNTPVYPVPKPDGKWRMVLDYREVNKTIPLIAAQNQHSAGILSSIFRGKYKTTLDLSNGFWAHSITPESYWLTAFTWLGQQYCWTRLPQGFLNSPALFTADVVDLLKEVPNVQVYVDDIYISHDDPREHLEQLEKVFSLLLNAGYVVSLKKSEIAQHEVEFLGFNITKEGRGLTETFKQKLLNITPPRDLKQLQSILGLLNFARNFIPNFSELVKPLYNIIATANGKYITWTTDNSQQLQNIISMLNSAENLEERNPEVRLIMKVNTSPSAGYIRFYNEFAKRPIMYLNYVYTKAEVKFTNTEKLLTTIHKGLIKALDLGMGQEILVYSPIVSMTKIQKTPLPERKALPIRWITWMSYLEDPRIQFHYDKTLPELQQVPTVTDDIIAKIKHPSEFSMVFYTDGSAIKHPNVNKSHNAGMGIAQVQFKPEFTVINTWSIPLGDHTAQLAEVAAVEFACKKALKIDGPVLIVTDSFYVAESVNKELPYWQSNGFFNNKKKPLKHVSKWKSIADCIQLKPDIIIIHEKGHQPTASTFHTEGNNLADKLATQGSYVVNAGKRTADGSEFEKRTADGSEFESPKKKAKVE

SEQ ID NO: 510 - protein, 2176 aa, synthetic construct
MPAAKRVKLDGGDKKYSIGLDIGTNSVGWAVITDEYKVPSKKFKVLGNTDRHSIKKNLIGALLFDSGETAEATRLKRTARRRYTRRKNRICYLQEIFSNEMAKVDDSFFHRLEESFLVEEDKKHERHPIFGNIVDEVAYHEKYPTIYHLRKKLVDSTDKADLRLIYLALAHMIKFRGHFLIEGDLNPDNSDVDKLFIQLVQTYNQLFEENPINASGVDAKAILSARLSKSRRLENLIAQLPGEKKNGLFGNLIALSLGLTPNFKSNFDLAEDAKLQLSKDTYDDDLDNLLAQIGDQYADLFLAAKNLSDAILLSDILRVNTEITKAPLSASMIKRYDEHHQDLTLLKALVRQQLPEKYKEIFFDQSKNGYAGYIDGGASQEEFYKFIKPILEKMDGTEELLVKLNREDLLRKQRTFDNGSIPHQIHLGELHAILRRQEDFYPFLKDNREKIEKILTFRIPYYVGPLARGNSRFAWMTRKSEETITPWNFEEVVDKGASAQSFIERMTNFDKNLPNEKVLPKHSLLYEYFTVYNELTKVKYVTEGMRKPAFLSGEQKKAIVDLLFKTNRKVTVKQLKEDYFKKIECFDSVEISGVEDRFNASLGTYHDLLKIIKDKDFLDNEENEDILEDIVLTLTLFEDREMIEERLKTYAHLFDDKVMKQLKRRRYTGWGRLSRKLINGIRDKQSGKTILDFLKSDGFANRNFMQLIHDDSLTFKEDIQKAQVSGQGDSLHEHIANLAGSPAIKKGILQTVKVVDELVKVMGRHKPENIVIEMARENQTTQKGQKNSRERMKRIEEGIKELGSQILKEHPVENTQLQNEKLYLYYLQNGRDMYVDQELDINRLSDYDVDHIVPQSFLKDDSIDNKVLTRSDKARGKSDNVPSEEVVKKMKNYWRQLLNAKLITQRKFDNLTKAERGGLSELDKAGFIKRQLVETRQITKHVAQILDSRMNTKYDENDKLIREVKVITLKSKLVSDFRKDFQFYKVREINNYHHAHDAYLNAVVGTALIKKYPKLESEFVYGDYKVYDVRKMIAKSEQEIGKATAKYFFYSNIMNFFKTEITLANGEIRKRPLIETNGETGEIVWDKGRDFATVRKVLSMPQVNIVKKTEVQTGGFSKESILPKRNSDKLIARKKDWDPKKYGGFDSPTVAYSVLVVAKVEKGKSKKLKSVKELLGITIMERSSFEKNPIDFLEAKGYKEVKKDLIIKLPKYSLFELENGRKRMLASAGELQKGNELALPSKYVNFLYLASHYEKLKGSPEDNEQKQLFVEQHKHYLDEIIEQISEFSKRVILADANLDKVLSAYNKHRDKPIREQAENIIHLFTLTNLGAPAAFKYFDTTIDRKRYTSTKEVLDATLIHQSITGLYETRIDLSQLGGDGGPAPEAAAKGGGGGMDPLQLLQPLEAEIKGTKLKAHWNSGATITCVPQAFLEEEVPIKNIWIKTIHGEKEQPVYYLTFKIQGRKVEAEVISSPYDYILVSPSDIPWLMKKPLQLTTLVPLQEYEERLLKQTMLTGSYKEKLQSLFLKYDALWQHWENQVGHRRIKPHHIATGTVNPRPQKQYPINPKAKASIQTVINDLLKQGVLIQQNSIMNTPVYPVPKPDGKWRMVLDYREVNKTIPLIAAQNQHSAGILSSIFRGKYKTTLDLSNGFWAHSITPESYWLTAFTWLGQQYCWTRLPQGFLNSPALFTADVVDLLKEVPNVQVYVDDIYISHDDPREHLEQLEKVFSLLLNAGYVVSLKKSEIAQHEVEFLGFNITKEGRGLTETFKQKLLNITPPRDLKQLQSILGLLNFARNFIPNFSELVKPLYNIIATANGKYITWTTDNSQQLQNIISMLNSAENLEERNPEVRLIMKVNTSPSAGYIRFYNEFAKRPIMYLNYVYTKAEVKFTNTEKLLTTIHKGLIKALDLGMGQEILVYSPIVSMTKIQKTPLPERKALPIRWITWMSYLEDPRIQFHYDKTLPELQQVPTVTDDIIAKIKHPSEFSMVFYTDGSAIKHPNVNKSHNAGMGIAQVQFKPEFTVINTWSIPLGDHTAQLAEVAAVEFACKKALKIDGPVLIVTDSFYVAESVNKELPYWQSNGFFNNKKKPLKHVSKWKSIADCIQLKPDIIIIHEKGHQPTASTFHTEGNNLADKLATQGSYVVNAGKRTADGSEFEKRTADGSEFESPKKKAKVE

SEQ ID NO: 511 - protein, 2176 aa, synthetic construct
MPAAKRVKLDGGDKKYSIGLDIGTNSVGWAVITDEYKVPSKKFKVLGNTDRHSIKKNLIGALLFDSGETAEATRLKRTARRRYTRRKNRICYLQEIFSNEMAKVDDSFFHRLEESFLVEEDKKHERHPIFGNIVDEVAYHEKYPTIYHLRKKLVDSTDKADLRLIYLALAHMIKFRGHFLIEGDLNPDNSDVDKLFIQLVQTYNQLFEENPINASGVDAKAILSARLSKSRRLENLIAQLPGEKKNGLFGNLIALSLGLTPNFKSNFDLAEDAKLQLSKDTYDDDLDNLLAQIGDQYADLFLAAKNLSDAILLSDILRVNTEITKAPLSASMIKRYDEHHQDLTLLKALVRQQLPEKYKEIFFDQSKNGYAGYIDGGASQEEFYKFIKPILEKMDGTEELLVKLNREDLLRKQRTFDNGSIPHQIHLGELHAILRRQEDFYPFLKDNREKIEKILTFRIPYYVGPLARGNSRFAWMTRKSEETITPWNFEEVVDKGASAQSFIERMTNFDKNLPNEKVLPKHSLLYEYFTVYNELTKVKYVTEGMRKPAFLSGEQKKAIVDLLFKTNRKVTVKQLKEDYFKKIECFDSVEISGVEDRFNASLGTYHDLLKIIKDKDFLDNEENEDILEDIVLTLTLFEDREMIEERLKTYAHLFDDKVMKQLKRRRYTGWGRLSRKLINGIRDKQSGKTILDFLKSDGFANRNFMQLIHDDSLTFKEDIQKAQVSGQGDSLHEHIANLAGSPAIKKGILQTVKVVDELVKVMGRHKPENIVIEMARENQTTQKGQKNSRERMKRIEEGIKELGSQILKEHPVENTQLQNEKLYLYYLQNGRDMYVDQELDINRLSDYDVDHIVPQSFLKDDSIDNKVLTRSDKARGKSDNVPSEEVVKKMKNYWRQLLNAKLITQRKFDNLTKAERGGLSELDKAGFIKRQLVETRQITKHVAQILDSRMNTKYDENDKLIREVKVITLKSKLVSDFRKDFQFYKVREINNYHHAHDAYLNAVVGTALIKKYPKLESEFVYGDYKVYDVRKMIAKSEQEIGKATAKYFFYSNIMNFFKTEITLANGEIRKRPLIETNGETGEIVWDKGRDFATVRKVLSMPQVNIVKKTEVQTGGFSKESILPKRNSDKLIARKKDWDPKKYGGFDSPTVAYSVLVVAKVEKGKSKKLKSVKELLGITIMERSSFEKNPIDFLEAKGYKEVKKDLIIKLPKYSLFELENGRKRMLASAGELQKGNELALPSKYVNFLYLASHYEKLKGSPEDNEQKQLFVEQHKHYLDEIIEQISEFSKRVILADANLDKVLSAYNKHRDKPIREQAENIIHLFTLTNLGAPAAFKYFDTTIDRKRYTSTKEVLDATLIHQSITGLYETRIDLSQLGGDGGEAAAKGGGGSSGGMDPLQLLQPLEAEIKGTKLKAHWNSGATITCVPQAFLEEEVPIKNIWIKTIHGEKEQPVYYLTFKIQGRKVEAEVISSPYDYILVSPSDIPWLMKKPLQLTTLVPLQEYEERLLKQTMLTGSYKEKLQSLFLKYDALWQHWENQVGHRRIKPHHIATGTVNPRPQKQYPINPKAKASIQTVINDLLKQGVLIQQNSIMNTPVYPVPKPDGKWRMVLDYREVNKTIPLIAAQNQHSAGILSSIFRGKYKTTLDLSNGFWAHSITPESYWLTAFTWLGQQYCWTRLPQGFLNSPALFTADVVDLLKEVPNVQVYVDDIYISHDDPREHLEQLEKVFSLLLNAGYVVSLKKSEIAQHEVEFLGFNITKEGRGLTETFKQKLLNITPPRDLKQLQSILGLLNFARNFIPNFSELVKPLYNIIATANGKYITWTTDNSQQLQNIISMLNSAENLEERNPEVRLIMKVNTSPSAGYIRFYNEFAKRPIMYLNYVYTKAEVKFTNTEKLLTTIHKGLIKALDLGMGQEILVYSPIVSMTKIQKTPLPERKALPIRWITWMSYLEDPRIQFHYDKTLPELQQVPTVTDDIIAKIKHPSEFSMVFYTDGSAIKHPNVNKSHNAGMGIAQVQFKPEFTVINTWSIPLGDHTAQLAEVAAVEFACKKALKIDGPVLIVTDSFYVAESVNKELPYWQSNGFFNNKKKPLKHVSKWKSIADCIQLKPDIIIIHEKGHQPTASTFHTEGNNLADKLATQGSYVVNAGKRTADGSEFEKRTADGSEFESPKKKAKVE

SEQ ID NO: 512 - protein, 2171 aa, synthetic construct
MPAAKRVKLDGGDKKYSIGLDIGTNSVGWAVITDEYKVPSKKFKVLGNTDRHSIKKNLIGALLFDSGETAEATRLKRTARRRYTRRKNRICYLQEIFSNEMAKVDDSFFHRLEESFLVEEDKKHERHPIFGNIVDEVAYHEKYPTIYHLRKKLVDSTDKADLRLIYLALAHMIKFRGHFLIEGDLNPDNSDVDKLFIQLVQTYNQLFEENPINASGVDAKAILSARLSKSRRLENLIAQLPGEKKNGLFGNLIALSLGLTPNFKSNFDLAEDAKLQLSKDTYDDDLDNLLAQIGDQYADLFLAAKNLSDAILLSDILRVNTEITKAPLSASMIKRYDEHHQDLTLLKALVRQQLPEKYKEIFFDQSKNGYAGYIDGGASQEEFYKFIKPILEKMDGTEELLVKLNREDLLRKQRTFDNGSIPHQIHLGELHAILRRQEDFYPFLKDNREKIEKILTFRIPYYVGPLARGNSRFAWMTRKSEETITPWNFEEVVDKGASAQSFIERMTNFDKNLPNEKVLPKHSLLYEYFTVYNELTKVKYVTEGMRKPAFLSGEQKKAIVDLLFKTNRKVTVKQLKEDYFKKIECFDSVEISGVEDRFNASLGTYHDLLKIIKDKDFLDNEENEDILEDIVLTLTLFEDREMIEERLKTYAHLFDDKVMKQLKRRRYTGWGRLSRKLINGIRDKQSGKTILDFLKSDGFANRNFMQLIHDDSLTFKEDIQKAQVSGQGDSLHEHIANLAGSPAIKKGILQTVKVVDELVKVMGRHKPENIVIEMARENQTTQKGQKNSRERMKRIEEGIKELGSQILKEHPVENTQLQNEKLYLYYLQNGRDMYVDQELDINRLSDYDVDHIVPQSFLKDDSIDNKVLTRSDKARGKSDNVPSEEVVKKMKNYWRQLLNAKLITQRKFDNLTKAERGGLSELDKAGFIKRQLVETRQITKHVAQILDSRMNTKYDENDKLIREVKVITLKSKLVSDFRKDFQFYKVREINNYHHAHDAYLNAVVGTALIKKYPKLESEFVYGDYKVYDVRKMIAKSEQEIGKATAKYFFYSNIMNFFKTEITLANGEIRKRPLIETNGETGEIVWDKGRDFATVRKVLSMPQVNIVKKTEVQTGGFSKESILPKRNSDKLIARKKDWDPKKYGGFDSPTVAYSVLVVAKVEKGKSKKLKSVKELLGITIMERSSFEKNPIDFLEAKGYKEVKKDLIIKLPKYSLFELENGRKRMLASAGELQKGNELALPSKYVNFLYLASHYEKLKGSPEDNEQKQLFVEQHKHYLDEIIEQISEFSKRVILADANLDKVLSAYNKHRDKPIREQAENIIHLFTLTNLGAPAAFKYFDTTIDRKRYTSTKEVLDATLIHQSITGLYETRIDLSQLGGDGGGGGPAPGGMDPLQLLQPLEAEIKGTKLKAHWNSGATITCVPQAFLEEEVPIKNIWIKTIHGEKEQPVYYLTFKIQGRKVEAEVISSPYDYILVSPSDIPWLMKKPLQLTTLVPLQEYEERLLKQTMLTGSYKEKLQSLFLKYDALWQHWENQVGHRRIKPHHIATGTVNPRPQKQYPINPKAKASIQTVINDLLKQGVLIQQNSIMNTPVYPVPKPDGKWRMVLDYREVNKTIPLIAAQNQHSAGILSSIFRGKYKTTLDLSNGFWAHSITPESYWLTAFTWLGQQYCWTRLPQGFLNSPALFTADVVDLLKEVPNVQVYVDDIYISHDDPREHLEQLEKVFSLLLNAGYVVSLKKSEIAQHEVEFLGFNITKEGRGLTETFKQKLLNITPPRDLKQLQSILGLLNFARNFIPNFSELVKPLYNIIATANGKYITWTTDNSQQLQNIISMLNSAENLEERNPEVRLIMKVNTSPSAGYIRFYNEFAKRPIMYLNYVYTKAEVKFTNTEKLLTTIHKGLIKALDLGMGQEILVYSPIVSMTKIQKTPLPERKALPIRWITWMSYLEDPRIQFHYDKTLPELQQVPTVTDDIIAKIKHPSEFSMVFYTDGSAIKHPNVNKSHNAGMGIAQVQFKPEFTVINTWSIPLGDHTAQLAEVAAVEFACKKALKIDGPVLIVTDSFYVAESVNKELPYWQSNGFFNNKKKPLKHVSKWKSIADCIQLKPDIIIIHEKGHQPTASTFHTEGNNLADKLATQGSYVVNAGKRTADGSEFEKRTADGSEFESPKKKAKVE

SEQ ID NO: 513 - protein, 2176 aa, synthetic construct
MPAAKRVKLDGGDKKYSIGLDIGTNSVGWAVITDEYKVPSKKFKVLGNTDRHSIKKNLIGALLFDSGETAEATRLKRTARRRYTRRKNRICYLQEIFSNEMAKVDDSFFHRLEESFLVEEDKKHERHPIFGNIVDEVAYHEKYPTIYHLRKKLVDSTDKADLRLIYLALAHMIKFRGHFLIEGDLNPDNSDVDKLFIQLVQTYNQLFEENPINASGVDAKAILSARLSKSRRLENLIAQLPGEKKNGLFGNLIALSLGLTPNFKSNFDLAEDAKLQLSKDTYDDDLDNLLAQIGDQYADLFLAAKNLSDAILLSDILRVNTEITKAPLSASMIKRYDEHHQDLTLLKALVRQQLPEKYKEIFFDQSKNGYAGYIDGGASQEEFYKFIKPILEKMDGTEELLVKLNREDLLRKQRTFDNGSIPHQIHLGELHAILRRQEDFYPFLKDNREKIEKILTFRIPYYVGPLARGNSRFAWMTRKSEETITPWNFEEVVDKGASAQSFIERMTNFDKNLPNEKVLPKHSLLYEYFTVYNELTKVKYVTEGMRKPAFLSGEQKKAIVDLLFKTNRKVTVKQLKEDYFKKIECFDSVEISGVEDRFNASLGTYHDLLKIIKDKDFLDNEENEDILEDIVLTLTLFEDREMIEERLKTYAHLFDDKVMKQLKRRRYTGWGRLSRKLINGIRDKQSGKTILDFLKSDGFANRNFMQLIHDDSLTFKEDIQKAQVSGQGDSLHEHIANLAGSPAIKKGILQTVKVVDELVKVMGRHKPENIVIEMARENQTTQKGQKNSRERMKRIEEGIKELGSQILKEHPVENTQLQNEKLYLYYLQNGRDMYVDQELDINRLSDYDVDHIVPQSFLKDDSIDNKVLTRSDKARGKSDNVPSEEVVKKMKNYWRQLLNAKLITQRKFDNLTKAERGGLSELDKAGFIKRQLVETRQITKHVAQILDSRMNTKYDENDKLIREVKVITLKSKLVSDFRKDFQFYKVREINNYHHAHDAYLNAVVGTALIKKYPKLESEFVYGDYKVYDVRKMIAKSEQEIGKATAKYFFYSNIMNFFKTEITLANGEIRKRPLIETNGETGEIVWDKGRDFATVRKVLSMPQVNIVKKTEVQTGGFSKESILPKRNSDKLIARKKDWDPKKYGGFDSPTVAYSVLVVAKVEKGKSKKLKSVKELLGITIMERSSFEKNPIDFLEAKGYKEVKKDLIIKLPKYSLFELENGRKRMLASAGELQKGNELALPSKYVNFLYLASHYEKLKGSPEDNEQKQLFVEQHKHYLDEIIEQISEFSKRVILADANLDKVLSAYNKHRDKPIREQAENIIHLFTLTNLGAPAAFKYFDTTIDRKRYTSTKEVLDATLIHQSITGLYETRIDLSQLGGDGGEAAAKGGSGGGGGMDPLQLLQPLEAEIKGTKLKAHWNSGATITCVPQAFLEEEVPIKNIWIKTIHGEKEQPVYYLTFKIQGRKVEAEVISSPYDYILVSPSDIPWLMKKPLQLTTLVPLQEYEERLLKQTMLTGSYKEKLQSLFLKYDALWQHWENQVGHRRIKPHHIATGTVNPRPQKQYPINPKAKASIQTVINDLLKQGVLIQQNSIMNTPVYPVPKPDGKWRMVLDYREVNKTIPLIAAQNQHSAGILSSIFRGKYKTTLDLSNGFWAHSITPESYWLTAFTWLGQQYCWTRLPQGFLNSPALFTADVVDLLKEVPNVQVYVDDIYISHDDPREHLEQLEKVFSLLLNAGYVVSLKKSEIAQHEVEFLGFNITKEGRGLTETFKQKLLNITPPRDLKQLQSILGLLNFARNFIPNFSELVKPLYNIIATANGKYITWTTDNSQQLQNIISMLNSAENLEERNPEVRLIMKVNTSPSAGYIRFYNEFAKRPIMYLNYVYTKAEVKFTNTEKLLTTIHKGLIKALDLGMGQEILVYSPIVSMTKIQKTPLPERKALPIRWITWMSYLEDPRIQFHYDKTLPELQQVPTVTDDIIAKIKHPSEFSMVFYTDGSAIKHPNVNKSHNAGMGIAQVQFKPEFTVINTWSIPLGDHTAQLAEVAAVEFACKKALKIDGPVLIVTDSFYVAESVNKELPYWQSNGFFNNKKKPLKHVSKWKSIADCIQLKPDIIIIHEKGHQPTASTFHTEGNNLADKLATQGSYVVNAGKRTADGSEFEKRTADGSEFESPKKKAKVE

SEQ ID NO: 514 - protein, 2174 aa, synthetic construct
MPAAKRVKLDGGDKKYSIGLDIGTNSVGWAVITDEYKVPSKKFKVLGNTDRHSIKKNLIGALLFDSGETAEATRLKRTARRRYTRRKNRICYLQEIFSNEMAKVDDSFFHRLEESFLVEEDKKHERHPIFGNIVDEVAYHEKYPTIYHLRKKLVDSTDKADLRLIYLALAHMIKFRGHFLIEGDLNPDNSDVDKLFIQLVQTYNQLFEENPINASGVDAKAILSARLSKSRRLENLIAQLPGEKKNGLFGNLIALSLGLTPNFKSNFDLAEDAKLQLSKDTYDDDLDNLLAQIGDQYADLFLAAKNLSDAILLSDILRVNTEITKAPLSASMIKRYDEHHQDLTLLKALVRQQLPEKYKEIFFDQSKNGYAGYIDGGASQEEFYKFIKPILEKMDGTEELLVKLNREDLLRKQRTFDNGSIPHQIHLGELHAILRRQEDFYPFLKDNREKIEKILTFRIPYYVGPLARGNSRFAWMTRKSEETITPWNFEEVVDKGASAQSFIERMTNFDKNLPNEKVLPKHSLLYEYFTVYNELTKVKYVTEGMRKPAFLSGEQKKAIVDLLFKTNRKVTVKQLKEDYFKKIECFDSVEISGVEDRFNASLGTYHDLLKIIKDKDFLDNEENEDILEDIVLTLTLFEDREMIEERLKTYAHLFDDKVMKQLKRRRYTGWGRLSRKLINGIRDKQSGKTILDFLKSDGFANRNFMQLIHDDSLTFKEDIQKAQVSGQGDSLHEHIANLAGSPAIKKGILQTVKVVDELVKVMGRHKPENIVIEMARENQTTQKGQKNSRERMKRIEEGIKELGSQILKEHPVENTQLQNEKLYLYYLQNGRDMYVDQELDINRLSDYDVDHIVPQSFLKDDSIDNKVLTRSDKARGKSDNVPSEEVVKKMKNYWRQLLNAKLITQRKFDNLTKAERGGLSELDKAGFIKRQLVETRQITKHVAQILDSRMNTKYDENDKLIREVKVITLKSKLVSDFRKDFQFYKVREINNYHHAHDAYLNAVVGTALIKKYPKLESEFVYGDYKVYDVRKMIAKSEQEIGKATAKYFFYSNIMNFFKTEITLANGEIRKRPLIETNGETGEIVWDKGRDFATVRKVLSMPQVNIVKKTEVQTGGFSKESILPKRNSDKLIARKKDWDPKKYGGFDSPTVAYSVLVVAKVEKGKSKKLKSVKELLGITIMERSSFEKNPIDFLEAKGYKEVKKDLIIKLPKYSLFELENGRKRMLASAGELQKGNELALPSKYVNFLYLASHYEKLKGSPEDNEQKQLFVEQHKHYLDEIIEQISEFSKRVILADANLDKVLSAYNKHRDKPIREQAENIIHLFTLTNLGAPAAFKYFDTTIDRKRYTSTKEVLDATLIHQSITGLYETRIDLSQLGGDGGGGGPAPGGSGGMDPLQLLQPLEAEIKGTKLKAHWNSGATITCVPQAFLEEEVPIKNIWIKTIHGEKEQPVYYLTFKIQGRKVEAEVISSPYDYILVSPSDIPWLMKKPLQLTTLVPLQEYEERLLKQTMLTGSYKEKLQSLFLKYDALWQHWENQVGHRRIKPHHIATGTVNPRPQKQYPINPKAKASIQTVINDLLKQGVLIQQNSIMNTPVYPVPKPDGKWRMVLDYREVNKTIPLIAAQNQHSAGILSSIFRGKYKTTLDLSNGFWAHSITPESYWLTAFTWLGQQYCWTRLPQGFLNSPALFTADVVDLLKEVPNVQVYVDDIYISHDDPREHLEQLEKVFSLLLNAGYVVSLKKSEIAQHEVEFLGFNITKEGRGLTETFKQKLLNITPPRDLKQLQSILGLLNFARNFIPNFSELVKPLYNIIATANGKYITWTTDNSQQLQNIISMLNSAENLEERNPEVRLIMKVNTSPSAGYIRFYNEFAKRPIMYLNYVYTKAEVKFTNTEKLLTTIHKGLIKALDLGMGQEILVYSPIVSMTKIQKTPLPERKALPIRWITWMSYLEDPRIQFHYDKTLPELQQVPTVTDDIIAKIKHPSEFSMVFYTDGSAIKHPNVNKSHNAGMGIAQVQFKPEFTVINTWSIPLGDHTAQLAEVAAVEFACKKALKIDGPVLIVTDSFYVAESVNKELPYWQSNGFFNNKKKPLKHVSKWKSIADCIQLKPDIIIIHEKGHQPTASTFHTEGNNLADKLATQGSYVVNAGKRTADGSEFEKRTADGSEFESPKKKAKVE

SEQ ID NO: 515 - protein, 2174 aa, synthetic construct
MPAAKRVKLDGGDKKYSIGLDIGTNSVGWAVITDEYKVPSKKFKVLGNTDRHSIKKNLIGALLFDSGETAEATRLKRTARRRYTRRKNRICYLQEIFSNEMAKVDDSFFHRLEESFLVEEDKKHERHPIFGNIVDEVAYHEKYPTIYHLRKKLVDSTDKADLRLIYLALAHMIKFRGHFLIEGDLNPDNSDVDKLFIQLVQTYNQLFEENPINASGVDAKAILSARLSKSRRLENLIAQLPGEKKNGLFGNLIALSLGLTPNFKSNFDLAEDAKLQLSKDTYDDDLDNLLAQIGDQYADLFLAAKNLSDAILLSDILRVNTEITKAPLSASMIKRYDEHHQDLTLLKALVRQQLPEKYKEIFFDQSKNGYAGYIDGGASQEEFYKFIKPILEKMDGTEELLVKLNREDLLRKQRTFDNGSIPHQIHLGELHAILRRQEDFYPFLKDNREKIEKILTFRIPYYVGPLARGNSRFAWMTRKSEETITPWNFEEVVDKGASAQSFIERMTNFDKNLPNEKVLPKHSLLYEYFTVYNELTKVKYVTEGMRKPAFLSGEQKKAIVDLLFKTNRKVTVKQLKEDYFKKIECFDSVEISGVEDRFNASLGTYHDLLKIIKDKDFLDNEENEDILEDIVLTLTLFEDREMIEERLKTYAHLFDDKVMKQLKRRRYTGWGRLSRKLINGIRDKQSGKTILDFLKSDGFANRNFMQLIHDDSLTFKEDIQKAQVSGQGDSLHEHIANLAGSPAIKKGILQTVKVVDELVKVMGRHKPENIVIEMARENQTTQKGQKNSRERMKRIEEGIKELGSQILKEHPVENTQLQNEKLYLYYLQNGRDMYVDQELDINRLSDYDVDHIVPQSFLKDDSIDNKVLTRSDKARGKSDNVPSEEVVKKMKNYWRQLLNAKLITQRKFDNLTKAERGGLSELDKAGFIKRQLVETRQITKHVAQILDSRMNTKYDENDKLIREVKVITLKSKLVSDFRKDFQFYKVREINNYHHAHDAYLNAVVGTALIKKYPKLESEFVYGDYKVYDVRKMIAKSEQEIGKATAKYFFYSNIMNFFKTEITLANGEIRKRPLIETNGETGEIVWDKGRDFATVRKVLSMPQVNIVKKTEVQTGGFSKESILPKRNSDKLIARKKDWDPKKYGGFDSPTVAYSVLVVAKVEKGKSKKLKSVKELLGITIMERSSFEKNPIDFLEAKGYKEVKKDLIIKLPKYSLFELENGRKRMLASAGELQKGNELALPSKYVNFLYLASHYEKLKGSPEDNEQKQLFVEQHKHYLDEIIEQISEFSKRVILADANLDKVLSAYNKHRDKPIREQAENIIHLFTLTNLGAPAAFKYFDTTIDRKRYTSTKEVLDATLIHQSITGLYETRIDLSQLGGDGGGSSGSSGSSGGMDPLQLLQPLEAEIKGTKLKAHWNSGATITCVPQAFLEEEVPIKNIWIKTIHGEKEQPVYYLTFKIQGRKVEAEVISSPYDYILVSPSDIPWLMKKPLQLTTLVPLQEYEERLLKQTMLTGSYKEKLQSLFLKYDALWQHWENQVGHRRIKPHHIATGTVNPRPQKQYPINPKAKASIQTVINDLLKQGVLIQQNSIMNTPVYPVPKPDGKWRMVLDYREVNKTIPLIAAQNQHSAGILSSIFRGKYKTTLDLSNGFWAHSITPESYWLTAFTWLGQQYCWTRLPQGFLNSPALFTADVVDLLKEVPNVQVYVDDIYISHDDPREHLEQLEKVFSLLLNAGYVVSLKKSEIAQHEVEFLGFNITKEGRGLTETFKQKLLNITPPRDLKQLQSILGLLNFARNFIPNFSELVKPLYNIIATANGKYITWTTDNSQQLQNIISMLNSAENLEERNPEVRLIMKVNTSPSAGYIRFYNEFAKRPIMYLNYVYTKAEVKFTNTEKLLTTIHKGLIKALDLGMGQEILVYSPIVSMTKIQKTPLPERKALPIRWITWMSYLEDPRIQFHYDKTLPELQQVPTVTDDIIAKIKHPSEFSMVFYTDGSAIKHPNVNKSHNAGMGIAQVQFKPEFTVINTWSIPLGDHTAQLAEVAAVEFACKKALKIDGPVLIVTDSFYVAESVNKELPYWQSNGFFNNKKKPLKHVSKWKSIADCIQLKPDIIIIHEKGHQPTASTFHTEGNNLADKLATQGSYVVNAGKRTADGSEFEKRTADGSEFESPKKKAKVE

SEQ ID NO: 516 - protein, 2171 aa, synthetic construct
MPAAKRVKLDGGDKKYSIGLDIGTNSVGWAVITDEYKVPSKKFKVLGNTDRHSIKKNLIGALLFDSGETAEATRLKRTARRRYTRRKNRICYLQEIFSNEMAKVDDSFFHRLEESFLVEEDKKHERHPIFGNIVDEVAYHEKYPTIYHLRKKLVDSTDKADLRLIYLALAHMIKFRGHFLIEGDLNPDNSDVDKLFIQLVQTYNQLFEENPINASGVDAKAILSARLSKSRRLENLIAQLPGEKKNGLFGNLIALSLGLTPNFKSNFDLAEDAKLQLSKDTYDDDLDNLLAQIGDQYADLFLAAKNLSDAILLSDILRVNTEITKAPLSASMIKRYDEHHQDLTLLKALVRQQLPEKYKEIFFDQSKNGYAGYIDGGASQEEFYKFIKPILEKMDGTEELLVKLNREDLLRKQRTFDNGSIPHQIHLGELHAILRRQEDFYPFLKDNREKIEKILTFRIPYYVGPLARGNSRFAWMTRKSEETITPWNFEEVVDKGASAQSFIERMTNFDKNLPNEKVLPKHSLLYEYFTVYNELTKVKYVTEGMRKPAFLSGEQKKAIVDLLFKTNRKVTVKQLKEDYFKKIECFDSVEISGVEDRFNASLGTYHDLLKIIKDKDFLDNEENEDILEDIVLTLTLFEDREMIEERLKTYAHLFDDKVMKQLKRRRYTGWGRLSRKLINGIRDKQSGKTILDFLKSDGFANRNFMQLIHDDSLTFKEDIQKAQVSGQGDSLHEHIANLAGSPAIKKGILQTVKVVDELVKVMGRHKPENIVIEMARENQTTQKGQKNSRERMKRIEEGIKELGSQILKEHPVENTQLQNEKLYLYYLQNGRDMYVDQELDINRLSDYDVDHIVPQSFLKDDSIDNKVLTRSDKARGKSDNVPSEEVVKKMKNYWRQLLNAKLITQRKFDNLTKAERGGLSELDKAGFIKRQLVETRQITKHVAQILDSRMNTKYDENDKLIREVKVITLKSKLVSDFRKDFQFYKVREINNYHHAHDAYLNAVVGTALIKKYPKLESEFVYGDYKVYDVRKMIAKSEQEIGKATAKYFFYSNIMNFFKTEITLANGEIRKRPLIETNGETGEIVWDKGRDFATVRKVLSMPQVNIVKKTEVQTGGFSKESILPKRNSDKLIARKKDWDPKKYGGFDSPTVAYSVLVVAKVEKGKSKKLKSVKELLGITIMERSSFEKNPIDFLEAKGYKEVKKDLIIKLPKYSLFELENGRKRMLASAGELQKGNELALPSKYVNFLYLASHYEKLKGSPEDNEQKQLFVEQHKHYLDEIIEQISEFSKRVILADANLDKVLSAYNKHRDKPIREQAENIIHLFTLTNLGAPAAFKYFDTTIDRKRYTSTKEVLDATLIHQSITGLYETRIDLSQLGGDGGPAPGGGGGMDPLQLLQPLEAEIKGTKLKAHWNSGATITCVPQAFLEEEVPIKNIWIKTIHGEKEQPVYYLTFKIQGRKVEAEVISSPYDYILVSPSDIPWLMKKPLQLTTLVPLQEYEERLLKQTMLTGSYKEKLQSLFLKYDALWQHWENQVGHRRIKPHHIATGTVNPRPQKQYPINPKAKASIQTVINDLLKQGVLIQQNSIMNTPVYPVPKPDGKWRMVLDYREVNKTIPLIAAQNQHSAGILSSIFRGKYKTTLDLSNGFWAHSITPESYWLTAFTWLGQQYCWTRLPQGFLNSPALFTADVVDLLKEVPNVQVYVDDIYISHDDPREHLEQLEKVFSLLLNAGYVVSLKKSEIAQHEVEFLGFNITKEGRGLTETFKQKLLNITPPRDLKQLQSILGLLNFARNFIPNFSELVKPLYNIIATANGKYITWTTDNSQQLQNIISMLNSAENLEERNPEVRLIMKVNTSPSAGYIRFYNEFAKRPIMYLNYVYTKAEVKFTNTEKLLTTIHKGLIKALDLGMGQEILVYSPIVSMTKIQKTPLPERKALPIRWITWMSYLEDPRIQFHYDKTLPELQQVPTVTDDIIAKIKHPSEFSMVFYTDGSAIKHPNVNKSHNAGMGIAQVQFKPEFTVINTWSIPLGDHTAQLAEVAAVEFACKKALKIDGPVLIVTDSFYVAESVNKELPYWQSNGFFNNKKKPLKHVSKWKSIADCIQLKPDIIIIHEKGHQPTASTFHTEGNNLADKLATQGSYVVNAGKRTADGSEFEKRTADGSEFESPKKKAKVE

SEQ ID NO: 517 - protein, 2176 aa, synthetic construct
MPAAKRVKLDGGDKKYSIGLDIGTNSVGWAVITDEYKVPSKKFKVLGNTDRHSIKKNLIGALLFDSGETAEATRLKRTARRRYTRRKNRICYLQEIFSNEMAKVDDSFFHRLEESFLVEEDKKHERHPIFGNIVDEVAYHEKYPTIYHLRKKLVDSTDKADLRLIYLALAHMIKFRGHFLIEGDLNPDNSDVDKLFIQLVQTYNQLFEENPINASGVDAKAILSARLSKSRRLENLIAQLPGEKKNGLFGNLIALSLGLTPNFKSNFDLAEDAKLQLSKDTYDDDLDNLLAQIGDQYADLFLAAKNLSDAILLSDILRVNTEITKAPLSASMIKRYDEHHQDLTLLKALVRQQLPEKYKEIFFDQSKNGYAGYIDGGASQEEFYKFIKPILEKMDGTEELLVKLNREDLLRKQRTFDNGSIPHQIHLGELHAILRRQEDFYPFLKDNREKIEKILTFRIPYYVGPLARGNSRFAWMTRKSEETITPWNFEEVVDKGASAQSFIERMTNFDKNLPNEKVLPKHSLLYEYFTVYNELTKVKYVTEGMRKPAFLSGEQKKAIVDLLFKTNRKVTVKQLKEDYFKKIECFDSVEISGVEDRFNASLGTYHDLLKIIKDKDFLDNEENEDILEDIVLTLTLFEDREMIEERLKTYAHLFDDKVMKQLKRRRYTGWGRLSRKLINGIRDKQSGKTILDFLKSDGFANRNFMQLIHDDSLTFKEDIQKAQVSGQGDSLHEHIANLAGSPAIKKGILQTVKVVDELVKVMGRHKPENIVIEMARENQTTQKGQKNSRERMKRIEEGIKELGSQILKEHPVENTQLQNEKLYLYYLQNGRDMYVDQELDINRLSDYDVDHIVPQSFLKDDSIDNKVLTRSDKARGKSDNVPSEEVVKKMKNYWRQLLNAKLITQRKFDNLTKAERGGLSELDKAGFIKRQLVETRQITKHVAQILDSRMNTKYDENDKLIREVKVITLKSKLVSDFRKDFQFYKVREINNYHHAHDAYLNAVVGTALIKKYPKLESEFVYGDYKVYDVRKMIAKSEQEIGKATAKYFFYSNIMNFFKTEITLANGEIRKRPLIETNGETGEIVWDKGRDFATVRKVLSMPQVNIVKKTEVQTGGFSKESILPKRNSDKLIARKKDWDPKKYGGFDSPTVAYSVLVVAKVEKGKSKKLKSVKELLGITIMERSSFEKNPIDFLEAKGYKEVKKDLIIKLPKYSLFELENGRKRMLASAGELQKGNELALPSKYVNFLYLASHYEKLKGSPEDNEQKQLFVEQHKHYLDEIIEQISEFSKRVILADANLDKVLSAYNKHRDKPIREQAENIIHLFTLTNLGAPAAFKYFDTTIDRKRYTSTKEVLDATLIHQSITGLYETRIDLSQLGGDGGEAAAKGSSGGSGGMDPLQLLQPLEAEIKGTKLKAHWNSGATITCVPQAFLEEEVPIKNIWIKTIHGEKEQPVYYLTFKIQGRKVEAEVISSPYDYILVSPSDIPWLMKKPLQLTTLVPLQEYEERLLKQTMLTGSYKEKLQSLFLKYDALWQHWENQVGHRRIKPHHIATGTVNPRPQKQYPINPKAKASIQTVINDLLKQGVLIQQNSIMNTPVYPVPKPDGKWRMVLDYREVNKTIPLIAAQNQHSAGILSSIFRGKYKTTLDLSNGFWAHSITPESYWLTAFTWLGQQYCWTRLPQGFLNSPALFTADVVDLLKEVPNVQVYVDDIYISHDDPREHLEQLEKVFSLLLNAGYVVSLKKSEIAQHEVEFLGFNITKEGRGLTETFKQKLLNITPPRDLKQLQSILGLLNFARNFIPNFSELVKPLYNIIATANGKYITWTTDNSQQLQNIISMLNSAENLEERNPEVRLIMKVNTSPSAGYIRFYNEFAKRPIMYLNYVYTKAEVKFTNTEKLLTTIHKGLIKALDLGMGQEILVYSPIVSMTKIQKTPLPERKALPIRWITWMSYLEDPRIQFHYDKTLPELQQVPTVTDDIIAKIKHPSEFSMVFYTDGSAIKHPNVNKSHNAGMGIAQVQFKPEFTVINTWSIPLGDHTAQLAEVAAVEFACKKALKIDGPVLIVTDSFYVAESVNKELPYWQSNGFFNNKKKPLKHVSKWKSIADCIQLKPDIIIIHEKGHQPTASTFHTEGNNLADKLATQGSYVVNAGKRTADGSEFEKRTADGSEFESPKKKAKVE

SEQ ID NO: 518 - protein, 2174 aa, synthetic construct
MPAAKRVKLDGGDKKYSIGLDIGTNSVGWAVITDEYKVPSKKFKVLGNTDRHSIKKNLIGALLFDSGETAEATRLKRTARRRYTRRKNRICYLQEIFSNEMAKVDDSFFHRLEESFLVEEDKKHERHPIFGNIVDEVAYHEKYPTIYHLRKKLVDSTDKADLRLIYLALAHMIKFRGHFLIEGDLNPDNSDVDKLFIQLVQTYNQLFEENPINASGVDAKAILSARLSKSRRLENLIAQLPGEKKNGLFGNLIALSLGLTPNFKSNFDLAEDAKLQLSKDTYDDDLDNLLAQIGDQYADLFLAAKNLSDAILLSDILRVNTEITKAPLSASMIKRYDEHHQDLTLLKALVRQQLPEKYKEIFFDQSKNGYAGYIDGGASQEEFYKFIKPILEKMDGTEELLVKLNREDLLRKQRTFDNGSIPHQIHLGELHAILRRQEDFYPFLKDNREKIEKILTFRIPYYVGPLARGNSRFAWMTRKSEETITPWNFEEVVDKGASAQSFIERMTNFDKNLPNEKVLPKHSLLYEYFTVYNELTKVKYVTEGMRKPAFLSGEQKKAIVDLLFKTNRKVTVKQLKEDYFKKIECFDSVEISGVEDRFNASLGTYHDLLKIIKDKDFLDNEENEDILEDIVLTLTLFEDREMIEERLKTYAHLFDDKVMKQLKRRRYTGWGRLSRKLINGIRDKQSGKTILDFLKSDGFANRNFMQLIHDDSLTFKEDIQKAQVSGQGDSLHEHIANLAGSPAIKKGILQTVKVVDELVKVMGRHKPENIVIEMARENQTTQKGQKNSRERMKRIEEGIKELGSQILKEHPVENTQLQNEKLYLYYLQNGRDMYVDQELDINRLSDYDVDHIVPQSFLKDDSIDNKVLTRSDKARGKSDNVPSEEVVKKMKNYWRQLLNAKLITQRKFDNLTKAERGGLSELDKAGFIKRQLVETRQITKHVAQILDSRMNTKYDENDKLIREVKVITLKSKLVSDFRKDFQFYKVREINNYHHAHDAYLNAVVGTALIKKYPKLESEFVYGDYKVYDVRKMIAKSEQEIGKATAKYFFYSNIMNFFKTEITLANGEIRKRPLIETNGETGEIVWDKGRDFATVRKVLSMPQVNIVKKTEVQTGGFSKESILPKRNSDKLIARKKDWDPKKYGGFDSPTVAYSVLVVAKVEKGKSKKLKSVKELLGITIMERSSFEKNPIDFLEAKGYKEVKKDLIIKLPKYSLFELENGRKRMLASAGELQKGNELALPSKYVNFLYLASHYEKLKGSPEDNEQKQLFVEQHKHYLDEIIEQISEFSKRVILADANLDKVLSAYNKHRDKPIREQAENIIHLFTLTNLGAPAAFKYFDTTIDRKRYTSTKEVLDATLIHQSITGLYETRIDLSQLGGDGGGGSPAPGSSGGMDPLQLLQPLEAEIKGTKLKAHWNSGATITCVPQAFLEEEVPIKNIWIKTIHGEKEQPVYYLTFKIQGRKVEAEVISSPYDYILVSPSDIPWLMKKPLQLTTLVPLQEYEERLLKQTMLTGSYKEKLQSLFLKYDALWQHWENQVGHRRIKPHHIATGTVNPRPQKQYPINPKAKASIQTVINDLLKQGVLIQQNSIMNTPVYPVPKPDGKWRMVLDYREVNKTIPLIAAQNQHSAGILSSIFRGKYKTTLDLSNGFWAHSITPESYWLTAFTWLGQQYCWTRLPQGFLNSPALFTADVVDLLKEVPNVQVYVDDIYISHDDPREHLEQLEKVFSLLLNAGYVVSLKKSEIAQHEVEFLGFNITKEGRGLTETFKQKLLNITPPRDLKQLQSILGLLNFARNFIPNFSELVKPLYNIIATANGKYITWTTDNSQQLQNIISMLNSAENLEERNPEVRLIMKVNTSPSAGYIRFYNEFAKRPIMYLNYVYTKAEVKFTNTEKLLTTIHKGLIKALDLGMGQEILVYSPIVSMTKIQKTPLPERKALPIRWITWMSYLEDPRIQFHYDKTLPELQQVPTVTDDIIAKIKHPSEFSMVFYTDGSAIKHPNVNKSHNAGMGIAQVQFKPEFTVINTWSIPLGDHTAQLAEVAAVEFACKKALKIDGPVLIVTDSFYVAESVNKELPYWQSNGFFNNKKKPLKHVSKWKSIADCIQLKPDIIIIHEKGHQPTASTFHTEGNNLADKLATQGSYVVNAGKRTADGSEFEKRTADGSEFESPKKKAKVE

SEQ ID NO: 519 - protein, 2175 aa, synthetic construct
MPAAKRVKLDGGDKKYSIGLDIGTNSVGWAVITDEYKVPSKKFKVLGNTDRHSIKKNLIGALLFDSGETAEATRLKRTARRRYTRRKNRICYLQEIFSNEMAKVDDSFFHRLEESFLVEEDKKHERHPIFGNIVDEVAYHEKYPTIYHLRKKLVDSTDKADLRLIYLALAHMIKFRGHFLIEGDLNPDNSDVDKLFIQLVQTYNQLFEENPINASGVDAKAILSARLSKSRRLENLIAQLPGEKKNGLFGNLIALSLGLTPNFKSNFDLAEDAKLQLSKDTYDDDLDNLLAQIGDQYADLFLAAKNLSDAILLSDILRVNTEITKAPLSASMIKRYDEHHQDLTLLKALVRQQLPEKYKEIFFDQSKNGYAGYIDGGASQEEFYKFIKPILEKMDGTEELLVKLNREDLLRKQRTFDNGSIPHQIHLGELHAILRRQEDFYPFLKDNREKIEKILTFRIPYYVGPLARGNSRFAWMTRKSEETITPWNFEEVVDKGASAQSFIERMTNFDKNLPNEKVLPKHSLLYEYFTVYNELTKVKYVTEGMRKPAFLSGEQKKAIVDLLFKTNRKVTVKQLKEDYFKKIECFDSVEISGVEDRFNASLGTYHDLLKIIKDKDFLDNEENEDILEDIVLTLTLFEDREMIEERLKTYAHLFDDKVMKQLKRRRYTGWGRLSRKLINGIRDKQSGKTILDFLKSDGFANRNFMQLIHDDSLTFKEDIQKAQVSGQGDSLHEHIANLAGSPAIKKGILQTVKVVDELVKVMGRHKPENIVIEMARENQTTQKGQKNSRERMKRIEEGIKELGSQILKEHPVENTQLQNEKLYLYYLQNGRDMYVDQELDINRLSDYDVDHIVPQSFLKDDSIDNKVLTRSDKARGKSDNVPSEEVVKKMKNYWRQLLNAKLITQRKFDNLTKAERGGLSELDKAGFIKRQLVETRQITKHVAQILDSRMNTKYDENDKLIREVKVITLKSKLVSDFRKDFQFYKVREINNYHHAHDAYLNAVVGTALIKKYPKLESEFVYGDYKVYDVRKMIAKSEQEIGKATAKYFFYSNIMNFFKTEITLANGEIRKRPLIETNGETGEIVWDKGRDFATVRKVLSMPQVNIVKKTEVQTGGFSKESILPKRNSDKLIARKKDWDPKKYGGFDSPTVAYSVLVVAKVEKGKSKKLKSVKELLGITIMERSSFEKNPIDFLEAKGYKEVKKDLIIKLPKYSLFELENGRKRMLASAGELQKGNELALPSKYVNFLYLASHYEKLKGSPEDNEQKQLFVEQHKHYLDEIIEQISEFSKRVILADANLDKVLSAYNKHRDKPIREQAENIIHLFTLTNLGAPAAFKYFDTTIDRKRYTSTKEVLDATLIHQSITGLYETRIDLSQLGGDGGGGGGSGGGGSGGMDPLQLLQPLEAEIKGTKLKAHWNSGATITCVPQAFLEEEVPIKNIWIKTIHGEKEQPVYYLTFKIQGRKVEAEVISSPYDYILVSPSDIPWLMKKPLQLTTLVPLQEYEERLLKQTMLTGSYKEKLQSLFLKYDALWQHWENQVGHRRIKPHHIATGTVNPRPQKQYPINPKAKASIQTVINDLLKQGVLIQQNSIMNTPVYPVPKPDGKWRMVLDYREVNKTIPLIAAQNQHSAGILSSIFRGKYKTTLDLSNGFWAHSITPESYWLTAFTWLGQQYCWTRLPQGFLNSPALFTADVVDLLKEVPNVQVYVDDIYISHDDPREHLEQLEKVFSLLLNAGYVVSLKKSEIAQHEVEFLGFNITKEGRGLTETFKQKLLNITPPRDLKQLQSILGLLNFARNFIPNFSELVKPLYNIIATANGKYITWTTDNSQQLQNIISMLNSAENLEERNPEVRLIMKVNTSPSAGYIRFYNEFAKRPIMYLNYVYTKAEVKFTNTEKLLTTIHKGLIKALDLGMGQEILVYSPIVSMTKIQKTPLPERKALPIRWITWMSYLEDPRIQFHYDKTLPELQQVPTVTDDIIAKIKHPSEFSMVFYTDGSAIKHPNVNKSHNAGMGIAQVQFKPEFTVINTWSIPLGDHTAQLAEVAAVEFACKKALKIDGPVLIVTDSFYVAESVNKELPYWQSNGFFNNKKKPLKHVSKWKSIADCIQLKPDIIIIHEKGHQPTASTFHTEGNNLADKLATQGSYVVNAGKRTADGSEFEKRTADGSEFESPKKKAKVE

SEQ ID NO: 520 - protein, 2172 aa, synthetic construct
MPAAKRVKLDGGDKKYSIGLDIGTNSVGWAVITDEYKVPSKKFKVLGNTDRHSIKKNLIGALLFDSGETAEATRLKRTARRRYTRRKNRICYLQEIFSNEMAKVDDSFFHRLEESFLVEEDKKHERHPIFGNIVDEVAYHEKYPTIYHLRKKLVDSTDKADLRLIYLALAHMIKFRGHFLIEGDLNPDNSDVDKLFIQLVQTYNQLFEENPINASGVDAKAILSARLSKSRRLENLIAQLPGEKKNGLFGNLIALSLGLTPNFKSNFDLAEDAKLQLSKDTYDDDLDNLLAQIGDQYADLFLAAKNLSDAILLSDILRVNTEITKAPLSASMIKRYDEHHQDLTLLKALVRQQLPEKYKEIFFDQSKNGYAGYIDGGASQEEFYKFIKPILEKMDGTEELLVKLNREDLLRKQRTFDNGSIPHQIHLGELHAILRRQEDFYPFLKDNREKIEKILTFRIPYYVGPLARGNSRFAWMTRKSEETITPWNFEEVVDKGASAQSFIERMTNFDKNLPNEKVLPKHSLLYEYFTVYNELTKVKYVTEGMRKPAFLSGEQKKAIVDLLFKTNRKVTVKQLKEDYFKKIECFDSVEISGVEDRFNASLGTYHDLLKIIKDKDFLDNEENEDILEDIVLTLTLFEDREMIEERLKTYAHLFDDKVMKQLKRRRYTGWGRLSRKLINGIRDKQSGKTILDFLKSDGFANRNFMQLIHDDSLTFKEDIQKAQVSGQGDSLHEHIANLAGSPAIKKGILQTVKVVDELVKVMGRHKPENIVIEMARENQTTQKGQKNSRERMKRIEEGIKELGSQILKEHPVENTQLQNEKLYLYYLQNGRDMYVDQELDINRLSDYDVDHIVPQSFLKDDSIDNKVLTRSDKARGKSDNVPSEEVVKKMKNYWRQLLNAKLITQRKFDNLTKAERGGLSELDKAGFIKRQLVETRQITKHVAQILDSRMNTKYDENDKLIREVKVITLKSKLVSDFRKDFQFYKVREINNYHHAHDAYLNAVVGTALIKKYPKLESEFVYGDYKVYDVRKMIAKSEQEIGKATAKYFFYSNIMNFFKTEITLANGEIRKRPLIETNGETGEIVWDKGRDFATVRKVLSMPQVNIVKKTEVQTGGFSKESILPKRNSDKLIARKKDWDPKKYGGFDSPTVAYSVLVVAKVEKGKSKKLKSVKELLGITIMERSSFEKNPIDFLEAKGYKEVKKDLIIKLPKYSLFELENGRKRMLASAGELQKGNELALPSKYVNFLYLASHYEKLKGSPEDNEQKQLFVEQHKHYLDEIIEQISEFSKRVILADANLDKVLSAYNKHRDKPIREQAENIIHLFTLTNLGAPAAFKYFDTTIDRKRYTSTKEVLDATLIHQSITGLYETRIDLSQLGGDGGPAPAPAPGGMDPLQLLQPLEAEIKGTKLKAHWNSGATITCVPQAFLEEEVPIKNIWIKTIHGEKEQPVYYLTFKIQGRKVEAEVISSPYDYILVSPSDIPWLMKKPLQLTTLVPLQEYEERLLKQTMLTGSYKEKLQSLFLKYDALWQHWENQVGHRRIKPHHIATGTVNPRPQKQYPINPKAKASIQTVINDLLKQGVLIQQNSIMNTPVYPVPKPDGKWRMVLDYREVNKTIPLIAAQNQHSAGILSSIFRGKYKTTLDLSNGFWAHSITPESYWLTAFTWLGQQYCWTRLPQGFLNSPALFTADVVDLLKEVPNVQVYVDDIYISHDDPREHLEQLEKVFSLLLNAGYVVSLKKSEIAQHEVEFLGFNITKEGRGLTETFKQKLLNITPPRDLKQLQSILGLLNFARNFIPNFSELVKPLYNIIATANGKYITWTTDNSQQLQNIISMLNSAENLEERNPEVRLIMKVNTSPSAGYIRFYNEFAKRPIMYLNYVYTKAEVKFTNTEKLLTTIHKGLIKALDLGMGQEILVYSPIVSMTKIQKTPLPERKALPIRWITWMSYLEDPRIQFHYDKTLPELQQVPTVTDDIIAKIKHPSEFSMVFYTDGSAIKHPNVNKSHNAGMGIAQVQFKPEFTVINTWSIPLGDHTAQLAEVAAVEFACKKALKIDGPVLIVTDSFYVAESVNKELPYWQSNGFFNNKKKPLKHVSKWKSIADCIQLKPDIIIIHEKGHQPTASTFHTEGNNLADKLATQGSYVVNAGKRTADGSEFEKRTADGSEFESPKKKAKVE

SEQ ID NO: 521 - protein, 2174 aa, synthetic construct
MPAAKRVKLDGGDKKYSIGLDIGTNSVGWAVITDEYKVPSKKFKVLGNTDRHSIKKNLIGALLFDSGETAEATRLKRTARRRYTRRKNRICYLQEIFSNEMAKVDDSFFHRLEESFLVEEDKKHERHPIFGNIVDEVAYHEKYPTIYHLRKKLVDSTDKADLRLIYLALAHMIKFRGHFLIEGDLNPDNSDVDKLFIQLVQTYNQLFEENPINASGVDAKAILSARLSKSRRLENLIAQLPGEKKNGLFGNLIALSLGLTPNFKSNFDLAEDAKLQLSKDTYDDDLDNLLAQIGDQYADLFLAAKNLSDAILLSDILRVNTEITKAPLSASMIKRYDEHHQDLTLLKALVRQQLPEKYKEIFFDQSKNGYAGYIDGGASQEEFYKFIKPILEKMDGTEELLVKLNREDLLRKQRTFDNGSIPHQIHLGELHAILRRQEDFYPFLKDNREKIEKILTFRIPYYVGPLARGNSRFAWMTRKSEETITPWNFEEVVDKGASAQSFIERMTNFDKNLPNEKVLPKHSLLYEYFTVYNELTKVKYVTEGMRKPAFLSGEQKKAIVDLLFKTNRKVTVKQLKEDYFKKIECFDSVEISGVEDRFNASLGTYHDLLKIIKDKDFLDNEENEDILEDIVLTLTLFEDREMIEERLKTYAHLFDDKVMKQLKRRRYTGWGRLSRKLINGIRDKQSGKTILDFLKSDGFANRNFMQLIHDDSLTFKEDIQKAQVSGQGDSLHEHIANLAGSPAIKKGILQTVKVVDELVKVMGRHKPENIVIEMARENQTTQKGQKNSRERMKRIEEGIKELGSQILKEHPVENTQLQNEKLYLYYLQNGRDMYVDQELDINRLSDYDVDHIVPQSFLKDDSIDNKVLTRSDKARGKSDNVPSEEVVKKMKNYWRQLLNAKLITQRKFDNLTKAERGGLSELDKAGFIKRQLVETRQITKHVAQILDSRMNTKYDENDKLIREVKVITLKSKLVSDFRKDFQFYKVREINNYHHAHDAYLNAVVGTALIKKYPKLESEFVYGDYKVYDVRKMIAKSEQEIGKATAKYFFYSNIMNFFKTEITLANGEIRKRPLIETNGETGEIVWDKGRDFATVRKVLSMPQVNIVKKTEVQTGGFSKESILPKRNSDKLIARKKDWDPKKYGGFDSPTVAYSVLVVAKVEKGKSKKLKSVKELLGITIMERSSFEKNPIDFLEAKGYKEVKKDLIIKLPKYSLFELENGRKRMLASAGELQKGNELALPSKYVNFLYLASHYEKLKGSPEDNEQKQLFVEQHKHYLDEIIEQISEFSKRVILADANLDKVLSAYNKHRDKPIREQAENIIHLFTLTNLGAPAAFKYFDTTIDRKRYTSTKEVLDATLIHQSITGLYETRIDLSQLGGDGGGSSGGSGGGGGMDPLQLLQPLEAEIKGTKLKAHWNSGATITCVPQAFLEEEVPIKNIWIKTIHGEKEQPVYYLTFKIQGRKVEAEVISSPYDYILVSPSDIPWLMKKPLQLTTLVPLQEYEERLLKQTMLTGSYKEKLQSLFLKYDALWQHWENQVGHRRIKPHHIATGTVNPRPQKQYPINPKAKASIQTVINDLLKQGVLIQQNSIMNTPVYPVPKPDGKWRMVLDYREVNKTIPLIAAQNQHSAGILSSIFRGKYKTTLDLSNGFWAHSITPESYWLTAFTWLGQQYCWTRLPQGFLNSPALFTADVVDLLKEVPNVQVYVDDIYISHDDPREHLEQLEKVFSLLLNAGYVVSLKKSEIAQHEVEFLGFNITKEGRGLTETFKQKLLNITPPRDLKQLQSILGLLNFARNFIPNFSELVKPLYNIIATANGKYITWTTDNSQQLQNIISMLNSAENLEERNPEVRLIMKVNTSPSAGYIRFYNEFAKRPIMYLNYVYTKAEVKFTNTEKLLTTIHKGLIKALDLGMGQEILVYSPIVSMTKIQKTPLPERKALPIRWITWMSYLEDPRIQFHYDKTLPELQQVPTVTDDIIAKIKHPSEFSMVFYTDGSAIKHPNVNKSHNAGMGIAQVQFKPEFTVINTWSIPLGDHTAQLAEVAAVEFACKKALKIDGPVLIVTDSFYVAESVNKELPYWQSNGFFNNKKKPLKHVSKWKSIADCIQLKPDIIIIHEKGHQPTASTFHTEGNNLADKLATQGSYVVNAGKRTADGSEFEKRTADGSEFESPKKKAKVE

SEQ ID NO: 522 - protein, 2010 aa, synthetic construct
MPAAKRVKLDGGDKKYSIGLDIGTNSVGWAVITDEYKVPSKKFKVLGNTDRHSIKKNLIGALLFDSGETAEATRLKRTARRRYTRRKNRICYLQEIFSNEMAKVDDSFFHRLEESFLVEEDKKHERHPIFGNIVDEVAYHEKYPTIYHLRKKLVDSTDKADLRLIYLALAHMIKFRGHFLIEGDLNPDNSDVDKLFIQLVQTYNQLFEENPINASGVDAKAILSARLSKSRRLENLIAQLPGEKKNGLFGNLIALSLGLTPNFKSNFDLAEDAKLQLSKDTYDDDLDNLLAQIGDQYADLFLAAKNLSDAILLSDILRVNTEITKAPLSASMIKRYDEHHQDLTLLKALVRQQLPEKYKEIFFDQSKNGYAGYIDGGASQEEFYKFIKPILEKMDGTEELLVKLNREDLLRKQRTFDNGSIPHQIHLGELHAILRRQEDFYPFLKDNREKIEKILTFRIPYYVGPLARGNSRFAWMTRKSEETITPWNFEEVVDKGASAQSFIERMTNFDKNLPNEKVLPKHSLLYEYFTVYNELTKVKYVTEGMRKPAFLSGEQKKAIVDLLFKTNRKVTVKQLKEDYFKKIECFDSVEISGVEDRFNASLGTYHDLLKIIKDKDFLDNEENEDILEDIVLTLTLFEDREMIEERLKTYAHLFDDKVMKQLKRRRYTGWGRLSRKLINGIRDKQSGKTILDFLKSDGFANRNFMQLIHDDSLTFKEDIQKAQVSGQGDSLHEHIANLAGSPAIKKGILQTVKVVDELVKVMGRHKPENIVIEMARENQTTQKGQKNSRERMKRIEEGIKELGSQILKEHPVENTQLQNEKLYLYYLQNGRDMYVDQELDINRLSDYDVDHIVPQSFLKDDSIDNKVLTRSDKARGKSDNVPSEEVVKKMKNYWRQLLNAKLITQRKFDNLTKAERGGLSELDKAGFIKRQLVETRQITKHVAQILDSRMNTKYDENDKLIREVKVITLKSKLVSDFRKDFQFYKVREINNYHHAHDAYLNAVVGTALIKKYPKLESEFVYGDYKVYDVRKMIAKSEQEIGKATAKYFFYSNIMNFFKTEITLANGEIRKRPLIETNGETGEIVWDKGRDFATVRKVLSMPQVNIVKKTEVQTGGFSKESILPKRNSDKLIARKKDWDPKKYGGFDSPTVAYSVLVVAKVEKGKSKKLKSVKELLGITIMERSSFEKNPIDFLEAKGYKEVKKDLIIKLPKYSLFELENGRKRMLASAGELQKGNELALPSKYVNFLYLASHYEKLKGSPEDNEQKQLFVEQHKHYLDEIIEQISEFSKRVILADANLDKVLSAYNKHRDKPIREQAENIIHLFTLTNLGAPAAFKYFDTTIDRKRYTSTKEVLDATLIHQSITGLYETRIDLSQLGGDGGGGGGSGGGGSGGGGSGGGGSGGGVLDTPPSHIGLEHLPPPPEVPQFPLNLERLQALQDLVHRSLEAGYISPWDGPGNNPVFPVRKPNGAWRFVHDLRATNALTKPIPALSPGPPDLTAPPTHPPHIICLDLKDAFFQIPVEDRFRFYLSFTLPSPGGLQPHRRFAWRVLPQGFINSPALFQRALQEPLRQVSAAFSQSLLVSYMDDILYASPTEEQRSQCYQALAARLRDLGFQVASEKTSQTPSPVPFLGQMVHEQIVTYQSLPTLQISSPISLHQLQAVLGDLQWVSRGTPTTRRPLQLLYSSLKRHHDPRAIIQLSPEQLQGIAELRQALSHNARSRYNEQEPLLAYVHLTRAGSTLVLFQKGAQFPLAYFQTPLTDNQASPWGLLLLLGCQYLQTQALSSYAKPILKYYHNLPKTSLDNWIQSSEDPRVQELLQLWPQISSQGIQPPGPWKTLITRAEVFLTPQFSPDPIPAALCLFSDGATGRGAYCLWKDHLLDFQAVPAPESAQKGELAGLLAGLAAAPPEPVNIWVDSKYLYSLLRTWVLGAWLQPDPVPSYALLYKSLLRHPAIVVGHVRSHSSASHPIASLNNYVDQLAGKRTADGSEFEKRTADGSEFESPKKKAKVE

SEQ ID NO: 523 - protein, 1995 aa, synthetic construct
MPAAKRVKLDGGDKKYSIGLDIGTNSVGWAVITDEYKVPSKKFKVLGNTDRHSIKKNLIGALLFDSGETAEATRLKRTARRRYTRRKNRICYLQEIFSNEMAKVDDSFFHRLEESFLVEEDKKHERHPIFGNIVDEVAYHEKYPTIYHLRKKLVDSTDKADLRLIYLALAHMIKFRGHFLIEGDLNPDNSDVDKLFIQLVQTYNQLFEENPINASGVDAKAILSARLSKSRRLENLIAQLPGEKKNGLFGNLIALSLGLTPNFKSNFDLAEDAKLQLSKDTYDDDLDNLLAQIGDQYADLFLAAKNLSDAILLSDILRVNTEITKAPLSASMIKRYDEHHQDLTLLKALVRQQLPEKYKEIFFDQSKNGYAGYIDGGASQEEFYKFIKPILEKMDGTEELLVKLNREDLLRKQRTFDNGSIPHQIHLGELHAILRRQEDFYPFLKDNREKIEKILTFRIPYYVGPLARGNSRFAWMTRKSEETITPWNFEEVVDKGASAQSFIERMTNFDKNLPNEKVLPKHSLLYEYFTVYNELTKVKYVTEGMRKPAFLSGEQKKAIVDLLFKTNRKVTVKQLKEDYFKKIECFDSVEISGVEDRFNASLGTYHDLLKIIKDKDFLDNEENEDILEDIVLTLTLFEDREMIEERLKTYAHLFDDKVMKQLKRRRYTGWGRLSRKLINGIRDKQSGKTILDFLKSDGFANRNFMQLIHDDSLTFKEDIQKAQVSGQGDSLHEHIANLAGSPAIKKGILQTVKVVDELVKVMGRHKPENIVIEMARENQTTQKGQKNSRERMKRIEEGIKELGSQILKEHPVENTQLQNEKLYLYYLQNGRDMYVDQELDINRLSDYDVDHIVPQSFLKDDSIDNKVLTRSDKARGKSDNVPSEEVVKKMKNYWRQLLNAKLITQRKFDNLTKAERGGLSELDKAGFIKRQLVETRQITKHVAQILDSRMNTKYDENDKLIREVKVITLKSKLVSDFRKDFQFYKVREINNYHHAHDAYLNAVVGTALIKKYPKLESEFVYGDYKVYDVRKMIAKSEQEIGKATAKYFFYSNIMNFFKTEITLANGEIRKRPLIETNGETGEIVWDKGRDFATVRKVLSMPQVNIVKKTEVQTGGFSKESILPKRNSDKLIARKKDWDPKKYGGFDSPTVAYSVLVVAKVEKGKSKKLKSVKELLGITIMERSSFEKNPIDFLEAKGYKEVKKDLIIKLPKYSLFELENGRKRMLASAGELQKGNELALPSKYVNFLYLASHYEKLKGSPEDNEQKQLFVEQHKHYLDEIIEQISEFSKRVILADANLDKVLSAYNKHRDKPIREQAENIIHLFTLTNLGAPAAFKYFDTTIDRKRYTSTKEVLDATLIHQSITGLYETRIDLSQLGGDGGGGGGGGGGVLDTPPSHIGLEHLPPPPEVPQFPLNLERLQALQDLVHRSLEAGYISPWDGPGNNPVFPVRKPNGAWRFVHDLRATNALTKPIPALSPGPPDLTAPPTHPPHIICLDLKDAFFQIPVEDRFRFYLSFTLPSPGGLQPHRRFAWRVLPQGFINSPALFQRALQEPLRQVSAAFSQSLLVSYMDDILYASPTEEQRSQCYQALAARLRDLGFQVASEKTSQTPSPVPFLGQMVHEQIVTYQSLPTLQISSPISLHQLQAVLGDLQWVSRGTPTTRRPLQLLYSSLKRHHDPRAIIQLSPEQLQGIAELRQALSHNARSRYNEQEPLLAYVHLTRAGSTLVLFQKGAQFPLAYFQTPLTDNQASPWGLLLLLGCQYLQTQALSSYAKPILKYYHNLPKTSLDNWIQSSEDPRVQELLQLWPQISSQGIQPPGPWKTLITRAEVFLTPQFSPDPIPAALCLFSDGATGRGAYCLWKDHLLDFQAVPAPESAQKGELAGLLAGLAAAPPEPVNIWVDSKYLYSLLRTWVLGAWLQPDPVPSYALLYKSLLRHPAIVVGHVRSHSSASHPIASLNNYVDQLAGKRTADGSEFEKRTADGSEFESPKKKAKVE

SEQ ID NO: 524 - protein, 2122 aa, synthetic construct
MPAAKRVKLDGGDKKYSIGLDIGTNSVGWAVITDEYKVPSKKFKVLGNTDRHSIKKNLIGALLFDSGETAEATRLKRTARRRYTRRKNRICYLQEIFSNEMAKVDDSFFHRLEESFLVEEDKKHERHPIFGNIVDEVAYHEKYPTIYHLRKKLVDSTDKADLRLIYLALAHMIKFRGHFLIEGDLNPDNSDVDKLFIQLVQTYNQLFEENPINASGVDAKAILSARLSKSRRLENLIAQLPGEKKNGLFGNLIALSLGLTPNFKSNFDLAEDAKLQLSKDTYDDDLDNLLAQIGDQYADLFLAAKNLSDAILLSDILRVNTEITKAPLSASMIKRYDEHHQDLTLLKALVRQQLPEKYKEIFFDQSKNGYAGYIDGGASQEEFYKFIKPILEKMDGTEELLVKLNREDLLRKQRTFDNGSIPHQIHLGELHAILRRQEDFYPFLKDNREKIEKILTFRIPYYVGPLARGNSRFAWMTRKSEETITPWNFEEVVDKGASAQSFIERMTNFDKNLPNEKVLPKHSLLYEYFTVYNELTKVKYVTEGMRKPAFLSGEQKKAIVDLLFKTNRKVTVKQLKEDYFKKIECFDSVEISGVEDRFNASLGTYHDLLKIIKDKDFLDNEENEDILEDIVLTLTLFEDREMIEERLKTYAHLFDDKVMKQLKRRRYTGWGRLSRKLINGIRDKQSGKTILDFLKSDGFANRNFMQLIHDDSLTFKEDIQKAQVSGQGDSLHEHIANLAGSPAIKKGILQTVKVVDELVKVMGRHKPENIVIEMARENQTTQKGQKNSRERMKRIEEGIKELGSQILKEHPVENTQLQNEKLYLYYLQNGRDMYVDQELDINRLSDYDVDHIVPQSFLKDDSIDNKVLTRSDKARGKSDNVPSEEVVKKMKNYWRQLLNAKLITQRKFDNLTKAERGGLSELDKAGFIKRQLVETRQITKHVAQILDSRMNTKYDENDKLIREVKVITLKSKLVSDFRKDFQFYKVREINNYHHAHDAYLNAVVGTALIKKYPKLESEFVYGDYKVYDVRKMIAKSEQEIGKATAKYFFYSNIMNFFKTEITLANGEIRKRPLIETNGETGEIVWDKGRDFATVRKVLSMPQVNIVKKTEVQTGGFSKESILPKRNSDKLIARKKDWDPKKYGGFDSPTVAYSVLVVAKVEKGKSKKLKSVKELLGITIMERSSFEKNPIDFLEAKGYKEVKKDLIIKLPKYSLFELENGRKRMLASAGELQKGNELALPSKYVNFLYLASHYEKLKGSPEDNEQKQLFVEQHKHYLDEIIEQISEFSKRVILADANLDKVLSAYNKHRDKPIREQAENIIHLFTLTNLGAPAAFKYFDTTIDRKRYTSTKEVLDATLIHQSITGLYETRIDLSQLGGDGGAEAAAKEAAAKEAAAKEAAAKALEAEAAAKEAAAKEAAAKEAAAKAGGIPWLMKKPLQLTTLVPLQEYEERLLKQTMLTGSYKEKLQSLFLKYDALWQHWENQVGHRRIKPHHIATGTVNPRPQKQYPINPKAKASIQTVINDLLKQGVLIQQNSIMNTPVYPVPKPDGKWRMVLDYREVNKTIPLIAAQNQHSAGILSSIFRGKYKTTLDLSNGFWAHSITPESYWLTAFTWLGQQYCWTRLPQGFLNSPALFTADVVDLLKEVPNVQVYVDDIYISHDDPREHLEQLEKVFSLLLNAGYVVSLKKSEIAQHEVEFLGFNITKEGRGLTETFKQKLLNITPPRDLKQLQSILGLLNFARNFIPNFSELVKPLYNIIATANGKYITWTTDNSQQLQNIISMLNSAENLEERNPEVRLIMKVNTSPSAGYIRFYNEFAKRPIMYLNYVYTKAEVKFTNTEKLLTTIHKGLIKALDLGMGQEILVYSPIVSMTKIQKTPLPERKALPIRWITWMSYLEDPRIQFHYDKTLPELQQVPTVTDDIIAKIKHPSEFSMVFYTDGSAIKHPNVNKSHNAGMGIAQVQFKPEFTVINTWSIPLGDHTAQLAEVAAVEFACKKALKIDGPVLIVTDSFYVAESVNKELPYWQSNGFFNNKKKPLKHVSKWKSIADCIQLKPDIIIIHEKGHQPTASTFHTEGNNLADKLATQGSYVVNAGKRTADGSEFEKRTADGSEFESPKKKAKVE

SEQ ID NO: 525 - protein, 2096 aa, synthetic construct
MPAAKRVKLDGGDKKYSIGLDIGTNSVGWAVITDEYKVPSKKFKVLGNTDRHSIKKNLIGALLFDSGETAEATRLKRTARRRYTRRKNRICYLQEIFSNEMAKVDDSFFHRLEESFLVEEDKKHERHPIFGNIVDEVAYHEKYPTIYHLRKKLVDSTDKADLRLIYLALAHMIKFRGHFLIEGDLNPDNSDVDKLFIQLVQTYNQLFEENPINASGVDAKAILSARLSKSRRLENLIAQLPGEKKNGLFGNLIALSLGLTPNFKSNFDLAEDAKLQLSKDTYDDDLDNLLAQIGDQYADLFLAAKNLSDAILLSDILRVNTEITKAPLSASMIKRYDEHHQDLTLLKALVRQQLPEKYKEIFFDQSKNGYAGYIDGGASQEEFYKFIKPILEKMDGTEELLVKLNREDLLRKQRTFDNGSIPHQIHLGELHAILRRQEDFYPFLKDNREKIEKILTFRIPYYVGPLARGNSRFAWMTRKSEETITPWNFEEVVDKGASAQSFIERMTNFDKNLPNEKVLPKHSLLYEYFTVYNELTKVKYVTEGMRKPAFLSGEQKKAIVDLLFKTNRKVTVKQLKEDYFKKIECFDSVEISGVEDRFNASLGTYHDLLKIIKDKDFLDNEENEDILEDIVLTLTLFEDREMIEERLKTYAHLFDDKVMKQLKRRRYTGWGRLSRKLINGIRDKQSGKTILDFLKSDGFANRNFMQLIHDDSLTFKEDIQKAQVSGQGDSLHEHIANLAGSPAIKKGILQTVKVVDELVKVMGRHKPENIVIEMARENQTTQKGQKNSRERMKRIEEGIKELGSQILKEHPVENTQLQNEKLYLYYLQNGRDMYVDQELDINRLSDYDVDHIVPQSFLKDDSIDNKVLTRSDKARGKSDNVPSEEVVKKMKNYWRQLLNAKLITQRKFDNLTKAERGGLSELDKAGFIKRQLVETRQITKHVAQILDSRMNTKYDENDKLIREVKVITLKSKLVSDFRKDFQFYKVREINNYHHAHDAYLNAVVGTALIKKYPKLESEFVYGDYKVYDVRKMIAKSEQEIGKATAKYFFYSNIMNFFKTEITLANGEIRKRPLIETNGETGEIVWDKGRDFATVRKVLSMPQVNIVKKTEVQTGGFSKESILPKRNSDKLIARKKDWDPKKYGGFDSPTVAYSVLVVAKVEKGKSKKLKSVKELLGITIMERSSFEKNPIDFLEAKGYKEVKKDLIIKLPKYSLFELENGRKRMLASAGELQKGNELALPSKYVNFLYLASHYEKLKGSPEDNEQKQLFVEQHKHYLDEIIEQISEFSKRVILADANLDKVLSAYNKHRDKPIREQAENIIHLFTLTNLGAPAAFKYFDTTIDRKRYTSTKEVLDATLIHQSITGLYETRIDLSQLGGDGGEAAAKEAAAKEAAAKEAAAKGGIPWLMKKPLQLTTLVPLQEYEERLLKQTMLTGSYKEKLQSLFLKYDALWQHWENQVGHRRIKPHHIATGTVNPRPQKQYPINPKAKASIQTVINDLLKQGVLIQQNSIMNTPVYPVPKPDGKWRMVLDYREVNKTIPLIAAQNQHSAGILSSIFRGKYKTTLDLSNGFWAHSITPESYWLTAFTWLGQQYCWTRLPQGFLNSPALFTADVVDLLKEVPNVQVYVDDIYISHDDPREHLEQLEKVFSLLLNAGYVVSLKKSEIAQHEVEFLGFNITKEGRGLTETFKQKLLNITPPRDLKQLQSILGLLNFARNFIPNFSELVKPLYNIIATANGKYITWTTDNSQQLQNIISMLNSAENLEERNPEVRLIMKVNTSPSAGYIRFYNEFAKRPIMYLNYVYTKAEVKFTNTEKLLTTIHKGLIKALDLGMGQEILVYSPIVSMTKIQKTPLPERKALPIRWITWMSYLEDPRIQFHYDKTLPELQQVPTVTDDIIAKIKHPSEFSMVFYTDGSAIKHPNVNKSHNAGMGIAQVQFKPEFTVINTWSIPLGDHTAQLAEVAAVEFACKKALKIDGPVLIVTDSFYVAESVNKELPYWQSNGFFNNKKKPLKHVSKWKSIADCIQLKPDIIIIHEKGHQPTASTFHTEGNNLADKLATQGSYVVNAGKRTADGSEFEKRTADGSEFESPKKKAKVE

SEQ ID NO: 526 - protein, 2087 aa, synthetic construct
MPAAKRVKLDGGDKKYSIGLDIGTNSVGWAVITDEYKVPSKKFKVLGNTDRHSIKKNLIGALLFDSGETAEATRLKRTARRRYTRRKNRICYLQEIFSNEMAKVDDSFFHRLEESFLVEEDKKHERHPIFGNIVDEVAYHEKYPTIYHLRKKLVDSTDKADLRLIYLALAHMIKFRGHFLIEGDLNPDNSDVDKLFIQLVQTYNQLFEENPINASGVDAKAILSARLSKSRRLENLIAQLPGEKKNGLFGNLIALSLGLTPNFKSNFDLAEDAKLQLSKDTYDDDLDNLLAQIGDQYADLFLAAKNLSDAILLSDILRVNTEITKAPLSASMIKRYDEHHQDLTLLKALVRQQLPEKYKEIFFDQSKNGYAGYIDGGASQEEFYKFIKPILEKMDGTEELLVKLNREDLLRKQRTFDNGSIPHQIHLGELHAILRRQEDFYPFLKDNREKIEKILTFRIPYYVGPLARGNSRFAWMTRKSEETITPWNFEEVVDKGASAQSFIERMTNFDKNLPNEKVLPKHSLLYEYFTVYNELTKVKYVTEGMRKPAFLSGEQKKAIVDLLFKTNRKVTVKQLKEDYFKKIECFDSVEISGVEDRFNASLGTYHDLLKIIKDKDFLDNEENEDILEDIVLTLTLFEDREMIEERLKTYAHLFDDKVMKQLKRRRYTGWGRLSRKLINGIRDKQSGKTILDFLKSDGFANRNFMQLIHDDSLTFKEDIQKAQVSGQGDSLHEHIANLAGSPAIKKGILQTVKVVDELVKVMGRHKPENIVIEMARENQTTQKGQKNSRERMKRIEEGIKELGSQILKEHPVENTQLQNEKLYLYYLQNGRDMYVDQELDINRLSDYDVDHIVPQSFLKDDSIDNKVLTRSDKARGKSDNVPSEEVVKKMKNYWRQLLNAKLITQRKFDNLTKAERGGLSELDKAGFIKRQLVETRQITKHVAQILDSRMNTKYDENDKLIREVKVITLKSKLVSDFRKDFQFYKVREINNYHHAHDAYLNAVVGTALIKKYPKLESEFVYGDYKVYDVRKMIAKSEQEIGKATAKYFFYSNIMNFFKTEITLANGEIRKRPLIETNGETGEIVWDKGRDFATVRKVLSMPQVNIVKKTEVQTGGFSKESILPKRNSDKLIARKKDWDPKKYGGFDSPTVAYSVLVVAKVEKGKSKKLKSVKELLGITIMERSSFEKNPIDFLEAKGYKEVKKDLIIKLPKYSLFELENGRKRMLASAGELQKGNELALPSKYVNFLYLASHYEKLKGSPEDNEQKQLFVEQHKHYLDEIIEQISEFSKRVILADANLDKVLSAYNKHRDKPIREQAENIIHLFTLTNLGAPAAFKYFDTTIDRKRYTSTKEVLDATLIHQSITGLYETRIDLSQLGGDGGGGSEAAAKPAPGGIPWLMKKPLQLTTLVPLQEYEERLLKQTMLTGSYKEKLQSLFLKYDALWQHWENQVGHRRIKPHHIATGTVNPRPQKQYPINPKAKASIQTVINDLLKQGVLIQQNSIMNTPVYPVPKPDGKWRMVLDYREVNKTIPLIAAQNQHSAGILSSIFRGKYKTTLDLSNGFWAHSITPESYWLTAFTWLGQQYCWTRLPQGFLNSPALFTADVVDLLKEVPNVQVYVDDIYISHDDPREHLEQLEKVFSLLLNAGYVVSLKKSEIAQHEVEFLGFNITKEGRGLTETFKQKLLNITPPRDLKQLQSILGLLNFARNFIPNFSELVKPLYNIIATANGKYITWTTDNSQQLQNIISMLNSAENLEERNPEVRLIMKVNTSPSAGYIRFYNEFAKRPIMYLNYVYTKAEVKFTNTEKLLTTIHKGLIKALDLGMGQEILVYSPIVSMTKIQKTPLPERKALPIRWITWMSYLEDPRIQFHYDKTLPELQQVPTVTDDIIAKIKHPSEFSMVFYTDGSAIKHPNVNKSHNAGMGIAQVQFKPEFTVINTWSIPLGDHTAQLAEVAAVEFACKKALKIDGPVLIVTDSFYVAESVNKELPYWQSNGFFNNKKKPLKHVSKWKSIADCIQLKPDIIIIHEKGHQPTASTFHTEGNNLADKLATQGSYVVNAGKRTADGSEFEKRTADGSEFESPKKKAKVE

SEQ ID NO: 527 - protein, 2109 aa, synthetic construct
MPAAKRVKLDGGDKKYSIGLDIGTNSVGWAVITDEYKVPSKKFKVLGNTDRHSIKKNLIGALLFDSGETAEATRLKRTARRRYTRRKNRICYLQEIFSNEMAKVDDSFFHRLEESFLVEEDKKHERHPIFGNIVDEVAYHEKYPTIYHLRKKLVDSTDKADLRLIYLALAHMIKFRGHFLIEGDLNPDNSDVDKLFIQLVQTYNQLFEENPINASGVDAKAILSARLSKSRRLENLIAQLPGEKKNGLFGNLIALSLGLTPNFKSNFDLAEDAKLQLSKDTYDDDLDNLLAQIGDQYADLFLAAKNLSDAILLSDILRVNTEITKAPLSASMIKRYDEHHQDLTLLKALVRQQLPEKYKEIFFDQSKNGYAGYIDGGASQEEFYKFIKPILEKMDGTEELLVKLNREDLLRKQRTFDNGSIPHQIHLGELHAILRRQEDFYPFLKDNREKIEKILTFRIPYYVGPLARGNSRFAWMTRKSEETITPWNFEEVVDKGASAQSFIERMTNFDKNLPNEKVLPKHSLLYEYFTVYNELTKVKYVTEGMRKPAFLSGEQKKAIVDLLFKTNRKVTVKQLKEDYFKKIECFDSVEISGVEDRFNASLGTYHDLLKIIKDKDFLDNEENEDILEDIVLTLTLFEDREMIEERLKTYAHLFDDKVMKQLKRRRYTGWGRLSRKLINGIRDKQSGKTILDFLKSDGFANRNFMQLIHDDSLTFKEDIQKAQVSGQGDSLHEHIANLAGSPAIKKGILQTVKVVDELVKVMGRHKPENIVIEMARENQTTQKGQKNSRERMKRIEEGIKELGSQILKEHPVENTQLQNEKLYLYYLQNGRDMYVDQELDINRLSDYDVDHIVPQSFLKDDSIDNKVLTRSDKARGKSDNVPSEEVVKKMKNYWRQLLNAKLITQRKFDNLTKAERGGLSELDKAGFIKRQLVETRQITKHVAQILDSRMNTKYDENDKLIREVKVITLKSKLVSDFRKDFQFYKVREINNYHHAHDAYLNAVVGTALIKKYPKLESEFVYGDYKVYDVRKMIAKSEQEIGKATAKYFFYSNIMNFFKTEITLANGEIRKRPLIETNGETGEIVWDKGRDFATVRKVLSMPQVNIVKKTEVQTGGFSKESILPKRNSDKLIARKKDWDPKKYGGFDSPTVAYSVLVVAKVEKGKSKKLKSVKELLGITIMERSSFEKNPIDFLEAKGYKEVKKDLIIKLPKYSLFELENGRKRMLASAGELQKGNELALPSKYVNFLYLASHYEKLKGSPEDNEQKQLFVEQHKHYLDEIIEQISEFSKRVILADANLDKVLSAYNKHRDKPIREQAENIIHLFTLTNLGAPAAFKYFDTTIDRKRYTSTKEVLDATLIHQSITGLYETRIDLSQLGGDGGSGGSSGGSSGSETPGTSESATPESSGGSSGGSSGGIPWLMKKPLQLTTLVPLQEYEERLLKQTMLTGSYKEKLQSLFLKYDALWQHWENQVGHRRIKPHHIATGTVNPRPQKQYPINPKAKASIQTVINDLLKQGVLIQQNSIMNTPVYPVPKPDGKWRMVLDYREVNKTIPLIAAQNQHSAGILSSIFRGKYKTTLDLSNGFWAHSITPESYWLTAFTWLGQQYCWTRLPQGFLNSPALFTADVVDLLKEVPNVQVYVDDIYISHDDPREHLEQLEKVFSLLLNAGYVVSLKKSEIAQHEVEFLGFNITKEGRGLTETFKQKLLNITPPRDLKQLQSILGLLNFARNFIPNFSELVKPLYNIIATANGKYITWTTDNSQQLQNIISMLNSAENLEERNPEVRLIMKVNTSPSAGYIRFYNEFAKRPIMYLNYVYTKAEVKFTNTEKLLTTIHKGLIKALDLGMGQEILVYSPIVSMTKIQKTPLPERKALPIRWITWMSYLEDPRIQFHYDKTLPELQQVPTVTDDIIAKIKHPSEFSMVFYTDGSAIKHPNVNKSHNAGMGIAQVQFKPEFTVINTWSIPLGDHTAQLAEVAAVEFACKKALKIDGPVLIVTDSFYVAESVNKELPYWQSNGFFNNKKKPLKHVSKWKSIADCIQLKPDIIIIHEKGHQPTASTFHTEGNNLADKLATQGSYVVNAGKRTADGSEFEKRTADGSEFESPKKKAKVE

SEQ ID NO: 528 - protein, 2106 aa, synthetic construct
MPAAKRVKLDGGDKKYSIGLDIGTNSVGWAVITDEYKVPSKKFKVLGNTDRHSIKKNLIGALLFDSGETAEATRLKRTARRRYTRRKNRICYLQEIFSNEMAKVDDSFFHRLEESFLVEEDKKHERHPIFGNIVDEVAYHEKYPTIYHLRKKLVDSTDKADLRLIYLALAHMIKFRGHFLIEGDLNPDNSDVDKLFIQLVQTYNQLFEENPINASGVDAKAILSARLSKSRRLENLIAQLPGEKKNGLFGNLIALSLGLTPNFKSNFDLAEDAKLQLSKDTYDDDLDNLLAQIGDQYADLFLAAKNLSDAILLSDILRVNTEITKAPLSASMIKRYDEHHQDLTLLKALVRQQLPEKYKEIFFDQSKNGYAGYIDGGASQEEFYKFIKPILEKMDGTEELLVKLNREDLLRKQRTFDNGSIPHQIHLGELHAILRRQEDFYPFLKDNREKIEKILTFRIPYYVGPLARGNSRFAWMTRKSEETITPWNFEEVVDKGASAQSFIERMTNFDKNLPNEKVLPKHSLLYEYFTVYNELTKVKYVTEGMRKPAFLSGEQKKAIVDLLFKTNRKVTVKQLKEDYFKKIECFDSVEISGVEDRFNASLGTYHDLLKIIKDKDFLDNEENEDILEDIVLTLTLFEDREMIEERLKTYAHLFDDKVMKQLKRRRYTGWGRLSRKLINGIRDKQSGKTILDFLKSDGFANRNFMQLIHDDSLTFKEDIQKAQVSGQGDSLHEHIANLAGSPAIKKGILQTVKVVDELVKVMGRHKPENIVIEMARENQTTQKGQKNSRERMKRIEEGIKELGSQILKEHPVENTQLQNEKLYLYYLQNGRDMYVDQELDINRLSDYDVDHIVPQSFLKDDSIDNKVLTRSDKARGKSDNVPSEEVVKKMKNYWRQLLNAKLITQRKFDNLTKAERGGLSELDKAGFIKRQLVETRQITKHVAQILDSRMNTKYDENDKLIREVKVITLKSKLVSDFRKDFQFYKVREINNYHHAHDAYLNAVVGTALIKKYPKLESEFVYGDYKVYDVRKMIAKSEQEIGKATAKYFFYSNIMNFFKTEITLANGEIRKRPLIETNGETGEIVWDKGRDFATVRKVLSMPQVNIVKKTEVQTGGFSKESILPKRNSDKLIARKKDWDPKKYGGFDSPTVAYSVLVVAKVEKGKSKKLKSVKELLGITIMERSSFEKNPIDFLEAKGYKEVKKDLIIKLPKYSLFELENGRKRMLASAGELQKGNELALPSKYVNFLYLASHYEKLKGSPEDNEQKQLFVEQHKHYLDEIIEQISEFSKRVILADANLDKVLSAYNKHRDKPIREQAENIIHLFTLTNLGAPAAFKYFDTTIDRKRYTSTKEVLDATLIHQSITGLYETRIDLSQLGGDGGGGGGSGGGGSGGGGSGGGGSGGGGSGGGGSGGIPWLMKKPLQLTTLVPLQEYEERLLKQTMLTGSYKEKLQSLFLKYDALWQHWENQVGHRRIKPHHIATGTVNPRPQKQYPINPKAKASIQTVINDLLKQGVLIQQNSIMNTPVYPVPKPDGKWRMVLDYREVNKTIPLIAAQNQHSAGILSSIFRGKYKTTLDLSNGFWAHSITPESYWLTAFTWLGQQYCWTRLPQGFLNSPALFTADVVDLLKEVPNVQVYVDDIYISHDDPREHLEQLEKVFSLLLNAGYVVSLKKSEIAQHEVEFLGFNITKEGRGLTETFKQKLLNITPPRDLKQLQSILGLLNFARNFIPNFSELVKPLYNIIATANGKYITWTTDNSQQLQNIISMLNSAENLEERNPEVRLIMKVNTSPSAGYIRFYNEFAKRPIMYLNYVYTKAEVKFTNTEKLLTTIHKGLIKALDLGMGQEILVYSPIVSMTKIQKTPLPERKALPIRWITWMSYLEDPRIQFHYDKTLPELQQVPTVTDDIIAKIKHPSEFSMVFYTDGSAIKHPNVNKSHNAGMGIAQVQFKPEFTVINTWSIPLGDHTAQLAEVAAVEFACKKALKIDGPVLIVTDSFYVAESVNKELPYWQSNGFFNNKKKPLKHVSKWKSIADCIQLKPDIIIIHEKGHQPTASTFHTEGNNLADKLATQGSYVVNAGKRTADGSEFEKRTADGSEFESPKKKAKVE

SEQ ID NO: 529 - protein, 2082 aa, synthetic construct
MPAAKRVKLDGGDKKYSIGLDIGTNSVGWAVITDEYKVPSKKFKVLGNTDRHSIKKNLIGALLFDSGETAEATRLKRTARRRYTRRKNRICYLQEIFSNEMAKVDDSFFHRLEESFLVEEDKKHERHPIFGNIVDEVAYHEKYPTIYHLRKKLVDSTDKADLRLIYLALAHMIKFRGHFLIEGDLNPDNSDVDKLFIQLVQTYNQLFEENPINASGVDAKAILSARLSKSRRLENLIAQLPGEKKNGLFGNLIALSLGLTPNFKSNFDLAEDAKLQLSKDTYDDDLDNLLAQIGDQYADLFLAAKNLSDAILLSDILRVNTEITKAPLSASMIKRYDEHHQDLTLLKALVRQQLPEKYKEIFFDQSKNGYAGYIDGGASQEEFYKFIKPILEKMDGTEELLVKLNREDLLRKQRTFDNGSIPHQIHLGELHAILRRQEDFYPFLKDNREKIEKILTFRIPYYVGPLARGNSRFAWMTRKSEETITPWNFEEVVDKGASAQSFIERMTNFDKNLPNEKVLPKHSLLYEYFTVYNELTKVKYVTEGMRKPAFLSGEQKKAIVDLLFKTNRKVTVKQLKEDYFKKIECFDSVEISGVEDRFNASLGTYHDLLKIIKDKDFLDNEENEDILEDIVLTLTLFEDREMIEERLKTYAHLFDDKVMKQLKRRRYTGWGRLSRKLINGIRDKQSGKTILDFLKSDGFANRNFMQLIHDDSLTFKEDIQKAQVSGQGDSLHEHIANLAGSPAIKKGILQTVKVVDELVKVMGRHKPENIVIEMARENQTTQKGQKNSRERMKRIEEGIKELGSQILKEHPVENTQLQNEKLYLYYLQNGRDMYVDQELDINRLSDYDVDHIVPQSFLKDDSIDNKVLTRSDKARGKSDNVPSEEVVKKMKNYWRQLLNAKLITQRKFDNLTKAERGGLSELDKAGFIKRQLVETRQITKHVAQILDSRMNTKYDENDKLIREVKVITLKSKLVSDFRKDFQFYKVREINNYHHAHDAYLNAVVGTALIKKYPKLESEFVYGDYKVYDVRKMIAKSEQEIGKATAKYFFYSNIMNFFKTEITLANGEIRKRPLIETNGETGEIVWDKGRDFATVRKVLSMPQVNIVKKTEVQTGGFSKESILPKRNSDKLIARKKDWDPKKYGGFDSPTVAYSVLVVAKVEKGKSKKLKSVKELLGITIMERSSFEKNPIDFLEAKGYKEVKKDLIIKLPKYSLFELENGRKRMLASAGELQKGNELALPSKYVNFLYLASHYEKLKGSPEDNEQKQLFVEQHKHYLDEIIEQISEFSKRVILADANLDKVLSAYNKHRDKPIREQAENIIHLFTLTNLGAPAAFKYFDTTIDRKRYTSTKEVLDATLIHQSITGLYETRIDLSQLGGDGGGGGGGGGGIPWLMKKPLQLTTLVPLQEYEERLLKQTMLTGSYKEKLQSLFLKYDALWQHWENQVGHRRIKPHHIATGTVNPRPQKQYPINPKAKASIQTVINDLLKQGVLIQQNSIMNTPVYPVPKPDGKWRMVLDYREVNKTIPLIAAQNQHSAGILSSIFRGKYKTTLDLSNGFWAHSITPESYWLTAFTWLGQQYCWTRLPQGFLNSPALFTADVVDLLKEVPNVQVYVDDIYISHDDPREHLEQLEKVFSLLLNAGYVVSLKKSEIAQHEVEFLGFNITKEGRGLTETFKQKLLNITPPRDLKQLQSILGLLNFARNFIPNFSELVKPLYNIIATANGKYITWTTDNSQQLQNIISMLNSAENLEERNPEVRLIMKVNTSPSAGYIRFYNEFAKRPIMYLNYVYTKAEVKFTNTEKLLTTIHKGLIKALDLGMGQEILVYSPIVSMTKIQKTPLPERKALPIRWITWMSYLEDPRIQFHYDKTLPELQQVPTVTDDIIAKIKHPSEFSMVFYTDGSAIKHPNVNKSHNAGMGIAQVQFKPEFTVINTWSIPLGDHTAQLAEVAAVEFACKKALKIDGPVLIVTDSFYVAESVNKELPYWQSNGFFNNKKKPLKHVSKWKSIADCIQLKPDIIIIHEKGHQPTASTFHTEGNNLADKLATQGSYVVNAGKRTADGSEFEKRTADGSEFESPKKKAKVE

SEQ ID NO: 530 - protein, 2087 aa, synthetic construct
MPAAKRVKLDGGDKKYSIGLDIGTNSVGWAVITDEYKVPSKKFKVLGNTDRHSIKKNLIGALLFDSGETAEATRLKRTARRRYTRRKNRICYLQEIFSNEMAKVDDSFFHRLEESFLVEEDKKHERHPIFGNIVDEVAYHEKYPTIYHLRKKLVDSTDKADLRLIYLALAHMIKFRGHFLIEGDLNPDNSDVDKLFIQLVQTYNQLFEENPINASGVDAKAILSARLSKSRRLENLIAQLPGEKKNGLFGNLIALSLGLTPNFKSNFDLAEDAKLQLSKDTYDDDLDNLLAQIGDQYADLFLAAKNLSDAILLSDILRVNTEITKAPLSASMIKRYDEHHQDLTLLKALVRQQLPEKYKEIFFDQSKNGYAGYIDGGASQEEFYKFIKPILEKMDGTEELLVKLNREDLLRKQRTFDNGSIPHQIHLGELHAILRRQEDFYPFLKDNREKIEKILTFRIPYYVGPLARGNSRFAWMTRKSEETITPWNFEEVVDKGASAQSFIERMTNFDKNLPNEKVLPKHSLLYEYFTVYNELTKVKYVTEGMRKPAFLSGEQKKAIVDLLFKTNRKVTVKQLKEDYFKKIECFDSVEISGVEDRFNASLGTYHDLLKIIKDKDFLDNEENEDILEDIVLTLTLFEDREMIEERLKTYAHLFDDKVMKQLKRRRYTGWGRLSRKLINGIRDKQSGKTILDFLKSDGFANRNFMQLIHDDSLTFKEDIQKAQVSGQGDSLHEHIANLAGSPAIKKGILQTVKVVDELVKVMGRHKPENIVIEMARENQTTQKGQKNSRERMKRIEEGIKELGSQILKEHPVENTQLQNEKLYLYYLQNGRDMYVDQELDINRLSDYDVDHIVPQSFLKDDSIDNKVLTRSDKARGKSDNVPSEEVVKKMKNYWRQLLNAKLITQRKFDNLTKAERGGLSELDKAGFIKRQLVETRQITKHVAQILDSRMNTKYDENDKLIREVKVITLKSKLVSDFRKDFQFYKVREINNYHHAHDAYLNAVVGTALIKKYPKLESEFVYGDYKVYDVRKMIAKSEQEIGKATAKYFFYSNIMNFFKTEITLANGEIRKRPLIETNGETGEIVWDKGRDFATVRKVLSMPQVNIVKKTEVQTGGFSKESILPKRNSDKLIARKKDWDPKKYGGFDSPTVAYSVLVVAKVEKGKSKKLKSVKELLGITIMERSSFEKNPIDFLEAKGYKEVKKDLIIKLPKYSLFELENGRKRMLASAGELQKGNELALPSKYVNFLYLASHYEKLKGSPEDNEQKQLFVEQHKHYLDEIIEQISEFSKRVILADANLDKVLSAYNKHRDKPIREQAENIIHLFTLTNLGAPAAFKYFDTTIDRKRYTSTKEVLDATLIHQSITGLYETRIDLSQLGGDGGGSSGGGEAAAKGGIPWLMKKPLQLTTLVPLQEYEERLLKQTMLTGSYKEKLQSLFLKYDALWQHWENQVGHRRIKPHHIATGTVNPRPQKQYPINPKAKASIQTVINDLLKQGVLIQQNSIMNTPVYPVPKPDGKWRMVLDYREVNKTIPLIAAQNQHSAGILSSIFRGKYKTTLDLSNGFWAHSITPESYWLTAFTWLGQQYCWTRLPQGFLNSPALFTADVVDLLKEVPNVQVYVDDIYISHDDPREHLEQLEKVFSLLLNAGYVVSLKKSEIAQHEVEFLGFNITKEGRGLTETFKQKLLNITPPRDLKQLQSILGLLNFARNFIPNFSELVKPLYNIIATANGKYITWTTDNSQQLQNIISMLNSAENLEERNPEVRLIMKVNTSPSAGYIRFYNEFAKRPIMYLNYVYTKAEVKFTNTEKLLTTIHKGLIKALDLGMGQEILVYSPIVSMTKIQKTPLPERKALPIRWITWMSYLEDPRIQFHYDKTLPELQQVPTVTDDIIAKIKHPSEFSMVFYTDGSAIKHPNVNKSHNAGMGIAQVQFKPEFTVINTWSIPLGDHTAQLAEVAAVEFACKKALKIDGPVLIVTDSFYVAESVNKELPYWQSNGFFNNKKKPLKHVSKWKSIADCIQLKPDIIIIHEKGHQPTASTFHTEGNNLADKLATQGSYVVNAGKRTADGSEFEKRTADGSEFESPKKKAKVE

SEQ ID NO: 531 - protein, 2082 aa, synthetic construct
MPAAKRVKLDGGDKKYSIGLDIGTNSVGWAVITDEYKVPSKKFKVLGNTDRHSIKKNLIGALLFDSGETAEATRLKRTARRRYTRRKNRICYLQEIFSNEMAKVDDSFFHRLEESFLVEEDKKHERHPIFGNIVDEVAYHEKYPTIYHLRKKLVDSTDKADLRLIYLALAHMIKFRGHFLIEGDLNPDNSDVDKLFIQLVQTYNQLFEENPINASGVDAKAILSARLSKSRRLENLIAQLPGEKKNGLFGNLIALSLGLTPNFKSNFDLAEDAKLQLSKDTYDDDLDNLLAQIGDQYADLFLAAKNLSDAILLSDILRVNTEITKAPLSASMIKRYDEHHQDLTLLKALVRQQLPEKYKEIFFDQSKNGYAGYIDGGASQEEFYKFIKPILEKMDGTEELLVKLNREDLLRKQRTFDNGSIPHQIHLGELHAILRRQEDFYPFLKDNREKIEKILTFRIPYYVGPLARGNSRFAWMTRKSEETITPWNFEEVVDKGASAQSFIERMTNFDKNLPNEKVLPKHSLLYEYFTVYNELTKVKYVTEGMRKPAFLSGEQKKAIVDLLFKTNRKVTVKQLKEDYFKKIECFDSVEISGVEDRFNASLGTYHDLLKIIKDKDFLDNEENEDILEDIVLTLTLFEDREMIEERLKTYAHLFDDKVMKQLKRRRYTGWGRLSRKLINGIRDKQSGKTILDFLKSDGFANRNFMQLIHDDSLTFKEDIQKAQVSGQGDSLHEHIANLAGSPAIKKGILQTVKVVDELVKVMGRHKPENIVIEMARENQTTQKGQKNSRERMKRIEEGIKELGSQILKEHPVENTQLQNEKLYLYYLQNGRDMYVDQELDINRLSDYDVDHIVPQSFLKDDSIDNKVLTRSDKARGKSDNVPSEEVVKKMKNYWRQLLNAKLITQRKFDNLTKAERGGLSELDKAGFIKRQLVETRQITKHVAQILDSRMNTKYDENDKLIREVKVITLKSKLVSDFRKDFQFYKVREINNYHHAHDAYLNAVVGTALIKKYPKLESEFVYGDYKVYDVRKMIAKSEQEIGKATAKYFFYSNIMNFFKTEITLANGEIRKRPLIETNGETGEIVWDKGRDFATVRKVLSMPQVNIVKKTEVQTGGFSKESILPKRNSDKLIARKKDWDPKKYGGFDSPTVAYSVLVVAKVEKGKSKKLKSVKELLGITIMERSSFEKNPIDFLEAKGYKEVKKDLIIKLPKYSLFELENGRKRMLASAGELQKGNELALPSKYVNFLYLASHYEKLKGSPEDNEQKQLFVEQHKHYLDEIIEQISEFSKRVILADANLDKVLSAYNKHRDKPIREQAENIIHLFTLTNLGAPAAFKYFDTTIDRKRYTSTKEVLDATLIHQSITGLYETRIDLSQLGGDGGGGSGGSGGIPWLMKKPLQLTTLVPLQEYEERLLKQTMLTGSYKEKLQSLFLKYDALWQHWENQVGHRRIKPHHIATGTVNPRPQKQYPINPKAKASIQTVINDLLKQGVLIQQNSIMNTPVYPVPKPDGKWRMVLDYREVNKTIPLIAAQNQHSAGILSSIFRGKYKTTLDLSNGFWAHSITPESYWLTAFTWLGQQYCWTRLPQGFLNSPALFTADVVDLLKEVPNVQVYVDDIYISHDDPREHLEQLEKVFSLLLNAGYVVSLKKSEIAQHEVEFLGFNITKEGRGLTETFKQKLLNITPPRDLKQLQSILGLLNFARNFIPNFSELVKPLYNIIATANGKYITWTTDNSQQLQNIISMLNSAENLEERNPEVRLIMKVNTSPSAGYIRFYNEFAKRPIMYLNYVYTKAEVKFTNTEKLLTTIHKGLIKALDLGMGQEILVYSPIVSMTKIQKTPLPERKALPIRWITWMSYLEDPRIQFHYDKTLPELQQVPTVTDDIIAKIKHPSEFSMVFYTDGSAIKHPNVNKSHNAGMGIAQVQFKPEFTVINTWSIPLGDHTAQLAEVAAVEFACKKALKIDGPVLIVTDSFYVAESVNKELPYWQSNGFFNNKKKPLKHVSKWKSIADCIQLKPDIIIIHEKGHQPTASTFHTEGNNLADKLATQGSYVVNAGKRTADGSEFEKRTADGSEFESPKKKAKVE

SEQ ID NO: 532 - protein, 2085 aa, synthetic construct
MPAAKRVKLDGGDKKYSIGLDIGTNSVGWAVITDEYKVPSKKFKVLGNTDRHSIKKNLIGALLFDSGETAEATRLKRTARRRYTRRKNRICYLQEIFSNEMAKVDDSFFHRLEESFLVEEDKKHERHPIFGNIVDEVAYHEKYPTIYHLRKKLVDSTDKADLRLIYLALAHMIKFRGHFLIEGDLNPDNSDVDKLFIQLVQTYNQLFEENPINASGVDAKAILSARLSKSRRLENLIAQLPGEKKNGLFGNLIALSLGLTPNFKSNFDLAEDAKLQLSKDTYDDDLDNLLAQIGDQYADLFLAAKNLSDAILLSDILRVNTEITKAPLSASMIKRYDEHHQDLTLLKALVRQQLPEKYKEIFFDQSKNGYAGYIDGGASQEEFYKFIKPILEKMDGTEELLVKLNREDLLRKQRTFDNGSIPHQIHLGELHAILRRQEDFYPFLKDNREKIEKILTFRIPYYVGPLARGNSRFAWMTRKSEETITPWNFEEVVDKGASAQSFIERMTNFDKNLPNEKVLPKHSLLYEYFTVYNELTKVKYVTEGMRKPAFLSGEQKKAIVDLLFKTNRKVTVKQLKEDYFKKIECFDSVEISGVEDRFNASLGTYHDLLKIIKDKDFLDNEENEDILEDIVLTLTLFEDREMIEERLKTYAHLFDDKVMKQLKRRRYTGWGRLSRKLINGIRDKQSGKTILDFLKSDGFANRNFMQLIHDDSLTFKEDIQKAQVSGQGDSLHEHIANLAGSPAIKKGILQTVKVVDELVKVMGRHKPENIVIEMARENQTTQKGQKNSRERMKRIEEGIKELGSQILKEHPVENTQLQNEKLYLYYLQNGRDMYVDQELDINRLSDYDVDHIVPQSFLKDDSIDNKVLTRSDKARGKSDNVPSEEVVKKMKNYWRQLLNAKLITQRKFDNLTKAERGGLSELDKAGFIKRQLVETRQITKHVAQILDSRMNTKYDENDKLIREVKVITLKSKLVSDFRKDFQFYKVREINNYHHAHDAYLNAVVGTALIKKYPKLESEFVYGDYKVYDVRKMIAKSEQEIGKATAKYFFYSNIMNFFKTEITLANGEIRKRPLIETNGETGEIVWDKGRDFATVRKVLSMPQVNIVKKTEVQTGGFSKESILPKRNSDKLIARKKDWDPKKYGGFDSPTVAYSVLVVAKVEKGKSKKLKSVKELLGITIMERSSFEKNPIDFLEAKGYKEVKKDLIIKLPKYSLFELENGRKRMLASAGELQKGNELALPSKYVNFLYLASHYEKLKGSPEDNEQKQLFVEQHKHYLDEIIEQISEFSKRVILADANLDKVLSAYNKHRDKPIREQAENIIHLFTLTNLGAPAAFKYFDTTIDRKRYTSTKEVLDATLIHQSITGLYETRIDLSQLGGDGGPAPGGGGGSGGIPWLMKKPLQLTTLVPLQEYEERLLKQTMLTGSYKEKLQSLFLKYDALWQHWENQVGHRRIKPHHIATGTVNPRPQKQYPINPKAKASIQTVINDLLKQGVLIQQNSIMNTPVYPVPKPDGKWRMVLDYREVNKTIPLIAAQNQHSAGILSSIFRGKYKTTLDLSNGFWAHSITPESYWLTAFTWLGQQYCWTRLPQGFLNSPALFTADVVDLLKEVPNVQVYVDDIYISHDDPREHLEQLEKVFSLLLNAGYVVSLKKSEIAQHEVEFLGFNITKEGRGLTETFKQKLLNITPPRDLKQLQSILGLLNFARNFIPNFSELVKPLYNIIATANGKYITWTTDNSQQLQNIISMLNSAENLEERNPEVRLIMKVNTSPSAGYIRFYNEFAKRPIMYLNYVYTKAEVKFTNTEKLLTTIHKGLIKALDLGMGQEILVYSPIVSMTKIQKTPLPERKALPIRWITWMSYLEDPRIQFHYDKTLPELQQVPTVTDDIIAKIKHPSEFSMVFYTDGSAIKHPNVNKSHNAGMGIAQVQFKPEFTVINTWSIPLGDHTAQLAEVAAVEFACKKALKIDGPVLIVTDSFYVAESVNKELPYWQSNGFFNNKKKPLKHVSKWKSIADCIQLKPDIIIIHEKGHQPTASTFHTEGNNLADKLATQGSYVVNAGKRTADGSEFEKRTADGSEFESPKKKAKVE

SEQ ID NO: 533 - protein, 2087 aa, synthetic construct
MPAAKRVKLDGGDKKYSIGLDIGTNSVGWAVITDEYKVPSKKFKVLGNTDRHSIKKNLIGALLFDSGETAEATRLKRTARRRYTRRKNRICYLQEIFSNEMAKVDDSFFHRLEESFLVEEDKKHERHPIFGNIVDEVAYHEKYPTIYHLRKKLVDSTDKADLRLIYLALAHMIKFRGHFLIEGDLNPDNSDVDKLFIQLVQTYNQLFEENPINASGVDAKAILSARLSKSRRLENLIAQLPGEKKNGLFGNLIALSLGLTPNFKSNFDLAEDAKLQLSKDTYDDDLDNLLAQIGDQYADLFLAAKNLSDAILLSDILRVNTEITKAPLSASMIKRYDEHHQDLTLLKALVRQQLPEKYKEIFFDQSKNGYAGYIDGGASQEEFYKFIKPILEKMDGTEELLVKLNREDLLRKQRTFDNGSIPHQIHLGELHAILRRQEDFYPFLKDNREKIEKILTFRIPYYVGPLARGNSRFAWMTRKSEETITPWNFEEVVDKGASAQSFIERMTNFDKNLPNEKVLPKHSLLYEYFTVYNELTKVKYVTEGMRKPAFLSGEQKKAIVDLLFKTNRKVTVKQLKEDYFKKIECFDSVEISGVEDRFNASLGTYHDLLKIIKDKDFLDNEENEDILEDIVLTLTLFEDREMIEERLKTYAHLFDDKVMKQLKRRRYTGWGRLSRKLINGIRDKQSGKTILDFLKSDGFANRNFMQLIHDDSLTFKEDIQKAQVSGQGDSLHEHIANLAGSPAIKKGILQTVKVVDELVKVMGRHKPENIVIEMARENQTTQKGQKNSRERMKRIEEGIKELGSQILKEHPVENTQLQNEKLYLYYLQNGRDMYVDQELDINRLSDYDVDHIVPQSFLKDDSIDNKVLTRSDKARGKSDNVPSEEVVKKMKNYWRQLLNAKLITQRKFDNLTKAERGGLSELDKAGFIKRQLVETRQITKHVAQILDSRMNTKYDENDKLIREVKVITLKSKLVSDFRKDFQFYKVREINNYHHAHDAYLNAVVGTALIKKYPKLESEFVYGDYKVYDVRKMIAKSEQEIGKATAKYFFYSNIMNFFKTEITLANGEIRKRPLIETNGETGEIVWDKGRDFATVRKVLSMPQVNIVKKTEVQTGGFSKESILPKRNSDKLIARKKDWDPKKYGGFDSPTVAYSVLVVAKVEKGKSKKLKSVKELLGITIMERSSFEKNPIDFLEAKGYKEVKKDLIIKLPKYSLFELENGRKRMLASAGELQKGNELALPSKYVNFLYLASHYEKLKGSPEDNEQKQLFVEQHKHYLDEIIEQISEFSKRVILADANLDKVLSAYNKHRDKPIREQAENIIHLFTLTNLGAPAAFKYFDTTIDRKRYTSTKEVLDATLIHQSITGLYETRIDLSQLGGDGGGGSGGGEAAAKGGIPWLMKKPLQLTTLVPLQEYEERLLKQTMLTGSYKEKLQSLFLKYDALWQHWENQVGHRRIKPHHIATGTVNPRPQKQYPINPKAKASIQTVINDLLKQGVLIQQNSIMNTPVYPVPKPDGKWRMVLDYREVNKTIPLIAAQNQHSAGILSSIFRGKYKTTLDLSNGFWAHSITPESYWLTAFTWLGQQYCWTRLPQGFLNSPALFTADVVDLLKEVPNVQVYVDDIYISHDDPREHLEQLEKVFSLLLNAGYVVSLKKSEIAQHEVEFLGFNITKEGRGLTETFKQKLLNITPPRDLKQLQSILGLLNFARNFIPNFSELVKPLYNIIATANGKYITWTTDNSQQLQNIISMLNSAENLEERNPEVRLIMKVNTSPSAGYIRFYNEFAKRPIMYLNYVYTKAEVKFTNTEKLLTTIHKGLIKALDLGMGQEILVYSPIVSMTKIQKTPLPERKALPIRWITWMSYLEDPRIQFHYDKTLPELQQVPTVTDDIIAKIKHPSEFSMVFYTDGSAIKHPNVNKSHNAGMGIAQVQFKPEFTVINTWSIPLGDHTAQLAEVAAVEFACKKALKIDGPVLIVTDSFYVAESVNKELPYWQSNGFFNNKKKPLKHVSKWKSIADCIQLKPDIIIIHEKGHQPTASTFHTEGNNLADKLATQGSYVVNAGKRTADGSEFEKRTADGSEFESPKKKAKVE

SEQ ID NO: 534 - protein, 2079 aa, synthetic construct
MPAAKRVKLDGGDKKYSIGLDIGTNSVGWAVITDEYKVPSKKFKVLGNTDRHSIKKNLIGALLFDSGETAEATRLKRTARRRYTRRKNRICYLQEIFSNEMAKVDDSFFHRLEESFLVEEDKKHERHPIFGNIVDEVAYHEKYPTIYHLRKKLVDSTDKADLRLIYLALAHMIKFRGHFLIEGDLNPDNSDVDKLFIQLVQTYNQLFEENPINASGVDAKAILSARLSKSRRLENLIAQLPGEKKNGLFGNLIALSLGLTPNFKSNFDLAEDAKLQLSKDTYDDDLDNLLAQIGDQYADLFLAAKNLSDAILLSDILRVNTEITKAPLSASMIKRYDEHHQDLTLLKALVRQQLPEKYKEIFFDQSKNGYAGYIDGGASQEEFYKFIKPILEKMDGTEELLVKLNREDLLRKQRTFDNGSIPHQIHLGELHAILRRQEDFYPFLKDNREKIEKILTFRIPYYVGPLARGNSRFAWMTRKSEETITPWNFEEVVDKGASAQSFIERMTNFDKNLPNEKVLPKHSLLYEYFTVYNELTKVKYVTEGMRKPAFLSGEQKKAIVDLLFKTNRKVTVKQLKEDYFKKIECFDSVEISGVEDRFNASLGTYHDLLKIIKDKDFLDNEENEDILEDIVLTLTLFEDREMIEERLKTYAHLFDDKVMKQLKRRRYTGWGRLSRKLINGIRDKQSGKTILDFLKSDGFANRNFMQLIHDDSLTFKEDIQKAQVSGQGDSLHEHIANLAGSPAIKKGILQTVKVVDELVKVMGRHKPENIVIEMARENQTTQKGQKNSRERMKRIEEGIKELGSQILKEHPVENTQLQNEKLYLYYLQNGRDMYVDQELDINRLSDYDVDHIVPQSFLKDDSIDNKVLTRSDKARGKSDNVPSEEVVKKMKNYWRQLLNAKLITQRKFDNLTKAERGGLSELDKAGFIKRQLVETRQITKHVAQILDSRMNTKYDENDKLIREVKVITLKSKLVSDFRKDFQFYKVREINNYHHAHDAYLNAVVGTALIKKYPKLESEFVYGDYKVYDVRKMIAKSEQEIGKATAKYFFYSNIMNFFKTEITLANGEIRKRPLIETNGETGEIVWDKGRDFATVRKVLSMPQVNIVKKTEVQTGGFSKESILPKRNSDKLIARKKDWDPKKYGGFDSPTVAYSVLVVAKVEKGKSKKLKSVKELLGITIMERSSFEKNPIDFLEAKGYKEVKKDLIIKLPKYSLFELENGRKRMLASAGELQKGNELALPSKYVNFLYLASHYEKLKGSPEDNEQKQLFVEQHKHYLDEIIEQISEFSKRVILADANLDKVLSAYNKHRDKPIREQAENIIHLFTLTNLGAPAAFKYFDTTIDRKRYTSTKEVLDATLIHQSITGLYETRIDLSQLGGDGGGSSGGIPWLMKKPLQLTTLVPLQEYEERLLKQTMLTGSYKEKLQSLFLKYDALWQHWENQVGHRRIKPHHIATGTVNPRPQKQYPINPKAKASIQTVINDLLKQGVLIQQNSIMNTPVYPVPKPDGKWRMVLDYREVNKTIPLIAAQNQHSAGILSSIFRGKYKTTLDLSNGFWAHSITPESYWLTAFTWLGQQYCWTRLPQGFLNSPALFNADVVDLLKEVPNVQVYVDDIYISHDDPREHLEQLEKVFSLLLNAGYVVSLKKSEIAQHEVEFLGFNITKEGRGLTETFKQKLLNITPPRDLKQLQSILGLLNFARNFIPNFSELVKPLYNIIATAPGKYITWTTDNSQQLQNIISMLNSAENLEERNPEVRLIMKVNTSPSAGYIRFYNEFAKRPIMYLNYVYTKAEVKFTNTEKLLTTIHKGLIKALDLGMGQEILVYSPIVSMTKIQKTPLPERKALPIRWITWMSYLEDPRIQFHYDKTLPELQQVPTVTDDIIAKIKHPSEFSMVFYTDGSAIKHPNVNKSHNAGMGIAQVQFKPEFTVINTWSIPLGDHTAQLAEVAAVEFACKKALKIDGPVLIVTDSFYVAESVNKELPYWQSNGFFNNKKKPLKHVSKWKSIADCIQLKPDIIIIHEKGHQPTASTFHTEGNNLADKLATQGSYVVNAGKRTADGSEFEKRTADGSEFESPKKKAKVE

SEQ ID NO: 535 - protein, 2082 aa, synthetic construct
MPAAKRVKLDGGDKKYSIGLDIGTNSVGWAVITDEYKVPSKKFKVLGNTDRHSIKKNLIGALLFDSGETAEATRLKRTARRRYTRRKNRICYLQEIFSNEMAKVDDSFFHRLEESFLVEEDKKHERHPIFGNIVDEVAYHEKYPTIYHLRKKLVDSTDKADLRLIYLALAHMIKFRGHFLIEGDLNPDNSDVDKLFIQLVQTYNQLFEENPINASGVDAKAILSARLSKSRRLENLIAQLPGEKKNGLFGNLIALSLGLTPNFKSNFDLAEDAKLQLSKDTYDDDLDNLLAQIGDQYADLFLAAKNLSDAILLSDILRVNTEITKAPLSASMIKRYDEHHQDLTLLKALVRQQLPEKYKEIFFDQSKNGYAGYIDGGASQEEFYKFIKPILEKMDGTEELLVKLNREDLLRKQRTFDNGSIPHQIHLGELHAILRRQEDFYPFLKDNREKIEKILTFRIPYYVGPLARGNSRFAWMTRKSEETITPWNFEEVVDKGASAQSFIERMTNFDKNLPNEKVLPKHSLLYEYFTVYNELTKVKYVTEGMRKPAFLSGEQKKAIVDLLFKTNRKVTVKQLKEDYFKKIECFDSVEISGVEDRFNASLGTYHDLLKIIKDKDFLDNEENEDILEDIVLTLTLFEDREMIEERLKTYAHLFDDKVMKQLKRRRYTGWGRLSRKLINGIRDKQSGKTILDFLKSDGFANRNFMQLIHDDSLTFKEDIQKAQVSGQGDSLHEHIANLAGSPAIKKGILQTVKVVDELVKVMGRHKPENIVIEMARENQTTQKGQKNSRERMKRIEEGIKELGSQILKEHPVENTQLQNEKLYLYYLQNGRDMYVDQELDINRLSDYDVDHIVPQSFLKDDSIDNKVLTRSDKARGKSDNVPSEEVVKKMKNYWRQLLNAKLITQRKFDNLTKAERGGLSELDKAGFIKRQLVETRQITKHVAQILDSRMNTKYDENDKLIREVKVITLKSKLVSDFRKDFQFYKVREINNYHHAHDAYLNAVVGTALIKKYPKLESEFVYGDYKVYDVRKMIAKSEQEIGKATAKYFFYSNIMNFFKTEITLANGEIRKRPLIETNGETGEIVWDKGRDFATVRKVLSMPQVNIVKKTEVQTGGFSKESILPKRNSDKLIARKKDWDPKKYGGFDSPTVAYSVLVVAKVEKGKSKKLKSVKELLGITIMERSSFEKNPIDFLEAKGYKEVKKDLIIKLPKYSLFELENGRKRMLASAGELQKGNELALPSKYVNFLYLASHYEKLKGSPEDNEQKQLFVEQHKHYLDEIIEQISEFSKRVILADANLDKVLSAYNKHRDKPIREQAENIIHLFTLTNLGAPAAFKYFDTTIDRKRYTSTKEVLDATLIHQSITGLYETRIDLSQLGGDGGPAPGSSGGIPWLMKKPLQLTTLVPLQEYEERLLKQTMLTGSYKEKLQSLFLKYDALWQHWENQVGHRRIKPHHIATGTVNPRPQKQYPINPKAKASIQTVINDLLKQGVLIQQNSIMNTPVYPVPKPDGKWRMVLDYREVNKTIPLIAAQNQHSAGILSSIFRGKYKTTLDLSNGFWAHSITPESYWLTAFTWLGQQYCWTRLPQGFLNSPALFNADVVDLLKEVPNVQVYVDDIYISHDDPREHLEQLEKVFSLLLNAGYVVSLKKSEIAQHEVEFLGFNITKEGRGLTETFKQKLLNITPPRDLKQLQSILGLLNFARNFIPNFSELVKPLYNIIATAPGKYITWTTDNSQQLQNIISMLNSAENLEERNPEVRLIMKVNTSPSAGYIRFYNEFAKRPIMYLNYVYTKAEVKFTNTEKLLTTIHKGLIKALDLGMGQEILVYSPIVSMTKIQKTPLPERKALPIRWITWMSYLEDPRIQFHYDKTLPELQQVPTVTDDIIAKIKHPSEFSMVFYTDGSAIKHPNVNKSHNAGMGIAQVQFKPEFTVINTWSIPLGDHTAQLAEVAAVEFACKKALKIDGPVLIVTDSFYVAESVNKELPYWQSNGFFNNKKKPLKHVSKWKSIADCIQLKPDIIIIHEKGHQPTASTFHTEGNNLADKLATQGSYVVNAGKRTADGSEFEKRTADGSEFESPKKKAKVE

SEQ ID NO: 536 - protein, 2087 aa, synthetic construct
MPAAKRVKLDGGDKKYSIGLDIGTNSVGWAVITDEYKVPSKKFKVLGNTDRHSIKKNLIGALLFDSGETAEATRLKRTARRRYTRRKNRICYLQEIFSNEMAKVDDSFFHRLEESFLVEEDKKHERHPIFGNIVDEVAYHEKYPTIYHLRKKLVDSTDKADLRLIYLALAHMIKFRGHFLIEGDLNPDNSDVDKLFIQLVQTYNQLFEENPINASGVDAKAILSARLSKSRRLENLIAQLPGEKKNGLFGNLIALSLGLTPNFKSNFDLAEDAKLQLSKDTYDDDLDNLLAQIGDQYADLFLAAKNLSDAILLSDILRVNTEITKAPLSASMIKRYDEHHQDLTLLKALVRQQLPEKYKEIFFDQSKNGYAGYIDGGASQEEFYKFIKPILEKMDGTEELLVKLNREDLLRKQRTFDNGSIPHQIHLGELHAILRRQEDFYPFLKDNREKIEKILTFRIPYYVGPLARGNSRFAWMTRKSEETITPWNFEEVVDKGASAQSFIERMTNFDKNLPNEKVLPKHSLLYEYFTVYNELTKVKYVTEGMRKPAFLSGEQKKAIVDLLFKTNRKVTVKQLKEDYFKKIECFDSVEISGVEDRFNASLGTYHDLLKIIKDKDFLDNEENEDILEDIVLTLTLFEDREMIEERLKTYAHLFDDKVMKQLKRRRYTGWGRLSRKLINGIRDKQSGKTILDFLKSDGFANRNFMQLIHDDSLTFKEDIQKAQVSGQGDSLHEHIANLAGSPAIKKGILQTVKVVDELVKVMGRHKPENIVIEMARENQTTQKGQKNSRERMKRIEEGIKELGSQILKEHPVENTQLQNEKLYLYYLQNGRDMYVDQELDINRLSDYDVDHIVPQSFLKDDSIDNKVLTRSDKARGKSDNVPSEEVVKKMKNYWRQLLNAKLITQRKFDNLTKAERGGLSELDKAGFIKRQLVETRQITKHVAQILDSRMNTKYDENDKLIREVKVITLKSKLVSDFRKDFQFYKVREINNYHHAHDAYLNAVVGTALIKKYPKLESEFVYGDYKVYDVRKMIAKSEQEIGKATAKYFFYSNIMNFFKTEITLANGEIRKRPLIETNGETGEIVWDKGRDFATVRKVLSMPQVNIVKKTEVQTGGFSKESILPKRNSDKLIARKKDWDPKKYGGFDSPTVAYSVLVVAKVEKGKSKKLKSVKELLGITIMERSSFEKNPIDFLEAKGYKEVKKDLIIKLPKYSLFELENGRKRMLASAGELQKGNELALPSKYVNFLYLASHYEKLKGSPEDNEQKQLFVEQHKHYLDEIIEQISEFSKRVILADANLDKVLSAYNKHRDKPIREQAENIIHLFTLTNLGAPAAFKYFDTTIDRKRYTSTKEVLDATLIHQSITGLYETRIDLSQLGGDGGGSSGGSEAAAKGGIPWLMKKPLQLTTLVPLQEYEERLLKQTMLTGSYKEKLQSLFLKYDALWQHWENQVGHRRIKPHHIATGTVNPRPQKQYPINPKAKASIQTVINDLLKQGVLIQQNSIMNTPVYPVPKPDGKWRMVLDYREVNKTIPLIAAQNQHSAGILSSIFRGKYKTTLDLSNGFWAHSITPESYWLTAFTWLGQQYCWTRLPQGFLNSPALFNADVVDLLKEVPNVQVYVDDIYISHDDPREHLEQLEKVFSLLLNAGYVVSLKKSEIAQHEVEFLGFNITKEGRGLTETFKQKLLNITPPRDLKQLQSILGLLNFARNFIPNFSELVKPLYNIIATAPGKYITWTTDNSQQLQNIISMLNSAENLEERNPEVRLIMKVNTSPSAGYIRFYNEFAKRPIMYLNYVYTKAEVKFTNTEKLLTTIHKGLIKALDLGMGQEILVYSPIVSMTKIQKTPLPERKALPIRWITWMSYLEDPRIQFHYDKTLPELQQVPTVTDDIIAKIKHPSEFSMVFYTDGSAIKHPNVNKSHNAGMGIAQVQFKPEFTVINTWSIPLGDHTAQLAEVAAVEFACKKALKIDGPVLIVTDSFYVAESVNKELPYWQSNGFFNNKKKPLKHVSKWKSIADCIQLKPDIIIIHEKGHQPTASTFHTEGNNLADKLATQGSYVVNAGKRTADGSEFEKRTADGSEFESPKKKAKVE

SEQ ID NO: 537 - protein, 2087 aa, synthetic construct
MPAAKRVKLDGGDKKYSIGLDIGTNSVGWAVITDEYKVPSKKFKVLGNTDRHSIKKNLIGALLFDSGETAEATRLKRTARRRYTRRKNRICYLQEIFSNEMAKVDDSFFHRLEESFLVEEDKKHERHPIFGNIVDEVAYHEKYPTIYHLRKKLVDSTDKADLRLIYLALAHMIKFRGHFLIEGDLNPDNSDVDKLFIQLVQTYNQLFEENPINASGVDAKAILSARLSKSRRLENLIAQLPGEKKNGLFGNLIALSLGLTPNFKSNFDLAEDAKLQLSKDTYDDDLDNLLAQIGDQYADLFLAAKNLSDAILLSDILRVNTEITKAPLSASMIKRYDEHHQDLTLLKALVRQQLPEKYKEIFFDQSKNGYAGYIDGGASQEEFYKFIKPILEKMDGTEELLVKLNREDLLRKQRTFDNGSIPHQIHLGELHAILRRQEDFYPFLKDNREKIEKILTFRIPYYVGPLARGNSRFAWMTRKSEETITPWNFEEVVDKGASAQSFIERMTNFDKNLPNEKVLPKHSLLYEYFTVYNELTKVKYVTEGMRKPAFLSGEQKKAIVDLLFKTNRKVTVKQLKEDYFKKIECFDSVEISGVEDRFNASLGTYHDLLKIIKDKDFLDNEENEDILEDIVLTLTLFEDREMIEERLKTYAHLFDDKVMKQLKRRRYTGWGRLSRKLINGIRDKQSGKTILDFLKSDGFANRNFMQLIHDDSLTFKEDIQKAQVSGQGDSLHEHIANLAGSPAIKKGILQTVKVVDELVKVMGRHKPENIVIEMARENQTTQKGQKNSRERMKRIEEGIKELGSQILKEHPVENTQLQNEKLYLYYLQNGRDMYVDQELDINRLSDYDVDHIVPQSFLKDDSIDNKVLTRSDKARGKSDNVPSEEVVKKMKNYWRQLLNAKLITQRKFDNLTKAERGGLSELDKAGFIKRQLVETRQITKHVAQILDSRMNTKYDENDKLIREVKVITLKSKLVSDFRKDFQFYKVREINNYHHAHDAYLNAVVGTALIKKYPKLESEFVYGDYKVYDVRKMIAKSEQEIGKATAKYFFYSNIMNFFKTEITLANGEIRKRPLIETNGETGEIVWDKGRDFATVRKVLSMPQVNIVKKTEVQTGGFSKESILPKRNSDKLIARKKDWDPKKYGGFDSPTVAYSVLVVAKVEKGKSKKLKSVKELLGITIMERSSFEKNPIDFLEAKGYKEVKKDLIIKLPKYSLFELENGRKRMLASAGELQKGNELALPSKYVNFLYLASHYEKLKGSPEDNEQKQLFVEQHKHYLDEIIEQISEFSKRVILADANLDKVLSAYNKHRDKPIREQAENIIHLFTLTNLGAPAAFKYFDTTIDRKRYTSTKEVLDATLIHQSITGLYETRIDLSQLGGDGGGSSPAPEAAAKGGIPWLMKKPLQLTTLVPLQEYEERLLKQTMLTGSYKEKLQSLFLKYDALWQHWENQVGHRRIKPHHIATGTVNPRPQKQYPINPKAKASIQTVINDLLKQGVLIQQNSIMNTPVYPVPKPDGKWRMVLDYREVNKTIPLIAAQNQHSAGILSSIFRGKYKTTLDLSNGFWAHSITPESYWLTAFTWLGQQYCWTRLPQGFLNSPALFNADVVDLLKEVPNVQVYVDDIYISHDDPREHLEQLEKVFSLLLNAGYVVSLKKSEIAQHEVEFLGFNITKEGRGLTETFKQKLLNITPPRDLKQLQSILGLLNFARNFIPNFSELVKPLYNIIATAPGKYITWTTDNSQQLQNIISMLNSAENLEERNPEVRLIMKVNTSPSAGYIRFYNEFAKRPIMYLNYVYTKAEVKFTNTEKLLTTIHKGLIKALDLGMGQEILVYSPIVSMTKIQKTPLPERKALPIRWITWMSYLEDPRIQFHYDKTLPELQQVPTVTDDIIAKIKHPSEFSMVFYTDGSAIKHPNVNKSHNAGMGIAQVQFKPEFTVINTWSIPLGDHTAQLAEVAAVEFACKKALKIDGPVLIVTDSFYVAESVNKELPYWQSNGFFNNKKKPLKHVSKWKSIADCIQLKPDIIIIHEKGHQPTASTFHTEGNNLADKLATQGSYVVNAGKRTADGSEFEKRTADGSEFESPKKKAKVE

SEQ ID NO: 538 - protein, 2087 aa, synthetic construct
MPAAKRVKLDGGDKKYSIGLDIGTNSVGWAVITDEYKVPSKKFKVLGNTDRHSIKKNLIGALLFDSGETAEATRLKRTARRRYTRRKNRICYLQEIFSNEMAKVDDSFFHRLEESFLVEEDKKHERHPIFGNIVDEVAYHEKYPTIYHLRKKLVDSTDKADLRLIYLALAHMIKFRGHFLIEGDLNPDNSDVDKLFIQLVQTYNQLFEENPINASGVDAKAILSARLSKSRRLENLIAQLPGEKKNGLFGNLIALSLGLTPNFKSNFDLAEDAKLQLSKDTYDDDLDNLLAQIGDQYADLFLAAKNLSDAILLSDILRVNTEITKAPLSASMIKRYDEHHQDLTLLKALVRQQLPEKYKEIFFDQSKNGYAGYIDGGASQEEFYKFIKPILEKMDGTEELLVKLNREDLLRKQRTFDNGSIPHQIHLGELHAILRRQEDFYPFLKDNREKIEKILTFRIPYYVGPLARGNSRFAWMTRKSEETITPWNFEEVVDKGASAQSFIERMTNFDKNLPNEKVLPKHSLLYEYFTVYNELTKVKYVTEGMRKPAFLSGEQKKAIVDLLFKTNRKVTVKQLKEDYFKKIECFDSVEISGVEDRFNASLGTYHDLLKIIKDKDFLDNEENEDILEDIVLTLTLFEDREMIEERLKTYAHLFDDKVMKQLKRRRYTGWGRLSRKLINGIRDKQSGKTILDFLKSDGFANRNFMQLIHDDSLTFKEDIQKAQVSGQGDSLHEHIANLAGSPAIKKGILQTVKVVDELVKVMGRHKPENIVIEMARENQTTQKGQKNSRERMKRIEEGIKELGSQILKEHPVENTQLQNEKLYLYYLQNGRDMYVDQELDINRLSDYDVDHIVPQSFLKDDSIDNKVLTRSDKARGKSDNVPSEEVVKKMKNYWRQLLNAKLITQRKFDNLTKAERGGLSELDKAGFIKRQLVETRQITKHVAQILDSRMNTKYDENDKLIREVKVITLKSKLVSDFRKDFQFYKVREINNYHHAHDAYLNAVVGTALIKKYPKLESEFVYGDYKVYDVRKMIAKSEQEIGKATAKYFFYSNIMNFFKTEITLANGEIRKRPLIETNGETGEIVWDKGRDFATVRKVLSMPQVNIVKKTEVQTGGFSKESILPKRNSDKLIARKKDWDPKKYGGFDSPTVAYSVLVVAKVEKGKSKKLKSVKELLGITIMERSSFEKNPIDFLEAKGYKEVKKDLIIKLPKYSLFELENGRKRMLASAGELQKGNELALPSKYVNFLYLASHYEKLKGSPEDNEQKQLFVEQHKHYLDEIIEQISEFSKRVILADANLDKVLSAYNKHRDKPIREQAENIIHLFTLTNLGAPAAFKYFDTTIDRKRYTSTKEVLDATLIHQSITGLYETRIDLSQLGGDGGPAPEAAAKGGSGGIPWLMKKPLQLTTLVPLQEYEERLLKQTMLTGSYKEKLQSLFLKYDALWQHWENQVGHRRIKPHHIATGTVNPRPQKQYPINPKAKASIQTVINDLLKQGVLIQQNSIMNTPVYPVPKPDGKWRMVLDYREVNKTIPLIAAQNQHSAGILSSIFRGKYKTTLDLSNGFWAHSITPESYWLTAFTWLGQQYCWTRLPQGFLNSPALFNADVVDLLKEVPNVQVYVDDIYISHDDPREHLEQLEKVFSLLLNAGYVVSLKKSEIAQHEVEFLGFNITKEGRGLTETFKQKLLNITPPRDLKQLQSILGLLNFARNFIPNFSELVKPLYNIIATAPGKYITWTTDNSQQLQNIISMLNSAENLEERNPEVRLIMKVNTSPSAGYIRFYNEFAKRPIMYLNYVYTKAEVKFTNTEKLLTTIHKGLIKALDLGMGQEILVYSPIVSMTKIQKTPLPERKALPIRWITWMSYLEDPRIQFHYDKTLPELQQVPTVTDDIIAKIKHPSEFSMVFYTDGSAIKHPNVNKSHNAGMGIAQVQFKPEFTVINTWSIPLGDHTAQLAEVAAVEFACKKALKIDGPVLIVTDSFYVAESVNKELPYWQSNGFFNNKKKPLKHVSKWKSIADCIQLKPDIIIIHEKGHQPTASTFHTEGNNLADKLATQGSYVVNAGKRTADGSEFEKRTADGSEFESPKKKAKVE

SEQ ID NO: 539 - protein, 2096 aa, synthetic construct
MPAAKRVKLDGGDKKYSIGLDIGTNSVGWAVITDEYKVPSKKFKVLGNTDRHSIKKNLIGALLFDSGETAEATRLKRTARRRYTRRKNRICYLQEIFSNEMAKVDDSFFHRLEESFLVEEDKKHERHPIFGNIVDEVAYHEKYPTIYHLRKKLVDSTDKADLRLIYLALAHMIKFRGHFLIEGDLNPDNSDVDKLFIQLVQTYNQLFEENPINASGVDAKAILSARLSKSRRLENLIAQLPGEKKNGLFGNLIALSLGLTPNFKSNFDLAEDAKLQLSKDTYDDDLDNLLAQIGDQYADLFLAAKNLSDAILLSDILRVNTEITKAPLSASMIKRYDEHHQDLTLLKALVRQQLPEKYKEIFFDQSKNGYAGYIDGGASQEEFYKFIKPILEKMDGTEELLVKLNREDLLRKQRTFDNGSIPHQIHLGELHAILRRQEDFYPFLKDNREKIEKILTFRIPYYVGPLARGNSRFAWMTRKSEETITPWNFEEVVDKGASAQSFIERMTNFDKNLPNEKVLPKHSLLYEYFTVYNELTKVKYVTEGMRKPAFLSGEQKKAIVDLLFKTNRKVTVKQLKEDYFKKIECFDSVEISGVEDRFNASLGTYHDLLKIIKDKDFLDNEENEDILEDIVLTLTLFEDREMIEERLKTYAHLFDDKVMKQLKRRRYTGWGRLSRKLINGIRDKQSGKTILDFLKSDGFANRNFMQLIHDDSLTFKEDIQKAQVSGQGDSLHEHIANLAGSPAIKKGILQTVKVVDELVKVMGRHKPENIVIEMARENQTTQKGQKNSRERMKRIEEGIKELGSQILKEHPVENTQLQNEKLYLYYLQNGRDMYVDQELDINRLSDYDVDHIVPQSFLKDDSIDNKVLTRSDKARGKSDNVPSEEVVKKMKNYWRQLLNAKLITQRKFDNLTKAERGGLSELDKAGFIKRQLVETRQITKHVAQILDSRMNTKYDENDKLIREVKVITLKSKLVSDFRKDFQFYKVREINNYHHAHDAYLNAVVGTALIKKYPKLESEFVYGDYKVYDVRKMIAKSEQEIGKATAKYFFYSNIMNFFKTEITLANGEIRKRPLIETNGETGEIVWDKGRDFATVRKVLSMPQVNIVKKTEVQTGGFSKESILPKRNSDKLIARKKDWDPKKYGGFDSPTVAYSVLVVAKVEKGKSKKLKSVKELLGITIMERSSFEKNPIDFLEAKGYKEVKKDLIIKLPKYSLFELENGRKRMLASAGELQKGNELALPSKYVNFLYLASHYEKLKGSPEDNEQKQLFVEQHKHYLDEIIEQISEFSKRVILADANLDKVLSAYNKHRDKPIREQAENIIHLFTLTNLGAPAAFKYFDTTIDRKRYTSTKEVLDATLIHQSITGLYETRIDLSQLGGDGGEAAAKEAAAKEAAAKEAAAKGGIPWLMKKPLQLTTLVPLQEYEERLLKQTMLTGSYKEKLQSLFLKYDALWQHWENQVGHRRIKPHHIATGTVNPRPQKQYPINPKAKASIQTVINDLLKQGVLIQQNSIMNTPVYPVPKPDGKWRMVLDYREVNKTIPLIAAQNQHSAGILSSIFRGKYKTTLDLSNGFWAHSITPESYWLTAFTWLGQQYCWTRLPQGFLNSPALFNADVVDLLKEVPNVQVYVDDIYISHDDPREHLEQLEKVFSLLLNAGYVVSLKKSEIAQHEVEFLGFNITKEGRGLTETFKQKLLNITPPRDLKQLQSILGLLNFARNFIPNFSELVKPLYNIIATAPGKYITWTTDNSQQLQNIISMLNSAENLEERNPEVRLIMKVNTSPSAGYIRFYNEFAKRPIMYLNYVYTKAEVKFTNTEKLLTTIHKGLIKALDLGMGQEILVYSPIVSMTKIQKTPLPERKALPIRWITWMSYLEDPRIQFHYDKTLPELQQVPTVTDDIIAKIKHPSEFSMVFYTDGSAIKHPNVNKSHNAGMGIAQVQFKPEFTVINTWSIPLGDHTAQLAEVAAVEFACKKALKIDGPVLIVTDSFYVAESVNKELPYWQSNGFFNNKKKPLKHVSKWKSIADCIQLKPDIIIIHEKGHQPTASTFHTEGNNLADKLATQGSYVVNAGKRTADGSEFEKRTADGSEFESPKKKAKVE

SEQ ID NO: 540 - protein, 2085 aa, synthetic construct
MPAAKRVKLDGGDKKYSIGLDIGTNSVGWAVITDEYKVPSKKFKVLGNTDRHSIKKNLIGALLFDSGETAEATRLKRTARRRYTRRKNRICYLQEIFSNEMAKVDDSFFHRLEESFLVEEDKKHERHPIFGNIVDEVAYHEKYPTIYHLRKKLVDSTDKADLRLIYLALAHMIKFRGHFLIEGDLNPDNSDVDKLFIQLVQTYNQLFEENPINASGVDAKAILSARLSKSRRLENLIAQLPGEKKNGLFGNLIALSLGLTPNFKSNFDLAEDAKLQLSKDTYDDDLDNLLAQIGDQYADLFLAAKNLSDAILLSDILRVNTEITKAPLSASMIKRYDEHHQDLTLLKALVRQQLPEKYKEIFFDQSKNGYAGYIDGGASQEEFYKFIKPILEKMDGTEELLVKLNREDLLRKQRTFDNGSIPHQIHLGELHAILRRQEDFYPFLKDNREKIEKILTFRIPYYVGPLARGNSRFAWMTRKSEETITPWNFEEVVDKGASAQSFIERMTNFDKNLPNEKVLPKHSLLYEYFTVYNELTKVKYVTEGMRKPAFLSGEQKKAIVDLLFKTNRKVTVKQLKEDYFKKIECFDSVEISGVEDRFNASLGTYHDLLKIIKDKDFLDNEENEDILEDIVLTLTLFEDREMIEERLKTYAHLFDDKVMKQLKRRRYTGWGRLSRKLINGIRDKQSGKTILDFLKSDGFANRNFMQLIHDDSLTFKEDIQKAQVSGQGDSLHEHIANLAGSPAIKKGILQTVKVVDELVKVMGRHKPENIVIEMARENQTTQKGQKNSRERMKRIEEGIKELGSQILKEHPVENTQLQNEKLYLYYLQNGRDMYVDQELDINRLSDYDVDHIVPQSFLKDDSIDNKVLTRSDKARGKSDNVPSEEVVKKMKNYWRQLLNAKLITQRKFDNLTKAERGGLSELDKAGFIKRQLVETRQITKHVAQILDSRMNTKYDENDKLIREVKVITLKSKLVSDFRKDFQFYKVREINNYHHAHDAYLNAVVGTALIKKYPKLESEFVYGDYKVYDVRKMIAKSEQEIGKATAKYFFYSNIMNFFKTEITLANGEIRKRPLIETNGETGEIVWDKGRDFATVRKVLSMPQVNIVKKTEVQTGGFSKESILPKRNSDKLIARKKDWDPKKYGGFDSPTVAYSVLVVAKVEKGKSKKLKSVKELLGITIMERSSFEKNPIDFLEAKGYKEVKKDLIIKLPKYSLFELENGRKRMLASAGELQKGNELALPSKYVNFLYLASHYEKLKGSPEDNEQKQLFVEQHKHYLDEIIEQISEFSKRVILADANLDKVLSAYNKHRDKPIREQAENIIHLFTLTNLGAPAAFKYFDTTIDRKRYTSTKEVLDATLIHQSITGLYETRIDLSQLGGDGGGGSPAPGSSGGIPWLMKKPLQLTTLVPLQEYEERLLKQTMLTGSYKEKLQSLFLKYDALWQHWENQVGHRRIKPHHIATGTVNPRPQKQYPINPKAKASIQTVINDLLKQGVLIQQNSIMNTPVYPVPKPDGKWRMVLDYREVNKTIPLIAAQNQHSAGILSSIFRGKYKTTLDLSNGFWAHSITPESYWLTAFTWLGQQYCWTRLPQGFLNSPALFNADVVDLLKEVPNVQVYVDDIYISHDDPREHLEQLEKVFSLLLNAGYVVSLKKSEIAQHEVEFLGFNITKEGRGLTETFKQKLLNITPPRDLKQLQSILGLLNFARNFIPNFSELVKPLYNIIATAPGKYITWTTDNSQQLQNIISMLNSAENLEERNPEVRLIMKVNTSPSAGYIRFYNEFAKRPIMYLNYVYTKAEVKFTNTEKLLTTIHKGLIKALDLGMGQEILVYSPIVSMTKIQKTPLPERKALPIRWITWMSYLEDPRIQFHYDKTLPELQQVPTVTDDIIAKIKHPSEFSMVFYTDGSAIKHPNVNKSHNAGMGIAQVQFKPEFTVINTWSIPLGDHTAQLAEVAAVEFACKKALKIDGPVLIVTDSFYVAESVNKELPYWQSNGFFNNKKKPLKHVSKWKSIADCIQLKPDIIIIHEKGHQPTASTFHTEGNNLADKLATQGSYVVNAGKRTADGSEFEKRTADGSEFESPKKKAKVE

SEQ ID NO: 541 - protein, 2091 aa, synthetic construct
MPAAKRVKLDGGDKKYSIGLDIGTNSVGWAVITDEYKVPSKKFKVLGNTDRHSIKKNLIGALLFDSGETAEATRLKRTARRRYTRRKNRICYLQEIFSNEMAKVDDSFFHRLEESFLVEEDKKHERHPIFGNIVDEVAYHEKYPTIYHLRKKLVDSTDKADLRLIYLALAHMIKFRGHFLIEGDLNPDNSDVDKLFIQLVQTYNQLFEENPINASGVDAKAILSARLSKSRRLENLIAQLPGEKKNGLFGNLIALSLGLTPNFKSNFDLAEDAKLQLSKDTYDDDLDNLLAQIGDQYADLFLAAKNLSDAILLSDILRVNTEITKAPLSASMIKRYDEHHQDLTLLKALVRQQLPEKYKEIFFDQSKNGYAGYIDGGASQEEFYKFIKPILEKMDGTEELLVKLNREDLLRKQRTFDNGSIPHQIHLGELHAILRRQEDFYPFLKDNREKIEKILTFRIPYYVGPLARGNSRFAWMTRKSEETITPWNFEEVVDKGASAQSFIERMTNFDKNLPNEKVLPKHSLLYEYFTVYNELTKVKYVTEGMRKPAFLSGEQKKAIVDLLFKTNRKVTVKQLKEDYFKKIECFDSVEISGVEDRFNASLGTYHDLLKIIKDKDFLDNEENEDILEDIVLTLTLFEDREMIEERLKTYAHLFDDKVMKQLKRRRYTGWGRLSRKLINGIRDKQSGKTILDFLKSDGFANRNFMQLIHDDSLTFKEDIQKAQVSGQGDSLHEHIANLAGSPAIKKGILQTVKVVDELVKVMGRHKPENIVIEMARENQTTQKGQKNSRERMKRIEEGIKELGSQILKEHPVENTQLQNEKLYLYYLQNGRDMYVDQELDINRLSDYDVDHIVPQSFLKDDSIDNKVLTRSDKARGKSDNVPSEEVVKKMKNYWRQLLNAKLITQRKFDNLTKAERGGLSELDKAGFIKRQLVETRQITKHVAQILDSRMNTKYDENDKLIREVKVITLKSKLVSDFRKDFQFYKVREINNYHHAHDAYLNAVVGTALIKKYPKLESEFVYGDYKVYDVRKMIAKSEQEIGKATAKYFFYSNIMNFFKTEITLANGEIRKRPLIETNGETGEIVWDKGRDFATVRKVLSMPQVNIVKKTEVQTGGFSKESILPKRNSDKLIARKKDWDPKKYGGFDSPTVAYSVLVVAKVEKGKSKKLKSVKELLGITIMERSSFEKNPIDFLEAKGYKEVKKDLIIKLPKYSLFELENGRKRMLASAGELQKGNELALPSKYVNFLYLASHYEKLKGSPEDNEQKQLFVEQHKHYLDEIIEQISEFSKRVILADANLDKVLSAYNKHRDKPIREQAENIIHLFTLTNLGAPAAFKYFDTTIDRKRYTSTKEVLDATLIHQSITGLYETRIDLSQLGGDGGEAAAKGGGGSEAAAKGGIPWLMKKPLQLTTLVPLQEYEERLLKQTMLTGSYKEKLQSLFLKYDALWQHWENQVGHRRIKPHHIATGTVNPRPQKQYPINPKAKASIQTVINDLLKQGVLIQQNSIMNTPVYPVPKPDGKWRMVLDYREVNKTIPLIAAQNQHSAGILSSIFRGKYKTTLDLSNGFWAHSITPESYWLTAFTWLGQQYCWTRLPQGFLNSPALFNADVVDLLKEVPNVQVYVDDIYISHDDPREHLEQLEKVFSLLLNAGYVVSLKKSEIAQHEVEFLGFNITKEGRGLTETFKQKLLNITPPRDLKQLQSILGLLNFARNFIPNFSELVKPLYNIIATAPGKYITWTTDNSQQLQNIISMLNSAENLEERNPEVRLIMKVNTSPSAGYIRFYNEFAKRPIMYLNYVYTKAEVKFTNTEKLLTTIHKGLIKALDLGMGQEILVYSPIVSMTKIQKTPLPERKALPIRWITWMSYLEDPRIQFHYDKTLPELQQVPTVTDDIIAKIKHPSEFSMVFYTDGSAIKHPNVNKSHNAGMGIAQVQFKPEFTVINTWSIPLGDHTAQLAEVAAVEFACKKALKIDGPVLIVTDSFYVAESVNKELPYWQSNGFFNNKKKPLKHVSKWKSIADCIQLKPDIIIIHEKGHQPTASTFHTEGNNLADKLATQGSYVVNAGKRTADGSEFEKRTADGSEFESPKKKAKVE

SEQ ID NO: 542 - protein, 2085 aa, synthetic construct
MPAAKRVKLDGGDKKYSIGLDIGTNSVGWAVITDEYKVPSKKFKVLGNTDRHSIKKNLIGALLFDSGETAEATRLKRTARRRYTRRKNRICYLQEIFSNEMAKVDDSFFHRLEESFLVEEDKKHERHPIFGNIVDEVAYHEKYPTIYHLRKKLVDSTDKADLRLIYLALAHMIKFRGHFLIEGDLNPDNSDVDKLFIQLVQTYNQLFEENPINASGVDAKAILSARLSKSRRLENLIAQLPGEKKNGLFGNLIALSLGLTPNFKSNFDLAEDAKLQLSKDTYDDDLDNLLAQIGDQYADLFLAAKNLSDAILLSDILRVNTEITKAPLSASMIKRYDEHHQDLTLLKALVRQQLPEKYKEIFFDQSKNGYAGYIDGGASQEEFYKFIKPILEKMDGTEELLVKLNREDLLRKQRTFDNGSIPHQIHLGELHAILRRQEDFYPFLKDNREKIEKILTFRIPYYVGPLARGNSRFAWMTRKSEETITPWNFEEVVDKGASAQSFIERMTNFDKNLPNEKVLPKHSLLYEYFTVYNELTKVKYVTEGMRKPAFLSGEQKKAIVDLLFKTNRKVTVKQLKEDYFKKIECFDSVEISGVEDRFNASLGTYHDLLKIIKDKDFLDNEENEDILEDIVLTLTLFEDREMIEERLKTYAHLFDDKVMKQLKRRRYTGWGRLSRKLINGIRDKQSGKTILDFLKSDGFANRNFMQLIHDDSLTFKEDIQKAQVSGQGDSLHEHIANLAGSPAIKKGILQTVKVVDELVKVMGRHKPENIVIEMARENQTTQKGQKNSRERMKRIEEGIKELGSQILKEHPVENTQLQNEKLYLYYLQNGRDMYVDQELDINRLSDYDVDHIVPQSFLKDDSIDNKVLTRSDKARGKSDNVPSEEVVKKMKNYWRQLLNAKLITQRKFDNLTKAERGGLSELDKAGFIKRQLVETRQITKHVAQILDSRMNTKYDENDKLIREVKVITLKSKLVSDFRKDFQFYKVREINNYHHAHDAYLNAVVGTALIKKYPKLESEFVYGDYKVYDVRKMIAKSEQEIGKATAKYFFYSNIMNFFKTEITLANGEIRKRPLIETNGETGEIVWDKGRDFATVRKVLSMPQVNIVKKTEVQTGGFSKESILPKRNSDKLIARKKDWDPKKYGGFDSPTVAYSVLVVAKVEKGKSKKLKSVKELLGITIMERSSFEKNPIDFLEAKGYKEVKKDLIIKLPKYSLFELENGRKRMLASAGELQKGNELALPSKYVNFLYLASHYEKLKGSPEDNEQKQLFVEQHKHYLDEIIEQISEFSKRVILADANLDKVLSAYNKHRDKPIREQAENIIHLFTLTNLGAPAAFKYFDTTIDRKRYTSTKEVLDATLIHQSITGLYETRIDLSQLGGDGGPAPGGGGGSGGIPWLMKKPLQLTTLVPLQEYEERLLKQTMLTGSYKEKLQSLFLKYDALWQHWENQVGHRRIKPHHIATGTVNPRPQKQYPINPKAKASIQTVINDLLKQGVLIQQNSIMNTPVYPVPKPDGKWRMVLDYREVNKTIPLIAAQNQHSAGILSSIFRGKYKTTLDLSNGFWAHSITPESYWLTAFTWLGQQYCWTRLPQGFLNSPALFNADVVDLLKEVPNVQVYVDDIYISHDDPREHLEQLEKVFSLLLNAGYVVSLKKSEIAQHEVEFLGFNITKEGRGLTETFKQKLLNITPPRDLKQLQSILGLLNFARNFIPNFSELVKPLYNIIATAPGKYITWTTDNSQQLQNIISMLNSAENLEERNPEVRLIMKVNTSPSAGYIRFYNEFAKRPIMYLNYVYTKAEVKFTNTEKLLTTIHKGLIKALDLGMGQEILVYSPIVSMTKIQKTPLPERKALPIRWITWMSYLEDPRIQFHYDKTLPELQQVPTVTDDIIAKIKHPSEFSMVFYTDGSAIKHPNVNKSHNAGMGIAQVQFKPEFTVINTWSIPLGDHTAQLAEVAAVEFACKKALKIDGPVLIVTDSFYVAESVNKELPYWQSNGFFNNKKKPLKHVSKWKSIADCIQLKPDIIIIHEKGHQPTASTFHTEGNNLADKLATQGSYVVNAGKRTADGSEFEKRTADGSEFESPKKKAKVE

SEQ ID NO: 543 - protein, 2087 aa, synthetic construct
MPAAKRVKLDGGDKKYSIGLDIGTNSVGWAVITDEYKVPSKKFKVLGNTDRHSIKKNLIGALLFDSGETAEATRLKRTARRRYTRRKNRICYLQEIFSNEMAKVDDSFFHRLEESFLVEEDKKHERHPIFGNIVDEVAYHEKYPTIYHLRKKLVDSTDKADLRLIYLALAHMIKFRGHFLIEGDLNPDNSDVDKLFIQLVQTYNQLFEENPINASGVDAKAILSARLSKSRRLENLIAQLPGEKKNGLFGNLIALSLGLTPNFKSNFDLAEDAKLQLSKDTYDDDLDNLLAQIGDQYADLFLAAKNLSDAILLSDILRVNTEITKAPLSASMIKRYDEHHQDLTLLKALVRQQLPEKYKEIFFDQSKNGYAGYIDGGASQEEFYKFIKPILEKMDGTEELLVKLNREDLLRKQRTFDNGSIPHQIHLGELHAILRRQEDFYPFLKDNREKIEKILTFRIPYYVGPLARGNSRFAWMTRKSEETITPWNFEEVVDKGASAQSFIERMTNFDKNLPNEKVLPKHSLLYEYFTVYNELTKVKYVTEGMRKPAFLSGEQKKAIVDLLFKTNRKVTVKQLKEDYFKKIECFDSVEISGVEDRFNASLGTYHDLLKIIKDKDFLDNEENEDILEDIVLTLTLFEDREMIEERLKTYAHLFDDKVMKQLKRRRYTGWGRLSRKLINGIRDKQSGKTILDFLKSDGFANRNFMQLIHDDSLTFKEDIQKAQVSGQGDSLHEHIANLAGSPAIKKGILQTVKVVDELVKVMGRHKPENIVIEMARENQTTQKGQKNSRERMKRIEEGIKELGSQILKEHPVENTQLQNEKLYLYYLQNGRDMYVDQELDINRLSDYDVDHIVPQSFLKDDSIDNKVLTRSDKARGKSDNVPSEEVVKKMKNYWRQLLNAKLITQRKFDNLTKAERGGLSELDKAGFIKRQLVETRQITKHVAQILDSRMNTKYDENDKLIREVKVITLKSKLVSDFRKDFQFYKVREINNYHHAHDAYLNAVVGTALIKKYPKLESEFVYGDYKVYDVRKMIAKSEQEIGKATAKYFFYSNIMNFFKTEITLANGEIRKRPLIETNGETGEIVWDKGRDFATVRKVLSMPQVNIVKKTEVQTGGFSKESILPKRNSDKLIARKKDWDPKKYGGFDSPTVAYSVLVVAKVEKGKSKKLKSVKELLGITIMERSSFEKNPIDFLEAKGYKEVKKDLIIKLPKYSLFELENGRKRMLASAGELQKGNELALPSKYVNFLYLASHYEKLKGSPEDNEQKQLFVEQHKHYLDEIIEQISEFSKRVILADANLDKVLSAYNKHRDKPIREQAENIIHLFTLTNLGAPAAFKYFDTTIDRKRYTSTKEVLDATLIHQSITGLYETRIDLSQLGGDGGGGSEAAAKGGGGGIPWLMKKPLQLTTLVPLQEYEERLLKQTMLTGSYKEKLQSLFLKYDALWQHWENQVGHRRIKPHHIATGTVNPRPQKQYPINPKAKASIQTVINDLLKQGVLIQQNSIMNTPVYPVPKPDGKWRMVLDYREVNKTIPLIAAQNQHSAGILSSIFRGKYKTTLDLSNGFWAHSITPESYWLTAFTWLGQQYCWTRLPQGFLNSPALFNADVVDLLKEVPNVQVYVDDIYISHDDPREHLEQLEKVFSLLLNAGYVVSLKKSEIAQHEVEFLGFNITKEGRGLTETFKQKLLNITPPRDLKQLQSILGLLNFARNFIPNFSELVKPLYNIIATAPGKYITWTTDNSQQLQNIISMLNSAENLEERNPEVRLIMKVNTSPSAGYIRFYNEFAKRPIMYLNYVYTKAEVKFTNTEKLLTTIHKGLIKALDLGMGQEILVYSPIVSMTKIQKTPLPERKALPIRWITWMSYLEDPRIQFHYDKTLPELQQVPTVTDDIIAKIKHPSEFSMVFYTDGSAIKHPNVNKSHNAGMGIAQVQFKPEFTVINTWSIPLGDHTAQLAEVAAVEFACKKALKIDGPVLIVTDSFYVAESVNKELPYWQSNGFFNNKKKPLKHVSKWKSIADCIQLKPDIIIIHEKGHQPTASTFHTEGNNLADKLATQGSYVVNAGKRTADGSEFEKRTADGSEFESPKKKAKVE

SEQ ID NO: 544 - protein, 2082 aa, synthetic construct
MPAAKRVKLDGGDKKYSIGLDIGTNSVGWAVITDEYKVPSKKFKVLGNTDRHSIKKNLIGALLFDSGETAEATRLKRTARRRYTRRKNRICYLQEIFSNEMAKVDDSFFHRLEESFLVEEDKKHERHPIFGNIVDEVAYHEKYPTIYHLRKKLVDSTDKADLRLIYLALAHMIKFRGHFLIEGDLNPDNSDVDKLFIQLVQTYNQLFEENPINASGVDAKAILSARLSKSRRLENLIAQLPGEKKNGLFGNLIALSLGLTPNFKSNFDLAEDAKLQLSKDTYDDDLDNLLAQIGDQYADLFLAAKNLSDAILLSDILRVNTEITKAPLSASMIKRYDEHHQDLTLLKALVRQQLPEKYKEIFFDQSKNGYAGYIDGGASQEEFYKFIKPILEKMDGTEELLVKLNREDLLRKQRTFDNGSIPHQIHLGELHAILRRQEDFYPFLKDNREKIEKILTFRIPYYVGPLARGNSRFAWMTRKSEETITPWNFEEVVDKGASAQSFIERMTNFDKNLPNEKVLPKHSLLYEYFTVYNELTKVKYVTEGMRKPAFLSGEQKKAIVDLLFKTNRKVTVKQLKEDYFKKIECFDSVEISGVEDRFNASLGTYHDLLKIIKDKDFLDNEENEDILEDIVLTLTLFEDREMIEERLKTYAHLFDDKVMKQLKRRRYTGWGRLSRKLINGIRDKQSGKTILDFLKSDGFANRNFMQLIHDDSLTFKEDIQKAQVSGQGDSLHEHIANLAGSPAIKKGILQTVKVVDELVKVMGRHKPENIVIEMARENQTTQKGQKNSRERMKRIEEGIKELGSQILKEHPVENTQLQNEKLYLYYLQNGRDMYVDQELDINRLSDYDVDHIVPQSFLKDDSIDNKVLTRSDKARGKSDNVPSEEVVKKMKNYWRQLLNAKLITQRKFDNLTKAERGGLSELDKAGFIKRQLVETRQITKHVAQILDSRMNTKYDENDKLIREVKVITLKSKLVSDFRKDFQFYKVREINNYHHAHDAYLNAVVGTALIKKYPKLESEFVYGDYKVYDVRKMIAKSEQEIGKATAKYFFYSNIMNFFKTEITLANGEIRKRPLIETNGETGEIVWDKGRDFATVRKVLSMPQVNIVKKTEVQTGGFSKESILPKRNSDKLIARKKDWDPKKYGGFDSPTVAYSVLVVAKVEKGKSKKLKSVKELLGITIMERSSFEKNPIDFLEAKGYKEVKKDLIIKLPKYSLFELENGRKRMLASAGELQKGNELALPSKYVNFLYLASHYEKLKGSPEDNEQKQLFVEQHKHYLDEIIEQISEFSKRVILADANLDKVLSAYNKHRDKPIREQAENIIHLFTLTNLGAPAAFKYFDTTIDRKRYTSTKEVLDATLIHQSITGLYETRIDLSQLGGDGGGSSGGGGGIPWLMKKPLQLTTLVPLQEYEERLLKQTMLTGSYKEKLQSLFLKYDALWQHWENQVGHRRIKPHHIATGTVNPRPQKQYPINPKAKASIQTVINDLLKQGVLIQQNSIMNTPVYPVPKPDGKWRMVLDYREVNKTIPLIAAQNQHSAGILSSIFRGKYKTTLDLSNGFWAHSITPESYWLTAFTWLGQQYCWTRLPQGFLNSPALFNADVVDLLKEVPNVQVYVDDIYISHDDPREHLEQLEKVFSLLLNAGYVVSLKKSEIAQHEVEFLGFNITKEGRGLTETFKQKLLNITPPRDLKQLQSILGLLNFARNFIPNFSELVKPLYNIIATAPGKYITWTTDNSQQLQNIISMLNSAENLEERNPEVRLIMKVNTSPSAGYIRFYNEFAKRPIMYLNYVYTKAEVKFTNTEKLLTTIHKGLIKALDLGMGQEILVYSPIVSMTKIQKTPLPERKALPIRWITWMSYLEDPRIQFHYDKTLPELQQVPTVTDDIIAKIKHPSEFSMVFYTDGSAIKHPNVNKSHNAGMGIAQVQFKPEFTVINTWSIPLGDHTAQLAEVAAVEFACKKALKIDGPVLIVTDSFYVAESVNKELPYWQSNGFFNNKKKPLKHVSKWKSIADCIQLKPDIIIIHEKGHQPTASTFHTEGNNLADKLATQGSYVVNAGKRTADGSEFEKRTADGSEFESPKKKAKVE

SEQ ID NO: 545 - protein, 2085 aa, synthetic construct
MPAAKRVKLDGGDKKYSIGLDIGTNSVGWAVITDEYKVPSKKFKVLGNTDRHSIKKNLIGALLFDSGETAEATRLKRTARRRYTRRKNRICYLQEIFSNEMAKVDDSFFHRLEESFLVEEDKKHERHPIFGNIVDEVAYHEKYPTIYHLRKKLVDSTDKADLRLIYLALAHMIKFRGHFLIEGDLNPDNSDVDKLFIQLVQTYNQLFEENPINASGVDAKAILSARLSKSRRLENLIAQLPGEKKNGLFGNLIALSLGLTPNFKSNFDLAEDAKLQLSKDTYDDDLDNLLAQIGDQYADLFLAAKNLSDAILLSDILRVNTEITKAPLSASMIKRYDEHHQDLTLLKALVRQQLPEKYKEIFFDQSKNGYAGYIDGGASQEEFYKFIKPILEKMDGTEELLVKLNREDLLRKQRTFDNGSIPHQIHLGELHAILRRQEDFYPFLKDNREKIEKILTFRIPYYVGPLARGNSRFAWMTRKSEETITPWNFEEVVDKGASAQSFIERMTNFDKNLPNEKVLPKHSLLYEYFTVYNELTKVKYVTEGMRKPAFLSGEQKKAIVDLLFKTNRKVTVKQLKEDYFKKIECFDSVEISGVEDRFNASLGTYHDLLKIIKDKDFLDNEENEDILEDIVLTLTLFEDREMIEERLKTYAHLFDDKVMKQLKRRRYTGWGRLSRKLINGIRDKQSGKTILDFLKSDGFANRNFMQLIHDDSLTFKEDIQKAQVSGQGDSLHEHIANLAGSPAIKKGILQTVKVVDELVKVMGRHKPENIVIEMARENQTTQKGQKNSRERMKRIEEGIKELGSQILKEHPVENTQLQNEKLYLYYLQNGRDMYVDQELDINRLSDYDVDHIVPQSFLKDDSIDNKVLTRSDKARGKSDNVPSEEVVKKMKNYWRQLLNAKLITQRKFDNLTKAERGGLSELDKAGFIKRQLVETRQITKHVAQILDSRMNTKYDENDKLIREVKVITLKSKLVSDFRKDFQFYKVREINNYHHAHDAYLNAVVGTALIKKYPKLESEFVYGDYKVYDVRKMIAKSEQEIGKATAKYFFYSNIMNFFKTEITLANGEIRKRPLIETNGETGEIVWDKGRDFATVRKVLSMPQVNIVKKTEVQTGGFSKESILPKRNSDKLIARKKDWDPKKYGGFDSPTVAYSVLVVAKVEKGKSKKLKSVKELLGITIMERSSFEKNPIDFLEAKGYKEVKKDLIIKLPKYSLFELENGRKRMLASAGELQKGNELALPSKYVNFLYLASHYEKLKGSPEDNEQKQLFVEQHKHYLDEIIEQISEFSKRVILADANLDKVLSAYNKHRDKPIREQAENIIHLFTLTNLGAPAAFKYFDTTIDRKRYTSTKEVLDATLIHQSITGLYETRIDLSQLGGDGGGSSGGSPAPGGIPWLMKKPLQLTTLVPLQEYEERLLKQTMLTGSYKEKLQSLFLKYDALWQHWENQVGHRRIKPHHIATGTVNPRPQKQYPINPKAKASIQTVINDLLKQGVLIQQNSIMNTPVYPVPKPDGKWRMVLDYREVNKTIPLIAAQNQHSAGILSSIFRGKYKTTLDLSNGFWAHSITPESYWLTAFTWLGQQYCWTRLPQGFLNSPALFNADVVDLLKEVPNVQVYVDDIYISHDDPREHLEQLEKVFSLLLNAGYVVSLKKSEIAQHEVEFLGFNITKEGRGLTETFKQKLLNITPPRDLKQLQSILGLLNFARNFIPNFSELVKPLYNIIATAPGKYITWTTDNSQQLQNIISMLNSAENLEERNPEVRLIMKVNTSPSAGYIRFYNEFAKRPIMYLNYVYTKAEVKFTNTEKLLTTIHKGLIKALDLGMGQEILVYSPIVSMTKIQKTPLPERKALPIRWITWMSYLEDPRIQFHYDKTLPELQQVPTVTDDIIAKIKHPSEFSMVFYTDGSAIKHPNVNKSHNAGMGIAQVQFKPEFTVINTWSIPLGDHTAQLAEVAAVEFACKKALKIDGPVLIVTDSFYVAESVNKELPYWQSNGFFNNKKKPLKHVSKWKSIADCIQLKPDIIIIHEKGHQPTASTFHTEGNNLADKLATQGSYVVNAGKRTADGSEFEKRTADGSEFESPKKKAKVE

SEQ ID NO: 546 - protein, 2085 aa, synthetic construct
MPAAKRVKLDGGDKKYSIGLDIGTNSVGWAVITDEYKVPSKKFKVLGNTDRHSIKKNLIGALLFDSGETAEATRLKRTARRRYTRRKNRICYLQEIFSNEMAKVDDSFFHRLEESFLVEEDKKHERHPIFGNIVDEVAYHEKYPTIYHLRKKLVDSTDKADLRLIYLALAHMIKFRGHFLIEGDLNPDNSDVDKLFIQLVQTYNQLFEENPINASGVDAKAILSARLSKSRRLENLIAQLPGEKKNGLFGNLIALSLGLTPNFKSNFDLAEDAKLQLSKDTYDDDLDNLLAQIGDQYADLFLAAKNLSDAILLSDILRVNTEITKAPLSASMIKRYDEHHQDLTLLKALVRQQLPEKYKEIFFDQSKNGYAGYIDGGASQEEFYKFIKPILEKMDGTEELLVKLNREDLLRKQRTFDNGSIPHQIHLGELHAILRRQEDFYPFLKDNREKIEKILTFRIPYYVGPLARGNSRFAWMTRKSEETITPWNFEEVVDKGASAQSFIERMTNFDKNLPNEKVLPKHSLLYEYFTVYNELTKVKYVTEGMRKPAFLSGEQKKAIVDLLFKTNRKVTVKQLKEDYFKKIECFDSVEISGVEDRFNASLGTYHDLLKIIKDKDFLDNEENEDILEDIVLTLTLFEDREMIEERLKTYAHLFDDKVMKQLKRRRYTGWGRLSRKLINGIRDKQSGKTILDFLKSDGFANRNFMQLIHDDSLTFKEDIQKAQVSGQGDSLHEHIANLAGSPAIKKGILQTVKVVDELVKVMGRHKPENIVIEMARENQTTQKGQKNSRERMKRIEEGIKELGSQILKEHPVENTQLQNEKLYLYYLQNGRDMYVDQELDINRLSDYDVDHIVPQSFLKDDSIDNKVLTRSDKARGKSDNVPSEEVVKKMKNYWRQLLNAKLITQRKFDNLTKAERGGLSELDKAGFIKRQLVETRQITKHVAQILDSRMNTKYDENDKLIREVKVITLKSKLVSDFRKDFQFYKVREINNYHHAHDAYLNAVVGTALIKKYPKLESEFVYGDYKVYDVRKMIAKSEQEIGKATAKYFFYSNIMNFFKTEITLANGEIRKRPLIETNGETGEIVWDKGRDFATVRKVLSMPQVNIVKKTEVQTGGFSKESILPKRNSDKLIARKKDWDPKKYGGFDSPTVAYSVLVVAKVEKGKSKKLKSVKELLGITIMERSSFEKNPIDFLEAKGYKEVKKDLIIKLPKYSLFELENGRKRMLASAGELQKGNELALPSKYVNFLYLASHYEKLKGSPEDNEQKQLFVEQHKHYLDEIIEQISEFSKRVILADANLDKVLSAYNKHRDKPIREQAENIIHLFTLTNLGAPAAFKYFDTTIDRKRYTSTKEVLDATLIHQSITGLYETRIDLSQLGGDGGPAPGSSGGGGGIPWLMKKPLQLTTLVPLQEYEERLLKQTMLTGSYKEKLQSLFLKYDALWQHWENQVGHRRIKPHHIATGTVNPRPQKQYPINPKAKASIQTVINDLLKQGVLIQQNSIMNTPVYPVPKPDGKWRMVLDYREVNKTIPLIAAQNQHSAGILSSIFRGKYKTTLDLSNGFWAHSITPESYWLTAFTWLGQQYCWTRLPQGFLNSPALFNADVVDLLKEVPNVQVYVDDIYISHDDPREHLEQLEKVFSLLLNAGYVVSLKKSEIAQHEVEFLGFNITKEGRGLTETFKQKLLNITPPRDLKQLQSILGLLNFARNFIPNFSELVKPLYNIIATAPGKYITWTTDNSQQLQNIISMLNSAENLEERNPEVRLIMKVNTSPSAGYIRFYNEFAKRPIMYLNYVYTKAEVKFTNTEKLLTTIHKGLIKALDLGMGQEILVYSPIVSMTKIQKTPLPERKALPIRWITWMSYLEDPRIQFHYDKTLPELQQVPTVTDDIIAKIKHPSEFSMVFYTDGSAIKHPNVNKSHNAGMGIAQVQFKPEFTVINTWSIPLGDHTAQLAEVAAVEFACKKALKIDGPVLIVTDSFYVAESVNKELPYWQSNGFFNNKKKPLKHVSKWKSIADCIQLKPDIIIIHEKGHQPTASTFHTEGNNLADKLATQGSYVVNAGKRTADGSEFEKRTADGSEFESPKKKAKVE

SEQ ID NO: 547 - protein, 2085 aa, synthetic construct
MPAAKRVKLDGGDKKYSIGLDIGTNSVGWAVITDEYKVPSKKFKVLGNTDRHSIKKNLIGALLFDSGETAEATRLKRTARRRYTRRKNRICYLQEIFSNEMAKVDDSFFHRLEESFLVEEDKKHERHPIFGNIVDEVAYHEKYPTIYHLRKKLVDSTDKADLRLIYLALAHMIKFRGHFLIEGDLNPDNSDVDKLFIQLVQTYNQLFEENPINASGVDAKAILSARLSKSRRLENLIAQLPGEKKNGLFGNLIALSLGLTPNFKSNFDLAEDAKLQLSKDTYDDDLDNLLAQIGDQYADLFLAAKNLSDAILLSDILRVNTEITKAPLSASMIKRYDEHHQDLTLLKALVRQQLPEKYKEIFFDQSKNGYAGYIDGGASQEEFYKFIKPILEKMDGTEELLVKLNREDLLRKQRTFDNGSIPHQIHLGELHAILRRQEDFYPFLKDNREKIEKILTFRIPYYVGPLARGNSRFAWMTRKSEETITPWNFEEVVDKGASAQSFIERMTNFDKNLPNEKVLPKHSLLYEYFTVYNELTKVKYVTEGMRKPAFLSGEQKKAIVDLLFKTNRKVTVKQLKEDYFKKIECFDSVEISGVEDRFNASLGTYHDLLKIIKDKDFLDNEENEDILEDIVLTLTLFEDREMIEERLKTYAHLFDDKVMKQLKRRRYTGWGRLSRKLINGIRDKQSGKTILDFLKSDGFANRNFMQLIHDDSLTFKEDIQKAQVSGQGDSLHEHIANLAGSPAIKKGILQTVKVVDELVKVMGRHKPENIVIEMARENQTTQKGQKNSRERMKRIEEGIKELGSQILKEHPVENTQLQNEKLYLYYLQNGRDMYVDQELDINRLSDYDVDHIVPQSFLKDDSIDNKVLTRSDKARGKSDNVPSEEVVKKMKNYWRQLLNAKLITQRKFDNLTKAERGGLSELDKAGFIKRQLVETRQITKHVAQILDSRMNTKYDENDKLIREVKVITLKSKLVSDFRKDFQFYKVREINNYHHAHDAYLNAVVGTALIKKYPKLESEFVYGDYKVYDVRKMIAKSEQEIGKATAKYFFYSNIMNFFKTEITLANGEIRKRPLIETNGETGEIVWDKGRDFATVRKVLSMPQVNIVKKTEVQTGGFSKESILPKRNSDKLIARKKDWDPKKYGGFDSPTVAYSVLVVAKVEKGKSKKLKSVKELLGITIMERSSFEKNPIDFLEAKGYKEVKKDLIIKLPKYSLFELENGRKRMLASAGELQKGNELALPSKYVNFLYLASHYEKLKGSPEDNEQKQLFVEQHKHYLDEIIEQISEFSKRVILADANLDKVLSAYNKHRDKPIREQAENIIHLFTLTNLGAPAAFKYFDTTIDRKRYTSTKEVLDATLIHQSITGLYETRIDLSQLGGDGGGSSGGGPAPGGIPWLMKKPLQLTTLVPLQEYEERLLKQTMLTGSYKEKLQSLFLKYDALWQHWENQVGHRRIKPHHIATGTVNPRPQKQYPINPKAKASIQTVINDLLKQGVLIQQNSIMNTPVYPVPKPDGKWRMVLDYREVNKTIPLIAAQNQHSAGILSSIFRGKYKTTLDLSNGFWAHSITPESYWLTAFTWLGQQYCWTRLPQGFLNSPALFNADVVDLLKEVPNVQVYVDDIYISHDDPREHLEQLEKVFSLLLNAGYVVSLKKSEIAQHEVEFLGFNITKEGRGLTETFKQKLLNITPPRDLKQLQSILGLLNFARNFIPNFSELVKPLYNIIATAPGKYITWTTDNSQQLQNIISMLNSAENLEERNPEVRLIMKVNTSPSAGYIRFYNEFAKRPIMYLNYVYTKAEVKFTNTEKLLTTIHKGLIKALDLGMGQEILVYSPIVSMTKIQKTPLPERKALPIRWITWMSYLEDPRIQFHYDKTLPELQQVPTVTDDIIAKIKHPSEFSMVFYTDGSAIKHPNVNKSHNAGMGIAQVQFKPEFTVINTWSIPLGDHTAQLAEVAAVEFACKKALKIDGPVLIVTDSFYVAESVNKELPYWQSNGFFNNKKKPLKHVSKWKSIADCIQLKPDIIIIHEKGHQPTASTFHTEGNNLADKLATQGSYVVNAGKRTADGSEFEKRTADGSEFESPKKKAKVE

SEQ ID NO: 548 - protein, 2087 aa, synthetic construct
MPAAKRVKLDGGDKKYSIGLDIGTNSVGWAVITDEYKVPSKKFKVLGNTDRHSIKKNLIGALLFDSGETAEATRLKRTARRRYTRRKNRICYLQEIFSNEMAKVDDSFFHRLEESFLVEEDKKHERHPIFGNIVDEVAYHEKYPTIYHLRKKLVDSTDKADLRLIYLALAHMIKFRGHFLIEGDLNPDNSDVDKLFIQLVQTYNQLFEENPINASGVDAKAILSARLSKSRRLENLIAQLPGEKKNGLFGNLIALSLGLTPNFKSNFDLAEDAKLQLSKDTYDDDLDNLLAQIGDQYADLFLAAKNLSDAILLSDILRVNTEITKAPLSASMIKRYDEHHQDLTLLKALVRQQLPEKYKEIFFDQSKNGYAGYIDGGASQEEFYKFIKPILEKMDGTEELLVKLNREDLLRKQRTFDNGSIPHQIHLGELHAILRRQEDFYPFLKDNREKIEKILTFRIPYYVGPLARGNSRFAWMTRKSEETITPWNFEEVVDKGASAQSFIERMTNFDKNLPNEKVLPKHSLLYEYFTVYNELTKVKYVTEGMRKPAFLSGEQKKAIVDLLFKTNRKVTVKQLKEDYFKKIECFDSVEISGVEDRFNASLGTYHDLLKIIKDKDFLDNEENEDILEDIVLTLTLFEDREMIEERLKTYAHLFDDKVMKQLKRRRYTGWGRLSRKLINGIRDKQSGKTILDFLKSDGFANRNFMQLIHDDSLTFKEDIQKAQVSGQGDSLHEHIANLAGSPAIKKGILQTVKVVDELVKVMGRHKPENIVIEMARENQTTQKGQKNSRERMKRIEEGIKELGSQILKEHPVENTQLQNEKLYLYYLQNGRDMYVDQELDINRLSDYDVDHIVPQSFLKDDSIDNKVLTRSDKARGKSDNVPSEEVVKKMKNYWRQLLNAKLITQRKFDNLTKAERGGLSELDKAGFIKRQLVETRQITKHVAQILDSRMNTKYDENDKLIREVKVITLKSKLVSDFRKDFQFYKVREINNYHHAHDAYLNAVVGTALIKKYPKLESEFVYGDYKVYDVRKMIAKSEQEIGKATAKYFFYSNIMNFFKTEITLANGEIRKRPLIETNGETGEIVWDKGRDFATVRKVLSMPQVNIVKKTEVQTGGFSKESILPKRNSDKLIARKKDWDPKKYGGFDSPTVAYSVLVVAKVEKGKSKKLKSVKELLGITIMERSSFEKNPIDFLEAKGYKEVKKDLIIKLPKYSLFELENGRKRMLASAGELQKGNELALPSKYVNFLYLASHYEKLKGSPEDNEQKQLFVEQHKHYLDEIIEQISEFSKRVILADANLDKVLSAYNKHRDKPIREQAENIIHLFTLTNLGAPAAFKYFDTTIDRKRYTSTKEVLDATLIHQSITGLYETRIDLSQLGGDGGGGSEAAAKPAPGGIPWLMKKPLQLTTLVPLQEYEERLLKQTMLTGSYKEKLQSLFLKYDALWQHWENQVGHRRIKPHHIATGTVNPRPQKQYPINPKAKASIQTVINDLLKQGVLIQQNSIMNTPVYPVPKPDGKWRMVLDYREVNKTIPLIAAQNQHSAGILSSIFRGKYKTTLDLSNGFWAHSITPESYWLTAFTWLGQQYCWTRLPQGFLNSPALFNADVVDLLKEVPNVQVYVDDIYISHDDPREHLEQLEKVFSLLLNAGYVVSLKKSEIAQHEVEFLGFNITKEGRGLTETFKQKLLNITPPRDLKQLQSILGLLNFARNFIPNFSELVKPLYNIIATAPGKYITWTTDNSQQLQNIISMLNSAENLEERNPEVRLIMKVNTSPSAGYIRFYNEFAKRPIMYLNYVYTKAEVKFTNTEKLLTTIHKGLIKALDLGMGQEILVYSPIVSMTKIQKTPLPERKALPIRWITWMSYLEDPRIQFHYDKTLPELQQVPTVTDDIIAKIKHPSEFSMVFYTDGSAIKHPNVNKSHNAGMGIAQVQFKPEFTVINTWSIPLGDHTAQLAEVAAVEFACKKALKIDGPVLIVTDSFYVAESVNKELPYWQSNGFFNNKKKPLKHVSKWKSIADCIQLKPDIIIIHEKGHQPTASTFHTEGNNLADKLATQGSYVVNAGKRTADGSEFEKRTADGSEFESPKKKAKVE

SEQ ID NO: 549 - protein, 2087 aa, synthetic construct
MPAAKRVKLDGGDKKYSIGLDIGTNSVGWAVITDEYKVPSKKFKVLGNTDRHSIKKNLIGALLFDSGETAEATRLKRTARRRYTRRKNRICYLQEIFSNEMAKVDDSFFHRLEESFLVEEDKKHERHPIFGNIVDEVAYHEKYPTIYHLRKKLVDSTDKADLRLIYLALAHMIKFRGHFLIEGDLNPDNSDVDKLFIQLVQTYNQLFEENPINASGVDAKAILSARLSKSRRLENLIAQLPGEKKNGLFGNLIALSLGLTPNFKSNFDLAEDAKLQLSKDTYDDDLDNLLAQIGDQYADLFLAAKNLSDAILLSDILRVNTEITKAPLSASMIKRYDEHHQDLTLLKALVRQQLPEKYKEIFFDQSKNGYAGYIDGGASQEEFYKFIKPILEKMDGTEELLVKLNREDLLRKQRTFDNGSIPHQIHLGELHAILRRQEDFYPFLKDNREKIEKILTFRIPYYVGPLARGNSRFAWMTRKSEETITPWNFEEVVDKGASAQSFIERMTNFDKNLPNEKVLPKHSLLYEYFTVYNELTKVKYVTEGMRKPAFLSGEQKKAIVDLLFKTNRKVTVKQLKEDYFKKIECFDSVEISGVEDRFNASLGTYHDLLKIIKDKDFLDNEENEDILEDIVLTLTLFEDREMIEERLKTYAHLFDDKVMKQLKRRRYTGWGRLSRKLINGIRDKQSGKTILDFLKSDGFANRNFMQLIHDDSLTFKEDIQKAQVSGQGDSLHEHIANLAGSPAIKKGILQTVKVVDELVKVMGRHKPENIVIEMARENQTTQKGQKNSRERMKRIEEGIKELGSQILKEHPVENTQLQNEKLYLYYLQNGRDMYVDQELDINRLSDYDVDHIVPQSFLKDDSIDNKVLTRSDKARGKSDNVPSEEVVKKMKNYWRQLLNAKLITQRKFDNLTKAERGGLSELDKAGFIKRQLVETRQITKHVAQILDSRMNTKYDENDKLIREVKVITLKSKLVSDFRKDFQFYKVREINNYHHAHDAYLNAVVGTALIKKYPKLESEFVYGDYKVYDVRKMIAKSEQEIGKATAKYFFYSNIMNFFKTEITLANGEIRKRPLIETNGETGEIVWDKGRDFATVRKVLSMPQVNIVKKTEVQTGGFSKESILPKRNSDKLIARKKDWDPKKYGGFDSPTVAYSVLVVAKVEKGKSKKLKSVKELLGITIMERSSFEKNPIDFLEAKGYKEVKKDLIIKLPKYSLFELENGRKRMLASAGELQKGNELALPSKYVNFLYLASHYEKLKGSPEDNEQKQLFVEQHKHYLDEIIEQISEFSKRVILADANLDKVLSAYNKHRDKPIREQAENIIHLFTLTNLGAPAAFKYFDTTIDRKRYTSTKEVLDATLIHQSITGLYETRIDLSQLGGDGGGGGPAPEAAAKGGIPWLMKKPLQLTTLVPLQEYEERLLKQTMLTGSYKEKLQSLFLKYDALWQHWENQVGHRRIKPHHIATGTVNPRPQKQYPINPKAKASIQTVINDLLKQGVLIQQNSIMNTPVYPVPKPDGKWRMVLDYREVNKTIPLIAAQNQHSAGILSSIFRGKYKTTLDLSNGFWAHSITPESYWLTAFTWLGQQYCWTRLPQGFLNSPALFNADVVDLLKEVPNVQVYVDDIYISHDDPREHLEQLEKVFSLLLNAGYVVSLKKSEIAQHEVEFLGFNITKEGRGLTETFKQKLLNITPPRDLKQLQSILGLLNFARNFIPNFSELVKPLYNIIATAPGKYITWTTDNSQQLQNIISMLNSAENLEERNPEVRLIMKVNTSPSAGYIRFYNEFAKRPIMYLNYVYTKAEVKFTNTEKLLTTIHKGLIKALDLGMGQEILVYSPIVSMTKIQKTPLPERKALPIRWITWMSYLEDPRIQFHYDKTLPELQQVPTVTDDIIAKIKHPSEFSMVFYTDGSAIKHPNVNKSHNAGMGIAQVQFKPEFTVINTWSIPLGDHTAQLAEVAAVEFACKKALKIDGPVLIVTDSFYVAESVNKELPYWQSNGFFNNKKKPLKHVSKWKSIADCIQLKPDIIIIHEKGHQPTASTFHTEGNNLADKLATQGSYVVNAGKRTADGSEFEKRTADGSEFESPKKKAKVE

SEQ ID NO: 550 - protein, 2106 aa, synthetic construct
MPAAKRVKLDGGDKKYSIGLDIGTNSVGWAVITDEYKVPSKKFKVLGNTDRHSIKKNLIGALLFDSGETAEATRLKRTARRRYTRRKNRICYLQEIFSNEMAKVDDSFFHRLEESFLVEEDKKHERHPIFGNIVDEVAYHEKYPTIYHLRKKLVDSTDKADLRLIYLALAHMIKFRGHFLIEGDLNPDNSDVDKLFIQLVQTYNQLFEENPINASGVDAKAILSARLSKSRRLENLIAQLPGEKKNGLFGNLIALSLGLTPNFKSNFDLAEDAKLQLSKDTYDDDLDNLLAQIGDQYADLFLAAKNLSDAILLSDILRVNTEITKAPLSASMIKRYDEHHQDLTLLKALVRQQLPEKYKEIFFDQSKNGYAGYIDGGASQEEFYKFIKPILEKMDGTEELLVKLNREDLLRKQRTFDNGSIPHQIHLGELHAILRRQEDFYPFLKDNREKIEKILTFRIPYYVGPLARGNSRFAWMTRKSEETITPWNFEEVVDKGASAQSFIERMTNFDKNLPNEKVLPKHSLLYEYFTVYNELTKVKYVTEGMRKPAFLSGEQKKAIVDLLFKTNRKVTVKQLKEDYFKKIECFDSVEISGVEDRFNASLGTYHDLLKIIKDKDFLDNEENEDILEDIVLTLTLFEDREMIEERLKTYAHLFDDKVMKQLKRRRYTGWGRLSRKLINGIRDKQSGKTILDFLKSDGFANRNFMQLIHDDSLTFKEDIQKAQVSGQGDSLHEHIANLAGSPAIKKGILQTVKVVDELVKVMGRHKPENIVIEMARENQTTQKGQKNSRERMKRIEEGIKELGSQILKEHPVENTQLQNEKLYLYYLQNGRDMYVDQELDINRLSDYDVDHIVPQSFLKDDSIDNKVLTRSDKARGKSDNVPSEEVVKKMKNYWRQLLNAKLITQRKFDNLTKAERGGLSELDKAGFIKRQLVETRQITKHVAQILDSRMNTKYDENDKLIREVKVITLKSKLVSDFRKDFQFYKVREINNYHHAHDAYLNAVVGTALIKKYPKLESEFVYGDYKVYDVRKMIAKSEQEIGKATAKYFFYSNIMNFFKTEITLANGEIRKRPLIETNGETGEIVWDKGRDFATVRKVLSMPQVNIVKKTEVQTGGFSKESILPKRNSDKLIARKKDWDPKKYGGFDSPTVAYSVLVVAKVEKGKSKKLKSVKELLGITIMERSSFEKNPIDFLEAKGYKEVKKDLIIKLPKYSLFELENGRKRMLASAGELQKGNELALPSKYVNFLYLASHYEKLKGSPEDNEQKQLFVEQHKHYLDEIIEQISEFSKRVILADANLDKVLSAYNKHRDKPIREQAENIIHLFTLTNLGAPAAFKYFDTTIDRKRYTSTKEVLDATLIHQSITGLYETRIDLSQLGGDGGEAAAKEAAAKEAAAKEAAAKEAAAKEAAAKGGIPWLMKKPLQLTTLVPLQEYEERLLKQTMLTGSYKEKLQSLFLKYDALWQHWENQVGHRRIKPHHIATGTVNPRPQKQYPINPKAKASIQTVINDLLKQGVLIQQNSIMNTPVYPVPKPDGKWRMVLDYREVNKTIPLIAAQNQHSAGILSSIFRGKYKTTLDLSNGFWAHSITPESYWLTAFTWLGQQYCWTRLPQGFLNSPALFNADVVDLLKEVPNVQVYVDDIYISHDDPREHLEQLEKVFSLLLNAGYVVSLKKSEIAQHEVEFLGFNITKEGRGLTETFKQKLLNITPPRDLKQLQSILGKLNFARNFIPNFSELVKPLYNIIATAPGKYITWTTDNSQQLQNIISMLNSAENLEERNPEVRLIMKVNTSPSAGYIRFYNEFAKRPIMYLNYVYTKAEVKFTNTEKLLTTIHKGLIKALDLGMGQEILVYSPIVSMTKIQKTPLPERKALPIRWITWMSYLEDPRIQFHYDKTLPELQQVPTVTDDIIAKIKHPSEFSMVFYTDGSAIKHPNVNKSHNAGMGIAQVQFKPEFTVINTWSIPLGDHTAQLAEVAAVEFACKKALKIDGPVLIVTDSFYVAESVNKELPYWQSNGFFNNKKKPLKHVSKWKSIADCIQLKPDIIIIHEKGHQPTASTFHTEGNNLADKLATQGSYVVNAGKRTADGSEFEKRTADGSEFESPKKKAKVE

SEQ ID NO: 551 - protein, 2079 aa, synthetic construct
MPAAKRVKLDGGDKKYSIGLDIGTNSVGWAVITDEYKVPSKKFKVLGNTDRHSIKKNLIGALLFDSGETAEATRLKRTARRRYTRRKNRICYLQEIFSNEMAKVDDSFFHRLEESFLVEEDKKHERHPIFGNIVDEVAYHEKYPTIYHLRKKLVDSTDKADLRLIYLALAHMIKFRGHFLIEGDLNPDNSDVDKLFIQLVQTYNQLFEENPINASGVDAKAILSARLSKSRRLENLIAQLPGEKKNGLFGNLIALSLGLTPNFKSNFDLAEDAKLQLSKDTYDDDLDNLLAQIGDQYADLFLAAKNLSDAILLSDILRVNTEITKAPLSASMIKRYDEHHQDLTLLKALVRQQLPEKYKEIFFDQSKNGYAGYIDGGASQEEFYKFIKPILEKMDGTEELLVKLNREDLLRKQRTFDNGSIPHQIHLGELHAILRRQEDFYPFLKDNREKIEKILTFRIPYYVGPLARGNSRFAWMTRKSEETITPWNFEEVVDKGASAQSFIERMTNFDKNLPNEKVLPKHSLLYEYFTVYNELTKVKYVTEGMRKPAFLSGEQKKAIVDLLFKTNRKVTVKQLKEDYFKKIECFDSVEISGVEDRFNASLGTYHDLLKIIKDKDFLDNEENEDILEDIVLTLTLFEDREMIEERLKTYAHLFDDKVMKQLKRRRYTGWGRLSRKLINGIRDKQSGKTILDFLKSDGFANRNFMQLIHDDSLTFKEDIQKAQVSGQGDSLHEHIANLAGSPAIKKGILQTVKVVDELVKVMGRHKPENIVIEMARENQTTQKGQKNSRERMKRIEEGIKELGSQILKEHPVENTQLQNEKLYLYYLQNGRDMYVDQELDINRLSDYDVDHIVPQSFLKDDSIDNKVLTRSDKARGKSDNVPSEEVVKKMKNYWRQLLNAKLITQRKFDNLTKAERGGLSELDKAGFIKRQLVETRQITKHVAQILDSRMNTKYDENDKLIREVKVITLKSKLVSDFRKDFQFYKVREINNYHHAHDAYLNAVVGTALIKKYPKLESEFVYGDYKVYDVRKMIAKSEQEIGKATAKYFFYSNIMNFFKTEITLANGEIRKRPLIETNGETGEIVWDKGRDFATVRKVLSMPQVNIVKKTEVQTGGFSKESILPKRNSDKLIARKKDWDPKKYGGFDSPTVAYSVLVVAKVEKGKSKKLKSVKELLGITIMERSSFEKNPIDFLEAKGYKEVKKDLIIKLPKYSLFELENGRKRMLASAGELQKGNELALPSKYVNFLYLASHYEKLKGSPEDNEQKQLFVEQHKHYLDEIIEQISEFSKRVILADANLDKVLSAYNKHRDKPIREQAENIIHLFTLTNLGAPAAFKYFDTTIDRKRYTSTKEVLDATLIHQSITGLYETRIDLSQLGGDGGGSSGGIPWLMKKPLQLTTLVPLQEYEERLLKQTMLTGSYKEKLQSLFLKYDALWQHWENQVGHRRIKPHHIATGTVNPRPQKQYPINPKAKASIQTVINDLLKQGVLIQQNSIMNTPVYPVPKPDGKWRMVLDYREVNKTIPLIAAQNQHSAGILSSIFRGKYKTTLDLSNGFWAHSITPESYWLTAFTWLGQQYCWTRLPQGFLNSPALFNADVVDLLKEVPNVQVYVDDIYISHDDPREHLEQLEKVFSLLLNAGYVVSLKKSEIAQHEVEFLGFNITKEGRGLTETFKQKLLNITPPRDLKQLQSILGKLNFARNFIPNFSELVKPLYNIIATAPGKYITWTTDNSQQLQNIISMLNSAENLEERNPEVRLIMKVNTSPSAGYIRFYNEFAKRPIMYLNYVYTKAEVKFTNTEKLLTTIHKGLIKALDLGMGQEILVYSPIVSMTKIQKTPLPERKALPIRWITWMSYLEDPRIQFHYDKTLPELQQVPTVTDDIIAKIKHPSEFSMVFYTDGSAIKHPNVNKSHNAGMGIAQVQFKPEFTVINTWSIPLGDHTAQLAEVAAVEFACKKALKIDGPVLIVTDSFYVAESVNKELPYWQSNGFFNNKKKPLKHVSKWKSIADCIQLKPDIIIIHEKGHQPTASTFHTEGNNLADKLATQGSYVVNAGKRTADGSEFEKRTADGSEFESPKKKAKVE

SEQ ID NO: 552 - protein, 2079 aa, synthetic construct
MPAAKRVKLDGGDKKYSIGLDIGTNSVGWAVITDEYKVPSKKFKVLGNTDRHSIKKNLIGALLFDSGETAEATRLKRTARRRYTRRKNRICYLQEIFSNEMAKVDDSFFHRLEESFLVEEDKKHERHPIFGNIVDEVAYHEKYPTIYHLRKKLVDSTDKADLRLIYLALAHMIKFRGHFLIEGDLNPDNSDVDKLFIQLVQTYNQLFEENPINASGVDAKAILSARLSKSRRLENLIAQLPGEKKNGLFGNLIALSLGLTPNFKSNFDLAEDAKLQLSKDTYDDDLDNLLAQIGDQYADLFLAAKNLSDAILLSDILRVNTEITKAPLSASMIKRYDEHHQDLTLLKALVRQQLPEKYKEIFFDQSKNGYAGYIDGGASQEEFYKFIKPILEKMDGTEELLVKLNREDLLRKQRTFDNGSIPHQIHLGELHAILRRQEDFYPFLKDNREKIEKILTFRIPYYVGPLARGNSRFAWMTRKSEETITPWNFEEVVDKGASAQSFIERMTNFDKNLPNEKVLPKHSLLYEYFTVYNELTKVKYVTEGMRKPAFLSGEQKKAIVDLLFKTNRKVTVKQLKEDYFKKIECFDSVEISGVEDRFNASLGTYHDLLKIIKDKDFLDNEENEDILEDIVLTLTLFEDREMIEERLKTYAHLFDDKVMKQLKRRRYTGWGRLSRKLINGIRDKQSGKTILDFLKSDGFANRNFMQLIHDDSLTFKEDIQKAQVSGQGDSLHEHIANLAGSPAIKKGILQTVKVVDELVKVMGRHKPENIVIEMARENQTTQKGQKNSRERMKRIEEGIKELGSQILKEHPVENTQLQNEKLYLYYLQNGRDMYVDQELDINRLSDYDVDHIVPQSFLKDDSIDNKVLTRSDKARGKSDNVPSEEVVKKMKNYWRQLLNAKLITQRKFDNLTKAERGGLSELDKAGFIKRQLVETRQITKHVAQILDSRMNTKYDENDKLIREVKVITLKSKLVSDFRKDFQFYKVREINNYHHAHDAYLNAVVGTALIKKYPKLESEFVYGDYKVYDVRKMIAKSEQEIGKATAKYFFYSNIMNFFKTEITLANGEIRKRPLIETNGETGEIVWDKGRDFATVRKVLSMPQVNIVKKTEVQTGGFSKESILPKRNSDKLIARKKDWDPKKYGGFDSPTVAYSVLVVAKVEKGKSKKLKSVKELLGITIMERSSFEKNPIDFLEAKGYKEVKKDLIIKLPKYSLFELENGRKRMLASAGELQKGNELALPSKYVNFLYLASHYEKLKGSPEDNEQKQLFVEQHKHYLDEIIEQISEFSKRVILADANLDKVLSAYNKHRDKPIREQAENIIHLFTLTNLGAPAAFKYFDTTIDRKRYTSTKEVLDATLIHQSITGLYETRIDLSQLGGDGGGGSGGIPWLMKKPLQLTTLVPLQEYEERLLKQTMLTGSYKEKLQSLFLKYDALWQHWENQVGHRRIKPHHIATGTVNPRPQKQYPINPKAKASIQTVINDLLKQGVLIQQNSIMNTPVYPVPKPDGKWRMVLDYREVNKTIPLIAAQNQHSAGILSSIFRGKYKTTLDLSNGFWAHSITPESYWLTAFTWLGQQYCWTRLPQGFLNSPALFNADVVDLLKEVPNVQVYVDDIYISHDDPREHLEQLEKVFSLLLNAGYVVSLKKSEIAQHEVEFLGFNITKEGRGLTETFKQKLLNITPPRDLKQLQSILGKLNFARNFIPNFSELVKPLYNIIATAPGKYITWTTDNSQQLQNIISMLNSAENLEERNPEVRLIMKVNTSPSAGYIRFYNEFAKRPIMYLNYVYTKAEVKFTNTEKLLTTIHKGLIKALDLGMGQEILVYSPIVSMTKIQKTPLPERKALPIRWITWMSYLEDPRIQFHYDKTLPELQQVPTVTDDIIAKIKHPSEFSMVFYTDGSAIKHPNVNKSHNAGMGIAQVQFKPEFTVINTWSIPLGDHTAQLAEVAAVEFACKKALKIDGPVLIVTDSFYVAESVNKELPYWQSNGFFNNKKKPLKHVSKWKSIADCIQLKPDIIIIHEKGHQPTASTFHTEGNNLADKLATQGSYVVNAGKRTADGSEFEKRTADGSEFESPKKKAKVE

SEQ ID NO: 553 - protein, 2087 aa, synthetic construct
MPAAKRVKLDGGDKKYSIGLDIGTNSVGWAVITDEYKVPSKKFKVLGNTDRHSIKKNLIGALLFDSGETAEATRLKRTARRRYTRRKNRICYLQEIFSNEMAKVDDSFFHRLEESFLVEEDKKHERHPIFGNIVDEVAYHEKYPTIYHLRKKLVDSTDKADLRLIYLALAHMIKFRGHFLIEGDLNPDNSDVDKLFIQLVQTYNQLFEENPINASGVDAKAILSARLSKSRRLENLIAQLPGEKKNGLFGNLIALSLGLTPNFKSNFDLAEDAKLQLSKDTYDDDLDNLLAQIGDQYADLFLAAKNLSDAILLSDILRVNTEITKAPLSASMIKRYDEHHQDLTLLKALVRQQLPEKYKEIFFDQSKNGYAGYIDGGASQEEFYKFIKPILEKMDGTEELLVKLNREDLLRKQRTFDNGSIPHQIHLGELHAILRRQEDFYPFLKDNREKIEKILTFRIPYYVGPLARGNSRFAWMTRKSEETITPWNFEEVVDKGASAQSFIERMTNFDKNLPNEKVLPKHSLLYEYFTVYNELTKVKYVTEGMRKPAFLSGEQKKAIVDLLFKTNRKVTVKQLKEDYFKKIECFDSVEISGVEDRFNASLGTYHDLLKIIKDKDFLDNEENEDILEDIVLTLTLFEDREMIEERLKTYAHLFDDKVMKQLKRRRYTGWGRLSRKLINGIRDKQSGKTILDFLKSDGFANRNFMQLIHDDSLTFKEDIQKAQVSGQGDSLHEHIANLAGSPAIKKGILQTVKVVDELVKVMGRHKPENIVIEMARENQTTQKGQKNSRERMKRIEEGIKELGSQILKEHPVENTQLQNEKLYLYYLQNGRDMYVDQELDINRLSDYDVDHIVPQSFLKDDSIDNKVLTRSDKARGKSDNVPSEEVVKKMKNYWRQLLNAKLITQRKFDNLTKAERGGLSELDKAGFIKRQLVETRQITKHVAQILDSRMNTKYDENDKLIREVKVITLKSKLVSDFRKDFQFYKVREINNYHHAHDAYLNAVVGTALIKKYPKLESEFVYGDYKVYDVRKMIAKSEQEIGKATAKYFFYSNIMNFFKTEITLANGEIRKRPLIETNGETGEIVWDKGRDFATVRKVLSMPQVNIVKKTEVQTGGFSKESILPKRNSDKLIARKKDWDPKKYGGFDSPTVAYSVLVVAKVEKGKSKKLKSVKELLGITIMERSSFEKNPIDFLEAKGYKEVKKDLIIKLPKYSLFELENGRKRMLASAGELQKGNELALPSKYVNFLYLASHYEKLKGSPEDNEQKQLFVEQHKHYLDEIIEQISEFSKRVILADANLDKVLSAYNKHRDKPIREQAENIIHLFTLTNLGAPAAFKYFDTTIDRKRYTSTKEVLDATLIHQSITGLYETRIDLSQLGGDGGGSSEAAAKPAPGGIPWLMKKPLQLTTLVPLQEYEERLLKQTMLTGSYKEKLQSLFLKYDALWQHWENQVGHRRIKPHHIATGTVNPRPQKQYPINPKAKASIQTVINDLLKQGVLIQQNSIMNTPVYPVPKPDGKWRMVLDYREVNKTIPLIAAQNQHSAGILSSIFRGKYKTTLDLSNGFWAHSITPESYWLTAFTWLGQQYCWTRLPQGFLNSPALFNADVVDLLKEVPNVQVYVDDIYISHDDPREHLEQLEKVFSLLLNAGYVVSLKKSEIAQHEVEFLGFNITKEGRGLTETFKQKLLNITPPRDLKQLQSILGKLNFARNFIPNFSELVKPLYNIIATAPGKYITWTTDNSQQLQNIISMLNSAENLEERNPEVRLIMKVNTSPSAGYIRFYNEFAKRPIMYLNYVYTKAEVKFTNTEKLLTTIHKGLIKALDLGMGQEILVYSPIVSMTKIQKTPLPERKALPIRWITWMSYLEDPRIQFHYDKTLPELQQVPTVTDDIIAKIKHPSEFSMVFYTDGSAIKHPNVNKSHNAGMGIAQVQFKPEFTVINTWSIPLGDHTAQLAEVAAVEFACKKALKIDGPVLIVTDSFYVAESVNKELPYWQSNGFFNNKKKPLKHVSKWKSIADCIQLKPDIIIIHEKGHQPTASTFHTEGNNLADKLATQGSYVVNAGKRTADGSEFEKRTADGSEFESPKKKAKVE

SEQ ID NO: 554 - protein, 2081 aa, synthetic construct
MPAAKRVKLDGGDKKYSIGLDIGTNSVGWAVITDEYKVPSKKFKVLGNTDRHSIKKNLIGALLFDSGETAEATRLKRTARRRYTRRKNRICYLQEIFSNEMAKVDDSFFHRLEESFLVEEDKKHERHPIFGNIVDEVAYHEKYPTIYHLRKKLVDSTDKADLRLIYLALAHMIKFRGHFLIEGDLNPDNSDVDKLFIQLVQTYNQLFEENPINASGVDAKAILSARLSKSRRLENLIAQLPGEKKNGLFGNLIALSLGLTPNFKSNFDLAEDAKLQLSKDTYDDDLDNLLAQIGDQYADLFLAAKNLSDAILLSDILRVNTEITKAPLSASMIKRYDEHHQDLTLLKALVRQQLPEKYKEIFFDQSKNGYAGYIDGGASQEEFYKFIKPILEKMDGTEELLVKLNREDLLRKQRTFDNGSIPHQIHLGELHAILRRQEDFYPFLKDNREKIEKILTFRIPYYVGPLARGNSRFAWMTRKSEETITPWNFEEVVDKGASAQSFIERMTNFDKNLPNEKVLPKHSLLYEYFTVYNELTKVKYVTEGMRKPAFLSGEQKKAIVDLLFKTNRKVTVKQLKEDYFKKIECFDSVEISGVEDRFNASLGTYHDLLKIIKDKDFLDNEENEDILEDIVLTLTLFEDREMIEERLKTYAHLFDDKVMKQLKRRRYTGWGRLSRKLINGIRDKQSGKTILDFLKSDGFANRNFMQLIHDDSLTFKEDIQKAQVSGQGDSLHEHIANLAGSPAIKKGILQTVKVVDELVKVMGRHKPENIVIEMARENQTTQKGQKNSRERMKRIEEGIKELGSQILKEHPVENTQLQNEKLYLYYLQNGRDMYVDQELDINRLSDYDVDHIVPQSFLKDDSIDNKVLTRSDKARGKSDNVPSEEVVKKMKNYWRQLLNAKLITQRKFDNLTKAERGGLSELDKAGFIKRQLVETRQITKHVAQILDSRMNTKYDENDKLIREVKVITLKSKLVSDFRKDFQFYKVREINNYHHAHDAYLNAVVGTALIKKYPKLESEFVYGDYKVYDVRKMIAKSEQEIGKATAKYFFYSNIMNFFKTEITLANGEIRKRPLIETNGETGEIVWDKGRDFATVRKVLSMPQVNIVKKTEVQTGGFSKESILPKRNSDKLIARKKDWDPKKYGGFDSPTVAYSVLVVAKVEKGKSKKLKSVKELLGITIMERSSFEKNPIDFLEAKGYKEVKKDLIIKLPKYSLFELENGRKRMLASAGELQKGNELALPSKYVNFLYLASHYEKLKGSPEDNEQKQLFVEQHKHYLDEIIEQISEFSKRVILADANLDKVLSAYNKHRDKPIREQAENIIHLFTLTNLGAPAAFKYFDTTIDRKRYTSTKEVLDATLIHQSITGLYETRIDLSQLGGDGGEAAAKGGIPWLMKKPLQLTTLVPLQEYEERLLKQTMLTGSYKEKLQSLFLKYDALWQHWENQVGHRRIKPHHIATGTVNPRPQKQYPINPKAKASIQTVINDLLKQGVLIQQNSIMNTPVYPVPKPDGKWRMVLDYREVNKTIPLIAAQNQHSAGILSSIFRGKYKTTLDLSNGFWAHSITPESYWLTAFTWLGQQYCWTRLPQGFLNSPALFNADVVDLLKEVPNVQVYVDDIYISHDDPREHLEQLEKVFSLLLNAGYVVSLKKSEIAQHEVEFLGFNITKEGRGLTETFKQKLLNITPPRDLKQLQSILGKLNFARNFIPNFSELVKPLYNIIATAPGKYITWTTDNSQQLQNIISMLNSAENLEERNPEVRLIMKVNTSPSAGYIRFYNEFAKRPIMYLNYVYTKAEVKFTNTEKLLTTIHKGLIKALDLGMGQEILVYSPIVSMTKIQKTPLPERKALPIRWITWMSYLEDPRIQFHYDKTLPELQQVPTVTDDIIAKIKHPSEFSMVFYTDGSAIKHPNVNKSHNAGMGIAQVQFKPEFTVINTWSIPLGDHTAQLAEVAAVEFACKKALKIDGPVLIVTDSFYVAESVNKELPYWQSNGFFNNKKKPLKHVSKWKSIADCIQLKPDIIIIHEKGHQPTASTFHTEGNNLADKLATQGSYVVNAGKRTADGSEFEKRTADGSEFESPKKKAKVE

SEQ ID NO: 555 - protein, 2087 aa, synthetic construct
MPAAKRVKLDGGDKKYSIGLDIGTNSVGWAVITDEYKVPSKKFKVLGNTDRHSIKKNLIGALLFDSGETAEATRLKRTARRRYTRRKNRICYLQEIFSNEMAKVDDSFFHRLEESFLVEEDKKHERHPIFGNIVDEVAYHEKYPTIYHLRKKLVDSTDKADLRLIYLALAHMIKFRGHFLIEGDLNPDNSDVDKLFIQLVQTYNQLFEENPINASGVDAKAILSARLSKSRRLENLIAQLPGEKKNGLFGNLIALSLGLTPNFKSNFDLAEDAKLQLSKDTYDDDLDNLLAQIGDQYADLFLAAKNLSDAILLSDILRVNTEITKAPLSASMIKRYDEHHQDLTLLKALVRQQLPEKYKEIFFDQSKNGYAGYIDGGASQEEFYKFIKPILEKMDGTEELLVKLNREDLLRKQRTFDNGSIPHQIHLGELHAILRRQEDFYPFLKDNREKIEKILTFRIPYYVGPLARGNSRFAWMTRKSEETITPWNFEEVVDKGASAQSFIERMTNFDKNLPNEKVLPKHSLLYEYFTVYNELTKVKYVTEGMRKPAFLSGEQKKAIVDLLFKTNRKVTVKQLKEDYFKKIECFDSVEISGVEDRFNASLGTYHDLLKIIKDKDFLDNEENEDILEDIVLTLTLFEDREMIEERLKTYAHLFDDKVMKQLKRRRYTGWGRLSRKLINGIRDKQSGKTILDFLKSDGFANRNFMQLIHDDSLTFKEDIQKAQVSGQGDSLHEHIANLAGSPAIKKGILQTVKVVDELVKVMGRHKPENIVIEMARENQTTQKGQKNSRERMKRIEEGIKELGSQILKEHPVENTQLQNEKLYLYYLQNGRDMYVDQELDINRLSDYDVDHIVPQSFLKDDSIDNKVLTRSDKARGKSDNVPSEEVVKKMKNYWRQLLNAKLITQRKFDNLTKAERGGLSELDKAGFIKRQLVETRQITKHVAQILDSRMNTKYDENDKLIREVKVITLKSKLVSDFRKDFQFYKVREINNYHHAHDAYLNAVVGTALIKKYPKLESEFVYGDYKVYDVRKMIAKSEQEIGKATAKYFFYSNIMNFFKTEITLANGEIRKRPLIETNGETGEIVWDKGRDFATVRKVLSMPQVNIVKKTEVQTGGFSKESILPKRNSDKLIARKKDWDPKKYGGFDSPTVAYSVLVVAKVEKGKSKKLKSVKELLGITIMERSSFEKNPIDFLEAKGYKEVKKDLIIKLPKYSLFELENGRKRMLASAGELQKGNELALPSKYVNFLYLASHYEKLKGSPEDNEQKQLFVEQHKHYLDEIIEQISEFSKRVILADANLDKVLSAYNKHRDKPIREQAENIIHLFTLTNLGAPAAFKYFDTTIDRKRYTSTKEVLDATLIHQSITGLYETRIDLSQLGGDGGEAAAKGGSGGGGGIPWLMKKPLQLTTLVPLQEYEERLLKQTMLTGSYKEKLQSLFLKYDALWQHWENQVGHRRIKPHHIATGTVNPRPQKQYPINPKAKASIQTVINDLLKQGVLIQQNSIMNTPVYPVPKPDGKWRMVLDYREVNKTIPLIAAQNQHSAGILSSIFRGKYKTTLDLSNGFWAHSITPESYWLTAFTWLGQQYCWTRLPQGFLNSPALFNADVVDLLKEVPNVQVYVDDIYISHDDPREHLEQLEKVFSLLLNAGYVVSLKKSEIAQHEVEFLGFNITKEGRGLTETFKQKLLNITPPRDLKQLQSILGKLNFARNFIPNFSELVKPLYNIIATAPGKYITWTTDNSQQLQNIISMLNSAENLEERNPEVRLIMKVNTSPSAGYIRFYNEFAKRPIMYLNYVYTKAEVKFTNTEKLLTTIHKGLIKALDLGMGQEILVYSPIVSMTKIQKTPLPERKALPIRWITWMSYLEDPRIQFHYDKTLPELQQVPTVTDDIIAKIKHPSEFSMVFYTDGSAIKHPNVNKSHNAGMGIAQVQFKPEFTVINTWSIPLGDHTAQLAEVAAVEFACKKALKIDGPVLIVTDSFYVAESVNKELPYWQSNGFFNNKKKPLKHVSKWKSIADCIQLKPDIIIIHEKGHQPTASTFHTEGNNLADKLATQGSYVVNAGKRTADGSEFEKRTADGSEFESPKKKAKVE

SEQ ID NO: 556 - protein, 2096 aa, synthetic construct
MPAAKRVKLDGGDKKYSIGLDIGTNSVGWAVITDEYKVPSKKFKVLGNTDRHSIKKNLIGALLFDSGETAEATRLKRTARRRYTRRKNRICYLQEIFSNEMAKVDDSFFHRLEESFLVEEDKKHERHPIFGNIVDEVAYHEKYPTIYHLRKKLVDSTDKADLRLIYLALAHMIKFRGHFLIEGDLNPDNSDVDKLFIQLVQTYNQLFEENPINASGVDAKAILSARLSKSRRLENLIAQLPGEKKNGLFGNLIALSLGLTPNFKSNFDLAEDAKLQLSKDTYDDDLDNLLAQIGDQYADLFLAAKNLSDAILLSDILRVNTEITKAPLSASMIKRYDEHHQDLTLLKALVRQQLPEKYKEIFFDQSKNGYAGYIDGGASQEEFYKFIKPILEKMDGTEELLVKLNREDLLRKQRTFDNGSIPHQIHLGELHAILRRQEDFYPFLKDNREKIEKILTFRIPYYVGPLARGNSRFAWMTRKSEETITPWNFEEVVDKGASAQSFIERMTNFDKNLPNEKVLPKHSLLYEYFTVYNELTKVKYVTEGMRKPAFLSGEQKKAIVDLLFKTNRKVTVKQLKEDYFKKIECFDSVEISGVEDRFNASLGTYHDLLKIIKDKDFLDNEENEDILEDIVLTLTLFEDREMIEERLKTYAHLFDDKVMKQLKRRRYTGWGRLSRKLINGIRDKQSGKTILDFLKSDGFANRNFMQLIHDDSLTFKEDIQKAQVSGQGDSLHEHIANLAGSPAIKKGILQTVKVVDELVKVMGRHKPENIVIEMARENQTTQKGQKNSRERMKRIEEGIKELGSQILKEHPVENTQLQNEKLYLYYLQNGRDMYVDQELDINRLSDYDVDHIVPQSFLKDDSIDNKVLTRSDKARGKSDNVPSEEVVKKMKNYWRQLLNAKLITQRKFDNLTKAERGGLSELDKAGFIKRQLVETRQITKHVAQILDSRMNTKYDENDKLIREVKVITLKSKLVSDFRKDFQFYKVREINNYHHAHDAYLNAVVGTALIKKYPKLESEFVYGDYKVYDVRKMIAKSEQEIGKATAKYFFYSNIMNFFKTEITLANGEIRKRPLIETNGETGEIVWDKGRDFATVRKVLSMPQVNIVKKTEVQTGGFSKESILPKRNSDKLIARKKDWDPKKYGGFDSPTVAYSVLVVAKVEKGKSKKLKSVKELLGITIMERSSFEKNPIDFLEAKGYKEVKKDLIIKLPKYSLFELENGRKRMLASAGELQKGNELALPSKYVNFLYLASHYEKLKGSPEDNEQKQLFVEQHKHYLDEIIEQISEFSKRVILADANLDKVLSAYNKHRDKPIREQAENIIHLFTLTNLGAPAAFKYFDTTIDRKRYTSTKEVLDATLIHQSITGLYETRIDLSQLGGDGGEAAAKEAAAKEAAAKEAAAKGGIPWLMKKPLQLTTLVPLQEYEERLLKQTMLTGSYKEKLQSLFLKYDALWQHWENQVGHRRIKPHHIATGTVNPRPQKQYPINPKAKASIQTVINDLLKQGVLIQQNSIMNTPVYPVPKPDGKWRMVLDYREVNKTIPLIAAQNQHSAGILSSIFRGKYKTTLDLSNGFWAHSITPESYWLTAFTWLGQQYCWTRLPQGFLNSPALFNADVVDLLKEVPNVQVYVDDIYISHDDPREHLEQLEKVFSLLLNAGYVVSLKKSEIAQHEVEFLGFNITKEGRGLTETFKQKLLNITPPRDLKQLQSILGKLNFARNFIPNFSELVKPLYNIIATAPGKYITWTTDNSQQLQNIISMLNSAENLEERNPEVRLIMKVNTSPSAGYIRFYNEFAKRPIMYLNYVYTKAEVKFTNTEKLLTTIHKGLIKALDLGMGQEILVYSPIVSMTKIQKTPLPERKALPIRWITWMSYLEDPRIQFHYDKTLPELQQVPTVTDDIIAKIKHPSEFSMVFYTDGSAIKHPNVNKSHNAGMGIAQVQFKPEFTVINTWSIPLGDHTAQLAEVAAVEFACKKALKIDGPVLIVTDSFYVAESVNKELPYWQSNGFFNNKKKPLKHVSKWKSIADCIQLKPDIIIIHEKGHQPTASTFHTEGNNLADKLATQGSYVVNAGKRTADGSEFEKRTADGSEFESPKKKAKVE

SEQ ID NO: 557 - protein, 2086 aa, synthetic construct
MPAAKRVKLDGGDKKYSIGLDIGTNSVGWAVITDEYKVPSKKFKVLGNTDRHSIKKNLIGALLFDSGETAEATRLKRTARRRYTRRKNRICYLQEIFSNEMAKVDDSFFHRLEESFLVEEDKKHERHPIFGNIVDEVAYHEKYPTIYHLRKKLVDSTDKADLRLIYLALAHMIKFRGHFLIEGDLNPDNSDVDKLFIQLVQTYNQLFEENPINASGVDAKAILSARLSKSRRLENLIAQLPGEKKNGLFGNLIALSLGLTPNFKSNFDLAEDAKLQLSKDTYDDDLDNLLAQIGDQYADLFLAAKNLSDAILLSDILRVNTEITKAPLSASMIKRYDEHHQDLTLLKALVRQQLPEKYKEIFFDQSKNGYAGYIDGGASQEEFYKFIKPILEKMDGTEELLVKLNREDLLRKQRTFDNGSIPHQIHLGELHAILRRQEDFYPFLKDNREKIEKILTFRIPYYVGPLARGNSRFAWMTRKSEETITPWNFEEVVDKGASAQSFIERMTNFDKNLPNEKVLPKHSLLYEYFTVYNELTKVKYVTEGMRKPAFLSGEQKKAIVDLLFKTNRKVTVKQLKEDYFKKIECFDSVEISGVEDRFNASLGTYHDLLKIIKDKDFLDNEENEDILEDIVLTLTLFEDREMIEERLKTYAHLFDDKVMKQLKRRRYTGWGRLSRKLINGIRDKQSGKTILDFLKSDGFANRNFMQLIHDDSLTFKEDIQKAQVSGQGDSLHEHIANLAGSPAIKKGILQTVKVVDELVKVMGRHKPENIVIEMARENQTTQKGQKNSRERMKRIEEGIKELGSQILKEHPVENTQLQNEKLYLYYLQNGRDMYVDQELDINRLSDYDVDHIVPQSFLKDDSIDNKVLTRSDKARGKSDNVPSEEVVKKMKNYWRQLLNAKLITQRKFDNLTKAERGGLSELDKAGFIKRQLVETRQITKHVAQILDSRMNTKYDENDKLIREVKVITLKSKLVSDFRKDFQFYKVREINNYHHAHDAYLNAVVGTALIKKYPKLESEFVYGDYKVYDVRKMIAKSEQEIGKATAKYFFYSNIMNFFKTEITLANGEIRKRPLIETNGETGEIVWDKGRDFATVRKVLSMPQVNIVKKTEVQTGGFSKESILPKRNSDKLIARKKDWDPKKYGGFDSPTVAYSVLVVAKVEKGKSKKLKSVKELLGITIMERSSFEKNPIDFLEAKGYKEVKKDLIIKLPKYSLFELENGRKRMLASAGELQKGNELALPSKYVNFLYLASHYEKLKGSPEDNEQKQLFVEQHKHYLDEIIEQISEFSKRVILADANLDKVLSAYNKHRDKPIREQAENIIHLFTLTNLGAPAAFKYFDTTIDRKRYTSTKEVLDATLIHQSITGLYETRIDLSQLGGDGGGGGGSGGGGSGGIPWLMKKPLQLTTLVPLQEYEERLLKQTMLTGSYKEKLQSLFLKYDALWQHWENQVGHRRIKPHHIATGTVNPRPQKQYPINPKAKASIQTVINDLLKQGVLIQQNSIMNTPVYPVPKPDGKWRMVLDYREVNKTIPLIAAQNQHSAGILSSIFRGKYKTTLDLSNGFWAHSITPESYWLTAFTWLGQQYCWTRLPQGFLNSPALFNADVVDLLKEVPNVQVYVDDIYISHDDPREHLEQLEKVFSLLLNAGYVVSLKKSEIAQHEVEFLGFNITKEGRGLTETFKQKLLNITPPRDLKQLQSILGKLNFARNFIPNFSELVKPLYNIIATAPGKYITWTTDNSQQLQNIISMLNSAENLEERNPEVRLIMKVNTSPSAGYIRFYNEFAKRPIMYLNYVYTKAEVKFTNTEKLLTTIHKGLIKALDLGMGQEILVYSPIVSMTKIQKTPLPERKALPIRWITWMSYLEDPRIQFHYDKTLPELQQVPTVTDDIIAKIKHPSEFSMVFYTDGSAIKHPNVNKSHNAGMGIAQVQFKPEFTVINTWSIPLGDHTAQLAEVAAVEFACKKALKIDGPVLIVTDSFYVAESVNKELPYWQSNGFFNNKKKPLKHVSKWKSIADCIQLKPDIIIIHEKGHQPTASTFHTEGNNLADKLATQGSYVVNAGKRTADGSEFEKRTADGSEFESPKKKAKVE

SEQ ID NO: 558 - protein, 2087 aa, synthetic construct
MPAAKRVKLDGGDKKYSIGLDIGTNSVGWAVITDEYKVPSKKFKVLGNTDRHSIKKNLIGALLFDSGETAEATRLKRTARRRYTRRKNRICYLQEIFSNEMAKVDDSFFHRLEESFLVEEDKKHERHPIFGNIVDEVAYHEKYPTIYHLRKKLVDSTDKADLRLIYLALAHMIKFRGHFLIEGDLNPDNSDVDKLFIQLVQTYNQLFEENPINASGVDAKAILSARLSKSRRLENLIAQLPGEKKNGLFGNLIALSLGLTPNFKSNFDLAEDAKLQLSKDTYDDDLDNLLAQIGDQYADLFLAAKNLSDAILLSDILRVNTEITKAPLSASMIKRYDEHHQDLTLLKALVRQQLPEKYKEIFFDQSKNGYAGYIDGGASQEEFYKFIKPILEKMDGTEELLVKLNREDLLRKQRTFDNGSIPHQIHLGELHAILRRQEDFYPFLKDNREKIEKILTFRIPYYVGPLARGNSRFAWMTRKSEETITPWNFEEVVDKGASAQSFIERMTNFDKNLPNEKVLPKHSLLYEYFTVYNELTKVKYVTEGMRKPAFLSGEQKKAIVDLLFKTNRKVTVKQLKEDYFKKIECFDSVEISGVEDRFNASLGTYHDLLKIIKDKDFLDNEENEDILEDIVLTLTLFEDREMIEERLKTYAHLFDDKVMKQLKRRRYTGWGRLSRKLINGIRDKQSGKTILDFLKSDGFANRNFMQLIHDDSLTFKEDIQKAQVSGQGDSLHEHIANLAGSPAIKKGILQTVKVVDELVKVMGRHKPENIVIEMARENQTTQKGQKNSRERMKRIEEGIKELGSQILKEHPVENTQLQNEKLYLYYLQNGRDMYVDQELDINRLSDYDVDHIVPQSFLKDDSIDNKVLTRSDKARGKSDNVPSEEVVKKMKNYWRQLLNAKLITQRKFDNLTKAERGGLSELDKAGFIKRQLVETRQITKHVAQILDSRMNTKYDENDKLIREVKVITLKSKLVSDFRKDFQFYKVREINNYHHAHDAYLNAVVGTALIKKYPKLESEFVYGDYKVYDVRKMIAKSEQEIGKATAKYFFYSNIMNFFKTEITLANGEIRKRPLIETNGETGEIVWDKGRDFATVRKVLSMPQVNIVKKTEVQTGGFSKESILPKRNSDKLIARKKDWDPKKYGGFDSPTVAYSVLVVAKVEKGKSKKLKSVKELLGITIMERSSFEKNPIDFLEAKGYKEVKKDLIIKLPKYSLFELENGRKRMLASAGELQKGNELALPSKYVNFLYLASHYEKLKGSPEDNEQKQLFVEQHKHYLDEIIEQISEFSKRVILADANLDKVLSAYNKHRDKPIREQAENIIHLFTLTNLGAPAAFKYFDTTIDRKRYTSTKEVLDATLIHQSITGLYETRIDLSQLGGDGGEAAAKPAPGSSGGIPWLMKKPLQLTTLVPLQEYEERLLKQTMLTGSYKEKLQSLFLKYDALWQHWENQVGHRRIKPHHIATGTVNPRPQKQYPINPKAKASIQTVINDLLKQGVLIQQNSIMNTPVYPVPKPDGKWRMVLDYREVNKTIPLIAAQNQHSAGILSSIFRGKYKTTLDLSNGFWAHSITPESYWLTAFTWLGQQYCWTRLPQGFLNSPALFNADVVDLLKEVPNVQVYVDDIYISHDDPREHLEQLEKVFSLLLNAGYVVSLKKSEIAQHEVEFLGFNITKEGRGLTETFKQKLLNITPPRDLKQLQSILGKLNFARNFIPNFSELVKPLYNIIATAPGKYITWTTDNSQQLQNIISMLNSAENLEERNPEVRLIMKVNTSPSAGYIRFYNEFAKRPIMYLNYVYTKAEVKFTNTEKLLTTIHKGLIKALDLGMGQEILVYSPIVSMTKIQKTPLPERKALPIRWITWMSYLEDPRIQFHYDKTLPELQQVPTVTDDIIAKIKHPSEFSMVFYTDGSAIKHPNVNKSHNAGMGIAQVQFKPEFTVINTWSIPLGDHTAQLAEVAAVEFACKKALKIDGPVLIVTDSFYVAESVNKELPYWQSNGFFNNKKKPLKHVSKWKSIADCIQLKPDIIIIHEKGHQPTASTFHTEGNNLADKLATQGSYVVNAGKRTADGSEFEKRTADGSEFESPKKKAKVE

SEQ ID NO: 559 - protein, 2087 aa, synthetic construct
MPAAKRVKLDGGDKKYSIGLDIGTNSVGWAVITDEYKVPSKKFKVLGNTDRHSIKKNLIGALLFDSGETAEATRLKRTARRRYTRRKNRICYLQEIFSNEMAKVDDSFFHRLEESFLVEEDKKHERHPIFGNIVDEVAYHEKYPTIYHLRKKLVDSTDKADLRLIYLALAHMIKFRGHFLIEGDLNPDNSDVDKLFIQLVQTYNQLFEENPINASGVDAKAILSARLSKSRRLENLIAQLPGEKKNGLFGNLIALSLGLTPNFKSNFDLAEDAKLQLSKDTYDDDLDNLLAQIGDQYADLFLAAKNLSDAILLSDILRVNTEITKAPLSASMIKRYDEHHQDLTLLKALVRQQLPEKYKEIFFDQSKNGYAGYIDGGASQEEFYKFIKPILEKMDGTEELLVKLNREDLLRKQRTFDNGSIPHQIHLGELHAILRRQEDFYPFLKDNREKIEKILTFRIPYYVGPLARGNSRFAWMTRKSEETITPWNFEEVVDKGASAQSFIERMTNFDKNLPNEKVLPKHSLLYEYFTVYNELTKVKYVTEGMRKPAFLSGEQKKAIVDLLFKTNRKVTVKQLKEDYFKKIECFDSVEISGVEDRFNASLGTYHDLLKIIKDKDFLDNEENEDILEDIVLTLTLFEDREMIEERLKTYAHLFDDKVMKQLKRRRYTGWGRLSRKLINGIRDKQSGKTILDFLKSDGFANRNFMQLIHDDSLTFKEDIQKAQVSGQGDSLHEHIANLAGSPAIKKGILQTVKVVDELVKVMGRHKPENIVIEMARENQTTQKGQKNSRERMKRIEEGIKELGSQILKEHPVENTQLQNEKLYLYYLQNGRDMYVDQELDINRLSDYDVDHIVPQSFLKDDSIDNKVLTRSDKARGKSDNVPSEEVVKKMKNYWRQLLNAKLITQRKFDNLTKAERGGLSELDKAGFIKRQLVETRQITKHVAQILDSRMNTKYDENDKLIREVKVITLKSKLVSDFRKDFQFYKVREINNYHHAHDAYLNAVVGTALIKKYPKLESEFVYGDYKVYDVRKMIAKSEQEIGKATAKYFFYSNIMNFFKTEITLANGEIRKRPLIETNGETGEIVWDKGRDFATVRKVLSMPQVNIVKKTEVQTGGFSKESILPKRNSDKLIARKKDWDPKKYGGFDSPTVAYSVLVVAKVEKGKSKKLKSVKELLGITIMERSSFEKNPIDFLEAKGYKEVKKDLIIKLPKYSLFELENGRKRMLASAGELQKGNELALPSKYVNFLYLASHYEKLKGSPEDNEQKQLFVEQHKHYLDEIIEQISEFSKRVILADANLDKVLSAYNKHRDKPIREQAENIIHLFTLTNLGAPAAFKYFDTTIDRKRYTSTKEVLDATLIHQSITGLYETRIDLSQLGGDGGPAPEAAAKGGGGGIPWLMKKPLQLTTLVPLQEYEERLLKQTMLTGSYKEKLQSLFLKYDALWQHWENQVGHRRIKPHHIATGTVNPRPQKQYPINPKAKASIQTVINDLLKQGVLIQQNSIMNTPVYPVPKPDGKWRMVLDYREVNKTIPLIAAQNQHSAGILSSIFRGKYKTTLDLSNGFWAHSITPESYWLTAFTWLGQQYCWTRLPQGFLNSPALFNADVVDLLKEVPNVQVYVDDIYISHDDPREHLEQLEKVFSLLLNAGYVVSLKKSEIAQHEVEFLGFNITKEGRGLTETFKQKLLNITPPRDLKQLQSILGKLNFARNFIPNFSELVKPLYNIIATAPGKYITWTTDNSQQLQNIISMLNSAENLEERNPEVRLIMKVNTSPSAGYIRFYNEFAKRPIMYLNYVYTKAEVKFTNTEKLLTTIHKGLIKALDLGMGQEILVYSPIVSMTKIQKTPLPERKALPIRWITWMSYLEDPRIQFHYDKTLPELQQVPTVTDDIIAKIKHPSEFSMVFYTDGSAIKHPNVNKSHNAGMGIAQVQFKPEFTVINTWSIPLGDHTAQLAEVAAVEFACKKALKIDGPVLIVTDSFYVAESVNKELPYWQSNGFFNNKKKPLKHVSKWKSIADCIQLKPDIIIIHEKGHQPTASTFHTEGNNLADKLATQGSYVVNAGKRTADGSEFEKRTADGSEFESPKKKAKVE

SEQ ID NO: 560 - protein, 2083 aa, synthetic construct
MPAAKRVKLDGGDKKYSIGLDIGTNSVGWAVITDEYKVPSKKFKVLGNTDRHSIKKNLIGALLFDSGETAEATRLKRTARRRYTRRKNRICYLQEIFSNEMAKVDDSFFHRLEESFLVEEDKKHERHPIFGNIVDEVAYHEKYPTIYHLRKKLVDSTDKADLRLIYLALAHMIKFRGHFLIEGDLNPDNSDVDKLFIQLVQTYNQLFEENPINASGVDAKAILSARLSKSRRLENLIAQLPGEKKNGLFGNLIALSLGLTPNFKSNFDLAEDAKLQLSKDTYDDDLDNLLAQIGDQYADLFLAAKNLSDAILLSDILRVNTEITKAPLSASMIKRYDEHHQDLTLLKALVRQQLPEKYKEIFFDQSKNGYAGYIDGGASQEEFYKFIKPILEKMDGTEELLVKLNREDLLRKQRTFDNGSIPHQIHLGELHAILRRQEDFYPFLKDNREKIEKILTFRIPYYVGPLARGNSRFAWMTRKSEETITPWNFEEVVDKGASAQSFIERMTNFDKNLPNEKVLPKHSLLYEYFTVYNELTKVKYVTEGMRKPAFLSGEQKKAIVDLLFKTNRKVTVKQLKEDYFKKIECFDSVEISGVEDRFNASLGTYHDLLKIIKDKDFLDNEENEDILEDIVLTLTLFEDREMIEERLKTYAHLFDDKVMKQLKRRRYTGWGRLSRKLINGIRDKQSGKTILDFLKSDGFANRNFMQLIHDDSLTFKEDIQKAQVSGQGDSLHEHIANLAGSPAIKKGILQTVKVVDELVKVMGRHKPENIVIEMARENQTTQKGQKNSRERMKRIEEGIKELGSQILKEHPVENTQLQNEKLYLYYLQNGRDMYVDQELDINRLSDYDVDHIVPQSFLKDDSIDNKVLTRSDKARGKSDNVPSEEVVKKMKNYWRQLLNAKLITQRKFDNLTKAERGGLSELDKAGFIKRQLVETRQITKHVAQILDSRMNTKYDENDKLIREVKVITLKSKLVSDFRKDFQFYKVREINNYHHAHDAYLNAVVGTALIKKYPKLESEFVYGDYKVYDVRKMIAKSEQEIGKATAKYFFYSNIMNFFKTEITLANGEIRKRPLIETNGETGEIVWDKGRDFATVRKVLSMPQVNIVKKTEVQTGGFSKESILPKRNSDKLIARKKDWDPKKYGGFDSPTVAYSVLVVAKVEKGKSKKLKSVKELLGITIMERSSFEKNPIDFLEAKGYKEVKKDLIIKLPKYSLFELENGRKRMLASAGELQKGNELALPSKYVNFLYLASHYEKLKGSPEDNEQKQLFVEQHKHYLDEIIEQISEFSKRVILADANLDKVLSAYNKHRDKPIREQAENIIHLFTLTNLGAPAAFKYFDTTIDRKRYTSTKEVLDATLIHQSITGLYETRIDLSQLGGDGGPAPAPAPGGIPWLMKKPLQLTTLVPLQEYEERLLKQTMLTGSYKEKLQSLFLKYDALWQHWENQVGHRRIKPHHIATGTVNPRPQKQYPINPKAKASIQTVINDLLKQGVLIQQNSIMNTPVYPVPKPDGKWRMVLDYREVNKTIPLIAAQNQHSAGILSSIFRGKYKTTLDLSNGFWAHSITPESYWLTAFTWLGQQYCWTRLPQGFLNSPALFNADVVDLLKEVPNVQVYVDDIYISHDDPREHLEQLEKVFSLLLNAGYVVSLKKSEIAQHEVEFLGFNITKEGRGLTETFKQKLLNITPPRDLKQLQSILGKLNFARNFIPNFSELVKPLYNIIATAPGKYITWTTDNSQQLQNIISMLNSAENLEERNPEVRLIMKVNTSPSAGYIRFYNEFAKRPIMYLNYVYTKAEVKFTNTEKLLTTIHKGLIKALDLGMGQEILVYSPIVSMTKIQKTPLPERKALPIRWITWMSYLEDPRIQFHYDKTLPELQQVPTVTDDIIAKIKHPSEFSMVFYTDGSAIKHPNVNKSHNAGMGIAQVQFKPEFTVINTWSIPLGDHTAQLAEVAAVEFACKKALKIDGPVLIVTDSFYVAESVNKELPYWQSNGFFNNKKKPLKHVSKWKSIADCIQLKPDIIIIHEKGHQPTASTFHTEGNNLADKLATQGSYVVNAGKRTADGSEFEKRTADGSEFESPKKKAKVE

SEQ ID NO: 561 - protein, 2087 aa, synthetic construct
MPAAKRVKLDGGDKKYSIGLDIGTNSVGWAVITDEYKVPSKKFKVLGNTDRHSIKKNLIGALLFDSGETAEATRLKRTARRRYTRRKNRICYLQEIFSNEMAKVDDSFFHRLEESFLVEEDKKHERHPIFGNIVDEVAYHEKYPTIYHLRKKLVDSTDKADLRLIYLALAHMIKFRGHFLIEGDLNPDNSDVDKLFIQLVQTYNQLFEENPINASGVDAKAILSARLSKSRRLENLIAQLPGEKKNGLFGNLIALSLGLTPNFKSNFDLAEDAKLQLSKDTYDDDLDNLLAQIGDQYADLFLAAKNLSDAILLSDILRVNTEITKAPLSASMIKRYDEHHQDLTLLKALVRQQLPEKYKEIFFDQSKNGYAGYIDGGASQEEFYKFIKPILEKMDGTEELLVKLNREDLLRKQRTFDNGSIPHQIHLGELHAILRRQEDFYPFLKDNREKIEKILTFRIPYYVGPLARGNSRFAWMTRKSEETITPWNFEEVVDKGASAQSFIERMTNFDKNLPNEKVLPKHSLLYEYFTVYNELTKVKYVTEGMRKPAFLSGEQKKAIVDLLFKTNRKVTVKQLKEDYFKKIECFDSVEISGVEDRFNASLGTYHDLLKIIKDKDFLDNEENEDILEDIVLTLTLFEDREMIEERLKTYAHLFDDKVMKQLKRRRYTGWGRLSRKLINGIRDKQSGKTILDFLKSDGFANRNFMQLIHDDSLTFKEDIQKAQVSGQGDSLHEHIANLAGSPAIKKGILQTVKVVDELVKVMGRHKPENIVIEMARENQTTQKGQKNSRERMKRIEEGIKELGSQILKEHPVENTQLQNEKLYLYYLQNGRDMYVDQELDINRLSDYDVDHIVPQSFLKDDSIDNKVLTRSDKARGKSDNVPSEEVVKKMKNYWRQLLNAKLITQRKFDNLTKAERGGLSELDKAGFIKRQLVETRQITKHVAQILDSRMNTKYDENDKLIREVKVITLKSKLVSDFRKDFQFYKVREINNYHHAHDAYLNAVVGTALIKKYPKLESEFVYGDYKVYDVRKMIAKSEQEIGKATAKYFFYSNIMNFFKTEITLANGEIRKRPLIETNGETGEIVWDKGRDFATVRKVLSMPQVNIVKKTEVQTGGFSKESILPKRNSDKLIARKKDWDPKKYGGFDSPTVAYSVLVVAKVEKGKSKKLKSVKELLGITIMERSSFEKNPIDFLEAKGYKEVKKDLIIKLPKYSLFELENGRKRMLASAGELQKGNELALPSKYVNFLYLASHYEKLKGSPEDNEQKQLFVEQHKHYLDEIIEQISEFSKRVILADANLDKVLSAYNKHRDKPIREQAENIIHLFTLTNLGAPAAFKYFDTTIDRKRYTSTKEVLDATLIHQSITGLYETRIDLSQLGGDGGGGSEAAAKGSSGGIPWLMKKPLQLTTLVPLQEYEERLLKQTMLTGSYKEKLQSLFLKYDALWQHWENQVGHRRIKPHHIATGTVNPRPQKQYPINPKAKASIQTVINDLLKQGVLIQQNSIMNTPVYPVPKPDGKWRMVLDYREVNKTIPLIAAQNQHSAGILSSIFRGKYKTTLDLSNGFWAHSITPESYWLTAFTWLGQQYCWTRLPQGFLNSPALFNADVVDLLKEVPNVQVYVDDIYISHDDPREHLEQLEKVFSLLLNAGYVVSLKKSEIAQHEVEFLGFNITKEGRGLTETFKQKLLNITPPRDLKQLQSILGKLNFARNFIPNFSELVKPLYNIIATAPGKYITWTTDNSQQLQNIISMLNSAENLEERNPEVRLIMKVNTSPSAGYIRFYNEFAKRPIMYLNYVYTKAEVKFTNTEKLLTTIHKGLIKALDLGMGQEILVYSPIVSMTKIQKTPLPERKALPIRWITWMSYLEDPRIQFHYDKTLPELQQVPTVTDDIIAKIKHPSEFSMVFYTDGSAIKHPNVNKSHNAGMGIAQVQFKPEFTVINTWSIPLGDHTAQLAEVAAVEFACKKALKIDGPVLIVTDSFYVAESVNKELPYWQSNGFFNNKKKPLKHVSKWKSIADCIQLKPDIIIIHEKGHQPTASTFHTEGNNLADKLATQGSYVVNAGKRTADGSEFEKRTADGSEFESPKKKAKVE

SEQ ID NO: 562 - protein, 2085 aa, synthetic construct
MPAAKRVKLDGGDKKYSIGLDIGTNSVGWAVITDEYKVPSKKFKVLGNTDRHSIKKNLIGALLFDSGETAEATRLKRTARRRYTRRKNRICYLQEIFSNEMAKVDDSFFHRLEESFLVEEDKKHERHPIFGNIVDEVAYHEKYPTIYHLRKKLVDSTDKADLRLIYLALAHMIKFRGHFLIEGDLNPDNSDVDKLFIQLVQTYNQLFEENPINASGVDAKAILSARLSKSRRLENLIAQLPGEKKNGLFGNLIALSLGLTPNFKSNFDLAEDAKLQLSKDTYDDDLDNLLAQIGDQYADLFLAAKNLSDAILLSDILRVNTEITKAPLSASMIKRYDEHHQDLTLLKALVRQQLPEKYKEIFFDQSKNGYAGYIDGGASQEEFYKFIKPILEKMDGTEELLVKLNREDLLRKQRTFDNGSIPHQIHLGELHAILRRQEDFYPFLKDNREKIEKILTFRIPYYVGPLARGNSRFAWMTRKSEETITPWNFEEVVDKGASAQSFIERMTNFDKNLPNEKVLPKHSLLYEYFTVYNELTKVKYVTEGMRKPAFLSGEQKKAIVDLLFKTNRKVTVKQLKEDYFKKIECFDSVEISGVEDRFNASLGTYHDLLKIIKDKDFLDNEENEDILEDIVLTLTLFEDREMIEERLKTYAHLFDDKVMKQLKRRRYTGWGRLSRKLINGIRDKQSGKTILDFLKSDGFANRNFMQLIHDDSLTFKEDIQKAQVSGQGDSLHEHIANLAGSPAIKKGILQTVKVVDELVKVMGRHKPENIVIEMARENQTTQKGQKNSRERMKRIEEGIKELGSQILKEHPVENTQLQNEKLYLYYLQNGRDMYVDQELDINRLSDYDVDHIVPQSFLKDDSIDNKVLTRSDKARGKSDNVPSEEVVKKMKNYWRQLLNAKLITQRKFDNLTKAERGGLSELDKAGFIKRQLVETRQITKHVAQILDSRMNTKYDENDKLIREVKVITLKSKLVSDFRKDFQFYKVREINNYHHAHDAYLNAVVGTALIKKYPKLESEFVYGDYKVYDVRKMIAKSEQEIGKATAKYFFYSNIMNFFKTEITLANGEIRKRPLIETNGETGEIVWDKGRDFATVRKVLSMPQVNIVKKTEVQTGGFSKESILPKRNSDKLIARKKDWDPKKYGGFDSPTVAYSVLVVAKVEKGKSKKLKSVKELLGITIMERSSFEKNPIDFLEAKGYKEVKKDLIIKLPKYSLFELENGRKRMLASAGELQKGNELALPSKYVNFLYLASHYEKLKGSPEDNEQKQLFVEQHKHYLDEIIEQISEFSKRVILADANLDKVLSAYNKHRDKPIREQAENIIHLFTLTNLGAPAAFKYFDTTIDRKRYTSTKEVLDATLIHQSITGLYETRIDLSQLGGDGGGSSPAPGGGGGIPWLMKKPLQLTTLVPLQEYEERLLKQTMLTGSYKEKLQSLFLKYDALWQHWENQVGHRRIKPHHIATGTVNPRPQKQYPINPKAKASIQTVINDLLKQGVLIQQNSIMNTPVYPVPKPDGKWRMVLDYREVNKTIPLIAAQNQHSAGILSSIFRGKYKTTLDLSNGFWAHSITPESYWLTAFTWLGQQYCWTRLPQGFLNSPALFNADVVDLLKEVPNVQVYVDDIYISHDDPREHLEQLEKVFSLLLNAGYVVSLKKSEIAQHEVEFLGFNITKEGRGLTETFKQKLLNITPPRDLKQLQSILGKLNFARNFIPNFSELVKPLYNIIATAPGKYITWTTDNSQQLQNIISMLNSAENLEERNPEVRLIMKVNTSPSAGYIRFYNEFAKRPIMYLNYVYTKAEVKFTNTEKLLTTIHKGLIKALDLGMGQEILVYSPIVSMTKIQKTPLPERKALPIRWITWMSYLEDPRIQFHYDKTLPELQQVPTVTDDIIAKIKHPSEFSMVFYTDGSAIKHPNVNKSHNAGMGIAQVQFKPEFTVINTWSIPLGDHTAQLAEVAAVEFACKKALKIDGPVLIVTDSFYVAESVNKELPYWQSNGFFNNKKKPLKHVSKWKSIADCIQLKPDIIIIHEKGHQPTASTFHTEGNNLADKLATQGSYVVNAGKRTADGSEFEKRTADGSEFESPKKKAKVE

SEQ ID NO: 563 - protein, 2087 aa, synthetic construct
MPAAKRVKLDGGDKKYSIGLDIGTNSVGWAVITDEYKVPSKKFKVLGNTDRHSIKKNLIGALLFDSGETAEATRLKRTARRRYTRRKNRICYLQEIFSNEMAKVDDSFFHRLEESFLVEEDKKHERHPIFGNIVDEVAYHEKYPTIYHLRKKLVDSTDKADLRLIYLALAHMIKFRGHFLIEGDLNPDNSDVDKLFIQLVQTYNQLFEENPINASGVDAKAILSARLSKSRRLENLIAQLPGEKKNGLFGNLIALSLGLTPNFKSNFDLAEDAKLQLSKDTYDDDLDNLLAQIGDQYADLFLAAKNLSDAILLSDILRVNTEITKAPLSASMIKRYDEHHQDLTLLKALVRQQLPEKYKEIFFDQSKNGYAGYIDGGASQEEFYKFIKPILEKMDGTEELLVKLNREDLLRKQRTFDNGSIPHQIHLGELHAILRRQEDFYPFLKDNREKIEKILTFRIPYYVGPLARGNSRFAWMTRKSEETITPWNFEEVVDKGASAQSFIERMTNFDKNLPNEKVLPKHSLLYEYFTVYNELTKVKYVTEGMRKPAFLSGEQKKAIVDLLFKTNRKVTVKQLKEDYFKKIECFDSVEISGVEDRFNASLGTYHDLLKIIKDKDFLDNEENEDILEDIVLTLTLFEDREMIEERLKTYAHLFDDKVMKQLKRRRYTGWGRLSRKLINGIRDKQSGKTILDFLKSDGFANRNFMQLIHDDSLTFKEDIQKAQVSGQGDSLHEHIANLAGSPAIKKGILQTVKVVDELVKVMGRHKPENIVIEMARENQTTQKGQKNSRERMKRIEEGIKELGSQILKEHPVENTQLQNEKLYLYYLQNGRDMYVDQELDINRLSDYDVDHIVPQSFLKDDSIDNKVLTRSDKARGKSDNVPSEEVVKKMKNYWRQLLNAKLITQRKFDNLTKAERGGLSELDKAGFIKRQLVETRQITKHVAQILDSRMNTKYDENDKLIREVKVITLKSKLVSDFRKDFQFYKVREINNYHHAHDAYLNAVVGTALIKKYPKLESEFVYGDYKVYDVRKMIAKSEQEIGKATAKYFFYSNIMNFFKTEITLANGEIRKRPLIETNGETGEIVWDKGRDFATVRKVLSMPQVNIVKKTEVQTGGFSKESILPKRNSDKLIARKKDWDPKKYGGFDSPTVAYSVLVVAKVEKGKSKKLKSVKELLGITIMERSSFEKNPIDFLEAKGYKEVKKDLIIKLPKYSLFELENGRKRMLASAGELQKGNELALPSKYVNFLYLASHYEKLKGSPEDNEQKQLFVEQHKHYLDEIIEQISEFSKRVILADANLDKVLSAYNKHRDKPIREQAENIIHLFTLTNLGAPAAFKYFDTTIDRKRYTSTKEVLDATLIHQSITGLYETRIDLSQLGGDGGGGSEAAAKGGGGGIPWLMKKPLQLTTLVPLQEYEERLLKQTMLTGSYKEKLQSLFLKYDALWQHWENQVGHRRIKPHHIATGTVNPRPQKQYPINPKAKASIQTVINDLLKQGVLIQQNSIMNTPVYPVPKPDGKWRMVLDYREVNKTIPLIAAQNQHSAGILSSIFRGKYKTTLDLSNGFWAHSITPESYWLTAFTWLGQQYCWTRLPQGFLNSPALFNADVVDLLKEVPNVQVYVDDIYISHDDPREHLEQLEKVFSLLLNAGYVVSLKKSEIAQHEVEFLGFNITKEGRGLTETFKQKLLNITPPRDLKQLQSILGKLNFARNFIPNFSELVKPLYNIIATAPGKYITWTTDNSQQLQNIISMLNSAENLEERNPEVRLIMKVNTSPSAGYIRFYNEFAKRPIMYLNYVYTKAEVKFTNTEKLLTTIHKGLIKALDLGMGQEILVYSPIVSMTKIQKTPLPERKALPIRWITWMSYLEDPRIQFHYDKTLPELQQVPTVTDDIIAKIKHPSEFSMVFYTDGSAIKHPNVNKSHNAGMGIAQVQFKPEFTVINTWSIPLGDHTAQLAEVAAVEFACKKALKIDGPVLIVTDSFYVAESVNKELPYWQSNGFFNNKKKPLKHVSKWKSIADCIQLKPDIIIIHEKGHQPTASTFHTEGNNLADKLATQGSYVVNAGKRTADGSEFEKRTADGSEFESPKKKAKVE

SEQ ID NO: 564 - protein, 2082 aa, synthetic construct
MPAAKRVKLDGGDKKYSIGLDIGTNSVGWAVITDEYKVPSKKFKVLGNTDRHSIKKNLIGALLFDSGETAEATRLKRTARRRYTRRKNRICYLQEIFSNEMAKVDDSFFHRLEESFLVEEDKKHERHPIFGNIVDEVAYHEKYPTIYHLRKKLVDSTDKADLRLIYLALAHMIKFRGHFLIEGDLNPDNSDVDKLFIQLVQTYNQLFEENPINASGVDAKAILSARLSKSRRLENLIAQLPGEKKNGLFGNLIALSLGLTPNFKSNFDLAEDAKLQLSKDTYDDDLDNLLAQIGDQYADLFLAAKNLSDAILLSDILRVNTEITKAPLSASMIKRYDEHHQDLTLLKALVRQQLPEKYKEIFFDQSKNGYAGYIDGGASQEEFYKFIKPILEKMDGTEELLVKLNREDLLRKQRTFDNGSIPHQIHLGELHAILRRQEDFYPFLKDNREKIEKILTFRIPYYVGPLARGNSRFAWMTRKSEETITPWNFEEVVDKGASAQSFIERMTNFDKNLPNEKVLPKHSLLYEYFTVYNELTKVKYVTEGMRKPAFLSGEQKKAIVDLLFKTNRKVTVKQLKEDYFKKIECFDSVEISGVEDRFNASLGTYHDLLKIIKDKDFLDNEENEDILEDIVLTLTLFEDREMIEERLKTYAHLFDDKVMKQLKRRRYTGWGRLSRKLINGIRDKQSGKTILDFLKSDGFANRNFMQLIHDDSLTFKEDIQKAQVSGQGDSLHEHIANLAGSPAIKKGILQTVKVVDELVKVMGRHKPENIVIEMARENQTTQKGQKNSRERMKRIEEGIKELGSQILKEHPVENTQLQNEKLYLYYLQNGRDMYVDQELDINRLSDYDVDHIVPQSFLKDDSIDNKVLTRSDKARGKSDNVPSEEVVKKMKNYWRQLLNAKLITQRKFDNLTKAERGGLSELDKAGFIKRQLVETRQITKHVAQILDSRMNTKYDENDKLIREVKVITLKSKLVSDFRKDFQFYKVREINNYHHAHDAYLNAVVGTALIKKYPKLESEFVYGDYKVYDVRKMIAKSEQEIGKATAKYFFYSNIMNFFKTEITLANGEIRKRPLIETNGETGEIVWDKGRDFATVRKVLSMPQVNIVKKTEVQTGGFSKESILPKRNSDKLIARKKDWDPKKYGGFDSPTVAYSVLVVAKVEKGKSKKLKSVKELLGITIMERSSFEKNPIDFLEAKGYKEVKKDLIIKLPKYSLFELENGRKRMLASAGELQKGNELALPSKYVNFLYLASHYEKLKGSPEDNEQKQLFVEQHKHYLDEIIEQISEFSKRVILADANLDKVLSAYNKHRDKPIREQAENIIHLFTLTNLGAPAAFKYFDTTIDRKRYTSTKEVLDATLIHQSITGLYETRIDLSQLGGDGGGGGGSSGGIPWLMKKPLQLTTLVPLQEYEERLLKQTMLTGSYKEKLQSLFLKYDALWQHWENQVGHRRIKPHHIATGTVNPRPQKQYPINPKAKASIQTVINDLLKQGVLIQQNSIMNTPVYPVPKPDGKWRMVLDYREVNKTIPLIAAQNQHSAGILSSIFRGKYKTTLDLSNGFWAHSITPESYWLTAFTWLGQQYCWTRLPQGFLNSPALFNADVVDLLKEVPNVQVYVDDIYISHDDPREHLEQLEKVFSLLLNAGYVVSLKKSEIAQHEVEFLGFNITKEGRGLTETFKQKLLNITPPRDLKQLQSILGKLNFARNFIPNFSELVKPLYNIIATAPGKYITWTTDNSQQLQNIISMLNSAENLEERNPEVRLIMKVNTSPSAGYIRFYNEFAKRPIMYLNYVYTKAEVKFTNTEKLLTTIHKGLIKALDLGMGQEILVYSPIVSMTKIQKTPLPERKALPIRWITWMSYLEDPRIQFHYDKTLPELQQVPTVTDDIIAKIKHPSEFSMVFYTDGSAIKHPNVNKSHNAGMGIAQVQFKPEFTVINTWSIPLGDHTAQLAEVAAVEFACKKALKIDGPVLIVTDSFYVAESVNKELPYWQSNGFFNNKKKPLKHVSKWKSIADCIQLKPDIIIIHEKGHQPTASTFHTEGNNLADKLATQGSYVVNAGKRTADGSEFEKRTADGSEFESPKKKAKVE

SEQ ID NO: 565 - protein, 2085 aa, synthetic construct
MPAAKRVKLDGGDKKYSIGLDIGTNSVGWAVITDEYKVPSKKFKVLGNTDRHSIKKNLIGALLFDSGETAEATRLKRTARRRYTRRKNRICYLQEIFSNEMAKVDDSFFHRLEESFLVEEDKKHERHPIFGNIVDEVAYHEKYPTIYHLRKKLVDSTDKADLRLIYLALAHMIKFRGHFLIEGDLNPDNSDVDKLFIQLVQTYNQLFEENPINASGVDAKAILSARLSKSRRLENLIAQLPGEKKNGLFGNLIALSLGLTPNFKSNFDLAEDAKLQLSKDTYDDDLDNLLAQIGDQYADLFLAAKNLSDAILLSDILRVNTEITKAPLSASMIKRYDEHHQDLTLLKALVRQQLPEKYKEIFFDQSKNGYAGYIDGGASQEEFYKFIKPILEKMDGTEELLVKLNREDLLRKQRTFDNGSIPHQIHLGELHAILRRQEDFYPFLKDNREKIEKILTFRIPYYVGPLARGNSRFAWMTRKSEETITPWNFEEVVDKGASAQSFIERMTNFDKNLPNEKVLPKHSLLYEYFTVYNELTKVKYVTEGMRKPAFLSGEQKKAIVDLLFKTNRKVTVKQLKEDYFKKIECFDSVEISGVEDRFNASLGTYHDLLKIIKDKDFLDNEENEDILEDIVLTLTLFEDREMIEERLKTYAHLFDDKVMKQLKRRRYTGWGRLSRKLINGIRDKQSGKTILDFLKSDGFANRNFMQLIHDDSLTFKEDIQKAQVSGQGDSLHEHIANLAGSPAIKKGILQTVKVVDELVKVMGRHKPENIVIEMARENQTTQKGQKNSRERMKRIEEGIKELGSQILKEHPVENTQLQNEKLYLYYLQNGRDMYVDQELDINRLSDYDVDHIVPQSFLKDDSIDNKVLTRSDKARGKSDNVPSEEVVKKMKNYWRQLLNAKLITQRKFDNLTKAERGGLSELDKAGFIKRQLVETRQITKHVAQILDSRMNTKYDENDKLIREVKVITLKSKLVSDFRKDFQFYKVREINNYHHAHDAYLNAVVGTALIKKYPKLESEFVYGDYKVYDVRKMIAKSEQEIGKATAKYFFYSNIMNFFKTEITLANGEIRKRPLIETNGETGEIVWDKGRDFATVRKVLSMPQVNIVKKTEVQTGGFSKESILPKRNSDKLIARKKDWDPKKYGGFDSPTVAYSVLVVAKVEKGKSKKLKSVKELLGITIMERSSFEKNPIDFLEAKGYKEVKKDLIIKLPKYSLFELENGRKRMLASAGELQKGNELALPSKYVNFLYLASHYEKLKGSPEDNEQKQLFVEQHKHYLDEIIEQISEFSKRVILADANLDKVLSAYNKHRDKPIREQAENIIHLFTLTNLGAPAAFKYFDTTIDRKRYTSTKEVLDATLIHQSITGLYETRIDLSQLGGDGGGGSGSSGGGGGIPWLMKKPLQLTTLVPLQEYEERLLKQTMLTGSYKEKLQSLFLKYDALWQHWENQVGHRRIKPHHIATGTVNPRPQKQYPINPKAKASIQTVINDLLKQGVLIQQNSIMNTPVYPVPKPDGKWRMVLDYREVNKTIPLIAAQNQHSAGILSSIFRGKYKTTLDLSNGFWAHSITPESYWLTAFTWLGQQYCWTRLPQGFLNSPALFNADVVDLLKEVPNVQVYVDDIYISHDDPREHLEQLEKVFSLLLNAGYVVSLKKSEIAQHEVEFLGFNITKEGRGLTETFKQKLLNITPPRDLKQLQSILGKLNFARNFIPNFSELVKPLYNIIATAPGKYITWTTDNSQQLQNIISMLNSAENLEERNPEVRLIMKVNTSPSAGYIRFYNEFAKRPIMYLNYVYTKAEVKFTNTEKLLTTIHKGLIKALDLGMGQEILVYSPIVSMTKIQKTPLPERKALPIRWITWMSYLEDPRIQFHYDKTLPELQQVPTVTDDIIAKIKHPSEFSMVFYTDGSAIKHPNVNKSHNAGMGIAQVQFKPEFTVINTWSIPLGDHTAQLAEVAAVEFACKKALKIDGPVLIVTDSFYVAESVNKELPYWQSNGFFNNKKKPLKHVSKWKSIADCIQLKPDIIIIHEKGHQPTASTFHTEGNNLADKLATQGSYVVNAGKRTADGSEFEKRTADGSEFESPKKKAKVE

SEQ ID NO: 566 - protein, 2091 aa, synthetic construct
MPAAKRVKLDGGDKKYSIGLDIGTNSVGWAVITDEYKVPSKKFKVLGNTDRHSIKKNLIGALLFDSGETAEATRLKRTARRRYTRRKNRICYLQEIFSNEMAKVDDSFFHRLEESFLVEEDKKHERHPIFGNIVDEVAYHEKYPTIYHLRKKLVDSTDKADLRLIYLALAHMIKFRGHFLIEGDLNPDNSDVDKLFIQLVQTYNQLFEENPINASGVDAKAILSARLSKSRRLENLIAQLPGEKKNGLFGNLIALSLGLTPNFKSNFDLAEDAKLQLSKDTYDDDLDNLLAQIGDQYADLFLAAKNLSDAILLSDILRVNTEITKAPLSASMIKRYDEHHQDLTLLKALVRQQLPEKYKEIFFDQSKNGYAGYIDGGASQEEFYKFIKPILEKMDGTEELLVKLNREDLLRKQRTFDNGSIPHQIHLGELHAILRRQEDFYPFLKDNREKIEKILTFRIPYYVGPLARGNSRFAWMTRKSEETITPWNFEEVVDKGASAQSFIERMTNFDKNLPNEKVLPKHSLLYEYFTVYNELTKVKYVTEGMRKPAFLSGEQKKAIVDLLFKTNRKVTVKQLKEDYFKKIECFDSVEISGVEDRFNASLGTYHDLLKIIKDKDFLDNEENEDILEDIVLTLTLFEDREMIEERLKTYAHLFDDKVMKQLKRRRYTGWGRLSRKLINGIRDKQSGKTILDFLKSDGFANRNFMQLIHDDSLTFKEDIQKAQVSGQGDSLHEHIANLAGSPAIKKGILQTVKVVDELVKVMGRHKPENIVIEMARENQTTQKGQKNSRERMKRIEEGIKELGSQILKEHPVENTQLQNEKLYLYYLQNGRDMYVDQELDINRLSDYDVDHIVPQSFLKDDSIDNKVLTRSDKARGKSDNVPSEEVVKKMKNYWRQLLNAKLITQRKFDNLTKAERGGLSELDKAGFIKRQLVETRQITKHVAQILDSRMNTKYDENDKLIREVKVITLKSKLVSDFRKDFQFYKVREINNYHHAHDAYLNAVVGTALIKKYPKLESEFVYGDYKVYDVRKMIAKSEQEIGKATAKYFFYSNIMNFFKTEITLANGEIRKRPLIETNGETGEIVWDKGRDFATVRKVLSMPQVNIVKKTEVQTGGFSKESILPKRNSDKLIARKKDWDPKKYGGFDSPTVAYSVLVVAKVEKGKSKKLKSVKELLGITIMERSSFEKNPIDFLEAKGYKEVKKDLIIKLPKYSLFELENGRKRMLASAGELQKGNELALPSKYVNFLYLASHYEKLKGSPEDNEQKQLFVEQHKHYLDEIIEQISEFSKRVILADANLDKVLSAYNKHRDKPIREQAENIIHLFTLTNLGAPAAFKYFDTTIDRKRYTSTKEVLDATLIHQSITGLYETRIDLSQLGGDGGGGSGGSGGSGGSGGSGGIPWLMKKPLQLTTLVPLQEYEERLLKQTMLTGSYKEKLQSLFLKYDALWQHWENQVGHRRIKPHHIATGTVNPRPQKQYPINPKAKASIQTVINDLLKQGVLIQQNSIMNTPVYPVPKPDGKWRMVLDYREVNKTIPLIAAQNQHSAGILSSIFRGKYKTTLDLSNGFWAHSITPESYWLTAFTWLGQQYCWTRLPQGFLNSPALFNADVVDLLKEVPNVQVYVDDIYISHDDPREHLEQLEKVFSLLLNAGYVVSLKKSEIAQHEVEFLGFNITKEGRGLTETFKQKLLNITPPRDLKQLQSILGKLNFARNFIPNFSELVKPLYNIIATAPGKYITWTTDNSQQLQNIISMLNSAENLEERNPEVRLIMKVNTSPSAGYIRFYNEFAKRPIMYLNYVYTKAEVKFTNTEKLLTTIHKGLIKALDLGMGQEILVYSPIVSMTKIQKTPLPERKALPIRWITWMSYLEDPRIQFHYDKTLPELQQVPTVTDDIIAKIKHPSEFSMVFYTDGSAIKHPNVNKSHNAGMGIAQVQFKPEFTVINTWSIPLGDHTAQLAEVAAVEFACKKALKIDGPVLIVTDSFYVAESVNKELPYWQSNGFFNNKKKPLKHVSKWKSIADCIQLKPDIIIIHEKGHQPTASTFHTEGNNLADKLATQGSYVVNAGKRTADGSEFEKRTADGSEFESPKKKAKVE

SEQ ID NO: 567 - protein, 2087 aa, synthetic construct
MPAAKRVKLDGGDKKYSIGLDIGTNSVGWAVITDEYKVPSKKFKVLGNTDRHSIKKNLIGALLFDSGETAEATRLKRTARRRYTRRKNRICYLQEIFSNEMAKVDDSFFHRLEESFLVEEDKKHERHPIFGNIVDEVAYHEKYPTIYHLRKKLVDSTDKADLRLIYLALAHMIKFRGHFLIEGDLNPDNSDVDKLFIQLVQTYNQLFEENPINASGVDAKAILSARLSKSRRLENLIAQLPGEKKNGLFGNLIALSLGLTPNFKSNFDLAEDAKLQLSKDTYDDDLDNLLAQIGDQYADLFLAAKNLSDAILLSDILRVNTEITKAPLSASMIKRYDEHHQDLTLLKALVRQQLPEKYKEIFFDQSKNGYAGYIDGGASQEEFYKFIKPILEKMDGTEELLVKLNREDLLRKQRTFDNGSIPHQIHLGELHAILRRQEDFYPFLKDNREKIEKILTFRIPYYVGPLARGNSRFAWMTRKSEETITPWNFEEVVDKGASAQSFIERMTNFDKNLPNEKVLPKHSLLYEYFTVYNELTKVKYVTEGMRKPAFLSGEQKKAIVDLLFKTNRKVTVKQLKEDYFKKIECFDSVEISGVEDRFNASLGTYHDLLKIIKDKDFLDNEENEDILEDIVLTLTLFEDREMIEERLKTYAHLFDDKVMKQLKRRRYTGWGRLSRKLINGIRDKQSGKTILDFLKSDGFANRNFMQLIHDDSLTFKEDIQKAQVSGQGDSLHEHIANLAGSPAIKKGILQTVKVVDELVKVMGRHKPENIVIEMARENQTTQKGQKNSRERMKRIEEGIKELGSQILKEHPVENTQLQNEKLYLYYLQNGRDMYVDQELDINRLSDYDVDHIVPQSFLKDDSIDNKVLTRSDKARGKSDNVPSEEVVKKMKNYWRQLLNAKLITQRKFDNLTKAERGGLSELDKAGFIKRQLVETRQITKHVAQILDSRMNTKYDENDKLIREVKVITLKSKLVSDFRKDFQFYKVREINNYHHAHDAYLNAVVGTALIKKYPKLESEFVYGDYKVYDVRKMIAKSEQEIGKATAKYFFYSNIMNFFKTEITLANGEIRKRPLIETNGETGEIVWDKGRDFATVRKVLSMPQVNIVKKTEVQTGGFSKESILPKRNSDKLIARKKDWDPKKYGGFDSPTVAYSVLVVAKVEKGKSKKLKSVKELLGITIMERSSFEKNPIDFLEAKGYKEVKKDLIIKLPKYSLFELENGRKRMLASAGELQKGNELALPSKYVNFLYLASHYEKLKGSPEDNEQKQLFVEQHKHYLDEIIEQISEFSKRVILADANLDKVLSAYNKHRDKPIREQAENIIHLFTLTNLGAPAAFKYFDTTIDRKRYTSTKEVLDATLIHQSITGLYETRIDLSQLGGDGGGSSEAAAKGGGGGIPWLMKKPLQLTTLVPLQEYEERLLKQTMLTGSYKEKLQSLFLKYDALWQHWENQVGHRRIKPHHIATGTVNPRPQKQYPINPKAKASIQTVINDLLKQGVLIQQNSIMNTPVYPVPKPDGKWRMVLDYREVNKTIPLIAAQNQHSAGILSSIFRGKYKTTLDLSNGFWAHSITPESYWLTAFTWLGQQYCWTRLPQGFLNSPALFNADVVDLLKEVPNVQVYVDDIYISHDDPREHLEQLEKVFSLLLNAGYVVSLKKSEIAQHEVEFLGFNITKEGRGLTETFKQKLLNITPPRDLKQLQSILGKLNFARNFIPNFSELVKPLYNIIATAPGKYITWTTDNSQQLQNIISMLNSAENLEERNPEVRLIMKVNTSPSAGYIRFYNEFAKRPIMYLNYVYTKAEVKFTNTEKLLTTIHKGLIKALDLGMGQEILVYSPIVSMTKIQKTPLPERKALPIRWITWMSYLEDPRIQFHYDKTLPELQQVPTVTDDIIAKIKHPSEFSMVFYTDGSAIKHPNVNKSHNAGMGIAQVQFKPEFTVINTWSIPLGDHTAQLAEVAAVEFACKKALKIDGPVLIVTDSFYVAESVNKELPYWQSNGFFNNKKKPLKHVSKWKSIADCIQLKPDIIIIHEKGHQPTASTFHTEGNNLADKLATQGSYVVNAGKRTADGSEFEKRTADGSEFESPKKKAKVE

SEQ ID NO: 568 - protein, 2085 aa, synthetic construct
MPAAKRVKLDGGDKKYSIGLDIGTNSVGWAVITDEYKVPSKKFKVLGNTDRHSIKKNLIGALLFDSGETAEATRLKRTARRRYTRRKNRICYLQEIFSNEMAKVDDSFFHRLEESFLVEEDKKHERHPIFGNIVDEVAYHEKYPTIYHLRKKLVDSTDKADLRLIYLALAHMIKFRGHFLIEGDLNPDNSDVDKLFIQLVQTYNQLFEENPINASGVDAKAILSARLSKSRRLENLIAQLPGEKKNGLFGNLIALSLGLTPNFKSNFDLAEDAKLQLSKDTYDDDLDNLLAQIGDQYADLFLAAKNLSDAILLSDILRVNTEITKAPLSASMIKRYDEHHQDLTLLKALVRQQLPEKYKEIFFDQSKNGYAGYIDGGASQEEFYKFIKPILEKMDGTEELLVKLNREDLLRKQRTFDNGSIPHQIHLGELHAILRRQEDFYPFLKDNREKIEKILTFRIPYYVGPLARGNSRFAWMTRKSEETITPWNFEEVVDKGASAQSFIERMTNFDKNLPNEKVLPKHSLLYEYFTVYNELTKVKYVTEGMRKPAFLSGEQKKAIVDLLFKTNRKVTVKQLKEDYFKKIECFDSVEISGVEDRFNASLGTYHDLLKIIKDKDFLDNEENEDILEDIVLTLTLFEDREMIEERLKTYAHLFDDKVMKQLKRRRYTGWGRLSRKLINGIRDKQSGKTILDFLKSDGFANRNFMQLIHDDSLTFKEDIQKAQVSGQGDSLHEHIANLAGSPAIKKGILQTVKVVDELVKVMGRHKPENIVIEMARENQTTQKGQKNSRERMKRIEEGIKELGSQILKEHPVENTQLQNEKLYLYYLQNGRDMYVDQELDINRLSDYDVDHIVPQSFLKDDSIDNKVLTRSDKARGKSDNVPSEEVVKKMKNYWRQLLNAKLITQRKFDNLTKAERGGLSELDKAGFIKRQLVETRQITKHVAQILDSRMNTKYDENDKLIREVKVITLKSKLVSDFRKDFQFYKVREINNYHHAHDAYLNAVVGTALIKKYPKLESEFVYGDYKVYDVRKMIAKSEQEIGKATAKYFFYSNIMNFFKTEITLANGEIRKRPLIETNGETGEIVWDKGRDFATVRKVLSMPQVNIVKKTEVQTGGFSKESILPKRNSDKLIARKKDWDPKKYGGFDSPTVAYSVLVVAKVEKGKSKKLKSVKELLGITIMERSSFEKNPIDFLEAKGYKEVKKDLIIKLPKYSLFELENGRKRMLASAGELQKGNELALPSKYVNFLYLASHYEKLKGSPEDNEQKQLFVEQHKHYLDEIIEQISEFSKRVILADANLDKVLSAYNKHRDKPIREQAENIIHLFTLTNLGAPAAFKYFDTTIDRKRYTSTKEVLDATLIHQSITGLYETRIDLSQLGGDGGGGGPAPGSSGGIPWLMKKPLQLTTLVPLQEYEERLLKQTMLTGSYKEKLQSLFLKYDALWQHWENQVGHRRIKPHHIATGTVNPRPQKQYPINPKAKASIQTVINDLLKQGVLIQQNSIMNTPVYPVPKPDGKWRMVLDYREVNKTIPLIAAQNQHSAGILSSIFRGKYKTTLDLSNGFWAHSITPESYWLTAFTWLGQQYCWTRLPQGFLNSPALFNADVVDLLKEVPNVQVYVDDIYISHDDPREHLEQLEKVFSLLLNAGYVVSLKKSEIAQHEVEFLGFNITKEGRGLTETFKQKLLNITPPRDLKQLQSILGKLNFARNFIPNFSELVKPLYNIIATAPGKYITWTTDNSQQLQNIISMLNSAENLEERNPEVRLIMKVNTSPSAGYIRFYNEFAKRPIMYLNYVYTKAEVKFTNTEKLLTTIHKGLIKALDLGMGQEILVYSPIVSMTKIQKTPLPERKALPIRWITWMSYLEDPRIQFHYDKTLPELQQVPTVTDDIIAKIKHPSEFSMVFYTDGSAIKHPNVNKSHNAGMGIAQVQFKPEFTVINTWSIPLGDHTAQLAEVAAVEFACKKALKIDGPVLIVTDSFYVAESVNKELPYWQSNGFFNNKKKPLKHVSKWKSIADCIQLKPDIIIIHEKGHQPTASTFHTEGNNLADKLATQGSYVVNAGKRTADGSEFEKRTADGSEFESPKKKAKVE

SEQ ID NO: 569 - protein, 2087 aa, synthetic construct
MPAAKRVKLDGGDKKYSIGLDIGTNSVGWAVITDEYKVPSKKFKVLGNTDRHSIKKNLIGALLFDSGETAEATRLKRTARRRYTRRKNRICYLQEIFSNEMAKVDDSFFHRLEESFLVEEDKKHERHPIFGNIVDEVAYHEKYPTIYHLRKKLVDSTDKADLRLIYLALAHMIKFRGHFLIEGDLNPDNSDVDKLFIQLVQTYNQLFEENPINASGVDAKAILSARLSKSRRLENLIAQLPGEKKNGLFGNLIALSLGLTPNFKSNFDLAEDAKLQLSKDTYDDDLDNLLAQIGDQYADLFLAAKNLSDAILLSDILRVNTEITKAPLSASMIKRYDEHHQDLTLLKALVRQQLPEKYKEIFFDQSKNGYAGYIDGGASQEEFYKFIKPILEKMDGTEELLVKLNREDLLRKQRTFDNGSIPHQIHLGELHAILRRQEDFYPFLKDNREKIEKILTFRIPYYVGPLARGNSRFAWMTRKSEETITPWNFEEVVDKGASAQSFIERMTNFDKNLPNEKVLPKHSLLYEYFTVYNELTKVKYVTEGMRKPAFLSGEQKKAIVDLLFKTNRKVTVKQLKEDYFKKIECFDSVEISGVEDRFNASLGTYHDLLKIIKDKDFLDNEENEDILEDIVLTLTLFEDREMIEERLKTYAHLFDDKVMKQLKRRRYTGWGRLSRKLINGIRDKQSGKTILDFLKSDGFANRNFMQLIHDDSLTFKEDIQKAQVSGQGDSLHEHIANLAGSPAIKKGILQTVKVVDELVKVMGRHKPENIVIEMARENQTTQKGQKNSRERMKRIEEGIKELGSQILKEHPVENTQLQNEKLYLYYLQNGRDMYVDQELDINRLSDYDVDHIVPQSFLKDDSIDNKVLTRSDKARGKSDNVPSEEVVKKMKNYWRQLLNAKLITQRKFDNLTKAERGGLSELDKAGFIKRQLVETRQITKHVAQILDSRMNTKYDENDKLIREVKVITLKSKLVSDFRKDFQFYKVREINNYHHAHDAYLNAVVGTALIKKYPKLESEFVYGDYKVYDVRKMIAKSEQEIGKATAKYFFYSNIMNFFKTEITLANGEIRKRPLIETNGETGEIVWDKGRDFATVRKVLSMPQVNIVKKTEVQTGGFSKESILPKRNSDKLIARKKDWDPKKYGGFDSPTVAYSVLVVAKVEKGKSKKLKSVKELLGITIMERSSFEKNPIDFLEAKGYKEVKKDLIIKLPKYSLFELENGRKRMLASAGELQKGNELALPSKYVNFLYLASHYEKLKGSPEDNEQKQLFVEQHKHYLDEIIEQISEFSKRVILADANLDKVLSAYNKHRDKPIREQAENIIHLFTLTNLGAPAAFKYFDTTIDRKRYTSTKEVLDATLIHQSITGLYETRIDLSQLGGDGGPAPAPAPAPAPGGIPWLMKKPLQLTTLVPLQEYEERLLKQTMLTGSYKEKLQSLFLKYDALWQHWENQVGHRRIKPHHIATGTVNPRPQKQYPINPKAKASIQTVINDLLKQGVLIQQNSIMNTPVYPVPKPDGKWRMVLDYREVNKTIPLIAAQNQHSAGILSSIFRGKYKTTLDLSNGFWAHSITPESYWLTAFTWLGQQYCWTRLPQGFLNSPALFNADVVDLLKEVPNVQVYVDDIYISHDDPREHLEQLEKVFSLLLNAGYVVSLKKSEIAQHEVEFLGFNITKEGRGLTETFKQKLLNITPPRDLKQLQSILGKLNFARNFIPNFSELVKPLYNIIATAPGKYITWTTDNSQQLQNIISMLNSAENLEERNPEVRLIMKVNTSPSAGYIRFYNEFAKRPIMYLNYVYTKAEVKFTNTEKLLTTIHKGLIKALDLGMGQEILVYSPIVSMTKIQKTPLPERKALPIRWITWMSYLEDPRIQFHYDKTLPELQQVPTVTDDIIAKIKHPSEFSMVFYTDGSAIKHPNVNKSHNAGMGIAQVQFKPEFTVINTWSIPLGDHTAQLAEVAAVEFACKKALKIDGPVLIVTDSFYVAESVNKELPYWQSNGFFNNKKKPLKHVSKWKSIADCIQLKPDIIIIHEKGHQPTASTFHTEGNNLADKLATQGSYVVNAGKRTADGSEFEKRTADGSEFESPKKKAKVE

SEQ ID NO: 570 - protein, 2101 aa, synthetic construct
MPAAKRVKLDGGDKKYSIGLDIGTNSVGWAVITDEYKVPSKKFKVLGNTDRHSIKKNLIGALLFDSGETAEATRLKRTARRRYTRRKNRICYLQEIFSNEMAKVDDSFFHRLEESFLVEEDKKHERHPIFGNIVDEVAYHEKYPTIYHLRKKLVDSTDKADLRLIYLALAHMIKFRGHFLIEGDLNPDNSDVDKLFIQLVQTYNQLFEENPINASGVDAKAILSARLSKSRRLENLIAQLPGEKKNGLFGNLIALSLGLTPNFKSNFDLAEDAKLQLSKDTYDDDLDNLLAQIGDQYADLFLAAKNLSDAILLSDILRVNTEITKAPLSASMIKRYDEHHQDLTLLKALVRQQLPEKYKEIFFDQSKNGYAGYIDGGASQEEFYKFIKPILEKMDGTEELLVKLNREDLLRKQRTFDNGSIPHQIHLGELHAILRRQEDFYPFLKDNREKIEKILTFRIPYYVGPLARGNSRFAWMTRKSEETITPWNFEEVVDKGASAQSFIERMTNFDKNLPNEKVLPKHSLLYEYFTVYNELTKVKYVTEGMRKPAFLSGEQKKAIVDLLFKTNRKVTVKQLKEDYFKKIECFDSVEISGVEDRFNASLGTYHDLLKIIKDKDFLDNEENEDILEDIVLTLTLFEDREMIEERLKTYAHLFDDKVMKQLKRRRYTGWGRLSRKLINGIRDKQSGKTILDFLKSDGFANRNFMQLIHDDSLTFKEDIQKAQVSGQGDSLHEHIANLAGSPAIKKGILQTVKVVDELVKVMGRHKPENIVIEMARENQTTQKGQKNSRERMKRIEEGIKELGSQILKEHPVENTQLQNEKLYLYYLQNGRDMYVDQELDINRLSDYDVDHIVPQSFLKDDSIDNKVLTRSDKARGKSDNVPSEEVVKKMKNYWRQLLNAKLITQRKFDNLTKAERGGLSELDKAGFIKRQLVETRQITKHVAQILDSRMNTKYDENDKLIREVKVITLKSKLVSDFRKDFQFYKVREINNYHHAHDAYLNAVVGTALIKKYPKLESEFVYGDYKVYDVRKMIAKSEQEIGKATAKYFFYSNIMNFFKTEITLANGEIRKRPLIETNGETGEIVWDKGRDFATVRKVLSMPQVNIVKKTEVQTGGFSKESILPKRNSDKLIARKKDWDPKKYGGFDSPTVAYSVLVVAKVEKGKSKKLKSVKELLGITIMERSSFEKNPIDFLEAKGYKEVKKDLIIKLPKYSLFELENGRKRMLASAGELQKGNELALPSKYVNFLYLASHYEKLKGSPEDNEQKQLFVEQHKHYLDEIIEQISEFSKRVILADANLDKVLSAYNKHRDKPIREQAENIIHLFTLTNLGAPAAFKYFDTTIDRKRYTSTKEVLDATLIHQSITGLYETRIDLSQLGGDGGEAAAKEAAAKEAAAKEAAAKEAAAKGGIPWLMKKPLQLTTLVPLQEYEERLLKQTMLTGSYKEKLQSLFLKYDALWQHWENQVGHRRIKPHHIATGTVNPRPQKQYPINPKAKASIQTVINDLLKQGVLIQQNSIMNTPVYPVPKPDGKWRMVLDYREVNKTIPLIAAQNQHSAGILSSIFRGKYKTTLDLSNGFWAHSITPESYWLTAFTWLGQQYCWTRLPQGFLNSPALFNADVVDLLKEVPNVQVYVDDIYISHDDPREHLEQLEKVFSLLLNAGYVVSLKKSEIAQHEVEFLGFNITKEGRGLTETFKQKLLNITPPRDLKQLQSILGKLNFARNFIPNFSELVKPLYNIIATAPGKYITWTTDNSQQLQNIISMLNSAENLEERNPEVRLIMKVNTSPSAGYIRFYNEFAKRPIMYLNYVYTKAEVKFTNTEKLLTTIHKGLIKALDLGMGQEILVYSPIVSMTKIQKTPLPERKALPIRWITWMSYLEDPRIQFHYDKTLPELQQVPTVTDDIIAKIKHPSEFSMVFYTDGSAIKHPNVNKSHNAGMGIAQVQFKPEFTVINTWSIPLGDHTAQLAEVAAVEFACKKALKIDGPVLIVTDSFYVAESVNKELPYWQSNGFFNNKKKPLKHVSKWKSIADCIQLKPDIIIIHEKGHQPTASTFHTEGNNLADKLATQGSYVVNAGKRTADGSEFEKRTADGSEFESPKKKAKVE

SEQ ID NO: 571 - protein, 2087 aa, synthetic construct
MPAAKRVKLDGGDKKYSIGLDIGTNSVGWAVITDEYKVPSKKFKVLGNTDRHSIKKNLIGALLFDSGETAEATRLKRTARRRYTRRKNRICYLQEIFSNEMAKVDDSFFHRLEESFLVEEDKKHERHPIFGNIVDEVAYHEKYPTIYHLRKKLVDSTDKADLRLIYLALAHMIKFRGHFLIEGDLNPDNSDVDKLFIQLVQTYNQLFEENPINASGVDAKAILSARLSKSRRLENLIAQLPGEKKNGLFGNLIALSLGLTPNFKSNFDLAEDAKLQLSKDTYDDDLDNLLAQIGDQYADLFLAAKNLSDAILLSDILRVNTEITKAPLSASMIKRYDEHHQDLTLLKALVRQQLPEKYKEIFFDQSKNGYAGYIDGGASQEEFYKFIKPILEKMDGTEELLVKLNREDLLRKQRTFDNGSIPHQIHLGELHAILRRQEDFYPFLKDNREKIEKILTFRIPYYVGPLARGNSRFAWMTRKSEETITPWNFEEVVDKGASAQSFIERMTNFDKNLPNEKVLPKHSLLYEYFTVYNELTKVKYVTEGMRKPAFLSGEQKKAIVDLLFKTNRKVTVKQLKEDYFKKIECFDSVEISGVEDRFNASLGTYHDLLKIIKDKDFLDNEENEDILEDIVLTLTLFEDREMIEERLKTYAHLFDDKVMKQLKRRRYTGWGRLSRKLINGIRDKQSGKTILDFLKSDGFANRNFMQLIHDDSLTFKEDIQKAQVSGQGDSLHEHIANLAGSPAIKKGILQTVKVVDELVKVMGRHKPENIVIEMARENQTTQKGQKNSRERMKRIEEGIKELGSQILKEHPVENTQLQNEKLYLYYLQNGRDMYVDQELDINRLSDYDVDHIVPQSFLKDDSIDNKVLTRSDKARGKSDNVPSEEVVKKMKNYWRQLLNAKLITQRKFDNLTKAERGGLSELDKAGFIKRQLVETRQITKHVAQILDSRMNTKYDENDKLIREVKVITLKSKLVSDFRKDFQFYKVREINNYHHAHDAYLNAVVGTALIKKYPKLESEFVYGDYKVYDVRKMIAKSEQEIGKATAKYFFYSNIMNFFKTEITLANGEIRKRPLIETNGETGEIVWDKGRDFATVRKVLSMPQVNIVKKTEVQTGGFSKESILPKRNSDKLIARKKDWDPKKYGGFDSPTVAYSVLVVAKVEKGKSKKLKSVKELLGITIMERSSFEKNPIDFLEAKGYKEVKKDLIIKLPKYSLFELENGRKRMLASAGELQKGNELALPSKYVNFLYLASHYEKLKGSPEDNEQKQLFVEQHKHYLDEIIEQISEFSKRVILADANLDKVLSAYNKHRDKPIREQAENIIHLFTLTNLGAPAAFKYFDTTIDRKRYTSTKEVLDATLIHQSITGLYETRIDLSQLGGDGGGGSGSSEAAAKGGIPWLMKKPLQLTTLVPLQEYEERLLKQTMLTGSYKEKLQSLFLKYDALWQHWENQVGHRRIKPHHIATGTVNPRPQKQYPINPKAKASIQTVINDLLKQGVLIQQNSIMNTPVYPVPKPDGKWRMVLDYREVNKTIPLIAAQNQHSAGILSSIFRGKYKTTLDLSNGFWAHSITPESYWLTAFTWLGQQYCWTRLPQGFLNSPALFNADVVDLLKEVPNVQVYVDDIYISHDDPREHLEQLEKVFSLLLNAGYVVSLKKSEIAQHEVEFLGFNITKEGRGLTETFKQKLLNITPPRDLKQLQSILGKLNFARNFIPNFSELVKPLYNIIATAPGKYITWTTDNSQQLQNIISMLNSAENLEERNPEVRLIMKVNTSPSAGYIRFYNEFAKRPIMYLNYVYTKAEVKFTNTEKLLTTIHKGLIKALDLGMGQEILVYSPIVSMTKIQKTPLPERKALPIRWITWMSYLEDPRIQFHYDKTLPELQQVPTVTDDIIAKIKHPSEFSMVFYTDGSAIKHPNVNKSHNAGMGIAQVQFKPEFTVINTWSIPLGDHTAQLAEVAAVEFACKKALKIDGPVLIVTDSFYVAESVNKELPYWQSNGFFNNKKKPLKHVSKWKSIADCIQLKPDIIIIHEKGHQPTASTFHTEGNNLADKLATQGSYVVNAGKRTADGSEFEKRTADGSEFESPKKKAKVE

SEQ ID NO: 572 - protein, 2087 aa, synthetic construct
MPAAKRVKLDGGDKKYSIGLDIGTNSVGWAVITDEYKVPSKKFKVLGNTDRHSIKKNLIGALLFDSGETAEATRLKRTARRRYTRRKNRICYLQEIFSNEMAKVDDSFFHRLEESFLVEEDKKHERHPIFGNIVDEVAYHEKYPTIYHLRKKLVDSTDKADLRLIYLALAHMIKFRGHFLIEGDLNPDNSDVDKLFIQLVQTYNQLFEENPINASGVDAKAILSARLSKSRRLENLIAQLPGEKKNGLFGNLIALSLGLTPNFKSNFDLAEDAKLQLSKDTYDDDLDNLLAQIGDQYADLFLAAKNLSDAILLSDILRVNTEITKAPLSASMIKRYDEHHQDLTLLKALVRQQLPEKYKEIFFDQSKNGYAGYIDGGASQEEFYKFIKPILEKMDGTEELLVKLNREDLLRKQRTFDNGSIPHQIHLGELHAILRRQEDFYPFLKDNREKIEKILTFRIPYYVGPLARGNSRFAWMTRKSEETITPWNFEEVVDKGASAQSFIERMTNFDKNLPNEKVLPKHSLLYEYFTVYNELTKVKYVTEGMRKPAFLSGEQKKAIVDLLFKTNRKVTVKQLKEDYFKKIECFDSVEISGVEDRFNASLGTYHDLLKIIKDKDFLDNEENEDILEDIVLTLTLFEDREMIEERLKTYAHLFDDKVMKQLKRRRYTGWGRLSRKLINGIRDKQSGKTILDFLKSDGFANRNFMQLIHDDSLTFKEDIQKAQVSGQGDSLHEHIANLAGSPAIKKGILQTVKVVDELVKVMGRHKPENIVIEMARENQTTQKGQKNSRERMKRIEEGIKELGSQILKEHPVENTQLQNEKLYLYYLQNGRDMYVDQELDINRLSDYDVDHIVPQSFLKDDSIDNKVLTRSDKARGKSDNVPSEEVVKKMKNYWRQLLNAKLITQRKFDNLTKAERGGLSELDKAGFIKRQLVETRQITKHVAQILDSRMNTKYDENDKLIREVKVITLKSKLVSDFRKDFQFYKVREINNYHHAHDAYLNAVVGTALIKKYPKLESEFVYGDYKVYDVRKMIAKSEQEIGKATAKYFFYSNIMNFFKTEITLANGEIRKRPLIETNGETGEIVWDKGRDFATVRKVLSMPQVNIVKKTEVQTGGFSKESILPKRNSDKLIARKKDWDPKKYGGFDSPTVAYSVLVVAKVEKGKSKKLKSVKELLGITIMERSSFEKNPIDFLEAKGYKEVKKDLIIKLPKYSLFELENGRKRMLASAGELQKGNELALPSKYVNFLYLASHYEKLKGSPEDNEQKQLFVEQHKHYLDEIIEQISEFSKRVILADANLDKVLSAYNKHRDKPIREQAENIIHLFTLTNLGAPAAFKYFDTTIDRKRYTSTKEVLDATLIHQSITGLYETRIDLSQLGGDGGEAAAKGGSPAPGGIPWLMKKPLQLTTLVPLQEYEERLLKQTMLTGSYKEKLQSLFLKYDALWQHWENQVGHRRIKPHHIATGTVNPRPQKQYPINPKAKASIQTVINDLLKQGVLIQQNSIMNTPVYPVPKPDGKWRMVLDYREVNKTIPLIAAQNQHSAGILSSIFRGKYKTTLDLSNGFWAHSITPESYWLTAFTWLGQQYCWTRLPQGFLNSPALFNADVVDLLKEVPNVQVYVDDIYISHDDPREHLEQLEKVFSLLLNAGYVVSLKKSEIAQHEVEFLGFNITKEGRGLTETFKQKLLNITPPRDLKQLQSILGKLNFARNFIPNFSELVKPLYNIIATAPGKYITWTTDNSQQLQNIISMLNSAENLEERNPEVRLIMKVNTSPSAGYIRFYNEFAKRPIMYLNYVYTKAEVKFTNTEKLLTTIHKGLIKALDLGMGQEILVYSPIVSMTKIQKTPLPERKALPIRWITWMSYLEDPRIQFHYDKTLPELQQVPTVTDDIIAKIKHPSEFSMVFYTDGSAIKHPNVNKSHNAGMGIAQVQFKPEFTVINTWSIPLGDHTAQLAEVAAVEFACKKALKIDGPVLIVTDSFYVAESVNKELPYWQSNGFFNNKKKPLKHVSKWKSIADCIQLKPDIIIIHEKGHQPTASTFHTEGNNLADKLATQGSYVVNAGKRTADGSEFEKRTADGSEFESPKKKAKVE

SEQ ID NO: 573 - protein, 2085 aa, synthetic construct
MPAAKRVKLDGGDKKYSIGLDIGTNSVGWAVITDEYKVPSKKFKVLGNTDRHSIKKNLIGALLFDSGETAEATRLKRTARRRYTRRKNRICYLQEIFSNEMAKVDDSFFHRLEESFLVEEDKKHERHPIFGNIVDEVAYHEKYPTIYHLRKKLVDSTDKADLRLIYLALAHMIKFRGHFLIEGDLNPDNSDVDKLFIQLVQTYNQLFEENPINASGVDAKAILSARLSKSRRLENLIAQLPGEKKNGLFGNLIALSLGLTPNFKSNFDLAEDAKLQLSKDTYDDDLDNLLAQIGDQYADLFLAAKNLSDAILLSDILRVNTEITKAPLSASMIKRYDEHHQDLTLLKALVRQQLPEKYKEIFFDQSKNGYAGYIDGGASQEEFYKFIKPILEKMDGTEELLVKLNREDLLRKQRTFDNGSIPHQIHLGELHAILRRQEDFYPFLKDNREKIEKILTFRIPYYVGPLARGNSRFAWMTRKSEETITPWNFEEVVDKGASAQSFIERMTNFDKNLPNEKVLPKHSLLYEYFTVYNELTKVKYVTEGMRKPAFLSGEQKKAIVDLLFKTNRKVTVKQLKEDYFKKIECFDSVEISGVEDRFNASLGTYHDLLKIIKDKDFLDNEENEDILEDIVLTLTLFEDREMIEERLKTYAHLFDDKVMKQLKRRRYTGWGRLSRKLINGIRDKQSGKTILDFLKSDGFANRNFMQLIHDDSLTFKEDIQKAQVSGQGDSLHEHIANLAGSPAIKKGILQTVKVVDELVKVMGRHKPENIVIEMARENQTTQKGQKNSRERMKRIEEGIKELGSQILKEHPVENTQLQNEKLYLYYLQNGRDMYVDQELDINRLSDYDVDHIVPQSFLKDDSIDNKVLTRSDKARGKSDNVPSEEVVKKMKNYWRQLLNAKLITQRKFDNLTKAERGGLSELDKAGFIKRQLVETRQITKHVAQILDSRMNTKYDENDKLIREVKVITLKSKLVSDFRKDFQFYKVREINNYHHAHDAYLNAVVGTALIKKYPKLESEFVYGDYKVYDVRKMIAKSEQEIGKATAKYFFYSNIMNFFKTEITLANGEIRKRPLIETNGETGEIVWDKGRDFATVRKVLSMPQVNIVKKTEVQTGGFSKESILPKRNSDKLIARKKDWDPKKYGGFDSPTVAYSVLVVAKVEKGKSKKLKSVKELLGITIMERSSFEKNPIDFLEAKGYKEVKKDLIIKLPKYSLFELENGRKRMLASAGELQKGNELALPSKYVNFLYLASHYEKLKGSPEDNEQKQLFVEQHKHYLDEIIEQISEFSKRVILADANLDKVLSAYNKHRDKPIREQAENIIHLFTLTNLGAPAAFKYFDTTIDRKRYTSTKEVLDATLIHQSITGLYETRIDLSQLGGDGGGGSPAPGGGGGIPWLMKKPLQLTTLVPLQEYEERLLKQTMLTGSYKEKLQSLFLKYDALWQHWENQVGHRRIKPHHIATGTVNPRPQKQYPINPKAKASIQTVINDLLKQGVLIQQNSIMNTPVYPVPKPDGKWRMVLDYREVNKTIPLIAAQNQHSAGILSSIFRGKYKTTLDLSNGFWAHSITPESYWLTAFTWLGQQYCWTRLPQGFLNSPALFNADVVDLLKEVPNVQVYVDDIYISHDDPREHLEQLEKVFSLLLNAGYVVSLKKSEIAQHEVEFLGFNITKEGRGLTETFKQKLLNITPPRDLKQLQSILGKLNFARNFIPNFSELVKPLYNIIATAPGKYITWTTDNSQQLQNIISMLNSAENLEERNPEVRLIMKVNTSPSAGYIRFYNEFAKRPIMYLNYVYTKAEVKFTNTEKLLTTIHKGLIKALDLGMGQEILVYSPIVSMTKIQKTPLPERKALPIRWITWMSYLEDPRIQFHYDKTLPELQQVPTVTDDIIAKIKHPSEFSMVFYTDGSAIKHPNVNKSHNAGMGIAQVQFKPEFTVINTWSIPLGDHTAQLAEVAAVEFACKKALKIDGPVLIVTDSFYVAESVNKELPYWQSNGFFNNKKKPLKHVSKWKSIADCIQLKPDIIIIHEKGHQPTASTFHTEGNNLADKLATQGSYVVNAGKRTADGSEFEKRTADGSEFESPKKKAKVE

SEQ ID NO: 574 - protein, 2091 aa, synthetic construct
MPAAKRVKLDGGDKKYSIGLDIGTNSVGWAVITDEYKVPSKKFKVLGNTDRHSIKKNLIGALLFDSGETAEATRLKRTARRRYTRRKNRICYLQEIFSNEMAKVDDSFFHRLEESFLVEEDKKHERHPIFGNIVDEVAYHEKYPTIYHLRKKLVDSTDKADLRLIYLALAHMIKFRGHFLIEGDLNPDNSDVDKLFIQLVQTYNQLFEENPINASGVDAKAILSARLSKSRRLENLIAQLPGEKKNGLFGNLIALSLGLTPNFKSNFDLAEDAKLQLSKDTYDDDLDNLLAQIGDQYADLFLAAKNLSDAILLSDILRVNTEITKAPLSASMIKRYDEHHQDLTLLKALVRQQLPEKYKEIFFDQSKNGYAGYIDGGASQEEFYKFIKPILEKMDGTEELLVKLNREDLLRKQRTFDNGSIPHQIHLGELHAILRRQEDFYPFLKDNREKIEKILTFRIPYYVGPLARGNSRFAWMTRKSEETITPWNFEEVVDKGASAQSFIERMTNFDKNLPNEKVLPKHSLLYEYFTVYNELTKVKYVTEGMRKPAFLSGEQKKAIVDLLFKTNRKVTVKQLKEDYFKKIECFDSVEISGVEDRFNASLGTYHDLLKIIKDKDFLDNEENEDILEDIVLTLTLFEDREMIEERLKTYAHLFDDKVMKQLKRRRYTGWGRLSRKLINGIRDKQSGKTILDFLKSDGFANRNFMQLIHDDSLTFKEDIQKAQVSGQGDSLHEHIANLAGSPAIKKGILQTVKVVDELVKVMGRHKPENIVIEMARENQTTQKGQKNSRERMKRIEEGIKELGSQILKEHPVENTQLQNEKLYLYYLQNGRDMYVDQELDINRLSDYDVDHIVPQSFLKDDSIDNKVLTRSDKARGKSDNVPSEEVVKKMKNYWRQLLNAKLITQRKFDNLTKAERGGLSELDKAGFIKRQLVETRQITKHVAQILDSRMNTKYDENDKLIREVKVITLKSKLVSDFRKDFQFYKVREINNYHHAHDAYLNAVVGTALIKKYPKLESEFVYGDYKVYDVRKMIAKSEQEIGKATAKYFFYSNIMNFFKTEITLANGEIRKRPLIETNGETGEIVWDKGRDFATVRKVLSMPQVNIVKKTEVQTGGFSKESILPKRNSDKLIARKKDWDPKKYGGFDSPTVAYSVLVVAKVEKGKSKKLKSVKELLGITIMERSSFEKNPIDFLEAKGYKEVKKDLIIKLPKYSLFELENGRKRMLASAGELQKGNELALPSKYVNFLYLASHYEKLKGSPEDNEQKQLFVEQHKHYLDEIIEQISEFSKRVILADANLDKVLSAYNKHRDKPIREQAENIIHLFTLTNLGAPAAFKYFDTTIDRKRYTSTKEVLDATLIHQSITGLYETRIDLSQLGGDGGEAAAKGGGGSEAAAKGGIPWLMKKPLQLTTLVPLQEYEERLLKQTMLTGSYKEKLQSLFLKYDALWQHWENQVGHRRIKPHHIATGTVNPRPQKQYPINPKAKASIQTVINDLLKQGVLIQQNSIMNTPVYPVPKPDGKWRMVLDYREVNKTIPLIAAQNQHSAGILSSIFRGKYKTTLDLSNGFWAHSITPESYWLTAFTWLGQQYCWTRLPQGFLNSPALFNADVVDLLKEVPNVQVYVDDIYISHDDPREHLEQLEKVFSLLLNAGYVVSLKKSEIAQHEVEFLGFNITKEGRGLTETFKQKLLNITPPRDLKQLQSILGKLNFARNFIPNFSELVKPLYNIIATAPGKYITWTTDNSQQLQNIISMLNSAENLEERNPEVRLIMKVNTSPSAGYIRFYNEFAKRPIMYLNYVYTKAEVKFTNTEKLLTTIHKGLIKALDLGMGQEILVYSPIVSMTKIQKTPLPERKALPIRWITWMSYLEDPRIQFHYDKTLPELQQVPTVTDDIIAKIKHPSEFSMVFYTDGSAIKHPNVNKSHNAGMGIAQVQFKPEFTVINTWSIPLGDHTAQLAEVAAVEFACKKALKIDGPVLIVTDSFYVAESVNKELPYWQSNGFFNNKKKPLKHVSKWKSIADCIQLKPDIIIIHEKGHQPTASTFHTEGNNLADKLATQGSYVVNAGKRTADGSEFEKRTADGSEFESPKKKAKVE

SEQ ID NO: 575 - protein, 2082 aa, synthetic construct
MPAAKRVKLDGGDKKYSIGLDIGTNSVGWAVITDEYKVPSKKFKVLGNTDRHSIKKNLIGALLFDSGETAEATRLKRTARRRYTRRKNRICYLQEIFSNEMAKVDDSFFHRLEESFLVEEDKKHERHPIFGNIVDEVAYHEKYPTIYHLRKKLVDSTDKADLRLIYLALAHMIKFRGHFLIEGDLNPDNSDVDKLFIQLVQTYNQLFEENPINASGVDAKAILSARLSKSRRLENLIAQLPGEKKNGLFGNLIALSLGLTPNFKSNFDLAEDAKLQLSKDTYDDDLDNLLAQIGDQYADLFLAAKNLSDAILLSDILRVNTEITKAPLSASMIKRYDEHHQDLTLLKALVRQQLPEKYKEIFFDQSKNGYAGYIDGGASQEEFYKFIKPILEKMDGTEELLVKLNREDLLRKQRTFDNGSIPHQIHLGELHAILRRQEDFYPFLKDNREKIEKILTFRIPYYVGPLARGNSRFAWMTRKSEETITPWNFEEVVDKGASAQSFIERMTNFDKNLPNEKVLPKHSLLYEYFTVYNELTKVKYVTEGMRKPAFLSGEQKKAIVDLLFKTNRKVTVKQLKEDYFKKIECFDSVEISGVEDRFNASLGTYHDLLKIIKDKDFLDNEENEDILEDIVLTLTLFEDREMIEERLKTYAHLFDDKVMKQLKRRRYTGWGRLSRKLINGIRDKQSGKTILDFLKSDGFANRNFMQLIHDDSLTFKEDIQKAQVSGQGDSLHEHIANLAGSPAIKKGILQTVKVVDELVKVMGRHKPENIVIEMARENQTTQKGQKNSRERMKRIEEGIKELGSQILKEHPVENTQLQNEKLYLYYLQNGRDMYVDQELDINRLSDYDVDHIVPQSFLKDDSIDNKVLTRSDKARGKSDNVPSEEVVKKMKNYWRQLLNAKLITQRKFDNLTKAERGGLSELDKAGFIKRQLVETRQITKHVAQILDSRMNTKYDENDKLIREVKVITLKSKLVSDFRKDFQFYKVREINNYHHAHDAYLNAVVGTALIKKYPKLESEFVYGDYKVYDVRKMIAKSEQEIGKATAKYFFYSNIMNFFKTEITLANGEIRKRPLIETNGETGEIVWDKGRDFATVRKVLSMPQVNIVKKTEVQTGGFSKESILPKRNSDKLIARKKDWDPKKYGGFDSPTVAYSVLVVAKVEKGKSKKLKSVKELLGITIMERSSFEKNPIDFLEAKGYKEVKKDLIIKLPKYSLFELENGRKRMLASAGELQKGNELALPSKYVNFLYLASHYEKLKGSPEDNEQKQLFVEQHKHYLDEIIEQISEFSKRVILADANLDKVLSAYNKHRDKPIREQAENIIHLFTLTNLGAPAAFKYFDTTIDRKRYTSTKEVLDATLIHQSITGLYETRIDLSQLGGDGGGSSPAPGGIPWLMKKPLQLTTLVPLQEYEERLLKQTMLTGSYKEKLQSLFLKYDALWQHWENQVGHRRIKPHHIATGTVNPRPQKQYPINPKAKASIQTVINDLLKQGVLIQQNSIMNTPVYPVPKPDGKWRMVLDYREVNKTIPLIAAQNQHSAGILSSIFRGKYKTTLDLSNGFWAHSITPESYWLTAFTWLGQQYCWTRLPQGFLNSPALFNADVVDLLKEVPNVQVYVDDIYISHDDPREHLEQLEKVFSLLLNAGYVVSLKKSEIAQHEVEFLGFNITKEGRGLTETFKQKLLNITPPRDLKQLQSILGKLNFARNFIPNFSELVKPLYNIIATAPGKYITWTTDNSQQLQNIISMLNSAENLEERNPEVRLIMKVNTSPSAGYIRFYNEFAKRPIMYLNYVYTKAEVKFTNTEKLLTTIHKGLIKALDLGMGQEILVYSPIVSMTKIQKTPLPERKALPIRWITWMSYLEDPRIQFHYDKTLPELQQVPTVTDDIIAKIKHPSEFSMVFYTDGSAIKHPNVNKSHNAGMGIAQVQFKPEFTVINTWSIPLGDHTAQLAEVAAVEFACKKALKIDGPVLIVTDSFYVAESVNKELPYWQSNGFFNNKKKPLKHVSKWKSIADCIQLKPDIIIIHEKGHQPTASTFHTEGNNLADKLATQGSYVVNAGKRTADGSEFEKRTADGSEFESPKKKAKVE

SEQ ID NO: 576 - protein, 2087 aa, synthetic construct
MPAAKRVKLDGGDKKYSIGLDIGTNSVGWAVITDEYKVPSKKFKVLGNTDRHSIKKNLIGALLFDSGETAEATRLKRTARRRYTRRKNRICYLQEIFSNEMAKVDDSFFHRLEESFLVEEDKKHERHPIFGNIVDEVAYHEKYPTIYHLRKKLVDSTDKADLRLIYLALAHMIKFRGHFLIEGDLNPDNSDVDKLFIQLVQTYNQLFEENPINASGVDAKAILSARLSKSRRLENLIAQLPGEKKNGLFGNLIALSLGLTPNFKSNFDLAEDAKLQLSKDTYDDDLDNLLAQIGDQYADLFLAAKNLSDAILLSDILRVNTEITKAPLSASMIKRYDEHHQDLTLLKALVRQQLPEKYKEIFFDQSKNGYAGYIDGGASQEEFYKFIKPILEKMDGTEELLVKLNREDLLRKQRTFDNGSIPHQIHLGELHAILRRQEDFYPFLKDNREKIEKILTFRIPYYVGPLARGNSRFAWMTRKSEETITPWNFEEVVDKGASAQSFIERMTNFDKNLPNEKVLPKHSLLYEYFTVYNELTKVKYVTEGMRKPAFLSGEQKKAIVDLLFKTNRKVTVKQLKEDYFKKIECFDSVEISGVEDRFNASLGTYHDLLKIIKDKDFLDNEENEDILEDIVLTLTLFEDREMIEERLKTYAHLFDDKVMKQLKRRRYTGWGRLSRKLINGIRDKQSGKTILDFLKSDGFANRNFMQLIHDDSLTFKEDIQKAQVSGQGDSLHEHIANLAGSPAIKKGILQTVKVVDELVKVMGRHKPENIVIEMARENQTTQKGQKNSRERMKRIEEGIKELGSQILKEHPVENTQLQNEKLYLYYLQNGRDMYVDQELDINRLSDYDVDHIVPQSFLKDDSIDNKVLTRSDKARGKSDNVPSEEVVKKMKNYWRQLLNAKLITQRKFDNLTKAERGGLSELDKAGFIKRQLVETRQITKHVAQILDSRMNTKYDENDKLIREVKVITLKSKLVSDFRKDFQFYKVREINNYHHAHDAYLNAVVGTALIKKYPKLESEFVYGDYKVYDVRKMIAKSEQEIGKATAKYFFYSNIMNFFKTEITLANGEIRKRPLIETNGETGEIVWDKGRDFATVRKVLSMPQVNIVKKTEVQTGGFSKESILPKRNSDKLIARKKDWDPKKYGGFDSPTVAYSVLVVAKVEKGKSKKLKSVKELLGITIMERSSFEKNPIDFLEAKGYKEVKKDLIIKLPKYSLFELENGRKRMLASAGELQKGNELALPSKYVNFLYLASHYEKLKGSPEDNEQKQLFVEQHKHYLDEIIEQISEFSKRVILADANLDKVLSAYNKHRDKPIREQAENIIHLFTLTNLGAPAAFKYFDTTIDRKRYTSTKEVLDATLIHQSITGLYETRIDLSQLGGDGGPAPGGSEAAAKGGIPWLMKKPLQLTTLVPLQEYEERLLKQTMLTGSYKEKLQSLFLKYDALWQHWENQVGHRRIKPHHIATGTVNPRPQKQYPINPKAKASIQTVINDLLKQGVLIQQNSIMNTPVYPVPKPDGKWRMVLDYREVNKTIPLIAAQNQHSAGILSSIFRGKYKTTLDLSNGFWAHSITPESYWLTAFTWLGQQYCWTRLPQGFLNSPALFNADVVDLLKEVPNVQVYVDDIYISHDDPREHLEQLEKVFSLLLNAGYVVSLKKSEIAQHEVEFLGFNITKEGRGLTETFKQKLLNITPPRDLKQLQSILGKLNFARNFIPNFSELVKPLYNIIATAPGKYITWTTDNSQQLQNIISMLNSAENLEERNPEVRLIMKVNTSPSAGYIRFYNEFAKRPIMYLNYVYTKAEVKFTNTEKLLTTIHKGLIKALDLGMGQEILVYSPIVSMTKIQKTPLPERKALPIRWITWMSYLEDPRIQFHYDKTLPELQQVPTVTDDIIAKIKHPSEFSMVFYTDGSAIKHPNVNKSHNAGMGIAQVQFKPEFTVINTWSIPLGDHTAQLAEVAAVEFACKKALKIDGPVLIVTDSFYVAESVNKELPYWQSNGFFNNKKKPLKHVSKWKSIADCIQLKPDIIIIHEKGHQPTASTFHTEGNNLADKLATQGSYVVNAGKRTADGSEFEKRTADGSEFESPKKKAKVE

SEQ ID NO: 577 - protein, 2087 aa, synthetic construct
MPAAKRVKLDGGDKKYSIGLDIGTNSVGWAVITDEYKVPSKKFKVLGNTDRHSIKKNLIGALLFDSGETAEATRLKRTARRRYTRRKNRICYLQEIFSNEMAKVDDSFFHRLEESFLVEEDKKHERHPIFGNIVDEVAYHEKYPTIYHLRKKLVDSTDKADLRLIYLALAHMIKFRGHFLIEGDLNPDNSDVDKLFIQLVQTYNQLFEENPINASGVDAKAILSARLSKSRRLENLIAQLPGEKKNGLFGNLIALSLGLTPNFKSNFDLAEDAKLQLSKDTYDDDLDNLLAQIGDQYADLFLAAKNLSDAILLSDILRVNTEITKAPLSASMIKRYDEHHQDLTLLKALVRQQLPEKYKEIFFDQSKNGYAGYIDGGASQEEFYKFIKPILEKMDGTEELLVKLNREDLLRKQRTFDNGSIPHQIHLGELHAILRRQEDFYPFLKDNREKIEKILTFRIPYYVGPLARGNSRFAWMTRKSEETITPWNFEEVVDKGASAQSFIERMTNFDKNLPNEKVLPKHSLLYEYFTVYNELTKVKYVTEGMRKPAFLSGEQKKAIVDLLFKTNRKVTVKQLKEDYFKKIECFDSVEISGVEDRFNASLGTYHDLLKIIKDKDFLDNEENEDILEDIVLTLTLFEDREMIEERLKTYAHLFDDKVMKQLKRRRYTGWGRLSRKLINGIRDKQSGKTILDFLKSDGFANRNFMQLIHDDSLTFKEDIQKAQVSGQGDSLHEHIANLAGSPAIKKGILQTVKVVDELVKVMGRHKPENIVIEMARENQTTQKGQKNSRERMKRIEEGIKELGSQILKEHPVENTQLQNEKLYLYYLQNGRDMYVDQELDINRLSDYDVDHIVPQSFLKDDSIDNKVLTRSDKARGKSDNVPSEEVVKKMKNYWRQLLNAKLITQRKFDNLTKAERGGLSELDKAGFIKRQLVETRQITKHVAQILDSRMNTKYDENDKLIREVKVITLKSKLVSDFRKDFQFYKVREINNYHHAHDAYLNAVVGTALIKKYPKLESEFVYGDYKVYDVRKMIAKSEQEIGKATAKYFFYSNIMNFFKTEITLANGEIRKRPLIETNGETGEIVWDKGRDFATVRKVLSMPQVNIVKKTEVQTGGFSKESILPKRNSDKLIARKKDWDPKKYGGFDSPTVAYSVLVVAKVEKGKSKKLKSVKELLGITIMERSSFEKNPIDFLEAKGYKEVKKDLIIKLPKYSLFELENGRKRMLASAGELQKGNELALPSKYVNFLYLASHYEKLKGSPEDNEQKQLFVEQHKHYLDEIIEQISEFSKRVILADANLDKVLSAYNKHRDKPIREQAENIIHLFTLTNLGAPAAFKYFDTTIDRKRYTSTKEVLDATLIHQSITGLYETRIDLSQLGGDGGGGGEAAAKGGSGGIPWLMKKPLQLTTLVPLQEYEERLLKQTMLTGSYKEKLQSLFLKYDALWQHWENQVGHRRIKPHHIATGTVNPRPQKQYPINPKAKASIQTVINDLLKQGVLIQQNSIMNTPVYPVPKPDGKWRMVLDYREVNKTIPLIAAQNQHSAGILSSIFRGKYKTTLDLSNGFWAHSITPESYWLTAFTWLGQQYCWTRLPQGFLNSPALFNADVVDLLKEVPNVQVYVDDIYISHDDPREHLEQLEKVFSLLLNAGYVVSLKKSEIAQHEVEFLGFNITKEGRGLTETFKQKLLNITPPRDLKQLQSILGKLNFARNFIPNFSELVKPLYNIIATAPGKYITWTTDNSQQLQNIISMLNSAENLEERNPEVRLIMKVNTSPSAGYIRFYNEFAKRPIMYLNYVYTKAEVKFTNTEKLLTTIHKGLIKALDLGMGQEILVYSPIVSMTKIQKTPLPERKALPIRWITWMSYLEDPRIQFHYDKTLPELQQVPTVTDDIIAKIKHPSEFSMVFYTDGSAIKHPNVNKSHNAGMGIAQVQFKPEFTVINTWSIPLGDHTAQLAEVAAVEFACKKALKIDGPVLIVTDSFYVAESVNKELPYWQSNGFFNNKKKPLKHVSKWKSIADCIQLKPDIIIIHEKGHQPTASTFHTEGNNLADKLATQGSYVVNAGKRTADGSEFEKRTADGSEFESPKKKAKVE

SEQ ID NO: 578 - protein, 2084 aa, synthetic construct
MPAAKRVKLDGGDKKYSIGLDIGTNSVGWAVITDEYKVPSKKFKVLGNTDRHSIKKNLIGALLFDSGETAEATRLKRTARRRYTRRKNRICYLQEIFSNEMAKVDDSFFHRLEESFLVEEDKKHERHPIFGNIVDEVAYHEKYPTIYHLRKKLVDSTDKADLRLIYLALAHMIKFRGHFLIEGDLNPDNSDVDKLFIQLVQTYNQLFEENPINASGVDAKAILSARLSKSRRLENLIAQLPGEKKNGLFGNLIALSLGLTPNFKSNFDLAEDAKLQLSKDTYDDDLDNLLAQIGDQYADLFLAAKNLSDAILLSDILRVNTEITKAPLSASMIKRYDEHHQDLTLLKALVRQQLPEKYKEIFFDQSKNGYAGYIDGGASQEEFYKFIKPILEKMDGTEELLVKLNREDLLRKQRTFDNGSIPHQIHLGELHAILRRQEDFYPFLKDNREKIEKILTFRIPYYVGPLARGNSRFAWMTRKSEETITPWNFEEVVDKGASAQSFIERMTNFDKNLPNEKVLPKHSLLYEYFTVYNELTKVKYVTEGMRKPAFLSGEQKKAIVDLLFKTNRKVTVKQLKEDYFKKIECFDSVEISGVEDRFNASLGTYHDLLKIIKDKDFLDNEENEDILEDIVLTLTLFEDREMIEERLKTYAHLFDDKVMKQLKRRRYTGWGRLSRKLINGIRDKQSGKTILDFLKSDGFANRNFMQLIHDDSLTFKEDIQKAQVSGQGDSLHEHIANLAGSPAIKKGILQTVKVVDELVKVMGRHKPENIVIEMARENQTTQKGQKNSRERMKRIEEGIKELGSQILKEHPVENTQLQNEKLYLYYLQNGRDMYVDQELDINRLSDYDVDHIVPQSFLKDDSIDNKVLTRSDKARGKSDNVPSEEVVKKMKNYWRQLLNAKLITQRKFDNLTKAERGGLSELDKAGFIKRQLVETRQITKHVAQILDSRMNTKYDENDKLIREVKVITLKSKLVSDFRKDFQFYKVREINNYHHAHDAYLNAVVGTALIKKYPKLESEFVYGDYKVYDVRKMIAKSEQEIGKATAKYFFYSNIMNFFKTEITLANGEIRKRPLIETNGETGEIVWDKGRDFATVRKVLSMPQVNIVKKTEVQTGGFSKESILPKRNSDKLIARKKDWDPKKYGGFDSPTVAYSVLVVAKVEKGKSKKLKSVKELLGITIMERSSFEKNPIDFLEAKGYKEVKKDLIIKLPKYSLFELENGRKRMLASAGELQKGNELALPSKYVNFLYLASHYEKLKGSPEDNEQKQLFVEQHKHYLDEIIEQISEFSKRVILADANLDKVLSAYNKHRDKPIREQAENIIHLFTLTNLGAPAAFKYFDTTIDRKRYTSTKEVLDATLIHQSITGLYETRIDLSQLGGDGGGGGGGGGGGGIPWLMKKPLQLTTLVPLQEYEERLLKQTMLTGSYKEKLQSLFLKYDALWQHWENQVGHRRIKPHHIATGTVNPRPQKQYPINPKAKASIQTVINDLLKQGVLIQQNSIMNTPVYPVPKPDGKWRMVLDYREVNKTIPLIAAQNQHSAGILSSIFRGKYKTTLDLSNGFWAHSITPESYWLTAFTWLGQQYCWTRLPQGFLNSPALFNADVVDLLKEVPNVQVYVDDIYISHDDPREHLEQLEKVFSLLLNAGYVVSLKKSEIAQHEVEFLGFNITKEGRGLTETFKQKLLNITPPRDLKQLQSILGKLNFARNFIPNFSELVKPLYNIIATAPGKYITWTTDNSQQLQNIISMLNSAENLEERNPEVRLIMKVNTSPSAGYIRFYNEFAKRPIMYLNYVYTKAEVKFTNTEKLLTTIHKGLIKALDLGMGQEILVYSPIVSMTKIQKTPLPERKALPIRWITWMSYLEDPRIQFHYDKTLPELQQVPTVTDDIIAKIKHPSEFSMVFYTDGSAIKHPNVNKSHNAGMGIAQVQFKPEFTVINTWSIPLGDHTAQLAEVAAVEFACKKALKIDGPVLIVTDSFYVAESVNKELPYWQSNGFFNNKKKPLKHVSKWKSIADCIQLKPDIIIIHEKGHQPTASTFHTEGNNLADKLATQGSYVVNAGKRTADGSEFEKRTADGSEFESPKKKAKVE

SEQ ID NO: 579 - protein, 2087 aa, synthetic construct
MPAAKRVKLDGGDKKYSIGLDIGTNSVGWAVITDEYKVPSKKFKVLGNTDRHSIKKNLIGALLFDSGETAEATRLKRTARRRYTRRKNRICYLQEIFSNEMAKVDDSFFHRLEESFLVEEDKKHERHPIFGNIVDEVAYHEKYPTIYHLRKKLVDSTDKADLRLIYLALAHMIKFRGHFLIEGDLNPDNSDVDKLFIQLVQTYNQLFEENPINASGVDAKAILSARLSKSRRLENLIAQLPGEKKNGLFGNLIALSLGLTPNFKSNFDLAEDAKLQLSKDTYDDDLDNLLAQIGDQYADLFLAAKNLSDAILLSDILRVNTEITKAPLSASMIKRYDEHHQDLTLLKALVRQQLPEKYKEIFFDQSKNGYAGYIDGGASQEEFYKFIKPILEKMDGTEELLVKLNREDLLRKQRTFDNGSIPHQIHLGELHAILRRQEDFYPFLKDNREKIEKILTFRIPYYVGPLARGNSRFAWMTRKSEETITPWNFEEVVDKGASAQSFIERMTNFDKNLPNEKVLPKHSLLYEYFTVYNELTKVKYVTEGMRKPAFLSGEQKKAIVDLLFKTNRKVTVKQLKEDYFKKIECFDSVEISGVEDRFNASLGTYHDLLKIIKDKDFLDNEENEDILEDIVLTLTLFEDREMIEERLKTYAHLFDDKVMKQLKRRRYTGWGRLSRKLINGIRDKQSGKTILDFLKSDGFANRNFMQLIHDDSLTFKEDIQKAQVSGQGDSLHEHIANLAGSPAIKKGILQTVKVVDELVKVMGRHKPENIVIEMARENQTTQKGQKNSRERMKRIEEGIKELGSQILKEHPVENTQLQNEKLYLYYLQNGRDMYVDQELDINRLSDYDVDHIVPQSFLKDDSIDNKVLTRSDKARGKSDNVPSEEVVKKMKNYWRQLLNAKLITQRKFDNLTKAERGGLSELDKAGFIKRQLVETRQITKHVAQILDSRMNTKYDENDKLIREVKVITLKSKLVSDFRKDFQFYKVREINNYHHAHDAYLNAVVGTALIKKYPKLESEFVYGDYKVYDVRKMIAKSEQEIGKATAKYFFYSNIMNFFKTEITLANGEIRKRPLIETNGETGEIVWDKGRDFATVRKVLSMPQVNIVKKTEVQTGGFSKESILPKRNSDKLIARKKDWDPKKYGGFDSPTVAYSVLVVAKVEKGKSKKLKSVKELLGITIMERSSFEKNPIDFLEAKGYKEVKKDLIIKLPKYSLFELENGRKRMLASAGELQKGNELALPSKYVNFLYLASHYEKLKGSPEDNEQKQLFVEQHKHYLDEIIEQISEFSKRVILADANLDKVLSAYNKHRDKPIREQAENIIHLFTLTNLGAPAAFKYFDTTIDRKRYTSTKEVLDATLIHQSITGLYETRIDLSQLGGDGGPAPGSSEAAAKGGIPWLMKKPLQLTTLVPLQEYEERLLKQTMLTGSYKEKLQSLFLKYDALWQHWENQVGHRRIKPHHIATGTVNPRPQKQYPINPKAKASIQTVINDLLKQGVLIQQNSIMNTPVYPVPKPDGKWRMVLDYREVNKTIPLIAAQNQHSAGILSSIFRGKYKTTLDLSNGFWAHSITPESYWLTAFTWLGQQYCWTRLPQGFLNSPALFNADVVDLLKEVPNVQVYVDDIYISHDDPREHLEQLEKVFSLLLNAGYVVSLKKSEIAQHEVEFLGFNITKEGRGLTETFKQKLLNITPPRDLKQLQSILGKLNFARNFIPNFSELVKPLYNIIATAPGKYITWTTDNSQQLQNIISMLNSAENLEERNPEVRLIMKVNTSPSAGYIRFYNEFAKRPIMYLNYVYTKAEVKFTNTEKLLTTIHKGLIKALDLGMGQEILVYSPIVSMTKIQKTPLPERKALPIRWITWMSYLEDPRIQFHYDKTLPELQQVPTVTDDIIAKIKHPSEFSMVFYTDGSAIKHPNVNKSHNAGMGIAQVQFKPEFTVINTWSIPLGDHTAQLAEVAAVEFACKKALKIDGPVLIVTDSFYVAESVNKELPYWQSNGFFNNKKKPLKHVSKWKSIADCIQLKPDIIIIHEKGHQPTASTFHTEGNNLADKLATQGSYVVNAGKRTADGSEFEKRTADGSEFESPKKKAKVE

SEQ ID NO: 580 - protein, 2087 aa, synthetic construct
MPAAKRVKLDGGDKKYSIGLDIGTNSVGWAVITDEYKVPSKKFKVLGNTDRHSIKKNLIGALLFDSGETAEATRLKRTARRRYTRRKNRICYLQEIFSNEMAKVDDSFFHRLEESFLVEEDKKHERHPIFGNIVDEVAYHEKYPTIYHLRKKLVDSTDKADLRLIYLALAHMIKFRGHFLIEGDLNPDNSDVDKLFIQLVQTYNQLFEENPINASGVDAKAILSARLSKSRRLENLIAQLPGEKKNGLFGNLIALSLGLTPNFKSNFDLAEDAKLQLSKDTYDDDLDNLLAQIGDQYADLFLAAKNLSDAILLSDILRVNTEITKAPLSASMIKRYDEHHQDLTLLKALVRQQLPEKYKEIFFDQSKNGYAGYIDGGASQEEFYKFIKPILEKMDGTEELLVKLNREDLLRKQRTFDNGSIPHQIHLGELHAILRRQEDFYPFLKDNREKIEKILTFRIPYYVGPLARGNSRFAWMTRKSEETITPWNFEEVVDKGASAQSFIERMTNFDKNLPNEKVLPKHSLLYEYFTVYNELTKVKYVTEGMRKPAFLSGEQKKAIVDLLFKTNRKVTVKQLKEDYFKKIECFDSVEISGVEDRFNASLGTYHDLLKIIKDKDFLDNEENEDILEDIVLTLTLFEDREMIEERLKTYAHLFDDKVMKQLKRRRYTGWGRLSRKLINGIRDKQSGKTILDFLKSDGFANRNFMQLIHDDSLTFKEDIQKAQVSGQGDSLHEHIANLAGSPAIKKGILQTVKVVDELVKVMGRHKPENIVIEMARENQTTQKGQKNSRERMKRIEEGIKELGSQILKEHPVENTQLQNEKLYLYYLQNGRDMYVDQELDINRLSDYDVDHIVPQSFLKDDSIDNKVLTRSDKARGKSDNVPSEEVVKKMKNYWRQLLNAKLITQRKFDNLTKAERGGLSELDKAGFIKRQLVETRQITKHVAQILDSRMNTKYDENDKLIREVKVITLKSKLVSDFRKDFQFYKVREINNYHHAHDAYLNAVVGTALIKKYPKLESEFVYGDYKVYDVRKMIAKSEQEIGKATAKYFFYSNIMNFFKTEITLANGEIRKRPLIETNGETGEIVWDKGRDFATVRKVLSMPQVNIVKKTEVQTGGFSKESILPKRNSDKLIARKKDWDPKKYGGFDSPTVAYSVLVVAKVEKGKSKKLKSVKELLGITIMERSSFEKNPIDFLEAKGYKEVKKDLIIKLPKYSLFELENGRKRMLASAGELQKGNELALPSKYVNFLYLASHYEKLKGSPEDNEQKQLFVEQHKHYLDEIIEQISEFSKRVILADANLDKVLSAYNKHRDKPIREQAENIIHLFTLTNLGAPAAFKYFDTTIDRKRYTSTKEVLDATLIHQSITGLYETRIDLSQLGGDGGGGSEAAAKPAPGGIPWLMKKPLQLTTLVPLQEYEERLLKQTMLTGSYKEKLQSLFLKYDALWQHWENQVGHRRIKPHHIATGTVNPRPQKQYPINPKAKASIQTVINDLLKQGVLIQQNSIMNTPVYPVPKPDGKWRMVLDYREVNKTIPLIAAQNQHSAGILSSIFRGKYKTTLDLSNGFWAHSITPESYWLTAFTWLGQQYCWTRLPQGFLNSPALFNADVVDLLKEVPNVQVYVDDIYISHDDPREHLEQLEKVFSLLLNAGYVVSLKKSEIAQHEVEFLGFNITKEGRGLTETFKQKLLNITPPRDLKQLQSILGKLNFARNFIPNFSELVKPLYNIIATAPGKYITWTTDNSQQLQNIISMLNSAENLEERNPEVRLIMKVNTSPSAGYIRFYNEFAKRPIMYLNYVYTKAEVKFTNTEKLLTTIHKGLIKALDLGMGQEILVYSPIVSMTKIQKTPLPERKALPIRWITWMSYLEDPRIQFHYDKTLPELQQVPTVTDDIIAKIKHPSEFSMVFYTDGSAIKHPNVNKSHNAGMGIAQVQFKPEFTVINTWSIPLGDHTAQLAEVAAVEFACKKALKIDGPVLIVTDSFYVAESVNKELPYWQSNGFFNNKKKPLKHVSKWKSIADCIQLKPDIIIIHEKGHQPTASTFHTEGNNLADKLATQGSYVVNAGKRTADGSEFEKRTADGSEFESPKKKAKVE

SEQ ID NO: 581 - protein, 2085 aa, synthetic construct
MPAAKRVKLDGGDKKYSIGLDIGTNSVGWAVITDEYKVPSKKFKVLGNTDRHSIKKNLIGALLFDSGETAEATRLKRTARRRYTRRKNRICYLQEIFSNEMAKVDDSFFHRLEESFLVEEDKKHERHPIFGNIVDEVAYHEKYPTIYHLRKKLVDSTDKADLRLIYLALAHMIKFRGHFLIEGDLNPDNSDVDKLFIQLVQTYNQLFEENPINASGVDAKAILSARLSKSRRLENLIAQLPGEKKNGLFGNLIALSLGLTPNFKSNFDLAEDAKLQLSKDTYDDDLDNLLAQIGDQYADLFLAAKNLSDAILLSDILRVNTEITKAPLSASMIKRYDEHHQDLTLLKALVRQQLPEKYKEIFFDQSKNGYAGYIDGGASQEEFYKFIKPILEKMDGTEELLVKLNREDLLRKQRTFDNGSIPHQIHLGELHAILRRQEDFYPFLKDNREKIEKILTFRIPYYVGPLARGNSRFAWMTRKSEETITPWNFEEVVDKGASAQSFIERMTNFDKNLPNEKVLPKHSLLYEYFTVYNELTKVKYVTEGMRKPAFLSGEQKKAIVDLLFKTNRKVTVKQLKEDYFKKIECFDSVEISGVEDRFNASLGTYHDLLKIIKDKDFLDNEENEDILEDIVLTLTLFEDREMIEERLKTYAHLFDDKVMKQLKRRRYTGWGRLSRKLINGIRDKQSGKTILDFLKSDGFANRNFMQLIHDDSLTFKEDIQKAQVSGQGDSLHEHIANLAGSPAIKKGILQTVKVVDELVKVMGRHKPENIVIEMARENQTTQKGQKNSRERMKRIEEGIKELGSQILKEHPVENTQLQNEKLYLYYLQNGRDMYVDQELDINRLSDYDVDHIVPQSFLKDDSIDNKVLTRSDKARGKSDNVPSEEVVKKMKNYWRQLLNAKLITQRKFDNLTKAERGGLSELDKAGFIKRQLVETRQITKHVAQILDSRMNTKYDENDKLIREVKVITLKSKLVSDFRKDFQFYKVREINNYHHAHDAYLNAVVGTALIKKYPKLESEFVYGDYKVYDVRKMIAKSEQEIGKATAKYFFYSNIMNFFKTEITLANGEIRKRPLIETNGETGEIVWDKGRDFATVRKVLSMPQVNIVKKTEVQTGGFSKESILPKRNSDKLIARKKDWDPKKYGGFDSPTVAYSVLVVAKVEKGKSKKLKSVKELLGITIMERSSFEKNPIDFLEAKGYKEVKKDLIIKLPKYSLFELENGRKRMLASAGELQKGNELALPSKYVNFLYLASHYEKLKGSPEDNEQKQLFVEQHKHYLDEIIEQISEFSKRVILADANLDKVLSAYNKHRDKPIREQAENIIHLFTLTNLGAPAAFKYFDTTIDRKRYTSTKEVLDATLIHQSITGLYETRIDLSQLGGDGGPAPGSSGGGGGIPWLMKKPLQLTTLVPLQEYEERLLKQTMLTGSYKEKLQSLFLKYDALWQHWENQVGHRRIKPHHIATGTVNPRPQKQYPINPKAKASIQTVINDLLKQGVLIQQNSIMNTPVYPVPKPDGKWRMVLDYREVNKTIPLIAAQNQHSAGILSSIFRGKYKTTLDLSNGFWAHSITPESYWLTAFTWLGQQYCWTRLPQGFLNSPALFNADVVDLLKEVPNVQVYVDDIYISHDDPREHLEQLEKVFSLLLNAGYVVSLKKSEIAQHEVEFLGFNITKEGRGLTETFKQKLLNITPPRDLKQLQSILGKLNFARNFIPNFSELVKPLYNIIATAPGKYITWTTDNSQQLQNIISMLNSAENLEERNPEVRLIMKVNTSPSAGYIRFYNEFAKRPIMYLNYVYTKAEVKFTNTEKLLTTIHKGLIKALDLGMGQEILVYSPIVSMTKIQKTPLPERKALPIRWITWMSYLEDPRIQFHYDKTLPELQQVPTVTDDIIAKIKHPSEFSMVFYTDGSAIKHPNVNKSHNAGMGIAQVQFKPEFTVINTWSIPLGDHTAQLAEVAAVEFACKKALKIDGPVLIVTDSFYVAESVNKELPYWQSNGFFNNKKKPLKHVSKWKSIADCIQLKPDIIIIHEKGHQPTASTFHTEGNNLADKLATQGSYVVNAGKRTADGSEFEKRTADGSEFESPKKKAKVE

SEQ ID NO: 582 - protein, 2087 aa, synthetic construct
MPAAKRVKLDGGDKKYSIGLDIGTNSVGWAVITDEYKVPSKKFKVLGNTDRHSIKKNLIGALLFDSGETAEATRLKRTARRRYTRRKNRICYLQEIFSNEMAKVDDSFFHRLEESFLVEEDKKHERHPIFGNIVDEVAYHEKYPTIYHLRKKLVDSTDKADLRLIYLALAHMIKFRGHFLIEGDLNPDNSDVDKLFIQLVQTYNQLFEENPINASGVDAKAILSARLSKSRRLENLIAQLPGEKKNGLFGNLIALSLGLTPNFKSNFDLAEDAKLQLSKDTYDDDLDNLLAQIGDQYADLFLAAKNLSDAILLSDILRVNTEITKAPLSASMIKRYDEHHQDLTLLKALVRQQLPEKYKEIFFDQSKNGYAGYIDGGASQEEFYKFIKPILEKMDGTEELLVKLNREDLLRKQRTFDNGSIPHQIHLGELHAILRRQEDFYPFLKDNREKIEKILTFRIPYYVGPLARGNSRFAWMTRKSEETITPWNFEEVVDKGASAQSFIERMTNFDKNLPNEKVLPKHSLLYEYFTVYNELTKVKYVTEGMRKPAFLSGEQKKAIVDLLFKTNRKVTVKQLKEDYFKKIECFDSVEISGVEDRFNASLGTYHDLLKIIKDKDFLDNEENEDILEDIVLTLTLFEDREMIEERLKTYAHLFDDKVMKQLKRRRYTGWGRLSRKLINGIRDKQSGKTILDFLKSDGFANRNFMQLIHDDSLTFKEDIQKAQVSGQGDSLHEHIANLAGSPAIKKGILQTVKVVDELVKVMGRHKPENIVIEMARENQTTQKGQKNSRERMKRIEEGIKELGSQILKEHPVENTQLQNEKLYLYYLQNGRDMYVDQELDINRLSDYDVDHIVPQSFLKDDSIDNKVLTRSDKARGKSDNVPSEEVVKKMKNYWRQLLNAKLITQRKFDNLTKAERGGLSELDKAGFIKRQLVETRQITKHVAQILDSRMNTKYDENDKLIREVKVITLKSKLVSDFRKDFQFYKVREINNYHHAHDAYLNAVVGTALIKKYPKLESEFVYGDYKVYDVRKMIAKSEQEIGKATAKYFFYSNIMNFFKTEITLANGEIRKRPLIETNGETGEIVWDKGRDFATVRKVLSMPQVNIVKKTEVQTGGFSKESILPKRNSDKLIARKKDWDPKKYGGFDSPTVAYSVLVVAKVEKGKSKKLKSVKELLGITIMERSSFEKNPIDFLEAKGYKEVKKDLIIKLPKYSLFELENGRKRMLASAGELQKGNELALPSKYVNFLYLASHYEKLKGSPEDNEQKQLFVEQHKHYLDEIIEQISEFSKRVILADANLDKVLSAYNKHRDKPIREQAENIIHLFTLTNLGAPAAFKYFDTTIDRKRYTSTKEVLDATLIHQSITGLYETRIDLSQLGGDGGGGGGSSEAAAKGGIPWLMKKPLQLTTLVPLQEYEERLLKQTMLTGSYKEKLQSLFLKYDALWQHWENQVGHRRIKPHHIATGTVNPRPQKQYPINPKAKASIQTVINDLLKQGVLIQQNSIMNTPVYPVPKPDGKWRMVLDYREVNKTIPLIAAQNQHSAGILSSIFRGKYKTTLDLSNGFWAHSITPESYWLTAFTWLGQQYCWTRLPQGFLNSPALFNADVVDLLKEVPNVQVYVDDIYISHDDPREHLEQLEKVFSLLLNAGYVVSLKKSEIAQHEVEFLGFNITKEGRGLTETFKQKLLNITPPRDLKQLQSILGKLNFARNFIPNFSELVKPLYNIIATAPGKYITWTTDNSQQLQNIISMLNSAENLEERNPEVRLIMKVNTSPSAGYIRFYNEFAKRPIMYLNYVYTKAEVKFTNTEKLLTTIHKGLIKALDLGMGQEILVYSPIVSMTKIQKTPLPERKALPIRWITWMSYLEDPRIQFHYDKTLPELQQVPTVTDDIIAKIKHPSEFSMVFYTDGSAIKHPNVNKSHNAGMGIAQVQFKPEFTVINTWSIPLGDHTAQLAEVAAVEFACKKALKIDGPVLIVTDSFYVAESVNKELPYWQSNGFFNNKKKPLKHVSKWKSIADCIQLKPDIIIIHEKGHQPTASTFHTEGNNLADKLATQGSYVVNAGKRTADGSEFEKRTADGSEFESPKKKAKVE

SEQ ID NO: 583 - protein, 2087 aa, synthetic construct
MPAAKRVKLDGGDKKYSIGLDIGTNSVGWAVITDEYKVPSKKFKVLGNTDRHSIKKNLIGALLFDSGETAEATRLKRTARRRYTRRKNRICYLQEIFSNEMAKVDDSFFHRLEESFLVEEDKKHERHPIFGNIVDEVAYHEKYPTIYHLRKKLVDSTDKADLRLIYLALAHMIKFRGHFLIEGDLNPDNSDVDKLFIQLVQTYNQLFEENPINASGVDAKAILSARLSKSRRLENLIAQLPGEKKNGLFGNLIALSLGLTPNFKSNFDLAEDAKLQLSKDTYDDDLDNLLAQIGDQYADLFLAAKNLSDAILLSDILRVNTEITKAPLSASMIKRYDEHHQDLTLLKALVRQQLPEKYKEIFFDQSKNGYAGYIDGGASQEEFYKFIKPILEKMDGTEELLVKLNREDLLRKQRTFDNGSIPHQIHLGELHAILRRQEDFYPFLKDNREKIEKILTFRIPYYVGPLARGNSRFAWMTRKSEETITPWNFEEVVDKGASAQSFIERMTNFDKNLPNEKVLPKHSLLYEYFTVYNELTKVKYVTEGMRKPAFLSGEQKKAIVDLLFKTNRKVTVKQLKEDYFKKIECFDSVEISGVEDRFNASLGTYHDLLKIIKDKDFLDNEENEDILEDIVLTLTLFEDREMIEERLKTYAHLFDDKVMKQLKRRRYTGWGRLSRKLINGIRDKQSGKTILDFLKSDGFANRNFMQLIHDDSLTFKEDIQKAQVSGQGDSLHEHIANLAGSPAIKKGILQTVKVVDELVKVMGRHKPENIVIEMARENQTTQKGQKNSRERMKRIEEGIKELGSQILKEHPVENTQLQNEKLYLYYLQNGRDMYVDQELDINRLSDYDVDHIVPQSFLKDDSIDNKVLTRSDKARGKSDNVPSEEVVKKMKNYWRQLLNAKLITQRKFDNLTKAERGGLSELDKAGFIKRQLVETRQITKHVAQILDSRMNTKYDENDKLIREVKVITLKSKLVSDFRKDFQFYKVREINNYHHAHDAYLNAVVGTALIKKYPKLESEFVYGDYKVYDVRKMIAKSEQEIGKATAKYFFYSNIMNFFKTEITLANGEIRKRPLIETNGETGEIVWDKGRDFATVRKVLSMPQVNIVKKTEVQTGGFSKESILPKRNSDKLIARKKDWDPKKYGGFDSPTVAYSVLVVAKVEKGKSKKLKSVKELLGITIMERSSFEKNPIDFLEAKGYKEVKKDLIIKLPKYSLFELENGRKRMLASAGELQKGNELALPSKYVNFLYLASHYEKLKGSPEDNEQKQLFVEQHKHYLDEIIEQISEFSKRVILADANLDKVLSAYNKHRDKPIREQAENIIHLFTLTNLGAPAAFKYFDTTIDRKRYTSTKEVLDATLIHQSITGLYETRIDLSQLGGDGGGGSGGGEAAAKGGIPWLMKKPLQLTTLVPLQEYEERLLKQTMLTGSYKEKLQSLFLKYDALWQHWENQVGHRRIKPHHIATGTVNPRPQKQYPINPKAKASIQTVINDLLKQGVLIQQNSIMNTPVYPVPKPDGKWRMVLDYREVNKTIPLIAAQNQHSAGILSSIFRGKYKTTLDLSNGFWAHSITPESYWLTAFTWLGQQYCWTRLPQGFLNSPALFNADVVDLLKEVPNVQVYVDDIYISHDDPREHLEQLEKVFSLLLNAGYVVSLKKSEIAQHEVEFLGFNITKEGRGLTETFKQKLLNITPPRDLKQLQSILGKLNFARNFIPNFSELVKPLYNIIATAPGKYITWTTDNSQQLQNIISMLNSAENLEERNPEVRLIMKVNTSPSAGYIRFYNEFAKRPIMYLNYVYTKAEVKFTNTEKLLTTIHKGLIKALDLGMGQEILVYSPIVSMTKIQKTPLPERKALPIRWITWMSYLEDPRIQFHYDKTLPELQQVPTVTDDIIAKIKHPSEFSMVFYTDGSAIKHPNVNKSHNAGMGIAQVQFKPEFTVINTWSIPLGDHTAQLAEVAAVEFACKKALKIDGPVLIVTDSFYVAESVNKELPYWQSNGFFNNKKKPLKHVSKWKSIADCIQLKPDIIIIHEKGHQPTASTFHTEGNNLADKLATQGSYVVNAGKRTADGSEFEKRTADGSEFESPKKKAKVE

SEQ ID NO: 584 - protein, 2085 aa, synthetic construct
MPAAKRVKLDGGDKKYSIGLDIGTNSVGWAVITDEYKVPSKKFKVLGNTDRHSIKKNLIGALLFDSGETAEATRLKRTARRRYTRRKNRICYLQEIFSNEMAKVDDSFFHRLEESFLVEEDKKHERHPIFGNIVDEVAYHEKYPTIYHLRKKLVDSTDKADLRLIYLALAHMIKFRGHFLIEGDLNPDNSDVDKLFIQLVQTYNQLFEENPINASGVDAKAILSARLSKSRRLENLIAQLPGEKKNGLFGNLIALSLGLTPNFKSNFDLAEDAKLQLSKDTYDDDLDNLLAQIGDQYADLFLAAKNLSDAILLSDILRVNTEITKAPLSASMIKRYDEHHQDLTLLKALVRQQLPEKYKEIFFDQSKNGYAGYIDGGASQEEFYKFIKPILEKMDGTEELLVKLNREDLLRKQRTFDNGSIPHQIHLGELHAILRRQEDFYPFLKDNREKIEKILTFRIPYYVGPLARGNSRFAWMTRKSEETITPWNFEEVVDKGASAQSFIERMTNFDKNLPNEKVLPKHSLLYEYFTVYNELTKVKYVTEGMRKPAFLSGEQKKAIVDLLFKTNRKVTVKQLKEDYFKKIECFDSVEISGVEDRFNASLGTYHDLLKIIKDKDFLDNEENEDILEDIVLTLTLFEDREMIEERLKTYAHLFDDKVMKQLKRRRYTGWGRLSRKLINGIRDKQSGKTILDFLKSDGFANRNFMQLIHDDSLTFKEDIQKAQVSGQGDSLHEHIANLAGSPAIKKGILQTVKVVDELVKVMGRHKPENIVIEMARENQTTQKGQKNSRERMKRIEEGIKELGSQILKEHPVENTQLQNEKLYLYYLQNGRDMYVDQELDINRLSDYDVDHIVPQSFLKDDSIDNKVLTRSDKARGKSDNVPSEEVVKKMKNYWRQLLNAKLITQRKFDNLTKAERGGLSELDKAGFIKRQLVETRQITKHVAQILDSRMNTKYDENDKLIREVKVITLKSKLVSDFRKDFQFYKVREINNYHHAHDAYLNAVVGTALIKKYPKLESEFVYGDYKVYDVRKMIAKSEQEIGKATAKYFFYSNIMNFFKTEITLANGEIRKRPLIETNGETGEIVWDKGRDFATVRKVLSMPQVNIVKKTEVQTGGFSKESILPKRNSDKLIARKKDWDPKKYGGFDSPTVAYSVLVVAKVEKGKSKKLKSVKELLGITIMERSSFEKNPIDFLEAKGYKEVKKDLIIKLPKYSLFELENGRKRMLASAGELQKGNELALPSKYVNFLYLASHYEKLKGSPEDNEQKQLFVEQHKHYLDEIIEQISEFSKRVILADANLDKVLSAYNKHRDKPIREQAENIIHLFTLTNLGAPAAFKYFDTTIDRKRYTSTKEVLDATLIHQSITGLYETRIDLSQLGGDGGGSSGGSPAPGGIPWLMKKPLQLTTLVPLQEYEERLLKQTMLTGSYKEKLQSLFLKYDALWQHWENQVGHRRIKPHHIATGTVNPRPQKQYPINPKAKASIQTVINDLLKQGVLIQQNSIMNTPVYPVPKPDGKWRMVLDYREVNKTIPLIAAQNQHSAGILSSIFRGKYKTTLDLSNGFWAHSITPESYWLTAFTWLGQQYCWTRLPQGFLNSPALFNADVVDLLKEVPNVQVYVDDIYISHDDPREHLEQLEKVFSLLLNAGYVVSLKKSEIAQHEVEFLGFNITKEGRGLTETFKQKLLNITPPRDLKQLQSILGKLNFARNFIPNFSELVKPLYNIIATAPGKYITWTTDNSQQLQNIISMLNSAENLEERNPEVRLIMKVNTSPSAGYIRFYNEFAKRPIMYLNYVYTKAEVKFTNTEKLLTTIHKGLIKALDLGMGQEILVYSPIVSMTKIQKTPLPERKALPIRWITWMSYLEDPRIQFHYDKTLPELQQVPTVTDDIIAKIKHPSEFSMVFYTDGSAIKHPNVNKSHNAGMGIAQVQFKPEFTVINTWSIPLGDHTAQLAEVAAVEFACKKALKIDGPVLIVTDSFYVAESVNKELPYWQSNGFFNNKKKPLKHVSKWKSIADCIQLKPDIIIIHEKGHQPTASTFHTEGNNLADKLATQGSYVVNAGKRTADGSEFEKRTADGSEFESPKKKAKVE

SEQ ID NO: 585 - protein, 2109 aa, synthetic construct
MPAAKRVKLDGGDKKYSIGLDIGTNSVGWAVITDEYKVPSKKFKVLGNTDRHSIKKNLIGALLFDSGETAEATRLKRTARRRYTRRKNRICYLQEIFSNEMAKVDDSFFHRLEESFLVEEDKKHERHPIFGNIVDEVAYHEKYPTIYHLRKKLVDSTDKADLRLIYLALAHMIKFRGHFLIEGDLNPDNSDVDKLFIQLVQTYNQLFEENPINASGVDAKAILSARLSKSRRLENLIAQLPGEKKNGLFGNLIALSLGLTPNFKSNFDLAEDAKLQLSKDTYDDDLDNLLAQIGDQYADLFLAAKNLSDAILLSDILRVNTEITKAPLSASMIKRYDEHHQDLTLLKALVRQQLPEKYKEIFFDQSKNGYAGYIDGGASQEEFYKFIKPILEKMDGTEELLVKLNREDLLRKQRTFDNGSIPHQIHLGELHAILRRQEDFYPFLKDNREKIEKILTFRIPYYVGPLARGNSRFAWMTRKSEETITPWNFEEVVDKGASAQSFIERMTNFDKNLPNEKVLPKHSLLYEYFTVYNELTKVKYVTEGMRKPAFLSGEQKKAIVDLLFKTNRKVTVKQLKEDYFKKIECFDSVEISGVEDRFNASLGTYHDLLKIIKDKDFLDNEENEDILEDIVLTLTLFEDREMIEERLKTYAHLFDDKVMKQLKRRRYTGWGRLSRKLINGIRDKQSGKTILDFLKSDGFANRNFMQLIHDDSLTFKEDIQKAQVSGQGDSLHEHIANLAGSPAIKKGILQTVKVVDELVKVMGRHKPENIVIEMARENQTTQKGQKNSRERMKRIEEGIKELGSQILKEHPVENTQLQNEKLYLYYLQNGRDMYVDQELDINRLSDYDVDHIVPQSFLKDDSIDNKVLTRSDKARGKSDNVPSEEVVKKMKNYWRQLLNAKLITQRKFDNLTKAERGGLSELDKAGFIKRQLVETRQITKHVAQILDSRMNTKYDENDKLIREVKVITLKSKLVSDFRKDFQFYKVREINNYHHAHDAYLNAVVGTALIKKYPKLESEFVYGDYKVYDVRKMIAKSEQEIGKATAKYFFYSNIMNFFKTEITLANGEIRKRPLIETNGETGEIVWDKGRDFATVRKVLSMPQVNIVKKTEVQTGGFSKESILPKRNSDKLIARKKDWDPKKYGGFDSPTVAYSVLVVAKVEKGKSKKLKSVKELLGITIMERSSFEKNPIDFLEAKGYKEVKKDLIIKLPKYSLFELENGRKRMLASAGELQKGNELALPSKYVNFLYLASHYEKLKGSPEDNEQKQLFVEQHKHYLDEIIEQISEFSKRVILADANLDKVLSAYNKHRDKPIREQAENIIHLFTLTNLGAPAAFKYFDTTIDRKRYTSTKEVLDATLIHQSITGLYETRIDLSQLGGDGGSGGSSGGSSGSETPGTSESATPESSGGSSGGSSGGIPWLMKKPLQLTTLVPLQEYEERLLKQTMLTGSYKEKLQSLFLKYDALWQHWENQVGHRRIKPHHIATGTVNPRPQKQYPINPKAKASIQTVINDLLKQGVLIQQNSIMNTPVYPVPKPDGKWRMVLDYREVNKTIPLIAAQNQHSAGILSSIFRGKYKTTLDLSNGFWAHSITPESYWLTAFTWLGQQYCWTRLPQGFLNSPALFNADVVDLLKEVPNVQVYVDDIYISHDDPREHLEQLEKVFSLLLNAGYVVSLKKSEIAQHEVEFLGFNITKEGRGLTETFKQKLLNITPPRDLKQLQSILGKLNFARNFIPNFSELVKPLYNIIATAPGKYITWTTDNSQQLQNIISMLNSAENLEERNPEVRLIMKVNTSPSAGYIRFYNEFAKRPIMYLNYVYTKAEVKFTNTEKLLTTIHKGLIKALDLGMGQEILVYSPIVSMTKIQKTPLPERKALPIRWITWMSYLEDPRIQFHYDKTLPELQQVPTVTDDIIAKIKHPSEFSMVFYTDGSAIKHPNVNKSHNAGMGIAQVQFKPEFTVINTWSIPLGDHTAQLAEVAAVEFACKKALKIDGPVLIVTDSFYVAESVNKELPYWQSNGFFNNKKKPLKHVSKWKSIADCIQLKPDIIIIHEKGHQPTASTFHTEGNNLADKLATQGSYVVNAGKRTADGSEFEKRTADGSEFESPKKKAKVE

SEQ ID NO: 586 - protein, 2088 aa, synthetic construct
MPAAKRVKLDGGDKKYSIGLDIGTNSVGWAVITDEYKVPSKKFKVLGNTDRHSIKKNLIGALLFDSGETAEATRLKRTARRRYTRRKNRICYLQEIFSNEMAKVDDSFFHRLEESFLVEEDKKHERHPIFGNIVDEVAYHEKYPTIYHLRKKLVDSTDKADLRLIYLALAHMIKFRGHFLIEGDLNPDNSDVDKLFIQLVQTYNQLFEENPINASGVDAKAILSARLSKSRRLENLIAQLPGEKKNGLFGNLIALSLGLTPNFKSNFDLAEDAKLQLSKDTYDDDLDNLLAQIGDQYADLFLAAKNLSDAILLSDILRVNTEITKAPLSASMIKRYDEHHQDLTLLKALVRQQLPEKYKEIFFDQSKNGYAGYIDGGASQEEFYKFIKPILEKMDGTEELLVKLNREDLLRKQRTFDNGSIPHQIHLGELHAILRRQEDFYPFLKDNREKIEKILTFRIPYYVGPLARGNSRFAWMTRKSEETITPWNFEEVVDKGASAQSFIERMTNFDKNLPNEKVLPKHSLLYEYFTVYNELTKVKYVTEGMRKPAFLSGEQKKAIVDLLFKTNRKVTVKQLKEDYFKKIECFDSVEISGVEDRFNASLGTYHDLLKIIKDKDFLDNEENEDILEDIVLTLTLFEDREMIEERLKTYAHLFDDKVMKQLKRRRYTGWGRLSRKLINGIRDKQSGKTILDFLKSDGFANRNFMQLIHDDSLTFKEDIQKAQVSGQGDSLHEHIANLAGSPAIKKGILQTVKVVDELVKVMGRHKPENIVIEMARENQTTQKGQKNSRERMKRIEEGIKELGSQILKEHPVENTQLQNEKLYLYYLQNGRDMYVDQELDINRLSDYDVDHIVPQSFLKDDSIDNKVLTRSDKARGKSDNVPSEEVVKKMKNYWRQLLNAKLITQRKFDNLTKAERGGLSELDKAGFIKRQLVETRQITKHVAQILDSRMNTKYDENDKLIREVKVITLKSKLVSDFRKDFQFYKVREINNYHHAHDAYLNAVVGTALIKKYPKLESEFVYGDYKVYDVRKMIAKSEQEIGKATAKYFFYSNIMNFFKTEITLANGEIRKRPLIETNGETGEIVWDKGRDFATVRKVLSMPQVNIVKKTEVQTGGFSKESILPKRNSDKLIARKKDWDPKKYGGFDSPTVAYSVLVVAKVEKGKSKKLKSVKELLGITIMERSSFEKNPIDFLEAKGYKEVKKDLIIKLPKYSLFELENGRKRMLASAGELQKGNELALPSKYVNFLYLASHYEKLKGSPEDNEQKQLFVEQHKHYLDEIIEQISEFSKRVILADANLDKVLSAYNKHRDKPIREQAENIIHLFTLTNLGAPAAFKYFDTTIDRKRYTSTKEVLDATLIHQSITGLYETRIDLSQLGGDGGGSSGSSGSSGSSGGIPWLMKKPLQLTTLVPLQEYEERLLKQTMLTGSYKEKLQSLFLKYDALWQHWENQVGHRRIKPHHIATGTVNPRPQKQYPINPKAKASIQTVINDLLKQGVLIQQNSIMNTPVYPVPKPDGKWRMVLDYREVNKTIPLIAAQNQHSAGILSSIFRGKYKTTLDLSNGFWAHSITPESYWLTAFTWLGQQYCWTRLPQGFLNSPALFNADVVDLLKEVPNVQVYVDDIYISHDDPREHLEQLEKVFSLLLNAGYVVSLKKSEIAQHEVEFLGFNITKEGRGLTETFKQKLLNITPPRDLKQLQSILGKLNFARNFIPNFSELVKPLYNIIATAPGKYITWTTDNSQQLQNIISMLNSAENLEERNPEVRLIMKVNTSPSAGYIRFYNEFAKRPIMYLNYVYTKAEVKFTNTEKLLTTIHKGLIKALDLGMGQEILVYSPIVSMTKIQKTPLPERKALPIRWITWMSYLEDPRIQFHYDKTLPELQQVPTVTDDIIAKIKHPSEFSMVFYTDGSAIKHPNVNKSHNAGMGIAQVQFKPEFTVINTWSIPLGDHTAQLAEVAAVEFACKKALKIDGPVLIVTDSFYVAESVNKELPYWQSNGFFNNKKKPLKHVSKWKSIADCIQLKPDIIIIHEKGHQPTASTFHTEGNNLADKLATQGSYVVNAGKRTADGSEFEKRTADGSEFESPKKKAKVE

SEQ ID NO: 587 - protein, 2085 aa, synthetic construct
MPAAKRVKLDGGDKKYSIGLDIGTNSVGWAVITDEYKVPSKKFKVLGNTDRHSIKKNLIGALLFDSGETAEATRLKRTARRRYTRRKNRICYLQEIFSNEMAKVDDSFFHRLEESFLVEEDKKHERHPIFGNIVDEVAYHEKYPTIYHLRKKLVDSTDKADLRLIYLALAHMIKFRGHFLIEGDLNPDNSDVDKLFIQLVQTYNQLFEENPINASGVDAKAILSARLSKSRRLENLIAQLPGEKKNGLFGNLIALSLGLTPNFKSNFDLAEDAKLQLSKDTYDDDLDNLLAQIGDQYADLFLAAKNLSDAILLSDILRVNTEITKAPLSASMIKRYDEHHQDLTLLKALVRQQLPEKYKEIFFDQSKNGYAGYIDGGASQEEFYKFIKPILEKMDGTEELLVKLNREDLLRKQRTFDNGSIPHQIHLGELHAILRRQEDFYPFLKDNREKIEKILTFRIPYYVGPLARGNSRFAWMTRKSEETITPWNFEEVVDKGASAQSFIERMTNFDKNLPNEKVLPKHSLLYEYFTVYNELTKVKYVTEGMRKPAFLSGEQKKAIVDLLFKTNRKVTVKQLKEDYFKKIECFDSVEISGVEDRFNASLGTYHDLLKIIKDKDFLDNEENEDILEDIVLTLTLFEDREMIEERLKTYAHLFDDKVMKQLKRRRYTGWGRLSRKLINGIRDKQSGKTILDFLKSDGFANRNFMQLIHDDSLTFKEDIQKAQVSGQGDSLHEHIANLAGSPAIKKGILQTVKVVDELVKVMGRHKPENIVIEMARENQTTQKGQKNSRERMKRIEEGIKELGSQILKEHPVENTQLQNEKLYLYYLQNGRDMYVDQELDINRLSDYDVDHIVPQSFLKDDSIDNKVLTRSDKARGKSDNVPSEEVVKKMKNYWRQLLNAKLITQRKFDNLTKAERGGLSELDKAGFIKRQLVETRQITKHVAQILDSRMNTKYDENDKLIREVKVITLKSKLVSDFRKDFQFYKVREINNYHHAHDAYLNAVVGTALIKKYPKLESEFVYGDYKVYDVRKMIAKSEQEIGKATAKYFFYSNIMNFFKTEITLANGEIRKRPLIETNGETGEIVWDKGRDFATVRKVLSMPQVNIVKKTEVQTGGFSKESILPKRNSDKLIARKKDWDPKKYGGFDSPTVAYSVLVVAKVEKGKSKKLKSVKELLGITIMERSSFEKNPIDFLEAKGYKEVKKDLIIKLPKYSLFELENGRKRMLASAGELQKGNELALPSKYVNFLYLASHYEKLKGSPEDNEQKQLFVEQHKHYLDEIIEQISEFSKRVILADANLDKVLSAYNKHRDKPIREQAENIIHLFTLTNLGAPAAFKYFDTTIDRKRYTSTKEVLDATLIHQSITGLYETRIDLSQLGGDGGGSSGGSGGGGGIPWLMKKPLQLTTLVPLQEYEERLLKQTMLTGSYKEKLQSLFLKYDALWQHWENQVGHRRIKPHHIATGTVNPRPQKQYPINPKAKASIQTVINDLLKQGVLIQQNSIMNTPVYPVPKPDGKWRMVLDYREVNKTIPLIAAQNQHSAGILSSIFRGKYKTTLDLSNGFWAHSITPESYWLTAFTWLGQQYCWTRLPQGFLNSPALFNADVVDLLKEVPNVQVYVDDIYISHDDPREHLEQLEKVFSLLLNAGYVVSLKKSEIAQHEVEFLGFNITKEGRGLTETFKQKLLNITPPRDLKQLQSILGKLNFARNFIPNFSELVKPLYNIIATAPGKYITWTTDNSQQLQNIISMLNSAENLEERNPEVRLIMKVNTSPSAGYIRFYNEFAKRPIMYLNYVYTKAEVKFTNTEKLLTTIHKGLIKALDLGMGQEILVYSPIVSMTKIQKTPLPERKALPIRWITWMSYLEDPRIQFHYDKTLPELQQVPTVTDDIIAKIKHPSEFSMVFYTDGSAIKHPNVNKSHNAGMGIAQVQFKPEFTVINTWSIPLGDHTAQLAEVAAVEFACKKALKIDGPVLIVTDSFYVAESVNKELPYWQSNGFFNNKKKPLKHVSKWKSIADCIQLKPDIIIIHEKGHQPTASTFHTEGNNLADKLATQGSYVVNAGKRTADGSEFEKRTADGSEFESPKKKAKVE

SEQ ID NO: 588 - protein, 2084 aa, synthetic construct
MPAAKRVKLDGGDKKYSIGLDIGTNSVGWAVITDEYKVPSKKFKVLGNTDRHSIKKNLIGALLFDSGETAEATRLKRTARRRYTRRKNRICYLQEIFSNEMAKVDDSFFHRLEESFLVEEDKKHERHPIFGNIVDEVAYHEKYPTIYHLRKKLVDSTDKADLRLIYLALAHMIKFRGHFLIEGDLNPDNSDVDKLFIQLVQTYNQLFEENPINASGVDAKAILSARLSKSRRLENLIAQLPGEKKNGLFGNLIALSLGLTPNFKSNFDLAEDAKLQLSKDTYDDDLDNLLAQIGDQYADLFLAAKNLSDAILLSDILRVNTEITKAPLSASMIKRYDEHHQDLTLLKALVRQQLPEKYKEIFFDQSKNGYAGYIDGGASQEEFYKFIKPILEKMDGTEELLVKLNREDLLRKQRTFDNGSIPHQIHLGELHAILRRQEDFYPFLKDNREKIEKILTFRIPYYVGPLARGNSRFAWMTRKSEETITPWNFEEVVDKGASAQSFIERMTNFDKNLPNEKVLPKHSLLYEYFTVYNELTKVKYVTEGMRKPAFLSGEQKKAIVDLLFKTNRKVTVKQLKEDYFKKIECFDSVEISGVEDRFNASLGTYHDLLKIIKDKDFLDNEENEDILEDIVLTLTLFEDREMIEERLKTYAHLFDDKVMKQLKRRRYTGWGRLSRKLINGIRDKQSGKTILDFLKSDGFANRNFMQLIHDDSLTFKEDIQKAQVSGQGDSLHEHIANLAGSPAIKKGILQTVKVVDELVKVMGRHKPENIVIEMARENQTTQKGQKNSRERMKRIEEGIKELGSQILKEHPVENTQLQNEKLYLYYLQNGRDMYVDQELDINRLSDYDVDHIVPQSFLKDDSIDNKVLTRSDKARGKSDNVPSEEVVKKMKNYWRQLLNAKLITQRKFDNLTKAERGGLSELDKAGFIKRQLVETRQITKHVAQILDSRMNTKYDENDKLIREVKVITLKSKLVSDFRKDFQFYKVREINNYHHAHDAYLNAVVGTALIKKYPKLESEFVYGDYKVYDVRKMIAKSEQEIGKATAKYFFYSNIMNFFKTEITLANGEIRKRPLIETNGETGEIVWDKGRDFATVRKVLSMPQVNIVKKTEVQTGGFSKESILPKRNSDKLIARKKDWDPKKYGGFDSPTVAYSVLVVAKVEKGKSKKLKSVKELLGITIMERSSFEKNPIDFLEAKGYKEVKKDLIIKLPKYSLFELENGRKRMLASAGELQKGNELALPSKYVNFLYLASHYEKLKGSPEDNEQKQLFVEQHKHYLDEIIEQISEFSKRVILADANLDKVLSAYNKHRDKPIREQAENIIHLFTLTNLGAPAAFKYFDTTIDRKRYTSTKEVLDATLIHQSITGLYETRIDLSQLGGDGGGGGEAAAKGGIPWLMKKPLQLTTLVPLQEYEERLLKQTMLTGSYKEKLQSLFLKYDALWQHWENQVGHRRIKPHHIATGTVNPRPQKQYPINPKAKASIQTVINDLLKQGVLIQQNSIMNTPVYPVPKPDGKWRMVLDYREVNKTIPLIAAQNQHSAGILSSIFRGKYKTTLDLSNGFWAHSITPESYWLTAFTWLGQQYCWTRLPQGFLNSPALFNADVVDLLKEVPNVQVYVDDIYISHDDPREHLEQLEKVFSLLLNAGYVVSLKKSEIAQHEVEFLGFNITKEGRGLTETFKQKLLNITPPRDLKQLQSILGKLNFARNFIPNFSELVKPLYNIIATAPGKYITWTTDNSQQLQNIISMLNSAENLEERNPEVRLIMKVNTSPSAGYIRFYNEFAKRPIMYLNYVYTKAEVKFTNTEKLLTTIHKGLIKALDLGMGQEILVYSPIVSMTKIQKTPLPERKALPIRWITWMSYLEDPRIQFHYDKTLPELQQVPTVTDDIIAKIKHPSEFSMVFYTDGSAIKHPNVNKSHNAGMGIAQVQFKPEFTVINTWSIPLGDHTAQLAEVAAVEFACKKALKIDGPVLIVTDSFYVAESVNKELPYWQSNGFFNNKKKPLKHVSKWKSIADCIQLKPDIIIIHEKGHQPTASTFHTEGNNLADKLATQGSYVVNAGKRTADGSEFEKRTADGSEFESPKKKAKVE

SEQ ID NO: 589 - protein, 2085 aa, synthetic construct
MPAAKRVKLDGGDKKYSIGLDIGTNSVGWAVITDEYKVPSKKFKVLGNTDRHSIKKNLIGALLFDSGETAEATRLKRTARRRYTRRKNRICYLQEIFSNEMAKVDDSFFHRLEESFLVEEDKKHERHPIFGNIVDEVAYHEKYPTIYHLRKKLVDSTDKADLRLIYLALAHMIKFRGHFLIEGDLNPDNSDVDKLFIQLVQTYNQLFEENPINASGVDAKAILSARLSKSRRLENLIAQLPGEKKNGLFGNLIALSLGLTPNFKSNFDLAEDAKLQLSKDTYDDDLDNLLAQIGDQYADLFLAAKNLSDAILLSDILRVNTEITKAPLSASMIKRYDEHHQDLTLLKALVRQQLPEKYKEIFFDQSKNGYAGYIDGGASQEEFYKFIKPILEKMDGTEELLVKLNREDLLRKQRTFDNGSIPHQIHLGELHAILRRQEDFYPFLKDNREKIEKILTFRIPYYVGPLARGNSRFAWMTRKSEETITPWNFEEVVDKGASAQSFIERMTNFDKNLPNEKVLPKHSLLYEYFTVYNELTKVKYVTEGMRKPAFLSGEQKKAIVDLLFKTNRKVTVKQLKEDYFKKIECFDSVEISGVEDRFNASLGTYHDLLKIIKDKDFLDNEENEDILEDIVLTLTLFEDREMIEERLKTYAHLFDDKVMKQLKRRRYTGWGRLSRKLINGIRDKQSGKTILDFLKSDGFANRNFMQLIHDDSLTFKEDIQKAQVSGQGDSLHEHIANLAGSPAIKKGILQTVKVVDELVKVMGRHKPENIVIEMARENQTTQKGQKNSRERMKRIEEGIKELGSQILKEHPVENTQLQNEKLYLYYLQNGRDMYVDQELDINRLSDYDVDHIVPQSFLKDDSIDNKVLTRSDKARGKSDNVPSEEVVKKMKNYWRQLLNAKLITQRKFDNLTKAERGGLSELDKAGFIKRQLVETRQITKHVAQILDSRMNTKYDENDKLIREVKVITLKSKLVSDFRKDFQFYKVREINNYHHAHDAYLNAVVGTALIKKYPKLESEFVYGDYKVYDVRKMIAKSEQEIGKATAKYFFYSNIMNFFKTEITLANGEIRKRPLIETNGETGEIVWDKGRDFATVRKVLSMPQVNIVKKTEVQTGGFSKESILPKRNSDKLIARKKDWDPKKYGGFDSPTVAYSVLVVAKVEKGKSKKLKSVKELLGITIMERSSFEKNPIDFLEAKGYKEVKKDLIIKLPKYSLFELENGRKRMLASAGELQKGNELALPSKYVNFLYLASHYEKLKGSPEDNEQKQLFVEQHKHYLDEIIEQISEFSKRVILADANLDKVLSAYNKHRDKPIREQAENIIHLFTLTNLGAPAAFKYFDTTIDRKRYTSTKEVLDATLIHQSITGLYETRIDLSQLGGDGGGGSGSSPAPGGIPWLMKKPLQLTTLVPLQEYEERLLKQTMLTGSYKEKLQSLFLKYDALWQHWENQVGHRRIKPHHIATGTVNPRPQKQYPINPKAKASIQTVINDLLKQGVLIQQNSIMNTPVYPVPKPDGKWRMVLDYREVNKTIPLIAAQNQHSAGILSSIFRGKYKTTLDLSNGFWAHSITPESYWLTAFTWLGQQYCWTRLPQGFLNSPALFNADVVDLLKEVPNVQVYVDDIYISHDDPREHLEQLEKVFSLLLNAGYVVSLKKSEIAQHEVEFLGFNITKEGRGLTETFKQKLLNITPPRDLKQLQSILGKLNFARNFIPNFSELVKPLYNIIATAPGKYITWTTDNSQQLQNIISMLNSAENLEERNPEVRLIMKVNTSPSAGYIRFYNEFAKRPIMYLNYVYTKAEVKFTNTEKLLTTIHKGLIKALDLGMGQEILVYSPIVSMTKIQKTPLPERKALPIRWITWMSYLEDPRIQFHYDKTLPELQQVPTVTDDIIAKIKHPSEFSMVFYTDGSAIKHPNVNKSHNAGMGIAQVQFKPEFTVINTWSIPLGDHTAQLAEVAAVEFACKKALKIDGPVLIVTDSFYVAESVNKELPYWQSNGFFNNKKKPLKHVSKWKSIADCIQLKPDIIIIHEKGHQPTASTFHTEGNNLADKLATQGSYVVNAGKRTADGSEFEKRTADGSEFESPKKKAKVE

SEQ ID NO: 590 - protein, 2195 aa, synthetic construct
MPAAKRVKLDGGDKKYSIGLDIGTNSVGWAVITDEYKVPSKKFKVLGNTDRHSIKKNLIGALLFDSGETAEATRLKRTARRRYTRRKNRICYLQEIFSNEMAKVDDSFFHRLEESFLVEEDKKHERHPIFGNIVDEVAYHEKYPTIYHLRKKLVDSTDKADLRLIYLALAHMIKFRGHFLIEGDLNPDNSDVDKLFIQLVQTYNQLFEENPINASGVDAKAILSARLSKSRRLENLIAQLPGEKKNGLFGNLIALSLGLTPNFKSNFDLAEDAKLQLSKDTYDDDLDNLLAQIGDQYADLFLAAKNLSDAILLSDILRVNTEITKAPLSASMIKRYDEHHQDLTLLKALVRQQLPEKYKEIFFDQSKNGYAGYIDGGASQEEFYKFIKPILEKMDGTEELLVKLNREDLLRKQRTFDNGSIPHQIHLGELHAILRRQEDFYPFLKDNREKIEKILTFRIPYYVGPLARGNSRFAWMTRKSEETITPWNFEEVVDKGASAQSFIERMTNFDKNLPNEKVLPKHSLLYEYFTVYNELTKVKYVTEGMRKPAFLSGEQKKAIVDLLFKTNRKVTVKQLKEDYFKKIECFDSVEISGVEDRFNASLGTYHDLLKIIKDKDFLDNEENEDILEDIVLTLTLFEDREMIEERLKTYAHLFDDKVMKQLKRRRYTGWGRLSRKLINGIRDKQSGKTILDFLKSDGFANRNFMQLIHDDSLTFKEDIQKAQVSGQGDSLHEHIANLAGSPAIKKGILQTVKVVDELVKVMGRHKPENIVIEMARENQTTQKGQKNSRERMKRIEEGIKELGSQILKEHPVENTQLQNEKLYLYYLQNGRDMYVDQELDINRLSDYDVDHIVPQSFLKDDSIDNKVLTRSDKARGKSDNVPSEEVVKKMKNYWRQLLNAKLITQRKFDNLTKAERGGLSELDKAGFIKRQLVETRQITKHVAQILDSRMNTKYDENDKLIREVKVITLKSKLVSDFRKDFQFYKVREINNYHHAHDAYLNAVVGTALIKKYPKLESEFVYGDYKVYDVRKMIAKSEQEIGKATAKYFFYSNIMNFFKTEITLANGEIRKRPLIETNGETGEIVWDKGRDFATVRKVLSMPQVNIVKKTEVQTGGFSKESILPKRNSDKLIARKKDWDPKKYGGFDSPTVAYSVLVVAKVEKGKSKKLKSVKELLGITIMERSSFEKNPIDFLEAKGYKEVKKDLIIKLPKYSLFELENGRKRMLASAGELQKGNELALPSKYVNFLYLASHYEKLKGSPEDNEQKQLFVEQHKHYLDEIIEQISEFSKRVILADANLDKVLSAYNKHRDKPIREQAENIIHLFTLTNLGAPAAFKYFDTTIDRKRYTSTKEVLDATLIHQSITGLYETRIDLSQLGGDGGEAAAKEAAAKEAAAKEAAAKEAAAKEAAAKGGMDPLQLLQPLEAEIKGTKLKAHWNSGATITCVPQAFLEEEVPIKNIWIKTIHGEKEQPVYYLTFKIQGRKVEAEVISSPYDYILVSPSDIPWLMKKPLQLTTLVPLQEYEERLLKQTMLTGSYKEKLQSLFLKYDALWQHWENQVGHRRIKPHHIATGTVNPRPQKQYPINPKAKASIQTVINDLLKQGVLIQQNSIMNTPVYPVPKPDGKWRMVLDYREVNKTIPLIAAQNQHSAGILSSIFRGKYKTTLDLSNGFWAHSITPESYWLTAFTWLGQQYCWTRLPQGFLNSPALFNADVVDLLKEVPNVQVYVDDIYISHDDPREHLEQLEKVFSLLLNAGYVVSLKKSEIAQHEVEFLGFNITKEGRGLTETFKQKLLNITPPRDLKQLQSILGLLNFARNFIPNFSELVKPLYNIIATAPGKYITWTTDNSQQLQNIISMLNSAENLEERNPEVRLIMKVNTSPSAGYIRFYNEFAKRPIMYLNYVYTKAEVKFTNTEKLLTTIHKGLIKALDLGMGQEILVYSPIVSMTKIQKTPLPERKALPIRWITWMSYLEDPRIQFHYDKTLPELQQVPTVTDDIIAKIKHPSEFSMVFYTDGSAIKHPNVNKSHNAGMGIAQVQFKPEFTVINTWSIPLGDHTAQLAEVAAVEFACKKALKIDGPVLIVTDSFYVAESVNKELPYWQSNGFFNNKKKPLKHVSKWKSIADCIQLKPDIIIIHEKGHQPTASTFHTEGNNLADKLATQGSYVVNAGKRTADGSEFEKRTADGSEFESPKKKAKVE

SEQ ID NO: 591 - protein, 2211 aa, synthetic construct
MPAAKRVKLDGGDKKYSIGLDIGTNSVGWAVITDEYKVPSKKFKVLGNTDRHSIKKNLIGALLFDSGETAEATRLKRTARRRYTRRKNRICYLQEIFSNEMAKVDDSFFHRLEESFLVEEDKKHERHPIFGNIVDEVAYHEKYPTIYHLRKKLVDSTDKADLRLIYLALAHMIKFRGHFLIEGDLNPDNSDVDKLFIQLVQTYNQLFEENPINASGVDAKAILSARLSKSRRLENLIAQLPGEKKNGLFGNLIALSLGLTPNFKSNFDLAEDAKLQLSKDTYDDDLDNLLAQIGDQYADLFLAAKNLSDAILLSDILRVNTEITKAPLSASMIKRYDEHHQDLTLLKALVRQQLPEKYKEIFFDQSKNGYAGYIDGGASQEEFYKFIKPILEKMDGTEELLVKLNREDLLRKQRTFDNGSIPHQIHLGELHAILRRQEDFYPFLKDNREKIEKILTFRIPYYVGPLARGNSRFAWMTRKSEETITPWNFEEVVDKGASAQSFIERMTNFDKNLPNEKVLPKHSLLYEYFTVYNELTKVKYVTEGMRKPAFLSGEQKKAIVDLLFKTNRKVTVKQLKEDYFKKIECFDSVEISGVEDRFNASLGTYHDLLKIIKDKDFLDNEENEDILEDIVLTLTLFEDREMIEERLKTYAHLFDDKVMKQLKRRRYTGWGRLSRKLINGIRDKQSGKTILDFLKSDGFANRNFMQLIHDDSLTFKEDIQKAQVSGQGDSLHEHIANLAGSPAIKKGILQTVKVVDELVKVMGRHKPENIVIEMARENQTTQKGQKNSRERMKRIEEGIKELGSQILKEHPVENTQLQNEKLYLYYLQNGRDMYVDQELDINRLSDYDVDHIVPQSFLKDDSIDNKVLTRSDKARGKSDNVPSEEVVKKMKNYWRQLLNAKLITQRKFDNLTKAERGGLSELDKAGFIKRQLVETRQITKHVAQILDSRMNTKYDENDKLIREVKVITLKSKLVSDFRKDFQFYKVREINNYHHAHDAYLNAVVGTALIKKYPKLESEFVYGDYKVYDVRKMIAKSEQEIGKATAKYFFYSNIMNFFKTEITLANGEIRKRPLIETNGETGEIVWDKGRDFATVRKVLSMPQVNIVKKTEVQTGGFSKESILPKRNSDKLIARKKDWDPKKYGGFDSPTVAYSVLVVAKVEKGKSKKLKSVKELLGITIMERSSFEKNPIDFLEAKGYKEVKKDLIIKLPKYSLFELENGRKRMLASAGELQKGNELALPSKYVNFLYLASHYEKLKGSPEDNEQKQLFVEQHKHYLDEIIEQISEFSKRVILADANLDKVLSAYNKHRDKPIREQAENIIHLFTLTNLGAPAAFKYFDTTIDRKRYTSTKEVLDATLIHQSITGLYETRIDLSQLGGDGGAEAAAKEAAAKEAAAKEAAAKALEAEAAAKEAAAKEAAAKEAAAKAGGMDPLQLLQPLEAEIKGTKLKAHWNSGATITCVPQAFLEEEVPIKNIWIKTIHGEKEQPVYYLTFKIQGRKVEAEVISSPYDYILVSPSDIPWLMKKPLQLTTLVPLQEYEERLLKQTMLTGSYKEKLQSLFLKYDALWQHWENQVGHRRIKPHHIATGTVNPRPQKQYPINPKAKASIQTVINDLLKQGVLIQQNSIMNTPVYPVPKPDGKWRMVLDYREVNKTIPLIAAQNQHSAGILSSIFRGKYKTTLDLSNGFWAHSITPESYWLTAFTWLGQQYCWTRLPQGFLNSPALFNADVVDLLKEVPNVQVYVDDIYISHDDPREHLEQLEKVFSLLLNAGYVVSLKKSEIAQHEVEFLGFNITKEGRGLTETFKQKLLNITPPRDLKQLQSILGLLNFARNFIPNFSELVKPLYNIIATAPGKYITWTTDNSQQLQNIISMLNSAENLEERNPEVRLIMKVNTSPSAGYIRFYNEFAKRPIMYLNYVYTKAEVKFTNTEKLLTTIHKGLIKALDLGMGQEILVYSPIVSMTKIQKTPLPERKALPIRWITWMSYLEDPRIQFHYDKTLPELQQVPTVTDDIIAKIKHPSEFSMVFYTDGSAIKHPNVNKSHNAGMGIAQVQFKPEFTVINTWSIPLGDHTAQLAEVAAVEFACKKALKIDGPVLIVTDSFYVAESVNKELPYWQSNGFFNNKKKPLKHVSKWKSIADCIQLKPDIIIIHEKGHQPTASTFHTEGNNLADKLATQGSYVVNAGKRTADGSEFEKRTADGSEFESPKKKAKVE

SEQ ID NO: 592 - protein, 2195 aa, synthetic construct
MPAAKRVKLDGGDKKYSIGLDIGTNSVGWAVITDEYKVPSKKFKVLGNTDRHSIKKNLIGALLFDSGETAEATRLKRTARRRYTRRKNRICYLQEIFSNEMAKVDDSFFHRLEESFLVEEDKKHERHPIFGNIVDEVAYHEKYPTIYHLRKKLVDSTDKADLRLIYLALAHMIKFRGHFLIEGDLNPDNSDVDKLFIQLVQTYNQLFEENPINASGVDAKAILSARLSKSRRLENLIAQLPGEKKNGLFGNLIALSLGLTPNFKSNFDLAEDAKLQLSKDTYDDDLDNLLAQIGDQYADLFLAAKNLSDAILLSDILRVNTEITKAPLSASMIKRYDEHHQDLTLLKALVRQQLPEKYKEIFFDQSKNGYAGYIDGGASQEEFYKFIKPILEKMDGTEELLVKLNREDLLRKQRTFDNGSIPHQIHLGELHAILRRQEDFYPFLKDNREKIEKILTFRIPYYVGPLARGNSRFAWMTRKSEETITPWNFEEVVDKGASAQSFIERMTNFDKNLPNEKVLPKHSLLYEYFTVYNELTKVKYVTEGMRKPAFLSGEQKKAIVDLLFKTNRKVTVKQLKEDYFKKIECFDSVEISGVEDRFNASLGTYHDLLKIIKDKDFLDNEENEDILEDIVLTLTLFEDREMIEERLKTYAHLFDDKVMKQLKRRRYTGWGRLSRKLINGIRDKQSGKTILDFLKSDGFANRNFMQLIHDDSLTFKEDIQKAQVSGQGDSLHEHIANLAGSPAIKKGILQTVKVVDELVKVMGRHKPENIVIEMARENQTTQKGQKNSRERMKRIEEGIKELGSQILKEHPVENTQLQNEKLYLYYLQNGRDMYVDQELDINRLSDYDVDHIVPQSFLKDDSIDNKVLTRSDKARGKSDNVPSEEVVKKMKNYWRQLLNAKLITQRKFDNLTKAERGGLSELDKAGFIKRQLVETRQITKHVAQILDSRMNTKYDENDKLIREVKVITLKSKLVSDFRKDFQFYKVREINNYHHAHDAYLNAVVGTALIKKYPKLESEFVYGDYKVYDVRKMIAKSEQEIGKATAKYFFYSNIMNFFKTEITLANGEIRKRPLIETNGETGEIVWDKGRDFATVRKVLSMPQVNIVKKTEVQTGGFSKESILPKRNSDKLIARKKDWDPKKYGGFDSPTVAYSVLVVAKVEKGKSKKLKSVKELLGITIMERSSFEKNPIDFLEAKGYKEVKKDLIIKLPKYSLFELENGRKRMLASAGELQKGNELALPSKYVNFLYLASHYEKLKGSPEDNEQKQLFVEQHKHYLDEIIEQISEFSKRVILADANLDKVLSAYNKHRDKPIREQAENIIHLFTLTNLGAPAAFKYFDTTIDRKRYTSTKEVLDATLIHQSITGLYETRIDLSQLGGDGGGGGGSGGGGSGGGGSGGGGSGGGGSGGGGSGGMDPLQLLQPLEAEIKGTKLKAHWNSGATITCVPQAFLEEEVPIKNIWIKTIHGEKEQPVYYLTFKIQGRKVEAEVISSPYDYILVSPSDIPWLMKKPLQLTTLVPLQEYEERLLKQTMLTGSYKEKLQSLFLKYDALWQHWENQVGHRRIKPHHIATGTVNPRPQKQYPINPKAKASIQTVINDLLKQGVLIQQNSIMNTPVYPVPKPDGKWRMVLDYREVNKTIPLIAAQNQHSAGILSSIFRGKYKTTLDLSNGFWAHSITPESYWLTAFTWLGQQYCWTRLPQGFLNSPALFNADVVDLLKEVPNVQVYVDDIYISHDDPREHLEQLEKVFSLLLNAGYVVSLKKSEIAQHEVEFLGFNITKEGRGLTETFKQKLLNITPPRDLKQLQSILGLLNFARNFIPNFSELVKPLYNIIATAPGKYITWTTDNSQQLQNIISMLNSAENLEERNPEVRLIMKVNTSPSAGYIRFYNEFAKRPIMYLNYVYTKAEVKFTNTEKLLTTIHKGLIKALDLGMGQEILVYSPIVSMTKIQKTPLPERKALPIRWITWMSYLEDPRIQFHYDKTLPELQQVPTVTDDIIAKIKHPSEFSMVFYTDGSAIKHPNVNKSHNAGMGIAQVQFKPEFTVINTWSIPLGDHTAQLAEVAAVEFACKKALKIDGPVLIVTDSFYVAESVNKELPYWQSNGFFNNKKKPLKHVSKWKSIADCIQLKPDIIIIHEKGHQPTASTFHTEGNNLADKLATQGSYVVNAGKRTADGSEFEKRTADGSEFESPKKKAKVE

SEQ ID NO: 593 - protein, 2190 aa, synthetic construct
MPAAKRVKLDGGDKKYSIGLDIGTNSVGWAVITDEYKVPSKKFKVLGNTDRHSIKKNLIGALLFDSGETAEATRLKRTARRRYTRRKNRICYLQEIFSNEMAKVDDSFFHRLEESFLVEEDKKHERHPIFGNIVDEVAYHEKYPTIYHLRKKLVDSTDKADLRLIYLALAHMIKFRGHFLIEGDLNPDNSDVDKLFIQLVQTYNQLFEENPINASGVDAKAILSARLSKSRRLENLIAQLPGEKKNGLFGNLIALSLGLTPNFKSNFDLAEDAKLQLSKDTYDDDLDNLLAQIGDQYADLFLAAKNLSDAILLSDILRVNTEITKAPLSASMIKRYDEHHQDLTLLKALVRQQLPEKYKEIFFDQSKNGYAGYIDGGASQEEFYKFIKPILEKMDGTEELLVKLNREDLLRKQRTFDNGSIPHQIHLGELHAILRRQEDFYPFLKDNREKIEKILTFRIPYYVGPLARGNSRFAWMTRKSEETITPWNFEEVVDKGASAQSFIERMTNFDKNLPNEKVLPKHSLLYEYFTVYNELTKVKYVTEGMRKPAFLSGEQKKAIVDLLFKTNRKVTVKQLKEDYFKKIECFDSVEISGVEDRFNASLGTYHDLLKIIKDKDFLDNEENEDILEDIVLTLTLFEDREMIEERLKTYAHLFDDKVMKQLKRRRYTGWGRLSRKLINGIRDKQSGKTILDFLKSDGFANRNFMQLIHDDSLTFKEDIQKAQVSGQGDSLHEHIANLAGSPAIKKGILQTVKVVDELVKVMGRHKPENIVIEMARENQTTQKGQKNSRERMKRIEEGIKELGSQILKEHPVENTQLQNEKLYLYYLQNGRDMYVDQELDINRLSDYDVDHIVPQSFLKDDSIDNKVLTRSDKARGKSDNVPSEEVVKKMKNYWRQLLNAKLITQRKFDNLTKAERGGLSELDKAGFIKRQLVETRQITKHVAQILDSRMNTKYDENDKLIREVKVITLKSKLVSDFRKDFQFYKVREINNYHHAHDAYLNAVVGTALIKKYPKLESEFVYGDYKVYDVRKMIAKSEQEIGKATAKYFFYSNIMNFFKTEITLANGEIRKRPLIETNGETGEIVWDKGRDFATVRKVLSMPQVNIVKKTEVQTGGFSKESILPKRNSDKLIARKKDWDPKKYGGFDSPTVAYSVLVVAKVEKGKSKKLKSVKELLGITIMERSSFEKNPIDFLEAKGYKEVKKDLIIKLPKYSLFELENGRKRMLASAGELQKGNELALPSKYVNFLYLASHYEKLKGSPEDNEQKQLFVEQHKHYLDEIIEQISEFSKRVILADANLDKVLSAYNKHRDKPIREQAENIIHLFTLTNLGAPAAFKYFDTTIDRKRYTSTKEVLDATLIHQSITGLYETRIDLSQLGGDGGEAAAKEAAAKEAAAKEAAAKEAAAKGGMDPLQLLQPLEAEIKGTKLKAHWNSGATITCVPQAFLEEEVPIKNIWIKTIHGEKEQPVYYLTFKIQGRKVEAEVISSPYDYILVSPSDIPWLMKKPLQLTTLVPLQEYEERLLKQTMLTGSYKEKLQSLFLKYDALWQHWENQVGHRRIKPHHIATGTVNPRPQKQYPINPKAKASIQTVINDLLKQGVLIQQNSIMNTPVYPVPKPDGKWRMVLDYREVNKTIPLIAAQNQHSAGILSSIFRGKYKTTLDLSNGFWAHSITPESYWLTAFTWLGQQYCWTRLPQGFLNSPALFNADVVDLLKEVPNVQVYVDDIYISHDDPREHLEQLEKVFSLLLNAGYVVSLKKSEIAQHEVEFLGFNITKEGRGLTETFKQKLLNITPPRDLKQLQSILGLLNFARNFIPNFSELVKPLYNIIATAPGKYITWTTDNSQQLQNIISMLNSAENLEERNPEVRLIMKVNTSPSAGYIRFYNEFAKRPIMYLNYVYTKAEVKFTNTEKLLTTIHKGLIKALDLGMGQEILVYSPIVSMTKIQKTPLPERKALPIRWITWMSYLEDPRIQFHYDKTLPELQQVPTVTDDIIAKIKHPSEFSMVFYTDGSAIKHPNVNKSHNAGMGIAQVQFKPEFTVINTWSIPLGDHTAQLAEVAAVEFACKKALKIDGPVLIVTDSFYVAESVNKELPYWQSNGFFNNKKKPLKHVSKWKSIADCIQLKPDIIIIHEKGHQPTASTFHTEGNNLADKLATQGSYVVNAGKRTADGSEFEKRTADGSEFESPKKKAKVE

SEQ ID NO: 594 - protein, 2174 aa, synthetic construct
MPAAKRVKLDGGDKKYSIGLDIGTNSVGWAVITDEYKVPSKKFKVLGNTDRHSIKKNLIGALLFDSGETAEATRLKRTARRRYTRRKNRICYLQEIFSNEMAKVDDSFFHRLEESFLVEEDKKHERHPIFGNIVDEVAYHEKYPTIYHLRKKLVDSTDKADLRLIYLALAHMIKFRGHFLIEGDLNPDNSDVDKLFIQLVQTYNQLFEENPINASGVDAKAILSARLSKSRRLENLIAQLPGEKKNGLFGNLIALSLGLTPNFKSNFDLAEDAKLQLSKDTYDDDLDNLLAQIGDQYADLFLAAKNLSDAILLSDILRVNTEITKAPLSASMIKRYDEHHQDLTLLKALVRQQLPEKYKEIFFDQSKNGYAGYIDGGASQEEFYKFIKPILEKMDGTEELLVKLNREDLLRKQRTFDNGSIPHQIHLGELHAILRRQEDFYPFLKDNREKIEKILTFRIPYYVGPLARGNSRFAWMTRKSEETITPWNFEEVVDKGASAQSFIERMTNFDKNLPNEKVLPKHSLLYEYFTVYNELTKVKYVTEGMRKPAFLSGEQKKAIVDLLFKTNRKVTVKQLKEDYFKKIECFDSVEISGVEDRFNASLGTYHDLLKIIKDKDFLDNEENEDILEDIVLTLTLFEDREMIEERLKTYAHLFDDKVMKQLKRRRYTGWGRLSRKLINGIRDKQSGKTILDFLKSDGFANRNFMQLIHDDSLTFKEDIQKAQVSGQGDSLHEHIANLAGSPAIKKGILQTVKVVDELVKVMGRHKPENIVIEMARENQTTQKGQKNSRERMKRIEEGIKELGSQILKEHPVENTQLQNEKLYLYYLQNGRDMYVDQELDINRLSDYDVDHIVPQSFLKDDSIDNKVLTRSDKARGKSDNVPSEEVVKKMKNYWRQLLNAKLITQRKFDNLTKAERGGLSELDKAGFIKRQLVETRQITKHVAQILDSRMNTKYDENDKLIREVKVITLKSKLVSDFRKDFQFYKVREINNYHHAHDAYLNAVVGTALIKKYPKLESEFVYGDYKVYDVRKMIAKSEQEIGKATAKYFFYSNIMNFFKTEITLANGEIRKRPLIETNGETGEIVWDKGRDFATVRKVLSMPQVNIVKKTEVQTGGFSKESILPKRNSDKLIARKKDWDPKKYGGFDSPTVAYSVLVVAKVEKGKSKKLKSVKELLGITIMERSSFEKNPIDFLEAKGYKEVKKDLIIKLPKYSLFELENGRKRMLASAGELQKGNELALPSKYVNFLYLASHYEKLKGSPEDNEQKQLFVEQHKHYLDEIIEQISEFSKRVILADANLDKVLSAYNKHRDKPIREQAENIIHLFTLTNLGAPAAFKYFDTTIDRKRYTSTKEVLDATLIHQSITGLYETRIDLSQLGGDGGGGGPAPGGSGGMDPLQLLQPLEAEIKGTKLKAHWNSGATITCVPQAFLEEEVPIKNIWIKTIHGEKEQPVYYLTFKIQGRKVEAEVISSPYDYILVSPSDIPWLMKKPLQLTTLVPLQEYEERLLKQTMLTGSYKEKLQSLFLKYDALWQHWENQVGHRRIKPHHIATGTVNPRPQKQYPINPKAKASIQTVINDLLKQGVLIQQNSIMNTPVYPVPKPDGKWRMVLDYREVNKTIPLIAAQNQHSAGILSSIFRGKYKTTLDLSNGFWAHSITPESYWLTAFTWLGQQYCWTRLPQGFLNSPALFNADVVDLLKEVPNVQVYVDDIYISHDDPREHLEQLEKVFSLLLNAGYVVSLKKSEIAQHEVEFLGFNITKEGRGLTETFKQKLLNITPPRDLKQLQSILGLLNFARNFIPNFSELVKPLYNIIATAPGKYITWTTDNSQQLQNIISMLNSAENLEERNPEVRLIMKVNTSPSAGYIRFYNEFAKRPIMYLNYVYTKAEVKFTNTEKLLTTIHKGLIKALDLGMGQEILVYSPIVSMTKIQKTPLPERKALPIRWITWMSYLEDPRIQFHYDKTLPELQQVPTVTDDIIAKIKHPSEFSMVFYTDGSAIKHPNVNKSHNAGMGIAQVQFKPEFTVINTWSIPLGDHTAQLAEVAAVEFACKKALKIDGPVLIVTDSFYVAESVNKELPYWQSNGFFNNKKKPLKHVSKWKSIADCIQLKPDIIIIHEKGHQPTASTFHTEGNNLADKLATQGSYVVNAGKRTADGSEFEKRTADGSEFESPKKKAKVE

SEQ ID NO: 595 - protein, 2176 aa, synthetic construct
MPAAKRVKLDGGDKKYSIGLDIGTNSVGWAVITDEYKVPSKKFKVLGNTDRHSIKKNLIGALLFDSGETAEATRLKRTARRRYTRRKNRICYLQEIFSNEMAKVDDSFFHRLEESFLVEEDKKHERHPIFGNIVDEVAYHEKYPTIYHLRKKLVDSTDKADLRLIYLALAHMIKFRGHFLIEGDLNPDNSDVDKLFIQLVQTYNQLFEENPINASGVDAKAILSARLSKSRRLENLIAQLPGEKKNGLFGNLIALSLGLTPNFKSNFDLAEDAKLQLSKDTYDDDLDNLLAQIGDQYADLFLAAKNLSDAILLSDILRVNTEITKAPLSASMIKRYDEHHQDLTLLKALVRQQLPEKYKEIFFDQSKNGYAGYIDGGASQEEFYKFIKPILEKMDGTEELLVKLNREDLLRKQRTFDNGSIPHQIHLGELHAILRRQEDFYPFLKDNREKIEKILTFRIPYYVGPLARGNSRFAWMTRKSEETITPWNFEEVVDKGASAQSFIERMTNFDKNLPNEKVLPKHSLLYEYFTVYNELTKVKYVTEGMRKPAFLSGEQKKAIVDLLFKTNRKVTVKQLKEDYFKKIECFDSVEISGVEDRFNASLGTYHDLLKIIKDKDFLDNEENEDILEDIVLTLTLFEDREMIEERLKTYAHLFDDKVMKQLKRRRYTGWGRLSRKLINGIRDKQSGKTILDFLKSDGFANRNFMQLIHDDSLTFKEDIQKAQVSGQGDSLHEHIANLAGSPAIKKGILQTVKVVDELVKVMGRHKPENIVIEMARENQTTQKGQKNSRERMKRIEEGIKELGSQILKEHPVENTQLQNEKLYLYYLQNGRDMYVDQELDINRLSDYDVDHIVPQSFLKDDSIDNKVLTRSDKARGKSDNVPSEEVVKKMKNYWRQLLNAKLITQRKFDNLTKAERGGLSELDKAGFIKRQLVETRQITKHVAQILDSRMNTKYDENDKLIREVKVITLKSKLVSDFRKDFQFYKVREINNYHHAHDAYLNAVVGTALIKKYPKLESEFVYGDYKVYDVRKMIAKSEQEIGKATAKYFFYSNIMNFFKTEITLANGEIRKRPLIETNGETGEIVWDKGRDFATVRKVLSMPQVNIVKKTEVQTGGFSKESILPKRNSDKLIARKKDWDPKKYGGFDSPTVAYSVLVVAKVEKGKSKKLKSVKELLGITIMERSSFEKNPIDFLEAKGYKEVKKDLIIKLPKYSLFELENGRKRMLASAGELQKGNELALPSKYVNFLYLASHYEKLKGSPEDNEQKQLFVEQHKHYLDEIIEQISEFSKRVILADANLDKVLSAYNKHRDKPIREQAENIIHLFTLTNLGAPAAFKYFDTTIDRKRYTSTKEVLDATLIHQSITGLYETRIDLSQLGGDGGGGSEAAAKPAPGGMDPLQLLQPLEAEIKGTKLKAHWNSGATITCVPQAFLEEEVPIKNIWIKTIHGEKEQPVYYLTFKIQGRKVEAEVISSPYDYILVSPSDIPWLMKKPLQLTTLVPLQEYEERLLKQTMLTGSYKEKLQSLFLKYDALWQHWENQVGHRRIKPHHIATGTVNPRPQKQYPINPKAKASIQTVINDLLKQGVLIQQNSIMNTPVYPVPKPDGKWRMVLDYREVNKTIPLIAAQNQHSAGILSSIFRGKYKTTLDLSNGFWAHSITPESYWLTAFTWLGQQYCWTRLPQGFLNSPALFNADVVDLLKEVPNVQVYVDDIYISHDDPREHLEQLEKVFSLLLNAGYVVSLKKSEIAQHEVEFLGFNITKEGRGLTETFKQKLLNITPPRDLKQLQSILGLLNFARNFIPNFSELVKPLYNIIATAPGKYITWTTDNSQQLQNIISMLNSAENLEERNPEVRLIMKVNTSPSAGYIRFYNEFAKRPIMYLNYVYTKAEVKFTNTEKLLTTIHKGLIKALDLGMGQEILVYSPIVSMTKIQKTPLPERKALPIRWITWMSYLEDPRIQFHYDKTLPELQQVPTVTDDIIAKIKHPSEFSMVFYTDGSAIKHPNVNKSHNAGMGIAQVQFKPEFTVINTWSIPLGDHTAQLAEVAAVEFACKKALKIDGPVLIVTDSFYVAESVNKELPYWQSNGFFNNKKKPLKHVSKWKSIADCIQLKPDIIIIHEKGHQPTASTFHTEGNNLADKLATQGSYVVNAGKRTADGSEFEKRTADGSEFESPKKKAKVE

SEQ ID NO: 596 - protein, 2180 aa, synthetic construct
MPAAKRVKLDGGDKKYSIGLDIGTNSVGWAVITDEYKVPSKKFKVLGNTDRHSIKKNLIGALLFDSGETAEATRLKRTARRRYTRRKNRICYLQEIFSNEMAKVDDSFFHRLEESFLVEEDKKHERHPIFGNIVDEVAYHEKYPTIYHLRKKLVDSTDKADLRLIYLALAHMIKFRGHFLIEGDLNPDNSDVDKLFIQLVQTYNQLFEENPINASGVDAKAILSARLSKSRRLENLIAQLPGEKKNGLFGNLIALSLGLTPNFKSNFDLAEDAKLQLSKDTYDDDLDNLLAQIGDQYADLFLAAKNLSDAILLSDILRVNTEITKAPLSASMIKRYDEHHQDLTLLKALVRQQLPEKYKEIFFDQSKNGYAGYIDGGASQEEFYKFIKPILEKMDGTEELLVKLNREDLLRKQRTFDNGSIPHQIHLGELHAILRRQEDFYPFLKDNREKIEKILTFRIPYYVGPLARGNSRFAWMTRKSEETITPWNFEEVVDKGASAQSFIERMTNFDKNLPNEKVLPKHSLLYEYFTVYNELTKVKYVTEGMRKPAFLSGEQKKAIVDLLFKTNRKVTVKQLKEDYFKKIECFDSVEISGVEDRFNASLGTYHDLLKIIKDKDFLDNEENEDILEDIVLTLTLFEDREMIEERLKTYAHLFDDKVMKQLKRRRYTGWGRLSRKLINGIRDKQSGKTILDFLKSDGFANRNFMQLIHDDSLTFKEDIQKAQVSGQGDSLHEHIANLAGSPAIKKGILQTVKVVDELVKVMGRHKPENIVIEMARENQTTQKGQKNSRERMKRIEEGIKELGSQILKEHPVENTQLQNEKLYLYYLQNGRDMYVDQELDINRLSDYDVDHIVPQSFLKDDSIDNKVLTRSDKARGKSDNVPSEEVVKKMKNYWRQLLNAKLITQRKFDNLTKAERGGLSELDKAGFIKRQLVETRQITKHVAQILDSRMNTKYDENDKLIREVKVITLKSKLVSDFRKDFQFYKVREINNYHHAHDAYLNAVVGTALIKKYPKLESEFVYGDYKVYDVRKMIAKSEQEIGKATAKYFFYSNIMNFFKTEITLANGEIRKRPLIETNGETGEIVWDKGRDFATVRKVLSMPQVNIVKKTEVQTGGFSKESILPKRNSDKLIARKKDWDPKKYGGFDSPTVAYSVLVVAKVEKGKSKKLKSVKELLGITIMERSSFEKNPIDFLEAKGYKEVKKDLIIKLPKYSLFELENGRKRMLASAGELQKGNELALPSKYVNFLYLASHYEKLKGSPEDNEQKQLFVEQHKHYLDEIIEQISEFSKRVILADANLDKVLSAYNKHRDKPIREQAENIIHLFTLTNLGAPAAFKYFDTTIDRKRYTSTKEVLDATLIHQSITGLYETRIDLSQLGGDGGEAAAKGGGGSEAAAKGGMDPLQLLQPLEAEIKGTKLKAHWNSGATITCVPQAFLEEEVPIKNIWIKTIHGEKEQPVYYLTFKIQGRKVEAEVISSPYDYILVSPSDIPWLMKKPLQLTTLVPLQEYEERLLKQTMLTGSYKEKLQSLFLKYDALWQHWENQVGHRRIKPHHIATGTVNPRPQKQYPINPKAKASIQTVINDLLKQGVLIQQNSIMNTPVYPVPKPDGKWRMVLDYREVNKTIPLIAAQNQHSAGILSSIFRGKYKTTLDLSNGFWAHSITPESYWLTAFTWLGQQYCWTRLPQGFLNSPALFNADVVDLLKEVPNVQVYVDDIYISHDDPREHLEQLEKVFSLLLNAGYVVSLKKSEIAQHEVEFLGFNITKEGRGLTETFKQKLLNITPPRDLKQLQSILGLLNFARNFIPNFSELVKPLYNIIATAPGKYITWTTDNSQQLQNIISMLNSAENLEERNPEVRLIMKVNTSPSAGYIRFYNEFAKRPIMYLNYVYTKAEVKFTNTEKLLTTIHKGLIKALDLGMGQEILVYSPIVSMTKIQKTPLPERKALPIRWITWMSYLEDPRIQFHYDKTLPELQQVPTVTDDIIAKIKHPSEFSMVFYTDGSAIKHPNVNKSHNAGMGIAQVQFKPEFTVINTWSIPLGDHTAQLAEVAAVEFACKKALKIDGPVLIVTDSFYVAESVNKELPYWQSNGFFNNKKKPLKHVSKWKSIADCIQLKPDIIIIHEKGHQPTASTFHTEGNNLADKLATQGSYVVNAGKRTADGSEFEKRTADGSEFESPKKKAKVE

SEQ ID NO: 597 - protein, 2175 aa, synthetic construct
MPAAKRVKLDGGDKKYSIGLDIGTNSVGWAVITDEYKVPSKKFKVLGNTDRHSIKKNLIGALLFDSGETAEATRLKRTARRRYTRRKNRICYLQEIFSNEMAKVDDSFFHRLEESFLVEEDKKHERHPIFGNIVDEVAYHEKYPTIYHLRKKLVDSTDKADLRLIYLALAHMIKFRGHFLIEGDLNPDNSDVDKLFIQLVQTYNQLFEENPINASGVDAKAILSARLSKSRRLENLIAQLPGEKKNGLFGNLIALSLGLTPNFKSNFDLAEDAKLQLSKDTYDDDLDNLLAQIGDQYADLFLAAKNLSDAILLSDILRVNTEITKAPLSASMIKRYDEHHQDLTLLKALVRQQLPEKYKEIFFDQSKNGYAGYIDGGASQEEFYKFIKPILEKMDGTEELLVKLNREDLLRKQRTFDNGSIPHQIHLGELHAILRRQEDFYPFLKDNREKIEKILTFRIPYYVGPLARGNSRFAWMTRKSEETITPWNFEEVVDKGASAQSFIERMTNFDKNLPNEKVLPKHSLLYEYFTVYNELTKVKYVTEGMRKPAFLSGEQKKAIVDLLFKTNRKVTVKQLKEDYFKKIECFDSVEISGVEDRFNASLGTYHDLLKIIKDKDFLDNEENEDILEDIVLTLTLFEDREMIEERLKTYAHLFDDKVMKQLKRRRYTGWGRLSRKLINGIRDKQSGKTILDFLKSDGFANRNFMQLIHDDSLTFKEDIQKAQVSGQGDSLHEHIANLAGSPAIKKGILQTVKVVDELVKVMGRHKPENIVIEMARENQTTQKGQKNSRERMKRIEEGIKELGSQILKEHPVENTQLQNEKLYLYYLQNGRDMYVDQELDINRLSDYDVDHIVPQSFLKDDSIDNKVLTRSDKARGKSDNVPSEEVVKKMKNYWRQLLNAKLITQRKFDNLTKAERGGLSELDKAGFIKRQLVETRQITKHVAQILDSRMNTKYDENDKLIREVKVITLKSKLVSDFRKDFQFYKVREINNYHHAHDAYLNAVVGTALIKKYPKLESEFVYGDYKVYDVRKMIAKSEQEIGKATAKYFFYSNIMNFFKTEITLANGEIRKRPLIETNGETGEIVWDKGRDFATVRKVLSMPQVNIVKKTEVQTGGFSKESILPKRNSDKLIARKKDWDPKKYGGFDSPTVAYSVLVVAKVEKGKSKKLKSVKELLGITIMERSSFEKNPIDFLEAKGYKEVKKDLIIKLPKYSLFELENGRKRMLASAGELQKGNELALPSKYVNFLYLASHYEKLKGSPEDNEQKQLFVEQHKHYLDEIIEQISEFSKRVILADANLDKVLSAYNKHRDKPIREQAENIIHLFTLTNLGAPAAFKYFDTTIDRKRYTSTKEVLDATLIHQSITGLYETRIDLSQLGGDGGGGGGSGGGGSGGMDPLQLLQPLEAEIKGTKLKAHWNSGATITCVPQAFLEEEVPIKNIWIKTIHGEKEQPVYYLTFKIQGRKVEAEVISSPYDYILVSPSDIPWLMKKPLQLTTLVPLQEYEERLLKQTMLTGSYKEKLQSLFLKYDALWQHWENQVGHRRIKPHHIATGTVNPRPQKQYPINPKAKASIQTVINDLLKQGVLIQQNSIMNTPVYPVPKPDGKWRMVLDYREVNKTIPLIAAQNQHSAGILSSIFRGKYKTTLDLSNGFWAHSITPESYWLTAFTWLGQQYCWTRLPQGFLNSPALFNADVVDLLKEVPNVQVYVDDIYISHDDPREHLEQLEKVFSLLLNAGYVVSLKKSEIAQHEVEFLGFNITKEGRGLTETFKQKLLNITPPRDLKQLQSILGLLNFARNFIPNFSELVKPLYNIIATAPGKYITWTTDNSQQLQNIISMLNSAENLEERNPEVRLIMKVNTSPSAGYIRFYNEFAKRPIMYLNYVYTKAEVKFTNTEKLLTTIHKGLIKALDLGMGQEILVYSPIVSMTKIQKTPLPERKALPIRWITWMSYLEDPRIQFHYDKTLPELQQVPTVTDDIIAKIKHPSEFSMVFYTDGSAIKHPNVNKSHNAGMGIAQVQFKPEFTVINTWSIPLGDHTAQLAEVAAVEFACKKALKIDGPVLIVTDSFYVAESVNKELPYWQSNGFFNNKKKPLKHVSKWKSIADCIQLKPDIIIIHEKGHQPTASTFHTEGNNLADKLATQGSYVVNAGKRTADGSEFEKRTADGSEFESPKKKAKVE

SEQ ID NO: 598 - protein, 2175 aa, synthetic construct
MPAAKRVKLDGGDKKYSIGLDIGTNSVGWAVITDEYKVPSKKFKVLGNTDRHSIKKNLIGALLFDSGETAEATRLKRTARRRYTRRKNRICYLQEIFSNEMAKVDDSFFHRLEESFLVEEDKKHERHPIFGNIVDEVAYHEKYPTIYHLRKKLVDSTDKADLRLIYLALAHMIKFRGHFLIEGDLNPDNSDVDKLFIQLVQTYNQLFEENPINASGVDAKAILSARLSKSRRLENLIAQLPGEKKNGLFGNLIALSLGLTPNFKSNFDLAEDAKLQLSKDTYDDDLDNLLAQIGDQYADLFLAAKNLSDAILLSDILRVNTEITKAPLSASMIKRYDEHHQDLTLLKALVRQQLPEKYKEIFFDQSKNGYAGYIDGGASQEEFYKFIKPILEKMDGTEELLVKLNREDLLRKQRTFDNGSIPHQIHLGELHAILRRQEDFYPFLKDNREKIEKILTFRIPYYVGPLARGNSRFAWMTRKSEETITPWNFEEVVDKGASAQSFIERMTNFDKNLPNEKVLPKHSLLYEYFTVYNELTKVKYVTEGMRKPAFLSGEQKKAIVDLLFKTNRKVTVKQLKEDYFKKIECFDSVEISGVEDRFNASLGTYHDLLKIIKDKDFLDNEENEDILEDIVLTLTLFEDREMIEERLKTYAHLFDDKVMKQLKRRRYTGWGRLSRKLINGIRDKQSGKTILDFLKSDGFANRNFMQLIHDDSLTFKEDIQKAQVSGQGDSLHEHIANLAGSPAIKKGILQTVKVVDELVKVMGRHKPENIVIEMARENQTTQKGQKNSRERMKRIEEGIKELGSQILKEHPVENTQLQNEKLYLYYLQNGRDMYVDQELDINRLSDYDVDHIVPQSFLKDDSIDNKVLTRSDKARGKSDNVPSEEVVKKMKNYWRQLLNAKLITQRKFDNLTKAERGGLSELDKAGFIKRQLVETRQITKHVAQILDSRMNTKYDENDKLIREVKVITLKSKLVSDFRKDFQFYKVREINNYHHAHDAYLNAVVGTALIKKYPKLESEFVYGDYKVYDVRKMIAKSEQEIGKATAKYFFYSNIMNFFKTEITLANGEIRKRPLIETNGETGEIVWDKGRDFATVRKVLSMPQVNIVKKTEVQTGGFSKESILPKRNSDKLIARKKDWDPKKYGGFDSPTVAYSVLVVAKVEKGKSKKLKSVKELLGITIMERSSFEKNPIDFLEAKGYKEVKKDLIIKLPKYSLFELENGRKRMLASAGELQKGNELALPSKYVNFLYLASHYEKLKGSPEDNEQKQLFVEQHKHYLDEIIEQISEFSKRVILADANLDKVLSAYNKHRDKPIREQAENIIHLFTLTNLGAPAAFKYFDTTIDRKRYTSTKEVLDATLIHQSITGLYETRIDLSQLGGDGGEAAAKEAAAKGGMDPLQLLQPLEAEIKGTKLKAHWNSGATITCVPQAFLEEEVPIKNIWIKTIHGEKEQPVYYLTFKIQGRKVEAEVISSPYDYILVSPSDIPWLMKKPLQLTTLVPLQEYEERLLKQTMLTGSYKEKLQSLFLKYDALWQHWENQVGHRRIKPHHIATGTVNPRPQKQYPINPKAKASIQTVINDLLKQGVLIQQNSIMNTPVYPVPKPDGKWRMVLDYREVNKTIPLIAAQNQHSAGILSSIFRGKYKTTLDLSNGFWAHSITPESYWLTAFTWLGQQYCWTRLPQGFLNSPALFNADVVDLLKEVPNVQVYVDDIYISHDDPREHLEQLEKVFSLLLNAGYVVSLKKSEIAQHEVEFLGFNITKEGRGLTETFKQKLLNITPPRDLKQLQSILGLLNFARNFIPNFSELVKPLYNIIATAPGKYITWTTDNSQQLQNIISMLNSAENLEERNPEVRLIMKVNTSPSAGYIRFYNEFAKRPIMYLNYVYTKAEVKFTNTEKLLTTIHKGLIKALDLGMGQEILVYSPIVSMTKIQKTPLPERKALPIRWITWMSYLEDPRIQFHYDKTLPELQQVPTVTDDIIAKIKHPSEFSMVFYTDGSAIKHPNVNKSHNAGMGIAQVQFKPEFTVINTWSIPLGDHTAQLAEVAAVEFACKKALKIDGPVLIVTDSFYVAESVNKELPYWQSNGFFNNKKKPLKHVSKWKSIADCIQLKPDIIIIHEKGHQPTASTFHTEGNNLADKLATQGSYVVNAGKRTADGSEFEKRTADGSEFESPKKKAKVE

SEQ ID NO: 599 - protein, 2176 aa, synthetic construct
MPAAKRVKLDGGDKKYSIGLDIGTNSVGWAVITDEYKVPSKKFKVLGNTDRHSIKKNLIGALLFDSGETAEATRLKRTARRRYTRRKNRICYLQEIFSNEMAKVDDSFFHRLEESFLVEEDKKHERHPIFGNIVDEVAYHEKYPTIYHLRKKLVDSTDKADLRLIYLALAHMIKFRGHFLIEGDLNPDNSDVDKLFIQLVQTYNQLFEENPINASGVDAKAILSARLSKSRRLENLIAQLPGEKKNGLFGNLIALSLGLTPNFKSNFDLAEDAKLQLSKDTYDDDLDNLLAQIGDQYADLFLAAKNLSDAILLSDILRVNTEITKAPLSASMIKRYDEHHQDLTLLKALVRQQLPEKYKEIFFDQSKNGYAGYIDGGASQEEFYKFIKPILEKMDGTEELLVKLNREDLLRKQRTFDNGSIPHQIHLGELHAILRRQEDFYPFLKDNREKIEKILTFRIPYYVGPLARGNSRFAWMTRKSEETITPWNFEEVVDKGASAQSFIERMTNFDKNLPNEKVLPKHSLLYEYFTVYNELTKVKYVTEGMRKPAFLSGEQKKAIVDLLFKTNRKVTVKQLKEDYFKKIECFDSVEISGVEDRFNASLGTYHDLLKIIKDKDFLDNEENEDILEDIVLTLTLFEDREMIEERLKTYAHLFDDKVMKQLKRRRYTGWGRLSRKLINGIRDKQSGKTILDFLKSDGFANRNFMQLIHDDSLTFKEDIQKAQVSGQGDSLHEHIANLAGSPAIKKGILQTVKVVDELVKVMGRHKPENIVIEMARENQTTQKGQKNSRERMKRIEEGIKELGSQILKEHPVENTQLQNEKLYLYYLQNGRDMYVDQELDINRLSDYDVDHIVPQSFLKDDSIDNKVLTRSDKARGKSDNVPSEEVVKKMKNYWRQLLNAKLITQRKFDNLTKAERGGLSELDKAGFIKRQLVETRQITKHVAQILDSRMNTKYDENDKLIREVKVITLKSKLVSDFRKDFQFYKVREINNYHHAHDAYLNAVVGTALIKKYPKLESEFVYGDYKVYDVRKMIAKSEQEIGKATAKYFFYSNIMNFFKTEITLANGEIRKRPLIETNGETGEIVWDKGRDFATVRKVLSMPQVNIVKKTEVQTGGFSKESILPKRNSDKLIARKKDWDPKKYGGFDSPTVAYSVLVVAKVEKGKSKKLKSVKELLGITIMERSSFEKNPIDFLEAKGYKEVKKDLIIKLPKYSLFELENGRKRMLASAGELQKGNELALPSKYVNFLYLASHYEKLKGSPEDNEQKQLFVEQHKHYLDEIIEQISEFSKRVILADANLDKVLSAYNKHRDKPIREQAENIIHLFTLTNLGAPAAFKYFDTTIDRKRYTSTKEVLDATLIHQSITGLYETRIDLSQLGGDGGGSSEAAAKGGGGGMDPLQLLQPLEAEIKGTKLKAHWNSGATITCVPQAFLEEEVPIKNIWIKTIHGEKEQPVYYLTFKIQGRKVEAEVISSPYDYILVSPSDIPWLMKKPLQLTTLVPLQEYEERLLKQTMLTGSYKEKLQSLFLKYDALWQHWENQVGHRRIKPHHIATGTVNPRPQKQYPINPKAKASIQTVINDLLKQGVLIQQNSIMNTPVYPVPKPDGKWRMVLDYREVNKTIPLIAAQNQHSAGILSSIFRGKYKTTLDLSNGFWAHSITPESYWLTAFTWLGQQYCWTRLPQGFLNSPALFNADVVDLLKEVPNVQVYVDDIYISHDDPREHLEQLEKVFSLLLNAGYVVSLKKSEIAQHEVEFLGFNITKEGRGLTETFKQKLLNITPPRDLKQLQSILGLLNFARNFIPNFSELVKPLYNIIATAPGKYITWTTDNSQQLQNIISMLNSAENLEERNPEVRLIMKVNTSPSAGYIRFYNEFAKRPIMYLNYVYTKAEVKFTNTEKLLTTIHKGLIKALDLGMGQEILVYSPIVSMTKIQKTPLPERKALPIRWITWMSYLEDPRIQFHYDKTLPELQQVPTVTDDIIAKIKHPSEFSMVFYTDGSAIKHPNVNKSHNAGMGIAQVQFKPEFTVINTWSIPLGDHTAQLAEVAAVEFACKKALKIDGPVLIVTDSFYVAESVNKELPYWQSNGFFNNKKKPLKHVSKWKSIADCIQLKPDIIIIHEKGHQPTASTFHTEGNNLADKLATQGSYVVNAGKRTADGSEFEKRTADGSEFESPKKKAKVE

SEQ ID NO: 600 - protein, 2174 aa, synthetic construct
MPAAKRVKLDGGDKKYSIGLDIGTNSVGWAVITDEYKVPSKKFKVLGNTDRHSIKKNLIGALLFDSGETAEATRLKRTARRRYTRRKNRICYLQEIFSNEMAKVDDSFFHRLEESFLVEEDKKHERHPIFGNIVDEVAYHEKYPTIYHLRKKLVDSTDKADLRLIYLALAHMIKFRGHFLIEGDLNPDNSDVDKLFIQLVQTYNQLFEENPINASGVDAKAILSARLSKSRRLENLIAQLPGEKKNGLFGNLIALSLGLTPNFKSNFDLAEDAKLQLSKDTYDDDLDNLLAQIGDQYADLFLAAKNLSDAILLSDILRVNTEITKAPLSASMIKRYDEHHQDLTLLKALVRQQLPEKYKEIFFDQSKNGYAGYIDGGASQEEFYKFIKPILEKMDGTEELLVKLNREDLLRKQRTFDNGSIPHQIHLGELHAILRRQEDFYPFLKDNREKIEKILTFRIPYYVGPLARGNSRFAWMTRKSEETITPWNFEEVVDKGASAQSFIERMTNFDKNLPNEKVLPKHSLLYEYFTVYNELTKVKYVTEGMRKPAFLSGEQKKAIVDLLFKTNRKVTVKQLKEDYFKKIECFDSVEISGVEDRFNASLGTYHDLLKIIKDKDFLDNEENEDILEDIVLTLTLFEDREMIEERLKTYAHLFDDKVMKQLKRRRYTGWGRLSRKLINGIRDKQSGKTILDFLKSDGFANRNFMQLIHDDSLTFKEDIQKAQVSGQGDSLHEHIANLAGSPAIKKGILQTVKVVDELVKVMGRHKPENIVIEMARENQTTQKGQKNSRERMKRIEEGIKELGSQILKEHPVENTQLQNEKLYLYYLQNGRDMYVDQELDINRLSDYDVDHIVPQSFLKDDSIDNKVLTRSDKARGKSDNVPSEEVVKKMKNYWRQLLNAKLITQRKFDNLTKAERGGLSELDKAGFIKRQLVETRQITKHVAQILDSRMNTKYDENDKLIREVKVITLKSKLVSDFRKDFQFYKVREINNYHHAHDAYLNAVVGTALIKKYPKLESEFVYGDYKVYDVRKMIAKSEQEIGKATAKYFFYSNIMNFFKTEITLANGEIRKRPLIETNGETGEIVWDKGRDFATVRKVLSMPQVNIVKKTEVQTGGFSKESILPKRNSDKLIARKKDWDPKKYGGFDSPTVAYSVLVVAKVEKGKSKKLKSVKELLGITIMERSSFEKNPIDFLEAKGYKEVKKDLIIKLPKYSLFELENGRKRMLASAGELQKGNELALPSKYVNFLYLASHYEKLKGSPEDNEQKQLFVEQHKHYLDEIIEQISEFSKRVILADANLDKVLSAYNKHRDKPIREQAENIIHLFTLTNLGAPAAFKYFDTTIDRKRYTSTKEVLDATLIHQSITGLYETRIDLSQLGGDGGPAPAPAPAPGGMDPLQLLQPLEAEIKGTKLKAHWNSGATITCVPQAFLEEEVPIKNIWIKTIHGEKEQPVYYLTFKIQGRKVEAEVISSPYDYILVSPSDIPWLMKKPLQLTTLVPLQEYEERLLKQTMLTGSYKEKLQSLFLKYDALWQHWENQVGHRRIKPHHIATGTVNPRPQKQYPINPKAKASIQTVINDLLKQGVLIQQNSIMNTPVYPVPKPDGKWRMVLDYREVNKTIPLIAAQNQHSAGILSSIFRGKYKTTLDLSNGFWAHSITPESYWLTAFTWLGQQYCWTRLPQGFLNSPALFNADVVDLLKEVPNVQVYVDDIYISHDDPREHLEQLEKVFSLLLNAGYVVSLKKSEIAQHEVEFLGFNITKEGRGLTETFKQKLLNITPPRDLKQLQSILGLLNFARNFIPNFSELVKPLYNIIATAPGKYITWTTDNSQQLQNIISMLNSAENLEERNPEVRLIMKVNTSPSAGYIRFYNEFAKRPIMYLNYVYTKAEVKFTNTEKLLTTIHKGLIKALDLGMGQEILVYSPIVSMTKIQKTPLPERKALPIRWITWMSYLEDPRIQFHYDKTLPELQQVPTVTDDIIAKIKHPSEFSMVFYTDGSAIKHPNVNKSHNAGMGIAQVQFKPEFTVINTWSIPLGDHTAQLAEVAAVEFACKKALKIDGPVLIVTDSFYVAESVNKELPYWQSNGFFNNKKKPLKHVSKWKSIADCIQLKPDIIIIHEKGHQPTASTFHTEGNNLADKLATQGSYVVNAGKRTADGSEFEKRTADGSEFESPKKKAKVE

SEQ ID NO: 601 - protein, 2180 aa, synthetic construct
MPAAKRVKLDGGDKKYSIGLDIGTNSVGWAVITDEYKVPSKKFKVLGNTDRHSIKKNLIGALLFDSGETAEATRLKRTARRRYTRRKNRICYLQEIFSNEMAKVDDSFFHRLEESFLVEEDKKHERHPIFGNIVDEVAYHEKYPTIYHLRKKLVDSTDKADLRLIYLALAHMIKFRGHFLIEGDLNPDNSDVDKLFIQLVQTYNQLFEENPINASGVDAKAILSARLSKSRRLENLIAQLPGEKKNGLFGNLIALSLGLTPNFKSNFDLAEDAKLQLSKDTYDDDLDNLLAQIGDQYADLFLAAKNLSDAILLSDILRVNTEITKAPLSASMIKRYDEHHQDLTLLKALVRQQLPEKYKEIFFDQSKNGYAGYIDGGASQEEFYKFIKPILEKMDGTEELLVKLNREDLLRKQRTFDNGSIPHQIHLGELHAILRRQEDFYPFLKDNREKIEKILTFRIPYYVGPLARGNSRFAWMTRKSEETITPWNFEEVVDKGASAQSFIERMTNFDKNLPNEKVLPKHSLLYEYFTVYNELTKVKYVTEGMRKPAFLSGEQKKAIVDLLFKTNRKVTVKQLKEDYFKKIECFDSVEISGVEDRFNASLGTYHDLLKIIKDKDFLDNEENEDILEDIVLTLTLFEDREMIEERLKTYAHLFDDKVMKQLKRRRYTGWGRLSRKLINGIRDKQSGKTILDFLKSDGFANRNFMQLIHDDSLTFKEDIQKAQVSGQGDSLHEHIANLAGSPAIKKGILQTVKVVDELVKVMGRHKPENIVIEMARENQTTQKGQKNSRERMKRIEEGIKELGSQILKEHPVENTQLQNEKLYLYYLQNGRDMYVDQELDINRLSDYDVDHIVPQSFLKDDSIDNKVLTRSDKARGKSDNVPSEEVVKKMKNYWRQLLNAKLITQRKFDNLTKAERGGLSELDKAGFIKRQLVETRQITKHVAQILDSRMNTKYDENDKLIREVKVITLKSKLVSDFRKDFQFYKVREINNYHHAHDAYLNAVVGTALIKKYPKLESEFVYGDYKVYDVRKMIAKSEQEIGKATAKYFFYSNIMNFFKTEITLANGEIRKRPLIETNGETGEIVWDKGRDFATVRKVLSMPQVNIVKKTEVQTGGFSKESILPKRNSDKLIARKKDWDPKKYGGFDSPTVAYSVLVVAKVEKGKSKKLKSVKELLGITIMERSSFEKNPIDFLEAKGYKEVKKDLIIKLPKYSLFELENGRKRMLASAGELQKGNELALPSKYVNFLYLASHYEKLKGSPEDNEQKQLFVEQHKHYLDEIIEQISEFSKRVILADANLDKVLSAYNKHRDKPIREQAENIIHLFTLTNLGAPAAFKYFDTTIDRKRYTSTKEVLDATLIHQSITGLYETRIDLSQLGGDGGGGGGSGGGGSGGGGSGGMDPLQLLQPLEAEIKGTKLKAHWNSGATITCVPQAFLEEEVPIKNIWIKTIHGEKEQPVYYLTFKIQGRKVEAEVISSPYDYILVSPSDIPWLMKKPLQLTTLVPLQEYEERLLKQTMLTGSYKEKLQSLFLKYDALWQHWENQVGHRRIKPHHIATGTVNPRPQKQYPINPKAKASIQTVINDLLKQGVLIQQNSIMNTPVYPVPKPDGKWRMVLDYREVNKTIPLIAAQNQHSAGILSSIFRGKYKTTLDLSNGFWAHSITPESYWLTAFTWLGQQYCWTRLPQGFLNSPALFNADVVDLLKEVPNVQVYVDDIYISHDDPREHLEQLEKVFSLLLNAGYVVSLKKSEIAQHEVEFLGFNITKEGRGLTETFKQKLLNITPPRDLKQLQSILGLLNFARNFIPNFSELVKPLYNIIATAPGKYITWTTDNSQQLQNIISMLNSAENLEERNPEVRLIMKVNTSPSAGYIRFYNEFAKRPIMYLNYVYTKAEVKFTNTEKLLTTIHKGLIKALDLGMGQEILVYSPIVSMTKIQKTPLPERKALPIRWITWMSYLEDPRIQFHYDKTLPELQQVPTVTDDIIAKIKHPSEFSMVFYTDGSAIKHPNVNKSHNAGMGIAQVQFKPEFTVINTWSIPLGDHTAQLAEVAAVEFACKKALKIDGPVLIVTDSFYVAESVNKELPYWQSNGFFNNKKKPLKHVSKWKSIADCIQLKPDIIIIHEKGHQPTASTFHTEGNNLADKLATQGSYVVNAGKRTADGSEFEKRTADGSEFESPKKKAKVE

SEQ ID NO: 602 - protein, 2176 aa, synthetic construct
MPAAKRVKLDGGDKKYSIGLDIGTNSVGWAVITDEYKVPSKKFKVLGNTDRHSIKKNLIGALLFDSGETAEATRLKRTARRRYTRRKNRICYLQEIFSNEMAKVDDSFFHRLEESFLVEEDKKHERHPIFGNIVDEVAYHEKYPTIYHLRKKLVDSTDKADLRLIYLALAHMIKFRGHFLIEGDLNPDNSDVDKLFIQLVQTYNQLFEENPINASGVDAKAILSARLSKSRRLENLIAQLPGEKKNGLFGNLIALSLGLTPNFKSNFDLAEDAKLQLSKDTYDDDLDNLLAQIGDQYADLFLAAKNLSDAILLSDILRVNTEITKAPLSASMIKRYDEHHQDLTLLKALVRQQLPEKYKEIFFDQSKNGYAGYIDGGASQEEFYKFIKPILEKMDGTEELLVKLNREDLLRKQRTFDNGSIPHQIHLGELHAILRRQEDFYPFLKDNREKIEKILTFRIPYYVGPLARGNSRFAWMTRKSEETITPWNFEEVVDKGASAQSFIERMTNFDKNLPNEKVLPKHSLLYEYFTVYNELTKVKYVTEGMRKPAFLSGEQKKAIVDLLFKTNRKVTVKQLKEDYFKKIECFDSVEISGVEDRFNASLGTYHDLLKIIKDKDFLDNEENEDILEDIVLTLTLFEDREMIEERLKTYAHLFDDKVMKQLKRRRYTGWGRLSRKLINGIRDKQSGKTILDFLKSDGFANRNFMQLIHDDSLTFKEDIQKAQVSGQGDSLHEHIANLAGSPAIKKGILQTVKVVDELVKVMGRHKPENIVIEMARENQTTQKGQKNSRERMKRIEEGIKELGSQILKEHPVENTQLQNEKLYLYYLQNGRDMYVDQELDINRLSDYDVDHIVPQSFLKDDSIDNKVLTRSDKARGKSDNVPSEEVVKKMKNYWRQLLNAKLITQRKFDNLTKAERGGLSELDKAGFIKRQLVETRQITKHVAQILDSRMNTKYDENDKLIREVKVITLKSKLVSDFRKDFQFYKVREINNYHHAHDAYLNAVVGTALIKKYPKLESEFVYGDYKVYDVRKMIAKSEQEIGKATAKYFFYSNIMNFFKTEITLANGEIRKRPLIETNGETGEIVWDKGRDFATVRKVLSMPQVNIVKKTEVQTGGFSKESILPKRNSDKLIARKKDWDPKKYGGFDSPTVAYSVLVVAKVEKGKSKKLKSVKELLGITIMERSSFEKNPIDFLEAKGYKEVKKDLIIKLPKYSLFELENGRKRMLASAGELQKGNELALPSKYVNFLYLASHYEKLKGSPEDNEQKQLFVEQHKHYLDEIIEQISEFSKRVILADANLDKVLSAYNKHRDKPIREQAENIIHLFTLTNLGAPAAFKYFDTTIDRKRYTSTKEVLDATLIHQSITGLYETRIDLSQLGGDGGPAPEAAAKGSSGGMDPLQLLQPLEAEIKGTKLKAHWNSGATITCVPQAFLEEEVPIKNIWIKTIHGEKEQPVYYLTFKIQGRKVEAEVISSPYDYILVSPSDIPWLMKKPLQLTTLVPLQEYEERLLKQTMLTGSYKEKLQSLFLKYDALWQHWENQVGHRRIKPHHIATGTVNPRPQKQYPINPKAKASIQTVINDLLKQGVLIQQNSIMNTPVYPVPKPDGKWRMVLDYREVNKTIPLIAAQNQHSAGILSSIFRGKYKTTLDLSNGFWAHSITPESYWLTAFTWLGQQYCWTRLPQGFLNSPALFNADVVDLLKEVPNVQVYVDDIYISHDDPREHLEQLEKVFSLLLNAGYVVSLKKSEIAQHEVEFLGFNITKEGRGLTETFKQKLLNITPPRDLKQLQSILGLLNFARNFIPNFSELVKPLYNIIATAPGKYITWTTDNSQQLQNIISMLNSAENLEERNPEVRLIMKVNTSPSAGYIRFYNEFAKRPIMYLNYVYTKAEVKFTNTEKLLTTIHKGLIKALDLGMGQEILVYSPIVSMTKIQKTPLPERKALPIRWITWMSYLEDPRIQFHYDKTLPELQQVPTVTDDIIAKIKHPSEFSMVFYTDGSAIKHPNVNKSHNAGMGIAQVQFKPEFTVINTWSIPLGDHTAQLAEVAAVEFACKKALKIDGPVLIVTDSFYVAESVNKELPYWQSNGFFNNKKKPLKHVSKWKSIADCIQLKPDIIIIHEKGHQPTASTFHTEGNNLADKLATQGSYVVNAGKRTADGSEFEKRTADGSEFESPKKKAKVE

SEQ ID NO: 603 - protein, 2173 aa, synthetic construct
MPAAKRVKLDGGDKKYSIGLDIGTNSVGWAVITDEYKVPSKKFKVLGNTDRHSIKKNLIGALLFDSGETAEATRLKRTARRRYTRRKNRICYLQEIFSNEMAKVDDSFFHRLEESFLVEEDKKHERHPIFGNIVDEVAYHEKYPTIYHLRKKLVDSTDKADLRLIYLALAHMIKFRGHFLIEGDLNPDNSDVDKLFIQLVQTYNQLFEENPINASGVDAKAILSARLSKSRRLENLIAQLPGEKKNGLFGNLIALSLGLTPNFKSNFDLAEDAKLQLSKDTYDDDLDNLLAQIGDQYADLFLAAKNLSDAILLSDILRVNTEITKAPLSASMIKRYDEHHQDLTLLKALVRQQLPEKYKEIFFDQSKNGYAGYIDGGASQEEFYKFIKPILEKMDGTEELLVKLNREDLLRKQRTFDNGSIPHQIHLGELHAILRRQEDFYPFLKDNREKIEKILTFRIPYYVGPLARGNSRFAWMTRKSEETITPWNFEEVVDKGASAQSFIERMTNFDKNLPNEKVLPKHSLLYEYFTVYNELTKVKYVTEGMRKPAFLSGEQKKAIVDLLFKTNRKVTVKQLKEDYFKKIECFDSVEISGVEDRFNASLGTYHDLLKIIKDKDFLDNEENEDILEDIVLTLTLFEDREMIEERLKTYAHLFDDKVMKQLKRRRYTGWGRLSRKLINGIRDKQSGKTILDFLKSDGFANRNFMQLIHDDSLTFKEDIQKAQVSGQGDSLHEHIANLAGSPAIKKGILQTVKVVDELVKVMGRHKPENIVIEMARENQTTQKGQKNSRERMKRIEEGIKELGSQILKEHPVENTQLQNEKLYLYYLQNGRDMYVDQELDINRLSDYDVDHIVPQSFLKDDSIDNKVLTRSDKARGKSDNVPSEEVVKKMKNYWRQLLNAKLITQRKFDNLTKAERGGLSELDKAGFIKRQLVETRQITKHVAQILDSRMNTKYDENDKLIREVKVITLKSKLVSDFRKDFQFYKVREINNYHHAHDAYLNAVVGTALIKKYPKLESEFVYGDYKVYDVRKMIAKSEQEIGKATAKYFFYSNIMNFFKTEITLANGEIRKRPLIETNGETGEIVWDKGRDFATVRKVLSMPQVNIVKKTEVQTGGFSKESILPKRNSDKLIARKKDWDPKKYGGFDSPTVAYSVLVVAKVEKGKSKKLKSVKELLGITIMERSSFEKNPIDFLEAKGYKEVKKDLIIKLPKYSLFELENGRKRMLASAGELQKGNELALPSKYVNFLYLASHYEKLKGSPEDNEQKQLFVEQHKHYLDEIIEQISEFSKRVILADANLDKVLSAYNKHRDKPIREQAENIIHLFTLTNLGAPAAFKYFDTTIDRKRYTSTKEVLDATLIHQSITGLYETRIDLSQLGGDGGGSSEAAAKGGMDPLQLLQPLEAEIKGTKLKAHWNSGATITCVPQAFLEEEVPIKNIWIKTIHGEKEQPVYYLTFKIQGRKVEAEVISSPYDYILVSPSDIPWLMKKPLQLTTLVPLQEYEERLLKQTMLTGSYKEKLQSLFLKYDALWQHWENQVGHRRIKPHHIATGTVNPRPQKQYPINPKAKASIQTVINDLLKQGVLIQQNSIMNTPVYPVPKPDGKWRMVLDYREVNKTIPLIAAQNQHSAGILSSIFRGKYKTTLDLSNGFWAHSITPESYWLTAFTWLGQQYCWTRLPQGFLNSPALFNADVVDLLKEVPNVQVYVDDIYISHDDPREHLEQLEKVFSLLLNAGYVVSLKKSEIAQHEVEFLGFNITKEGRGLTETFKQKLLNITPPRDLKQLQSILGLLNFARNFIPNFSELVKPLYNIIATAPGKYITWTTDNSQQLQNIISMLNSAENLEERNPEVRLIMKVNTSPSAGYIRFYNEFAKRPIMYLNYVYTKAEVKFTNTEKLLTTIHKGLIKALDLGMGQEILVYSPIVSMTKIQKTPLPERKALPIRWITWMSYLEDPRIQFHYDKTLPELQQVPTVTDDIIAKIKHPSEFSMVFYTDGSAIKHPNVNKSHNAGMGIAQVQFKPEFTVINTWSIPLGDHTAQLAEVAAVEFACKKALKIDGPVLIVTDSFYVAESVNKELPYWQSNGFFNNKKKPLKHVSKWKSIADCIQLKPDIIIIHEKGHQPTASTFHTEGNNLADKLATQGSYVVNAGKRTADGSEFEKRTADGSEFESPKKKAKVE

SEQ ID NO: 604 - protein, 2183 aa, synthetic construct
MPAAKRVKLDGGDKKYSIGLDIGTNSVGWAVITDEYKVPSKKFKVLGNTDRHSIKKNLIGALLFDSGETAEATRLKRTARRRYTRRKNRICYLQEIFSNEMAKVDDSFFHRLEESFLVEEDKKHERHPIFGNIVDEVAYHEKYPTIYHLRKKLVDSTDKADLRLIYLALAHMIKFRGHFLIEGDLNPDNSDVDKLFIQLVQTYNQLFEENPINASGVDAKAILSARLSKSRRLENLIAQLPGEKKNGLFGNLIALSLGLTPNFKSNFDLAEDAKLQLSKDTYDDDLDNLLAQIGDQYADLFLAAKNLSDAILLSDILRVNTEITKAPLSASMIKRYDEHHQDLTLLKALVRQQLPEKYKEIFFDQSKNGYAGYIDGGASQEEFYKFIKPILEKMDGTEELLVKLNREDLLRKQRTFDNGSIPHQIHLGELHAILRRQEDFYPFLKDNREKIEKILTFRIPYYVGPLARGNSRFAWMTRKSEETITPWNFEEVVDKGASAQSFIERMTNFDKNLPNEKVLPKHSLLYEYFTVYNELTKVKYVTEGMRKPAFLSGEQKKAIVDLLFKTNRKVTVKQLKEDYFKKIECFDSVEISGVEDRFNASLGTYHDLLKIIKDKDFLDNEENEDILEDIVLTLTLFEDREMIEERLKTYAHLFDDKVMKQLKRRRYTGWGRLSRKLINGIRDKQSGKTILDFLKSDGFANRNFMQLIHDDSLTFKEDIQKAQVSGQGDSLHEHIANLAGSPAIKKGILQTVKVVDELVKVMGRHKPENIVIEMARENQTTQKGQKNSRERMKRIEEGIKELGSQILKEHPVENTQLQNEKLYLYYLQNGRDMYVDQELDINRLSDYDVDHIVPQSFLKDDSIDNKVLTRSDKARGKSDNVPSEEVVKKMKNYWRQLLNAKLITQRKFDNLTKAERGGLSELDKAGFIKRQLVETRQITKHVAQILDSRMNTKYDENDKLIREVKVITLKSKLVSDFRKDFQFYKVREINNYHHAHDAYLNAVVGTALIKKYPKLESEFVYGDYKVYDVRKMIAKSEQEIGKATAKYFFYSNIMNFFKTEITLANGEIRKRPLIETNGETGEIVWDKGRDFATVRKVLSMPQVNIVKKTEVQTGGFSKESILPKRNSDKLIARKKDWDPKKYGGFDSPTVAYSVLVVAKVEKGKSKKLKSVKELLGITIMERSSFEKNPIDFLEAKGYKEVKKDLIIKLPKYSLFELENGRKRMLASAGELQKGNELALPSKYVNFLYLASHYEKLKGSPEDNEQKQLFVEQHKHYLDEIIEQISEFSKRVILADANLDKVLSAYNKHRDKPIREQAENIIHLFTLTNLGAPAAFKYFDTTIDRKRYTSTKEVLDATLIHQSITGLYETRIDLSQLGGDGGGGSGGSGGSGGSGGSGGSGGMDPLQLLQPLEAEIKGTKLKAHWNSGATITCVPQAFLEEEVPIKNIWIKTIHGEKEQPVYYLTFKIQGRKVEAEVISSPYDYILVSPSDIPWLMKKPLQLTTLVPLQEYEERLLKQTMLTGSYKEKLQSLFLKYDALWQHWENQVGHRRIKPHHIATGTVNPRPQKQYPINPKAKASIQTVINDLLKQGVLIQQNSIMNTPVYPVPKPDGKWRMVLDYREVNKTIPLIAAQNQHSAGILSSIFRGKYKTTLDLSNGFWAHSITPESYWLTAFTWLGQQYCWTRLPQGFLNSPALFNADVVDLLKEVPNVQVYVDDIYISHDDPREHLEQLEKVFSLLLNAGYVVSLKKSEIAQHEVEFLGFNITKEGRGLTETFKQKLLNITPPRDLKQLQSILGLLNFARNFIPNFSELVKPLYNIIATAPGKYITWTTDNSQQLQNIISMLNSAENLEERNPEVRLIMKVNTSPSAGYIRFYNEFAKRPIMYLNYVYTKAEVKFTNTEKLLTTIHKGLIKALDLGMGQEILVYSPIVSMTKIQKTPLPERKALPIRWITWMSYLEDPRIQFHYDKTLPELQQVPTVTDDIIAKIKHPSEFSMVFYTDGSAIKHPNVNKSHNAGMGIAQVQFKPEFTVINTWSIPLGDHTAQLAEVAAVEFACKKALKIDGPVLIVTDSFYVAESVNKELPYWQSNGFFNNKKKPLKHVSKWKSIADCIQLKPDIIIIHEKGHQPTASTFHTEGNNLADKLATQGSYVVNAGKRTADGSEFEKRTADGSEFESPKKKAKVE

SEQ ID NO: 605 - protein, 2171 aa, synthetic construct
MPAAKRVKLDGGDKKYSIGLDIGTNSVGWAVITDEYKVPSKKFKVLGNTDRHSIKKNLIGALLFDSGETAEATRLKRTARRRYTRRKNRICYLQEIFSNEMAKVDDSFFHRLEESFLVEEDKKHERHPIFGNIVDEVAYHEKYPTIYHLRKKLVDSTDKADLRLIYLALAHMIKFRGHFLIEGDLNPDNSDVDKLFIQLVQTYNQLFEENPINASGVDAKAILSARLSKSRRLENLIAQLPGEKKNGLFGNLIALSLGLTPNFKSNFDLAEDAKLQLSKDTYDDDLDNLLAQIGDQYADLFLAAKNLSDAILLSDILRVNTEITKAPLSASMIKRYDEHHQDLTLLKALVRQQLPEKYKEIFFDQSKNGYAGYIDGGASQEEFYKFIKPILEKMDGTEELLVKLNREDLLRKQRTFDNGSIPHQIHLGELHAILRRQEDFYPFLKDNREKIEKILTFRIPYYVGPLARGNSRFAWMTRKSEETITPWNFEEVVDKGASAQSFIERMTNFDKNLPNEKVLPKHSLLYEYFTVYNELTKVKYVTEGMRKPAFLSGEQKKAIVDLLFKTNRKVTVKQLKEDYFKKIECFDSVEISGVEDRFNASLGTYHDLLKIIKDKDFLDNEENEDILEDIVLTLTLFEDREMIEERLKTYAHLFDDKVMKQLKRRRYTGWGRLSRKLINGIRDKQSGKTILDFLKSDGFANRNFMQLIHDDSLTFKEDIQKAQVSGQGDSLHEHIANLAGSPAIKKGILQTVKVVDELVKVMGRHKPENIVIEMARENQTTQKGQKNSRERMKRIEEGIKELGSQILKEHPVENTQLQNEKLYLYYLQNGRDMYVDQELDINRLSDYDVDHIVPQSFLKDDSIDNKVLTRSDKARGKSDNVPSEEVVKKMKNYWRQLLNAKLITQRKFDNLTKAERGGLSELDKAGFIKRQLVETRQITKHVAQILDSRMNTKYDENDKLIREVKVITLKSKLVSDFRKDFQFYKVREINNYHHAHDAYLNAVVGTALIKKYPKLESEFVYGDYKVYDVRKMIAKSEQEIGKATAKYFFYSNIMNFFKTEITLANGEIRKRPLIETNGETGEIVWDKGRDFATVRKVLSMPQVNIVKKTEVQTGGFSKESILPKRNSDKLIARKKDWDPKKYGGFDSPTVAYSVLVVAKVEKGKSKKLKSVKELLGITIMERSSFEKNPIDFLEAKGYKEVKKDLIIKLPKYSLFELENGRKRMLASAGELQKGNELALPSKYVNFLYLASHYEKLKGSPEDNEQKQLFVEQHKHYLDEIIEQISEFSKRVILADANLDKVLSAYNKHRDKPIREQAENIIHLFTLTNLGAPAAFKYFDTTIDRKRYTSTKEVLDATLIHQSITGLYETRIDLSQLGGDGGGGGGSSGGMDPLQLLQPLEAEIKGTKLKAHWNSGATITCVPQAFLEEEVPIKNIWIKTIHGEKEQPVYYLTFKIQGRKVEAEVISSPYDYILVSPSDIPWLMKKPLQLTTLVPLQEYEERLLKQTMLTGSYKEKLQSLFLKYDALWQHWENQVGHRRIKPHHIATGTVNPRPQKQYPINPKAKASIQTVINDLLKQGVLIQQNSIMNTPVYPVPKPDGKWRMVLDYREVNKTIPLIAAQNQHSAGILSSIFRGKYKTTLDLSNGFWAHSITPESYWLTAFTWLGQQYCWTRLPQGFLNSPALFNADVVDLLKEVPNVQVYVDDIYISHDDPREHLEQLEKVFSLLLNAGYVVSLKKSEIAQHEVEFLGFNITKEGRGLTETFKQKLLNITPPRDLKQLQSILGLLNFARNFIPNFSELVKPLYNIIATAPGKYITWTTDNSQQLQNIISMLNSAENLEERNPEVRLIMKVNTSPSAGYIRFYNEFAKRPIMYLNYVYTKAEVKFTNTEKLLTTIHKGLIKALDLGMGQEILVYSPIVSMTKIQKTPLPERKALPIRWITWMSYLEDPRIQFHYDKTLPELQQVPTVTDDIIAKIKHPSEFSMVFYTDGSAIKHPNVNKSHNAGMGIAQVQFKPEFTVINTWSIPLGDHTAQLAEVAAVEFACKKALKIDGPVLIVTDSFYVAESVNKELPYWQSNGFFNNKKKPLKHVSKWKSIADCIQLKPDIIIIHEKGHQPTASTFHTEGNNLADKLATQGSYVVNAGKRTADGSEFEKRTADGSEFESPKKKAKVE

SEQ ID NO: 606 - protein, 2174 aa, synthetic construct
MPAAKRVKLDGGDKKYSIGLDIGTNSVGWAVITDEYKVPSKKFKVLGNTDRHSIKKNLIGALLFDSGETAEATRLKRTARRRYTRRKNRICYLQEIFSNEMAKVDDSFFHRLEESFLVEEDKKHERHPIFGNIVDEVAYHEKYPTIYHLRKKLVDSTDKADLRLIYLALAHMIKFRGHFLIEGDLNPDNSDVDKLFIQLVQTYNQLFEENPINASGVDAKAILSARLSKSRRLENLIAQLPGEKKNGLFGNLIALSLGLTPNFKSNFDLAEDAKLQLSKDTYDDDLDNLLAQIGDQYADLFLAAKNLSDAILLSDILRVNTEITKAPLSASMIKRYDEHHQDLTLLKALVRQQLPEKYKEIFFDQSKNGYAGYIDGGASQEEFYKFIKPILEKMDGTEELLVKLNREDLLRKQRTFDNGSIPHQIHLGELHAILRRQEDFYPFLKDNREKIEKILTFRIPYYVGPLARGNSRFAWMTRKSEETITPWNFEEVVDKGASAQSFIERMTNFDKNLPNEKVLPKHSLLYEYFTVYNELTKVKYVTEGMRKPAFLSGEQKKAIVDLLFKTNRKVTVKQLKEDYFKKIECFDSVEISGVEDRFNASLGTYHDLLKIIKDKDFLDNEENEDILEDIVLTLTLFEDREMIEERLKTYAHLFDDKVMKQLKRRRYTGWGRLSRKLINGIRDKQSGKTILDFLKSDGFANRNFMQLIHDDSLTFKEDIQKAQVSGQGDSLHEHIANLAGSPAIKKGILQTVKVVDELVKVMGRHKPENIVIEMARENQTTQKGQKNSRERMKRIEEGIKELGSQILKEHPVENTQLQNEKLYLYYLQNGRDMYVDQELDINRLSDYDVDHIVPQSFLKDDSIDNKVLTRSDKARGKSDNVPSEEVVKKMKNYWRQLLNAKLITQRKFDNLTKAERGGLSELDKAGFIKRQLVETRQITKHVAQILDSRMNTKYDENDKLIREVKVITLKSKLVSDFRKDFQFYKVREINNYHHAHDAYLNAVVGTALIKKYPKLESEFVYGDYKVYDVRKMIAKSEQEIGKATAKYFFYSNIMNFFKTEITLANGEIRKRPLIETNGETGEIVWDKGRDFATVRKVLSMPQVNIVKKTEVQTGGFSKESILPKRNSDKLIARKKDWDPKKYGGFDSPTVAYSVLVVAKVEKGKSKKLKSVKELLGITIMERSSFEKNPIDFLEAKGYKEVKKDLIIKLPKYSLFELENGRKRMLASAGELQKGNELALPSKYVNFLYLASHYEKLKGSPEDNEQKQLFVEQHKHYLDEIIEQISEFSKRVILADANLDKVLSAYNKHRDKPIREQAENIIHLFTLTNLGAPAAFKYFDTTIDRKRYTSTKEVLDATLIHQSITGLYETRIDLSQLGGDGGGGSGGSGGSGGMDPLQLLQPLEAEIKGTKLKAHWNSGATITCVPQAFLEEEVPIKNIWIKTIHGEKEQPVYYLTFKIQGRKVEAEVISSPYDYILVSPSDIPWLMKKPLQLTTLVPLQEYEERLLKQTMLTGSYKEKLQSLFLKYDALWQHWENQVGHRRIKPHHIATGTVNPRPQKQYPINPKAKASIQTVINDLLKQGVLIQQNSIMNTPVYPVPKPDGKWRMVLDYREVNKTIPLIAAQNQHSAGILSSIFRGKYKTTLDLSNGFWAHSITPESYWLTAFTWLGQQYCWTRLPQGFLNSPALFNADVVDLLKEVPNVQVYVDDIYISHDDPREHLEQLEKVFSLLLNAGYVVSLKKSEIAQHEVEFLGFNITKEGRGLTETFKQKLLNITPPRDLKQLQSILGLLNFARNFIPNFSELVKPLYNIIATAPGKYITWTTDNSQQLQNIISMLNSAENLEERNPEVRLIMKVNTSPSAGYIRFYNEFAKRPIMYLNYVYTKAEVKFTNTEKLLTTIHKGLIKALDLGMGQEILVYSPIVSMTKIQKTPLPERKALPIRWITWMSYLEDPRIQFHYDKTLPELQQVPTVTDDIIAKIKHPSEFSMVFYTDGSAIKHPNVNKSHNAGMGIAQVQFKPEFTVINTWSIPLGDHTAQLAEVAAVEFACKKALKIDGPVLIVTDSFYVAESVNKELPYWQSNGFFNNKKKPLKHVSKWKSIADCIQLKPDIIIIHEKGHQPTASTFHTEGNNLADKLATQGSYVVNAGKRTADGSEFEKRTADGSEFESPKKKAKVE

SEQ ID NO: 607 - protein, 2173 aa, synthetic construct
MPAAKRVKLDGGDKKYSIGLDIGTNSVGWAVITDEYKVPSKKFKVLGNTDRHSIKKNLIGALLFDSGETAEATRLKRTARRRYTRRKNRICYLQEIFSNEMAKVDDSFFHRLEESFLVEEDKKHERHPIFGNIVDEVAYHEKYPTIYHLRKKLVDSTDKADLRLIYLALAHMIKFRGHFLIEGDLNPDNSDVDKLFIQLVQTYNQLFEENPINASGVDAKAILSARLSKSRRLENLIAQLPGEKKNGLFGNLIALSLGLTPNFKSNFDLAEDAKLQLSKDTYDDDLDNLLAQIGDQYADLFLAAKNLSDAILLSDILRVNTEITKAPLSASMIKRYDEHHQDLTLLKALVRQQLPEKYKEIFFDQSKNGYAGYIDGGASQEEFYKFIKPILEKMDGTEELLVKLNREDLLRKQRTFDNGSIPHQIHLGELHAILRRQEDFYPFLKDNREKIEKILTFRIPYYVGPLARGNSRFAWMTRKSEETITPWNFEEVVDKGASAQSFIERMTNFDKNLPNEKVLPKHSLLYEYFTVYNELTKVKYVTEGMRKPAFLSGEQKKAIVDLLFKTNRKVTVKQLKEDYFKKIECFDSVEISGVEDRFNASLGTYHDLLKIIKDKDFLDNEENEDILEDIVLTLTLFEDREMIEERLKTYAHLFDDKVMKQLKRRRYTGWGRLSRKLINGIRDKQSGKTILDFLKSDGFANRNFMQLIHDDSLTFKEDIQKAQVSGQGDSLHEHIANLAGSPAIKKGILQTVKVVDELVKVMGRHKPENIVIEMARENQTTQKGQKNSRERMKRIEEGIKELGSQILKEHPVENTQLQNEKLYLYYLQNGRDMYVDQELDINRLSDYDVDHIVPQSFLKDDSIDNKVLTRSDKARGKSDNVPSEEVVKKMKNYWRQLLNAKLITQRKFDNLTKAERGGLSELDKAGFIKRQLVETRQITKHVAQILDSRMNTKYDENDKLIREVKVITLKSKLVSDFRKDFQFYKVREINNYHHAHDAYLNAVVGTALIKKYPKLESEFVYGDYKVYDVRKMIAKSEQEIGKATAKYFFYSNIMNFFKTEITLANGEIRKRPLIETNGETGEIVWDKGRDFATVRKVLSMPQVNIVKKTEVQTGGFSKESILPKRNSDKLIARKKDWDPKKYGGFDSPTVAYSVLVVAKVEKGKSKKLKSVKELLGITIMERSSFEKNPIDFLEAKGYKEVKKDLIIKLPKYSLFELENGRKRMLASAGELQKGNELALPSKYVNFLYLASHYEKLKGSPEDNEQKQLFVEQHKHYLDEIIEQISEFSKRVILADANLDKVLSAYNKHRDKPIREQAENIIHLFTLTNLGAPAAFKYFDTTIDRKRYTSTKEVLDATLIHQSITGLYETRIDLSQLGGDGGGGSEAAAKGGMDPLQLLQPLEAEIKGTKLKAHWNSGATITCVPQAFLEEEVPIKNIWIKTIHGEKEQPVYYLTFKIQGRKVEAEVISSPYDYILVSPSDIPWLMKKPLQLTTLVPLQEYEERLLKQTMLTGSYKEKLQSLFLKYDALWQHWENQVGHRRIKPHHIATGTVNPRPQKQYPINPKAKASIQTVINDLLKQGVLIQQNSIMNTPVYPVPKPDGKWRMVLDYREVNKTIPLIAAQNQHSAGILSSIFRGKYKTTLDLSNGFWAHSITPESYWLTAFTWLGQQYCWTRLPQGFLNSPALFNADVVDLLKEVPNVQVYVDDIYISHDDPREHLEQLEKVFSLLLNAGYVVSLKKSEIAQHEVEFLGFNITKEGRGLTETFKQKLLNITPPRDLKQLQSILGLLNFARNFIPNFSELVKPLYNIIATAPGKYITWTTDNSQQLQNIISMLNSAENLEERNPEVRLIMKVNTSPSAGYIRFYNEFAKRPIMYLNYVYTKAEVKFTNTEKLLTTIHKGLIKALDLGMGQEILVYSPIVSMTKIQKTPLPERKALPIRWITWMSYLEDPRIQFHYDKTLPELQQVPTVTDDIIAKIKHPSEFSMVFYTDGSAIKHPNVNKSHNAGMGIAQVQFKPEFTVINTWSIPLGDHTAQLAEVAAVEFACKKALKIDGPVLIVTDSFYVAESVNKELPYWQSNGFFNNKKKPLKHVSKWKSIADCIQLKPDIIIIHEKGHQPTASTFHTEGNNLADKLATQGSYVVNAGKRTADGSEFEKRTADGSEFESPKKKAKVE

SEQ ID NO: 608 - protein, 2170 aa, synthetic construct
MPAAKRVKLDGGDKKYSIGLDIGTNSVGWAVITDEYKVPSKKFKVLGNTDRHSIKKNLIGALLFDSGETAEATRLKRTARRRYTRRKNRICYLQEIFSNEMAKVDDSFFHRLEESFLVEEDKKHERHPIFGNIVDEVAYHEKYPTIYHLRKKLVDSTDKADLRLIYLALAHMIKFRGHFLIEGDLNPDNSDVDKLFIQLVQTYNQLFEENPINASGVDAKAILSARLSKSRRLENLIAQLPGEKKNGLFGNLIALSLGLTPNFKSNFDLAEDAKLQLSKDTYDDDLDNLLAQIGDQYADLFLAAKNLSDAILLSDILRVNTEITKAPLSASMIKRYDEHHQDLTLLKALVRQQLPEKYKEIFFDQSKNGYAGYIDGGASQEEFYKFIKPILEKMDGTEELLVKLNREDLLRKQRTFDNGSIPHQIHLGELHAILRRQEDFYPFLKDNREKIEKILTFRIPYYVGPLARGNSRFAWMTRKSEETITPWNFEEVVDKGASAQSFIERMTNFDKNLPNEKVLPKHSLLYEYFTVYNELTKVKYVTEGMRKPAFLSGEQKKAIVDLLFKTNRKVTVKQLKEDYFKKIECFDSVEISGVEDRFNASLGTYHDLLKIIKDKDFLDNEENEDILEDIVLTLTLFEDREMIEERLKTYAHLFDDKVMKQLKRRRYTGWGRLSRKLINGIRDKQSGKTILDFLKSDGFANRNFMQLIHDDSLTFKEDIQKAQVSGQGDSLHEHIANLAGSPAIKKGILQTVKVVDELVKVMGRHKPENIVIEMARENQTTQKGQKNSRERMKRIEEGIKELGSQILKEHPVENTQLQNEKLYLYYLQNGRDMYVDQELDINRLSDYDVDHIVPQSFLKDDSIDNKVLTRSDKARGKSDNVPSEEVVKKMKNYWRQLLNAKLITQRKFDNLTKAERGGLSELDKAGFIKRQLVETRQITKHVAQILDSRMNTKYDENDKLIREVKVITLKSKLVSDFRKDFQFYKVREINNYHHAHDAYLNAVVGTALIKKYPKLESEFVYGDYKVYDVRKMIAKSEQEIGKATAKYFFYSNIMNFFKTEITLANGEIRKRPLIETNGETGEIVWDKGRDFATVRKVLSMPQVNIVKKTEVQTGGFSKESILPKRNSDKLIARKKDWDPKKYGGFDSPTVAYSVLVVAKVEKGKSKKLKSVKELLGITIMERSSFEKNPIDFLEAKGYKEVKKDLIIKLPKYSLFELENGRKRMLASAGELQKGNELALPSKYVNFLYLASHYEKLKGSPEDNEQKQLFVEQHKHYLDEIIEQISEFSKRVILADANLDKVLSAYNKHRDKPIREQAENIIHLFTLTNLGAPAAFKYFDTTIDRKRYTSTKEVLDATLIHQSITGLYETRIDLSQLGGDGGEAAAKGGMDPLQLLQPLEAEIKGTKLKAHWNSGATITCVPQAFLEEEVPIKNIWIKTIHGEKEQPVYYLTFKIQGRKVEAEVISSPYDYILVSPSDIPWLMKKPLQLTTLVPLQEYEERLLKQTMLTGSYKEKLQSLFLKYDALWQHWENQVGHRRIKPHHIATGTVNPRPQKQYPINPKAKASIQTVINDLLKQGVLIQQNSIMNTPVYPVPKPDGKWRMVLDYREVNKTIPLIAAQNQHSAGILSSIFRGKYKTTLDLSNGFWAHSITPESYWLTAFTWLGQQYCWTRLPQGFLNSPALFNADVVDLLKEVPNVQVYVDDIYISHDDPREHLEQLEKVFSLLLNAGYVVSLKKSEIAQHEVEFLGFNITKEGRGLTETFKQKLLNITPPRDLKQLQSILGLLNFARNFIPNFSELVKPLYNIIATAPGKYITWTTDNSQQLQNIISMLNSAENLEERNPEVRLIMKVNTSPSAGYIRFYNEFAKRPIMYLNYVYTKAEVKFTNTEKLLTTIHKGLIKALDLGMGQEILVYSPIVSMTKIQKTPLPERKALPIRWITWMSYLEDPRIQFHYDKTLPELQQVPTVTDDIIAKIKHPSEFSMVFYTDGSAIKHPNVNKSHNAGMGIAQVQFKPEFTVINTWSIPLGDHTAQLAEVAAVEFACKKALKIDGPVLIVTDSFYVAESVNKELPYWQSNGFFNNKKKPLKHVSKWKSIADCIQLKPDIIIIHEKGHQPTASTFHTEGNNLADKLATQGSYVVNAGKRTADGSEFEKRTADGSEFESPKKKAKVE

SEQ ID NO: 609 - protein, 2174 aa, synthetic construct
MPAAKRVKLDGGDKKYSIGLDIGTNSVGWAVITDEYKVPSKKFKVLGNTDRHSIKKNLIGALLFDSGETAEATRLKRTARRRYTRRKNRICYLQEIFSNEMAKVDDSFFHRLEESFLVEEDKKHERHPIFGNIVDEVAYHEKYPTIYHLRKKLVDSTDKADLRLIYLALAHMIKFRGHFLIEGDLNPDNSDVDKLFIQLVQTYNQLFEENPINASGVDAKAILSARLSKSRRLENLIAQLPGEKKNGLFGNLIALSLGLTPNFKSNFDLAEDAKLQLSKDTYDDDLDNLLAQIGDQYADLFLAAKNLSDAILLSDILRVNTEITKAPLSASMIKRYDEHHQDLTLLKALVRQQLPEKYKEIFFDQSKNGYAGYIDGGASQEEFYKFIKPILEKMDGTEELLVKLNREDLLRKQRTFDNGSIPHQIHLGELHAILRRQEDFYPFLKDNREKIEKILTFRIPYYVGPLARGNSRFAWMTRKSEETITPWNFEEVVDKGASAQSFIERMTNFDKNLPNEKVLPKHSLLYEYFTVYNELTKVKYVTEGMRKPAFLSGEQKKAIVDLLFKTNRKVTVKQLKEDYFKKIECFDSVEISGVEDRFNASLGTYHDLLKIIKDKDFLDNEENEDILEDIVLTLTLFEDREMIEERLKTYAHLFDDKVMKQLKRRRYTGWGRLSRKLINGIRDKQSGKTILDFLKSDGFANRNFMQLIHDDSLTFKEDIQKAQVSGQGDSLHEHIANLAGSPAIKKGILQTVKVVDELVKVMGRHKPENIVIEMARENQTTQKGQKNSRERMKRIEEGIKELGSQILKEHPVENTQLQNEKLYLYYLQNGRDMYVDQELDINRLSDYDVDHIVPQSFLKDDSIDNKVLTRSDKARGKSDNVPSEEVVKKMKNYWRQLLNAKLITQRKFDNLTKAERGGLSELDKAGFIKRQLVETRQITKHVAQILDSRMNTKYDENDKLIREVKVITLKSKLVSDFRKDFQFYKVREINNYHHAHDAYLNAVVGTALIKKYPKLESEFVYGDYKVYDVRKMIAKSEQEIGKATAKYFFYSNIMNFFKTEITLANGEIRKRPLIETNGETGEIVWDKGRDFATVRKVLSMPQVNIVKKTEVQTGGFSKESILPKRNSDKLIARKKDWDPKKYGGFDSPTVAYSVLVVAKVEKGKSKKLKSVKELLGITIMERSSFEKNPIDFLEAKGYKEVKKDLIIKLPKYSLFELENGRKRMLASAGELQKGNELALPSKYVNFLYLASHYEKLKGSPEDNEQKQLFVEQHKHYLDEIIEQISEFSKRVILADANLDKVLSAYNKHRDKPIREQAENIIHLFTLTNLGAPAAFKYFDTTIDRKRYTSTKEVLDATLIHQSITGLYETRIDLSQLGGDGGGGSPAPGSSGGMDPLQLLQPLEAEIKGTKLKAHWNSGATITCVPQAFLEEEVPIKNIWIKTIHGEKEQPVYYLTFKIQGRKVEAEVISSPYDYILVSPSDIPWLMKKPLQLTTLVPLQEYEERLLKQTMLTGSYKEKLQSLFLKYDALWQHWENQVGHRRIKPHHIATGTVNPRPQKQYPINPKAKASIQTVINDLLKQGVLIQQNSIMNTPVYPVPKPDGKWRMVLDYREVNKTIPLIAAQNQHSAGILSSIFRGKYKTTLDLSNGFWAHSITPESYWLTAFTWLGQQYCWTRLPQGFLNSPALFNADVVDLLKEVPNVQVYVDDIYISHDDPREHLEQLEKVFSLLLNAGYVVSLKKSEIAQHEVEFLGFNITKEGRGLTETFKQKLLNITPPRDLKQLQSILGLLNFARNFIPNFSELVKPLYNIIATAPGKYITWTTDNSQQLQNIISMLNSAENLEERNPEVRLIMKVNTSPSAGYIRFYNEFAKRPIMYLNYVYTKAEVKFTNTEKLLTTIHKGLIKALDLGMGQEILVYSPIVSMTKIQKTPLPERKALPIRWITWMSYLEDPRIQFHYDKTLPELQQVPTVTDDIIAKIKHPSEFSMVFYTDGSAIKHPNVNKSHNAGMGIAQVQFKPEFTVINTWSIPLGDHTAQLAEVAAVEFACKKALKIDGPVLIVTDSFYVAESVNKELPYWQSNGFFNNKKKPLKHVSKWKSIADCIQLKPDIIIIHEKGHQPTASTFHTEGNNLADKLATQGSYVVNAGKRTADGSEFEKRTADGSEFESPKKKAKVE

SEQ ID NO: 610 - protein, 2174 aa, synthetic construct
MPAAKRVKLDGGDKKYSIGLDIGTNSVGWAVITDEYKVPSKKFKVLGNTDRHSIKKNLIGALLFDSGETAEATRLKRTARRRYTRRKNRICYLQEIFSNEMAKVDDSFFHRLEESFLVEEDKKHERHPIFGNIVDEVAYHEKYPTIYHLRKKLVDSTDKADLRLIYLALAHMIKFRGHFLIEGDLNPDNSDVDKLFIQLVQTYNQLFEENPINASGVDAKAILSARLSKSRRLENLIAQLPGEKKNGLFGNLIALSLGLTPNFKSNFDLAEDAKLQLSKDTYDDDLDNLLAQIGDQYADLFLAAKNLSDAILLSDILRVNTEITKAPLSASMIKRYDEHHQDLTLLKALVRQQLPEKYKEIFFDQSKNGYAGYIDGGASQEEFYKFIKPILEKMDGTEELLVKLNREDLLRKQRTFDNGSIPHQIHLGELHAILRRQEDFYPFLKDNREKIEKILTFRIPYYVGPLARGNSRFAWMTRKSEETITPWNFEEVVDKGASAQSFIERMTNFDKNLPNEKVLPKHSLLYEYFTVYNELTKVKYVTEGMRKPAFLSGEQKKAIVDLLFKTNRKVTVKQLKEDYFKKIECFDSVEISGVEDRFNASLGTYHDLLKIIKDKDFLDNEENEDILEDIVLTLTLFEDREMIEERLKTYAHLFDDKVMKQLKRRRYTGWGRLSRKLINGIRDKQSGKTILDFLKSDGFANRNFMQLIHDDSLTFKEDIQKAQVSGQGDSLHEHIANLAGSPAIKKGILQTVKVVDELVKVMGRHKPENIVIEMARENQTTQKGQKNSRERMKRIEEGIKELGSQILKEHPVENTQLQNEKLYLYYLQNGRDMYVDQELDINRLSDYDVDHIVPQSFLKDDSIDNKVLTRSDKARGKSDNVPSEEVVKKMKNYWRQLLNAKLITQRKFDNLTKAERGGLSELDKAGFIKRQLVETRQITKHVAQILDSRMNTKYDENDKLIREVKVITLKSKLVSDFRKDFQFYKVREINNYHHAHDAYLNAVVGTALIKKYPKLESEFVYGDYKVYDVRKMIAKSEQEIGKATAKYFFYSNIMNFFKTEITLANGEIRKRPLIETNGETGEIVWDKGRDFATVRKVLSMPQVNIVKKTEVQTGGFSKESILPKRNSDKLIARKKDWDPKKYGGFDSPTVAYSVLVVAKVEKGKSKKLKSVKELLGITIMERSSFEKNPIDFLEAKGYKEVKKDLIIKLPKYSLFELENGRKRMLASAGELQKGNELALPSKYVNFLYLASHYEKLKGSPEDNEQKQLFVEQHKHYLDEIIEQISEFSKRVILADANLDKVLSAYNKHRDKPIREQAENIIHLFTLTNLGAPAAFKYFDTTIDRKRYTSTKEVLDATLIHQSITGLYETRIDLSQLGGDGGGSSGGGGGSGGMDPLQLLQPLEAEIKGTKLKAHWNSGATITCVPQAFLEEEVPIKNIWIKTIHGEKEQPVYYLTFKIQGRKVEAEVISSPYDYILVSPSDIPWLMKKPLQLTTLVPLQEYEERLLKQTMLTGSYKEKLQSLFLKYDALWQHWENQVGHRRIKPHHIATGTVNPRPQKQYPINPKAKASIQTVINDLLKQGVLIQQNSIMNTPVYPVPKPDGKWRMVLDYREVNKTIPLIAAQNQHSAGILSSIFRGKYKTTLDLSNGFWAHSITPESYWLTAFTWLGQQYCWTRLPQGFLNSPALFNADVVDLLKEVPNVQVYVDDIYISHDDPREHLEQLEKVFSLLLNAGYVVSLKKSEIAQHEVEFLGFNITKEGRGLTETFKQKLLNITPPRDLKQLQSILGLLNFARNFIPNFSELVKPLYNIIATAPGKYITWTTDNSQQLQNIISMLNSAENLEERNPEVRLIMKVNTSPSAGYIRFYNEFAKRPIMYLNYVYTKAEVKFTNTEKLLTTIHKGLIKALDLGMGQEILVYSPIVSMTKIQKTPLPERKALPIRWITWMSYLEDPRIQFHYDKTLPELQQVPTVTDDIIAKIKHPSEFSMVFYTDGSAIKHPNVNKSHNAGMGIAQVQFKPEFTVINTWSIPLGDHTAQLAEVAAVEFACKKALKIDGPVLIVTDSFYVAESVNKELPYWQSNGFFNNKKKPLKHVSKWKSIADCIQLKPDIIIIHEKGHQPTASTFHTEGNNLADKLATQGSYVVNAGKRTADGSEFEKRTADGSEFESPKKKAKVE

SEQ ID NO: 611 - protein, 2180 aa, synthetic construct
MPAAKRVKLDGGDKKYSIGLDIGTNSVGWAVITDEYKVPSKKFKVLGNTDRHSIKKNLIGALLFDSGETAEATRLKRTARRRYTRRKNRICYLQEIFSNEMAKVDDSFFHRLEESFLVEEDKKHERHPIFGNIVDEVAYHEKYPTIYHLRKKLVDSTDKADLRLIYLALAHMIKFRGHFLIEGDLNPDNSDVDKLFIQLVQTYNQLFEENPINASGVDAKAILSARLSKSRRLENLIAQLPGEKKNGLFGNLIALSLGLTPNFKSNFDLAEDAKLQLSKDTYDDDLDNLLAQIGDQYADLFLAAKNLSDAILLSDILRVNTEITKAPLSASMIKRYDEHHQDLTLLKALVRQQLPEKYKEIFFDQSKNGYAGYIDGGASQEEFYKFIKPILEKMDGTEELLVKLNREDLLRKQRTFDNGSIPHQIHLGELHAILRRQEDFYPFLKDNREKIEKILTFRIPYYVGPLARGNSRFAWMTRKSEETITPWNFEEVVDKGASAQSFIERMTNFDKNLPNEKVLPKHSLLYEYFTVYNELTKVKYVTEGMRKPAFLSGEQKKAIVDLLFKTNRKVTVKQLKEDYFKKIECFDSVEISGVEDRFNASLGTYHDLLKIIKDKDFLDNEENEDILEDIVLTLTLFEDREMIEERLKTYAHLFDDKVMKQLKRRRYTGWGRLSRKLINGIRDKQSGKTILDFLKSDGFANRNFMQLIHDDSLTFKEDIQKAQVSGQGDSLHEHIANLAGSPAIKKGILQTVKVVDELVKVMGRHKPENIVIEMARENQTTQKGQKNSRERMKRIEEGIKELGSQILKEHPVENTQLQNEKLYLYYLQNGRDMYVDQELDINRLSDYDVDHIVPQSFLKDDSIDNKVLTRSDKARGKSDNVPSEEVVKKMKNYWRQLLNAKLITQRKFDNLTKAERGGLSELDKAGFIKRQLVETRQITKHVAQILDSRMNTKYDENDKLIREVKVITLKSKLVSDFRKDFQFYKVREINNYHHAHDAYLNAVVGTALIKKYPKLESEFVYGDYKVYDVRKMIAKSEQEIGKATAKYFFYSNIMNFFKTEITLANGEIRKRPLIETNGETGEIVWDKGRDFATVRKVLSMPQVNIVKKTEVQTGGFSKESILPKRNSDKLIARKKDWDPKKYGGFDSPTVAYSVLVVAKVEKGKSKKLKSVKELLGITIMERSSFEKNPIDFLEAKGYKEVKKDLIIKLPKYSLFELENGRKRMLASAGELQKGNELALPSKYVNFLYLASHYEKLKGSPEDNEQKQLFVEQHKHYLDEIIEQISEFSKRVILADANLDKVLSAYNKHRDKPIREQAENIIHLFTLTNLGAPAAFKYFDTTIDRKRYTSTKEVLDATLIHQSITGLYETRIDLSQLGGDGGGGGGSEAAAKGGGGSGGMDPLQLLQPLEAEIKGTKLKAHWNSGATITCVPQAFLEEEVPIKNIWIKTIHGEKEQPVYYLTFKIQGRKVEAEVISSPYDYILVSPSDIPWLMKKPLQLTTLVPLQEYEERLLKQTMLTGSYKEKLQSLFLKYDALWQHWENQVGHRRIKPHHIATGTVNPRPQKQYPINPKAKASIQTVINDLLKQGVLIQQNSIMNTPVYPVPKPDGKWRMVLDYREVNKTIPLIAAQNQHSAGILSSIFRGKYKTTLDLSNGFWAHSITPESYWLTAFTWLGQQYCWTRLPQGFLNSPALFNADVVDLLKEVPNVQVYVDDIYISHDDPREHLEQLEKVFSLLLNAGYVVSLKKSEIAQHEVEFLGFNITKEGRGLTETFKQKLLNITPPRDLKQLQSILGLLNFARNFIPNFSELVKPLYNIIATAPGKYITWTTDNSQQLQNIISMLNSAENLEERNPEVRLIMKVNTSPSAGYIRFYNEFAKRPIMYLNYVYTKAEVKFTNTEKLLTTIHKGLIKALDLGMGQEILVYSPIVSMTKIQKTPLPERKALPIRWITWMSYLEDPRIQFHYDKTLPELQQVPTVTDDIIAKIKHPSEFSMVFYTDGSAIKHPNVNKSHNAGMGIAQVQFKPEFTVINTWSIPLGDHTAQLAEVAAVEFACKKALKIDGPVLIVTDSFYVAESVNKELPYWQSNGFFNNKKKPLKHVSKWKSIADCIQLKPDIIIIHEKGHQPTASTFHTEGNNLADKLATQGSYVVNAGKRTADGSEFEKRTADGSEFESPKKKAKVE

SEQ ID NO: 612 - protein, 2174 aa, synthetic construct
MPAAKRVKLDGGDKKYSIGLDIGTNSVGWAVITDEYKVPSKKFKVLGNTDRHSIKKNLIGALLFDSGETAEATRLKRTARRRYTRRKNRICYLQEIFSNEMAKVDDSFFHRLEESFLVEEDKKHERHPIFGNIVDEVAYHEKYPTIYHLRKKLVDSTDKADLRLIYLALAHMIKFRGHFLIEGDLNPDNSDVDKLFIQLVQTYNQLFEENPINASGVDAKAILSARLSKSRRLENLIAQLPGEKKNGLFGNLIALSLGLTPNFKSNFDLAEDAKLQLSKDTYDDDLDNLLAQIGDQYADLFLAAKNLSDAILLSDILRVNTEITKAPLSASMIKRYDEHHQDLTLLKALVRQQLPEKYKEIFFDQSKNGYAGYIDGGASQEEFYKFIKPILEKMDGTEELLVKLNREDLLRKQRTFDNGSIPHQIHLGELHAILRRQEDFYPFLKDNREKIEKILTFRIPYYVGPLARGNSRFAWMTRKSEETITPWNFEEVVDKGASAQSFIERMTNFDKNLPNEKVLPKHSLLYEYFTVYNELTKVKYVTEGMRKPAFLSGEQKKAIVDLLFKTNRKVTVKQLKEDYFKKIECFDSVEISGVEDRFNASLGTYHDLLKIIKDKDFLDNEENEDILEDIVLTLTLFEDREMIEERLKTYAHLFDDKVMKQLKRRRYTGWGRLSRKLINGIRDKQSGKTILDFLKSDGFANRNFMQLIHDDSLTFKEDIQKAQVSGQGDSLHEHIANLAGSPAIKKGILQTVKVVDELVKVMGRHKPENIVIEMARENQTTQKGQKNSRERMKRIEEGIKELGSQILKEHPVENTQLQNEKLYLYYLQNGRDMYVDQELDINRLSDYDVDHIVPQSFLKDDSIDNKVLTRSDKARGKSDNVPSEEVVKKMKNYWRQLLNAKLITQRKFDNLTKAERGGLSELDKAGFIKRQLVETRQITKHVAQILDSRMNTKYDENDKLIREVKVITLKSKLVSDFRKDFQFYKVREINNYHHAHDAYLNAVVGTALIKKYPKLESEFVYGDYKVYDVRKMIAKSEQEIGKATAKYFFYSNIMNFFKTEITLANGEIRKRPLIETNGETGEIVWDKGRDFATVRKVLSMPQVNIVKKTEVQTGGFSKESILPKRNSDKLIARKKDWDPKKYGGFDSPTVAYSVLVVAKVEKGKSKKLKSVKELLGITIMERSSFEKNPIDFLEAKGYKEVKKDLIIKLPKYSLFELENGRKRMLASAGELQKGNELALPSKYVNFLYLASHYEKLKGSPEDNEQKQLFVEQHKHYLDEIIEQISEFSKRVILADANLDKVLSAYNKHRDKPIREQAENIIHLFTLTNLGAPAAFKYFDTTIDRKRYTSTKEVLDATLIHQSITGLYETRIDLSQLGGDGGGSSPAPGGGGGMDPLQLLQPLEAEIKGTKLKAHWNSGATITCVPQAFLEEEVPIKNIWIKTIHGEKEQPVYYLTFKIQGRKVEAEVISSPYDYILVSPSDIPWLMKKPLQLTTLVPLQEYEERLLKQTMLTGSYKEKLQSLFLKYDALWQHWENQVGHRRIKPHHIATGTVNPRPQKQYPINPKAKASIQTVINDLLKQGVLIQQNSIMNTPVYPVPKPDGKWRMVLDYREVNKTIPLIAAQNQHSAGILSSIFRGKYKTTLDLSNGFWAHSITPESYWLTAFTWLGQQYCWTRLPQGFLNSPALFNADVVDLLKEVPNVQVYVDDIYISHDDPREHLEQLEKVFSLLLNAGYVVSLKKSEIAQHEVEFLGFNITKEGRGLTETFKQKLLNITPPRDLKQLQSILGLLNFARNFIPNFSELVKPLYNIIATAPGKYITWTTDNSQQLQNIISMLNSAENLEERNPEVRLIMKVNTSPSAGYIRFYNEFAKRPIMYLNYVYTKAEVKFTNTEKLLTTIHKGLIKALDLGMGQEILVYSPIVSMTKIQKTPLPERKALPIRWITWMSYLEDPRIQFHYDKTLPELQQVPTVTDDIIAKIKHPSEFSMVFYTDGSAIKHPNVNKSHNAGMGIAQVQFKPEFTVINTWSIPLGDHTAQLAEVAAVEFACKKALKIDGPVLIVTDSFYVAESVNKELPYWQSNGFFNNKKKPLKHVSKWKSIADCIQLKPDIIIIHEKGHQPTASTFHTEGNNLADKLATQGSYVVNAGKRTADGSEFEKRTADGSEFESPKKKAKVE

SEQ ID NO: 613 - protein, 2176 aa, synthetic construct
MPAAKRVKLDGGDKKYSIGLDIGTNSVGWAVITDEYKVPSKKFKVLGNTDRHSIKKNLIGALLFDSGETAEATRLKRTARRRYTRRKNRICYLQEIFSNEMAKVDDSFFHRLEESFLVEEDKKHERHPIFGNIVDEVAYHEKYPTIYHLRKKLVDSTDKADLRLIYLALAHMIKFRGHFLIEGDLNPDNSDVDKLFIQLVQTYNQLFEENPINASGVDAKAILSARLSKSRRLENLIAQLPGEKKNGLFGNLIALSLGLTPNFKSNFDLAEDAKLQLSKDTYDDDLDNLLAQIGDQYADLFLAAKNLSDAILLSDILRVNTEITKAPLSASMIKRYDEHHQDLTLLKALVRQQLPEKYKEIFFDQSKNGYAGYIDGGASQEEFYKFIKPILEKMDGTEELLVKLNREDLLRKQRTFDNGSIPHQIHLGELHAILRRQEDFYPFLKDNREKIEKILTFRIPYYVGPLARGNSRFAWMTRKSEETITPWNFEEVVDKGASAQSFIERMTNFDKNLPNEKVLPKHSLLYEYFTVYNELTKVKYVTEGMRKPAFLSGEQKKAIVDLLFKTNRKVTVKQLKEDYFKKIECFDSVEISGVEDRFNASLGTYHDLLKIIKDKDFLDNEENEDILEDIVLTLTLFEDREMIEERLKTYAHLFDDKVMKQLKRRRYTGWGRLSRKLINGIRDKQSGKTILDFLKSDGFANRNFMQLIHDDSLTFKEDIQKAQVSGQGDSLHEHIANLAGSPAIKKGILQTVKVVDELVKVMGRHKPENIVIEMARENQTTQKGQKNSRERMKRIEEGIKELGSQILKEHPVENTQLQNEKLYLYYLQNGRDMYVDQELDINRLSDYDVDHIVPQSFLKDDSIDNKVLTRSDKARGKSDNVPSEEVVKKMKNYWRQLLNAKLITQRKFDNLTKAERGGLSELDKAGFIKRQLVETRQITKHVAQILDSRMNTKYDENDKLIREVKVITLKSKLVSDFRKDFQFYKVREINNYHHAHDAYLNAVVGTALIKKYPKLESEFVYGDYKVYDVRKMIAKSEQEIGKATAKYFFYSNIMNFFKTEITLANGEIRKRPLIETNGETGEIVWDKGRDFATVRKVLSMPQVNIVKKTEVQTGGFSKESILPKRNSDKLIARKKDWDPKKYGGFDSPTVAYSVLVVAKVEKGKSKKLKSVKELLGITIMERSSFEKNPIDFLEAKGYKEVKKDLIIKLPKYSLFELENGRKRMLASAGELQKGNELALPSKYVNFLYLASHYEKLKGSPEDNEQKQLFVEQHKHYLDEIIEQISEFSKRVILADANLDKVLSAYNKHRDKPIREQAENIIHLFTLTNLGAPAAFKYFDTTIDRKRYTSTKEVLDATLIHQSITGLYETRIDLSQLGGDGGGGGGSSEAAAKGGMDPLQLLQPLEAEIKGTKLKAHWNSGATITCVPQAFLEEEVPIKNIWIKTIHGEKEQPVYYLTFKIQGRKVEAEVISSPYDYILVSPSDIPWLMKKPLQLTTLVPLQEYEERLLKQTMLTGSYKEKLQSLFLKYDALWQHWENQVGHRRIKPHHIATGTVNPRPQKQYPINPKAKASIQTVINDLLKQGVLIQQNSIMNTPVYPVPKPDGKWRMVLDYREVNKTIPLIAAQNQHSAGILSSIFRGKYKTTLDLSNGFWAHSITPESYWLTAFTWLGQQYCWTRLPQGFLNSPALFNADVVDLLKEVPNVQVYVDDIYISHDDPREHLEQLEKVFSLLLNAGYVVSLKKSEIAQHEVEFLGFNITKEGRGLTETFKQKLLNITPPRDLKQLQSILGLLNFARNFIPNFSELVKPLYNIIATAPGKYITWTTDNSQQLQNIISMLNSAENLEERNPEVRLIMKVNTSPSAGYIRFYNEFAKRPIMYLNYVYTKAEVKFTNTEKLLTTIHKGLIKALDLGMGQEILVYSPIVSMTKIQKTPLPERKALPIRWITWMSYLEDPRIQFHYDKTLPELQQVPTVTDDIIAKIKHPSEFSMVFYTDGSAIKHPNVNKSHNAGMGIAQVQFKPEFTVINTWSIPLGDHTAQLAEVAAVEFACKKALKIDGPVLIVTDSFYVAESVNKELPYWQSNGFFNNKKKPLKHVSKWKSIADCIQLKPDIIIIHEKGHQPTASTFHTEGNNLADKLATQGSYVVNAGKRTADGSEFEKRTADGSEFESPKKKAKVE

SEQ ID NO: 614 - protein, 2176 aa, synthetic construct
MPAAKRVKLDGGDKKYSIGLDIGTNSVGWAVITDEYKVPSKKFKVLGNTDRHSIKKNLIGALLFDSGETAEATRLKRTARRRYTRRKNRICYLQEIFSNEMAKVDDSFFHRLEESFLVEEDKKHERHPIFGNIVDEVAYHEKYPTIYHLRKKLVDSTDKADLRLIYLALAHMIKFRGHFLIEGDLNPDNSDVDKLFIQLVQTYNQLFEENPINASGVDAKAILSARLSKSRRLENLIAQLPGEKKNGLFGNLIALSLGLTPNFKSNFDLAEDAKLQLSKDTYDDDLDNLLAQIGDQYADLFLAAKNLSDAILLSDILRVNTEITKAPLSASMIKRYDEHHQDLTLLKALVRQQLPEKYKEIFFDQSKNGYAGYIDGGASQEEFYKFIKPILEKMDGTEELLVKLNREDLLRKQRTFDNGSIPHQIHLGELHAILRRQEDFYPFLKDNREKIEKILTFRIPYYVGPLARGNSRFAWMTRKSEETITPWNFEEVVDKGASAQSFIERMTNFDKNLPNEKVLPKHSLLYEYFTVYNELTKVKYVTEGMRKPAFLSGEQKKAIVDLLFKTNRKVTVKQLKEDYFKKIECFDSVEISGVEDRFNASLGTYHDLLKIIKDKDFLDNEENEDILEDIVLTLTLFEDREMIEERLKTYAHLFDDKVMKQLKRRRYTGWGRLSRKLINGIRDKQSGKTILDFLKSDGFANRNFMQLIHDDSLTFKEDIQKAQVSGQGDSLHEHIANLAGSPAIKKGILQTVKVVDELVKVMGRHKPENIVIEMARENQTTQKGQKNSRERMKRIEEGIKELGSQILKEHPVENTQLQNEKLYLYYLQNGRDMYVDQELDINRLSDYDVDHIVPQSFLKDDSIDNKVLTRSDKARGKSDNVPSEEVVKKMKNYWRQLLNAKLITQRKFDNLTKAERGGLSELDKAGFIKRQLVETRQITKHVAQILDSRMNTKYDENDKLIREVKVITLKSKLVSDFRKDFQFYKVREINNYHHAHDAYLNAVVGTALIKKYPKLESEFVYGDYKVYDVRKMIAKSEQEIGKATAKYFFYSNIMNFFKTEITLANGEIRKRPLIETNGETGEIVWDKGRDFATVRKVLSMPQVNIVKKTEVQTGGFSKESILPKRNSDKLIARKKDWDPKKYGGFDSPTVAYSVLVVAKVEKGKSKKLKSVKELLGITIMERSSFEKNPIDFLEAKGYKEVKKDLIIKLPKYSLFELENGRKRMLASAGELQKGNELALPSKYVNFLYLASHYEKLKGSPEDNEQKQLFVEQHKHYLDEIIEQISEFSKRVILADANLDKVLSAYNKHRDKPIREQAENIIHLFTLTNLGAPAAFKYFDTTIDRKRYTSTKEVLDATLIHQSITGLYETRIDLSQLGGDGGGGSGSSEAAAKGGMDPLQLLQPLEAEIKGTKLKAHWNSGATITCVPQAFLEEEVPIKNIWIKTIHGEKEQPVYYLTFKIQGRKVEAEVISSPYDYILVSPSDIPWLMKKPLQLTTLVPLQEYEERLLKQTMLTGSYKEKLQSLFLKYDALWQHWENQVGHRRIKPHHIATGTVNPRPQKQYPINPKAKASIQTVINDLLKQGVLIQQNSIMNTPVYPVPKPDGKWRMVLDYREVNKTIPLIAAQNQHSAGILSSIFRGKYKTTLDLSNGFWAHSITPESYWLTAFTWLGQQYCWTRLPQGFLNSPALFNADVVDLLKEVPNVQVYVDDIYISHDDPREHLEQLEKVFSLLLNAGYVVSLKKSEIAQHEVEFLGFNITKEGRGLTETFKQKLLNITPPRDLKQLQSILGLLNFARNFIPNFSELVKPLYNIIATAPGKYITWTTDNSQQLQNIISMLNSAENLEERNPEVRLIMKVNTSPSAGYIRFYNEFAKRPIMYLNYVYTKAEVKFTNTEKLLTTIHKGLIKALDLGMGQEILVYSPIVSMTKIQKTPLPERKALPIRWITWMSYLEDPRIQFHYDKTLPELQQVPTVTDDIIAKIKHPSEFSMVFYTDGSAIKHPNVNKSHNAGMGIAQVQFKPEFTVINTWSIPLGDHTAQLAEVAAVEFACKKALKIDGPVLIVTDSFYVAESVNKELPYWQSNGFFNNKKKPLKHVSKWKSIADCIQLKPDIIIIHEKGHQPTASTFHTEGNNLADKLATQGSYVVNAGKRTADGSEFEKRTADGSEFESPKKKAKVE

SEQ ID NO: 615 - protein, 2185 aa, synthetic construct
MPAAKRVKLDGGDKKYSIGLDIGTNSVGWAVITDEYKVPSKKFKVLGNTDRHSIKKNLIGALLFDSGETAEATRLKRTARRRYTRRKNRICYLQEIFSNEMAKVDDSFFHRLEESFLVEEDKKHERHPIFGNIVDEVAYHEKYPTIYHLRKKLVDSTDKADLRLIYLALAHMIKFRGHFLIEGDLNPDNSDVDKLFIQLVQTYNQLFEENPINASGVDAKAILSARLSKSRRLENLIAQLPGEKKNGLFGNLIALSLGLTPNFKSNFDLAEDAKLQLSKDTYDDDLDNLLAQIGDQYADLFLAAKNLSDAILLSDILRVNTEITKAPLSASMIKRYDEHHQDLTLLKALVRQQLPEKYKEIFFDQSKNGYAGYIDGGASQEEFYKFIKPILEKMDGTEELLVKLNREDLLRKQRTFDNGSIPHQIHLGELHAILRRQEDFYPFLKDNREKIEKILTFRIPYYVGPLARGNSRFAWMTRKSEETITPWNFEEVVDKGASAQSFIERMTNFDKNLPNEKVLPKHSLLYEYFTVYNELTKVKYVTEGMRKPAFLSGEQKKAIVDLLFKTNRKVTVKQLKEDYFKKIECFDSVEISGVEDRFNASLGTYHDLLKIIKDKDFLDNEENEDILEDIVLTLTLFEDREMIEERLKTYAHLFDDKVMKQLKRRRYTGWGRLSRKLINGIRDKQSGKTILDFLKSDGFANRNFMQLIHDDSLTFKEDIQKAQVSGQGDSLHEHIANLAGSPAIKKGILQTVKVVDELVKVMGRHKPENIVIEMARENQTTQKGQKNSRERMKRIEEGIKELGSQILKEHPVENTQLQNEKLYLYYLQNGRDMYVDQELDINRLSDYDVDHIVPQSFLKDDSIDNKVLTRSDKARGKSDNVPSEEVVKKMKNYWRQLLNAKLITQRKFDNLTKAERGGLSELDKAGFIKRQLVETRQITKHVAQILDSRMNTKYDENDKLIREVKVITLKSKLVSDFRKDFQFYKVREINNYHHAHDAYLNAVVGTALIKKYPKLESEFVYGDYKVYDVRKMIAKSEQEIGKATAKYFFYSNIMNFFKTEITLANGEIRKRPLIETNGETGEIVWDKGRDFATVRKVLSMPQVNIVKKTEVQTGGFSKESILPKRNSDKLIARKKDWDPKKYGGFDSPTVAYSVLVVAKVEKGKSKKLKSVKELLGITIMERSSFEKNPIDFLEAKGYKEVKKDLIIKLPKYSLFELENGRKRMLASAGELQKGNELALPSKYVNFLYLASHYEKLKGSPEDNEQKQLFVEQHKHYLDEIIEQISEFSKRVILADANLDKVLSAYNKHRDKPIREQAENIIHLFTLTNLGAPAAFKYFDTTIDRKRYTSTKEVLDATLIHQSITGLYETRIDLSQLGGDGGGGGGSGGGGSGGGGSGGGGSGGMDPLQLLQPLEAEIKGTKLKAHWNSGATITCVPQAFLEEEVPIKNIWIKTIHGEKEQPVYYLTFKIQGRKVEAEVISSPYDYILVSPSDIPWLMKKPLQLTTLVPLQEYEERLLKQTMLTGSYKEKLQSLFLKYDALWQHWENQVGHRRIKPHHIATGTVNPRPQKQYPINPKAKASIQTVINDLLKQGVLIQQNSIMNTPVYPVPKPDGKWRMVLDYREVNKTIPLIAAQNQHSAGILSSIFRGKYKTTLDLSNGFWAHSITPESYWLTAFTWLGQQYCWTRLPQGFLNSPALFNADVVDLLKEVPNVQVYVDDIYISHDDPREHLEQLEKVFSLLLNAGYVVSLKKSEIAQHEVEFLGFNITKEGRGLTETFKQKLLNITPPRDLKQLQSILGLLNFARNFIPNFSELVKPLYNIIATAPGKYITWTTDNSQQLQNIISMLNSAENLEERNPEVRLIMKVNTSPSAGYIRFYNEFAKRPIMYLNYVYTKAEVKFTNTEKLLTTIHKGLIKALDLGMGQEILVYSPIVSMTKIQKTPLPERKALPIRWITWMSYLEDPRIQFHYDKTLPELQQVPTVTDDIIAKIKHPSEFSMVFYTDGSAIKHPNVNKSHNAGMGIAQVQFKPEFTVINTWSIPLGDHTAQLAEVAAVEFACKKALKIDGPVLIVTDSFYVAESVNKELPYWQSNGFFNNKKKPLKHVSKWKSIADCIQLKPDIIIIHEKGHQPTASTFHTEGNNLADKLATQGSYVVNAGKRTADGSEFEKRTADGSEFESPKKKAKVE

SEQ ID NO: 616 - protein, 2176 aa, synthetic construct
MPAAKRVKLDGGDKKYSIGLDIGTNSVGWAVITDEYKVPSKKFKVLGNTDRHSIKKNLIGALLFDSGETAEATRLKRTARRRYTRRKNRICYLQEIFSNEMAKVDDSFFHRLEESFLVEEDKKHERHPIFGNIVDEVAYHEKYPTIYHLRKKLVDSTDKADLRLIYLALAHMIKFRGHFLIEGDLNPDNSDVDKLFIQLVQTYNQLFEENPINASGVDAKAILSARLSKSRRLENLIAQLPGEKKNGLFGNLIALSLGLTPNFKSNFDLAEDAKLQLSKDTYDDDLDNLLAQIGDQYADLFLAAKNLSDAILLSDILRVNTEITKAPLSASMIKRYDEHHQDLTLLKALVRQQLPEKYKEIFFDQSKNGYAGYIDGGASQEEFYKFIKPILEKMDGTEELLVKLNREDLLRKQRTFDNGSIPHQIHLGELHAILRRQEDFYPFLKDNREKIEKILTFRIPYYVGPLARGNSRFAWMTRKSEETITPWNFEEVVDKGASAQSFIERMTNFDKNLPNEKVLPKHSLLYEYFTVYNELTKVKYVTEGMRKPAFLSGEQKKAIVDLLFKTNRKVTVKQLKEDYFKKIECFDSVEISGVEDRFNASLGTYHDLLKIIKDKDFLDNEENEDILEDIVLTLTLFEDREMIEERLKTYAHLFDDKVMKQLKRRRYTGWGRLSRKLINGIRDKQSGKTILDFLKSDGFANRNFMQLIHDDSLTFKEDIQKAQVSGQGDSLHEHIANLAGSPAIKKGILQTVKVVDELVKVMGRHKPENIVIEMARENQTTQKGQKNSRERMKRIEEGIKELGSQILKEHPVENTQLQNEKLYLYYLQNGRDMYVDQELDINRLSDYDVDHIVPQSFLKDDSIDNKVLTRSDKARGKSDNVPSEEVVKKMKNYWRQLLNAKLITQRKFDNLTKAERGGLSELDKAGFIKRQLVETRQITKHVAQILDSRMNTKYDENDKLIREVKVITLKSKLVSDFRKDFQFYKVREINNYHHAHDAYLNAVVGTALIKKYPKLESEFVYGDYKVYDVRKMIAKSEQEIGKATAKYFFYSNIMNFFKTEITLANGEIRKRPLIETNGETGEIVWDKGRDFATVRKVLSMPQVNIVKKTEVQTGGFSKESILPKRNSDKLIARKKDWDPKKYGGFDSPTVAYSVLVVAKVEKGKSKKLKSVKELLGITIMERSSFEKNPIDFLEAKGYKEVKKDLIIKLPKYSLFELENGRKRMLASAGELQKGNELALPSKYVNFLYLASHYEKLKGSPEDNEQKQLFVEQHKHYLDEIIEQISEFSKRVILADANLDKVLSAYNKHRDKPIREQAENIIHLFTLTNLGAPAAFKYFDTTIDRKRYTSTKEVLDATLIHQSITGLYETRIDLSQLGGDGGPAPEAAAKGGGGGMDPLQLLQPLEAEIKGTKLKAHWNSGATITCVPQAFLEEEVPIKNIWIKTIHGEKEQPVYYLTFKIQGRKVEAEVISSPYDYILVSPSDIPWLMKKPLQLTTLVPLQEYEERLLKQTMLTGSYKEKLQSLFLKYDALWQHWENQVGHRRIKPHHIATGTVNPRPQKQYPINPKAKASIQTVINDLLKQGVLIQQNSIMNTPVYPVPKPDGKWRMVLDYREVNKTIPLIAAQNQHSAGILSSIFRGKYKTTLDLSNGFWAHSITPESYWLTAFTWLGQQYCWTRLPQGFLNSPALFNADVVDLLKEVPNVQVYVDDIYISHDDPREHLEQLEKVFSLLLNAGYVVSLKKSEIAQHEVEFLGFNITKEGRGLTETFKQKLLNITPPRDLKQLQSILGLLNFARNFIPNFSELVKPLYNIIATAPGKYITWTTDNSQQLQNIISMLNSAENLEERNPEVRLIMKVNTSPSAGYIRFYNEFAKRPIMYLNYVYTKAEVKFTNTEKLLTTIHKGLIKALDLGMGQEILVYSPIVSMTKIQKTPLPERKALPIRWITWMSYLEDPRIQFHYDKTLPELQQVPTVTDDIIAKIKHPSEFSMVFYTDGSAIKHPNVNKSHNAGMGIAQVQFKPEFTVINTWSIPLGDHTAQLAEVAAVEFACKKALKIDGPVLIVTDSFYVAESVNKELPYWQSNGFFNNKKKPLKHVSKWKSIADCIQLKPDIIIIHEKGHQPTASTFHTEGNNLADKLATQGSYVVNAGKRTADGSEFEKRTADGSEFESPKKKAKVE

SEQ ID NO: 617 - protein, 2174 aa, synthetic construct
MPAAKRVKLDGGDKKYSIGLDIGTNSVGWAVITDEYKVPSKKFKVLGNTDRHSIKKNLIGALLFDSGETAEATRLKRTARRRYTRRKNRICYLQEIFSNEMAKVDDSFFHRLEESFLVEEDKKHERHPIFGNIVDEVAYHEKYPTIYHLRKKLVDSTDKADLRLIYLALAHMIKFRGHFLIEGDLNPDNSDVDKLFIQLVQTYNQLFEENPINASGVDAKAILSARLSKSRRLENLIAQLPGEKKNGLFGNLIALSLGLTPNFKSNFDLAEDAKLQLSKDTYDDDLDNLLAQIGDQYADLFLAAKNLSDAILLSDILRVNTEITKAPLSASMIKRYDEHHQDLTLLKALVRQQLPEKYKEIFFDQSKNGYAGYIDGGASQEEFYKFIKPILEKMDGTEELLVKLNREDLLRKQRTFDNGSIPHQIHLGELHAILRRQEDFYPFLKDNREKIEKILTFRIPYYVGPLARGNSRFAWMTRKSEETITPWNFEEVVDKGASAQSFIERMTNFDKNLPNEKVLPKHSLLYEYFTVYNELTKVKYVTEGMRKPAFLSGEQKKAIVDLLFKTNRKVTVKQLKEDYFKKIECFDSVEISGVEDRFNASLGTYHDLLKIIKDKDFLDNEENEDILEDIVLTLTLFEDREMIEERLKTYAHLFDDKVMKQLKRRRYTGWGRLSRKLINGIRDKQSGKTILDFLKSDGFANRNFMQLIHDDSLTFKEDIQKAQVSGQGDSLHEHIANLAGSPAIKKGILQTVKVVDELVKVMGRHKPENIVIEMARENQTTQKGQKNSRERMKRIEEGIKELGSQILKEHPVENTQLQNEKLYLYYLQNGRDMYVDQELDINRLSDYDVDHIVPQSFLKDDSIDNKVLTRSDKARGKSDNVPSEEVVKKMKNYWRQLLNAKLITQRKFDNLTKAERGGLSELDKAGFIKRQLVETRQITKHVAQILDSRMNTKYDENDKLIREVKVITLKSKLVSDFRKDFQFYKVREINNYHHAHDAYLNAVVGTALIKKYPKLESEFVYGDYKVYDVRKMIAKSEQEIGKATAKYFFYSNIMNFFKTEITLANGEIRKRPLIETNGETGEIVWDKGRDFATVRKVLSMPQVNIVKKTEVQTGGFSKESILPKRNSDKLIARKKDWDPKKYGGFDSPTVAYSVLVVAKVEKGKSKKLKSVKELLGITIMERSSFEKNPIDFLEAKGYKEVKKDLIIKLPKYSLFELENGRKRMLASAGELQKGNELALPSKYVNFLYLASHYEKLKGSPEDNEQKQLFVEQHKHYLDEIIEQISEFSKRVILADANLDKVLSAYNKHRDKPIREQAENIIHLFTLTNLGAPAAFKYFDTTIDRKRYTSTKEVLDATLIHQSITGLYETRIDLSQLGGDGGPAPGSSGGGGGMDPLQLLQPLEAEIKGTKLKAHWNSGATITCVPQAFLEEEVPIKNIWIKTIHGEKEQPVYYLTFKIQGRKVEAEVISSPYDYILVSPSDIPWLMKKPLQLTTLVPLQEYEERLLKQTMLTGSYKEKLQSLFLKYDALWQHWENQVGHRRIKPHHIATGTVNPRPQKQYPINPKAKASIQTVINDLLKQGVLIQQNSIMNTPVYPVPKPDGKWRMVLDYREVNKTIPLIAAQNQHSAGILSSIFRGKYKTTLDLSNGFWAHSITPESYWLTAFTWLGQQYCWTRLPQGFLNSPALFNADVVDLLKEVPNVQVYVDDIYISHDDPREHLEQLEKVFSLLLNAGYVVSLKKSEIAQHEVEFLGFNITKEGRGLTETFKQKLLNITPPRDLKQLQSILGLLNFARNFIPNFSELVKPLYNIIATAPGKYITWTTDNSQQLQNIISMLNSAENLEERNPEVRLIMKVNTSPSAGYIRFYNEFAKRPIMYLNYVYTKAEVKFTNTEKLLTTIHKGLIKALDLGMGQEILVYSPIVSMTKIQKTPLPERKALPIRWITWMSYLEDPRIQFHYDKTLPELQQVPTVTDDIIAKIKHPSEFSMVFYTDGSAIKHPNVNKSHNAGMGIAQVQFKPEFTVINTWSIPLGDHTAQLAEVAAVEFACKKALKIDGPVLIVTDSFYVAESVNKELPYWQSNGFFNNKKKPLKHVSKWKSIADCIQLKPDIIIIHEKGHQPTASTFHTEGNNLADKLATQGSYVVNAGKRTADGSEFEKRTADGSEFESPKKKAKVE

SEQ ID NO: 618 - protein, 2174 aa, synthetic construct
MPAAKRVKLDGGDKKYSIGLDIGTNSVGWAVITDEYKVPSKKFKVLGNTDRHSIKKNLIGALLFDSGETAEATRLKRTARRRYTRRKNRICYLQEIFSNEMAKVDDSFFHRLEESFLVEEDKKHERHPIFGNIVDEVAYHEKYPTIYHLRKKLVDSTDKADLRLIYLALAHMIKFRGHFLIEGDLNPDNSDVDKLFIQLVQTYNQLFEENPINASGVDAKAILSARLSKSRRLENLIAQLPGEKKNGLFGNLIALSLGLTPNFKSNFDLAEDAKLQLSKDTYDDDLDNLLAQIGDQYADLFLAAKNLSDAILLSDILRVNTEITKAPLSASMIKRYDEHHQDLTLLKALVRQQLPEKYKEIFFDQSKNGYAGYIDGGASQEEFYKFIKPILEKMDGTEELLVKLNREDLLRKQRTFDNGSIPHQIHLGELHAILRRQEDFYPFLKDNREKIEKILTFRIPYYVGPLARGNSRFAWMTRKSEETITPWNFEEVVDKGASAQSFIERMTNFDKNLPNEKVLPKHSLLYEYFTVYNELTKVKYVTEGMRKPAFLSGEQKKAIVDLLFKTNRKVTVKQLKEDYFKKIECFDSVEISGVEDRFNASLGTYHDLLKIIKDKDFLDNEENEDILEDIVLTLTLFEDREMIEERLKTYAHLFDDKVMKQLKRRRYTGWGRLSRKLINGIRDKQSGKTILDFLKSDGFANRNFMQLIHDDSLTFKEDIQKAQVSGQGDSLHEHIANLAGSPAIKKGILQTVKVVDELVKVMGRHKPENIVIEMARENQTTQKGQKNSRERMKRIEEGIKELGSQILKEHPVENTQLQNEKLYLYYLQNGRDMYVDQELDINRLSDYDVDHIVPQSFLKDDSIDNKVLTRSDKARGKSDNVPSEEVVKKMKNYWRQLLNAKLITQRKFDNLTKAERGGLSELDKAGFIKRQLVETRQITKHVAQILDSRMNTKYDENDKLIREVKVITLKSKLVSDFRKDFQFYKVREINNYHHAHDAYLNAVVGTALIKKYPKLESEFVYGDYKVYDVRKMIAKSEQEIGKATAKYFFYSNIMNFFKTEITLANGEIRKRPLIETNGETGEIVWDKGRDFATVRKVLSMPQVNIVKKTEVQTGGFSKESILPKRNSDKLIARKKDWDPKKYGGFDSPTVAYSVLVVAKVEKGKSKKLKSVKELLGITIMERSSFEKNPIDFLEAKGYKEVKKDLIIKLPKYSLFELENGRKRMLASAGELQKGNELALPSKYVNFLYLASHYEKLKGSPEDNEQKQLFVEQHKHYLDEIIEQISEFSKRVILADANLDKVLSAYNKHRDKPIREQAENIIHLFTLTNLGAPAAFKYFDTTIDRKRYTSTKEVLDATLIHQSITGLYETRIDLSQLGGDGGPAPGGSGGGGGMDPLQLLQPLEAEIKGTKLKAHWNSGATITCVPQAFLEEEVPIKNIWIKTIHGEKEQPVYYLTFKIQGRKVEAEVISSPYDYILVSPSDIPWLMKKPLQLTTLVPLQEYEERLLKQTMLTGSYKEKLQSLFLKYDALWQHWENQVGHRRIKPHHIATGTVNPRPQKQYPINPKAKASIQTVINDLLKQGVLIQQNSIMNTPVYPVPKPDGKWRMVLDYREVNKTIPLIAAQNQHSAGILSSIFRGKYKTTLDLSNGFWAHSITPESYWLTAFTWLGQQYCWTRLPQGFLNSPALFNADVVDLLKEVPNVQVYVDDIYISHDDPREHLEQLEKVFSLLLNAGYVVSLKKSEIAQHEVEFLGFNITKEGRGLTETFKQKLLNITPPRDLKQLQSILGLLNFARNFIPNFSELVKPLYNIIATAPGKYITWTTDNSQQLQNIISMLNSAENLEERNPEVRLIMKVNTSPSAGYIRFYNEFAKRPIMYLNYVYTKAEVKFTNTEKLLTTIHKGLIKALDLGMGQEILVYSPIVSMTKIQKTPLPERKALPIRWITWMSYLEDPRIQFHYDKTLPELQQVPTVTDDIIAKIKHPSEFSMVFYTDGSAIKHPNVNKSHNAGMGIAQVQFKPEFTVINTWSIPLGDHTAQLAEVAAVEFACKKALKIDGPVLIVTDSFYVAESVNKELPYWQSNGFFNNKKKPLKHVSKWKSIADCIQLKPDIIIIHEKGHQPTASTFHTEGNNLADKLATQGSYVVNAGKRTADGSEFEKRTADGSEFESPKKKAKVE

SEQ ID NO: 619 - protein, 2173 aa, synthetic construct
MPAAKRVKLDGGDKKYSIGLDIGTNSVGWAVITDEYKVPSKKFKVLGNTDRHSIKKNLIGALLFDSGETAEATRLKRTARRRYTRRKNRICYLQEIFSNEMAKVDDSFFHRLEESFLVEEDKKHERHPIFGNIVDEVAYHEKYPTIYHLRKKLVDSTDKADLRLIYLALAHMIKFRGHFLIEGDLNPDNSDVDKLFIQLVQTYNQLFEENPINASGVDAKAILSARLSKSRRLENLIAQLPGEKKNGLFGNLIALSLGLTPNFKSNFDLAEDAKLQLSKDTYDDDLDNLLAQIGDQYADLFLAAKNLSDAILLSDILRVNTEITKAPLSASMIKRYDEHHQDLTLLKALVRQQLPEKYKEIFFDQSKNGYAGYIDGGASQEEFYKFIKPILEKMDGTEELLVKLNREDLLRKQRTFDNGSIPHQIHLGELHAILRRQEDFYPFLKDNREKIEKILTFRIPYYVGPLARGNSRFAWMTRKSEETITPWNFEEVVDKGASAQSFIERMTNFDKNLPNEKVLPKHSLLYEYFTVYNELTKVKYVTEGMRKPAFLSGEQKKAIVDLLFKTNRKVTVKQLKEDYFKKIECFDSVEISGVEDRFNASLGTYHDLLKIIKDKDFLDNEENEDILEDIVLTLTLFEDREMIEERLKTYAHLFDDKVMKQLKRRRYTGWGRLSRKLINGIRDKQSGKTILDFLKSDGFANRNFMQLIHDDSLTFKEDIQKAQVSGQGDSLHEHIANLAGSPAIKKGILQTVKVVDELVKVMGRHKPENIVIEMARENQTTQKGQKNSRERMKRIEEGIKELGSQILKEHPVENTQLQNEKLYLYYLQNGRDMYVDQELDINRLSDYDVDHIVPQSFLKDDSIDNKVLTRSDKARGKSDNVPSEEVVKKMKNYWRQLLNAKLITQRKFDNLTKAERGGLSELDKAGFIKRQLVETRQITKHVAQILDSRMNTKYDENDKLIREVKVITLKSKLVSDFRKDFQFYKVREINNYHHAHDAYLNAVVGTALIKKYPKLESEFVYGDYKVYDVRKMIAKSEQEIGKATAKYFFYSNIMNFFKTEITLANGEIRKRPLIETNGETGEIVWDKGRDFATVRKVLSMPQVNIVKKTEVQTGGFSKESILPKRNSDKLIARKKDWDPKKYGGFDSPTVAYSVLVVAKVEKGKSKKLKSVKELLGITIMERSSFEKNPIDFLEAKGYKEVKKDLIIKLPKYSLFELENGRKRMLASAGELQKGNELALPSKYVNFLYLASHYEKLKGSPEDNEQKQLFVEQHKHYLDEIIEQISEFSKRVILADANLDKVLSAYNKHRDKPIREQAENIIHLFTLTNLGAPAAFKYFDTTIDRKRYTSTKEVLDATLIHQSITGLYETRIDLSQLGGDGGEAAAKPAPGGMDPLQLLQPLEAEIKGTKLKAHWNSGATITCVPQAFLEEEVPIKNIWIKTIHGEKEQPVYYLTFKIQGRKVEAEVISSPYDYILVSPSDIPWLMKKPLQLTTLVPLQEYEERLLKQTMLTGSYKEKLQSLFLKYDALWQHWENQVGHRRIKPHHIATGTVNPRPQKQYPINPKAKASIQTVINDLLKQGVLIQQNSIMNTPVYPVPKPDGKWRMVLDYREVNKTIPLIAAQNQHSAGILSSIFRGKYKTTLDLSNGFWAHSITPESYWLTAFTWLGQQYCWTRLPQGFLNSPALFNADVVDLLKEVPNVQVYVDDIYISHDDPREHLEQLEKVFSLLLNAGYVVSLKKSEIAQHEVEFLGFNITKEGRGLTETFKQKLLNITPPRDLKQLQSILGLLNFARNFIPNFSELVKPLYNIIATAPGKYITWTTDNSQQLQNIISMLNSAENLEERNPEVRLIMKVNTSPSAGYIRFYNEFAKRPIMYLNYVYTKAEVKFTNTEKLLTTIHKGLIKALDLGMGQEILVYSPIVSMTKIQKTPLPERKALPIRWITWMSYLEDPRIQFHYDKTLPELQQVPTVTDDIIAKIKHPSEFSMVFYTDGSAIKHPNVNKSHNAGMGIAQVQFKPEFTVINTWSIPLGDHTAQLAEVAAVEFACKKALKIDGPVLIVTDSFYVAESVNKELPYWQSNGFFNNKKKPLKHVSKWKSIADCIQLKPDIIIIHEKGHQPTASTFHTEGNNLADKLATQGSYVVNAGKRTADGSEFEKRTADGSEFESPKKKAKVE

SEQ ID NO: 620 - protein, 2176 aa, synthetic construct
MPAAKRVKLDGGDKKYSIGLDIGTNSVGWAVITDEYKVPSKKFKVLGNTDRHSIKKNLIGALLFDSGETAEATRLKRTARRRYTRRKNRICYLQEIFSNEMAKVDDSFFHRLEESFLVEEDKKHERHPIFGNIVDEVAYHEKYPTIYHLRKKLVDSTDKADLRLIYLALAHMIKFRGHFLIEGDLNPDNSDVDKLFIQLVQTYNQLFEENPINASGVDAKAILSARLSKSRRLENLIAQLPGEKKNGLFGNLIALSLGLTPNFKSNFDLAEDAKLQLSKDTYDDDLDNLLAQIGDQYADLFLAAKNLSDAILLSDILRVNTEITKAPLSASMIKRYDEHHQDLTLLKALVRQQLPEKYKEIFFDQSKNGYAGYIDGGASQEEFYKFIKPILEKMDGTEELLVKLNREDLLRKQRTFDNGSIPHQIHLGELHAILRRQEDFYPFLKDNREKIEKILTFRIPYYVGPLARGNSRFAWMTRKSEETITPWNFEEVVDKGASAQSFIERMTNFDKNLPNEKVLPKHSLLYEYFTVYNELTKVKYVTEGMRKPAFLSGEQKKAIVDLLFKTNRKVTVKQLKEDYFKKIECFDSVEISGVEDRFNASLGTYHDLLKIIKDKDFLDNEENEDILEDIVLTLTLFEDREMIEERLKTYAHLFDDKVMKQLKRRRYTGWGRLSRKLINGIRDKQSGKTILDFLKSDGFANRNFMQLIHDDSLTFKEDIQKAQVSGQGDSLHEHIANLAGSPAIKKGILQTVKVVDELVKVMGRHKPENIVIEMARENQTTQKGQKNSRERMKRIEEGIKELGSQILKEHPVENTQLQNEKLYLYYLQNGRDMYVDQELDINRLSDYDVDHIVPQSFLKDDSIDNKVLTRSDKARGKSDNVPSEEVVKKMKNYWRQLLNAKLITQRKFDNLTKAERGGLSELDKAGFIKRQLVETRQITKHVAQILDSRMNTKYDENDKLIREVKVITLKSKLVSDFRKDFQFYKVREINNYHHAHDAYLNAVVGTALIKKYPKLESEFVYGDYKVYDVRKMIAKSEQEIGKATAKYFFYSNIMNFFKTEITLANGEIRKRPLIETNGETGEIVWDKGRDFATVRKVLSMPQVNIVKKTEVQTGGFSKESILPKRNSDKLIARKKDWDPKKYGGFDSPTVAYSVLVVAKVEKGKSKKLKSVKELLGITIMERSSFEKNPIDFLEAKGYKEVKKDLIIKLPKYSLFELENGRKRMLASAGELQKGNELALPSKYVNFLYLASHYEKLKGSPEDNEQKQLFVEQHKHYLDEIIEQISEFSKRVILADANLDKVLSAYNKHRDKPIREQAENIIHLFTLTNLGAPAAFKYFDTTIDRKRYTSTKEVLDATLIHQSITGLYETRIDLSQLGGDGGGGGEAAAKGSSGGMDPLQLLQPLEAEIKGTKLKAHWNSGATITCVPQAFLEEEVPIKNIWIKTIHGEKEQPVYYLTFKIQGRKVEAEVISSPYDYILVSPSDIPWLMKKPLQLTTLVPLQEYEERLLKQTMLTGSYKEKLQSLFLKYDALWQHWENQVGHRRIKPHHIATGTVNPRPQKQYPINPKAKASIQTVINDLLKQGVLIQQNSIMNTPVYPVPKPDGKWRMVLDYREVNKTIPLIAAQNQHSAGILSSIFRGKYKTTLDLSNGFWAHSITPESYWLTAFTWLGQQYCWTRLPQGFLNSPALFNADVVDLLKEVPNVQVYVDDIYISHDDPREHLEQLEKVFSLLLNAGYVVSLKKSEIAQHEVEFLGFNITKEGRGLTETFKQKLLNITPPRDLKQLQSILGLLNFARNFIPNFSELVKPLYNIIATAPGKYITWTTDNSQQLQNIISMLNSAENLEERNPEVRLIMKVNTSPSAGYIRFYNEFAKRPIMYLNYVYTKAEVKFTNTEKLLTTIHKGLIKALDLGMGQEILVYSPIVSMTKIQKTPLPERKALPIRWITWMSYLEDPRIQFHYDKTLPELQQVPTVTDDIIAKIKHPSEFSMVFYTDGSAIKHPNVNKSHNAGMGIAQVQFKPEFTVINTWSIPLGDHTAQLAEVAAVEFACKKALKIDGPVLIVTDSFYVAESVNKELPYWQSNGFFNNKKKPLKHVSKWKSIADCIQLKPDIIIIHEKGHQPTASTFHTEGNNLADKLATQGSYVVNAGKRTADGSEFEKRTADGSEFESPKKKAKVE

SEQ ID NO: 621 - protein, 2176 aa, synthetic construct
MPAAKRVKLDGGDKKYSIGLDIGTNSVGWAVITDEYKVPSKKFKVLGNTDRHSIKKNLIGALLFDSGETAEATRLKRTARRRYTRRKNRICYLQEIFSNEMAKVDDSFFHRLEESFLVEEDKKHERHPIFGNIVDEVAYHEKYPTIYHLRKKLVDSTDKADLRLIYLALAHMIKFRGHFLIEGDLNPDNSDVDKLFIQLVQTYNQLFEENPINASGVDAKAILSARLSKSRRLENLIAQLPGEKKNGLFGNLIALSLGLTPNFKSNFDLAEDAKLQLSKDTYDDDLDNLLAQIGDQYADLFLAAKNLSDAILLSDILRVNTEITKAPLSASMIKRYDEHHQDLTLLKALVRQQLPEKYKEIFFDQSKNGYAGYIDGGASQEEFYKFIKPILEKMDGTEELLVKLNREDLLRKQRTFDNGSIPHQIHLGELHAILRRQEDFYPFLKDNREKIEKILTFRIPYYVGPLARGNSRFAWMTRKSEETITPWNFEEVVDKGASAQSFIERMTNFDKNLPNEKVLPKHSLLYEYFTVYNELTKVKYVTEGMRKPAFLSGEQKKAIVDLLFKTNRKVTVKQLKEDYFKKIECFDSVEISGVEDRFNASLGTYHDLLKIIKDKDFLDNEENEDILEDIVLTLTLFEDREMIEERLKTYAHLFDDKVMKQLKRRRYTGWGRLSRKLINGIRDKQSGKTILDFLKSDGFANRNFMQLIHDDSLTFKEDIQKAQVSGQGDSLHEHIANLAGSPAIKKGILQTVKVVDELVKVMGRHKPENIVIEMARENQTTQKGQKNSRERMKRIEEGIKELGSQILKEHPVENTQLQNEKLYLYYLQNGRDMYVDQELDINRLSDYDVDHIVPQSFLKDDSIDNKVLTRSDKARGKSDNVPSEEVVKKMKNYWRQLLNAKLITQRKFDNLTKAERGGLSELDKAGFIKRQLVETRQITKHVAQILDSRMNTKYDENDKLIREVKVITLKSKLVSDFRKDFQFYKVREINNYHHAHDAYLNAVVGTALIKKYPKLESEFVYGDYKVYDVRKMIAKSEQEIGKATAKYFFYSNIMNFFKTEITLANGEIRKRPLIETNGETGEIVWDKGRDFATVRKVLSMPQVNIVKKTEVQTGGFSKESILPKRNSDKLIARKKDWDPKKYGGFDSPTVAYSVLVVAKVEKGKSKKLKSVKELLGITIMERSSFEKNPIDFLEAKGYKEVKKDLIIKLPKYSLFELENGRKRMLASAGELQKGNELALPSKYVNFLYLASHYEKLKGSPEDNEQKQLFVEQHKHYLDEIIEQISEFSKRVILADANLDKVLSAYNKHRDKPIREQAENIIHLFTLTNLGAPAAFKYFDTTIDRKRYTSTKEVLDATLIHQSITGLYETRIDLSQLGGDGGGGGEAAAKPAPGGMDPLQLLQPLEAEIKGTKLKAHWNSGATITCVPQAFLEEEVPIKNIWIKTIHGEKEQPVYYLTFKIQGRKVEAEVISSPYDYILVSPSDIPWLMKKPLQLTTLVPLQEYEERLLKQTMLTGSYKEKLQSLFLKYDALWQHWENQVGHRRIKPHHIATGTVNPRPQKQYPINPKAKASIQTVINDLLKQGVLIQQNSIMNTPVYPVPKPDGKWRMVLDYREVNKTIPLIAAQNQHSAGILSSIFRGKYKTTLDLSNGFWAHSITPESYWLTAFTWLGQQYCWTRLPQGFLNSPALFNADVVDLLKEVPNVQVYVDDIYISHDDPREHLEQLEKVFSLLLNAGYVVSLKKSEIAQHEVEFLGFNITKEGRGLTETFKQKLLNITPPRDLKQLQSILGLLNFARNFIPNFSELVKPLYNIIATAPGKYITWTTDNSQQLQNIISMLNSAENLEERNPEVRLIMKVNTSPSAGYIRFYNEFAKRPIMYLNYVYTKAEVKFTNTEKLLTTIHKGLIKALDLGMGQEILVYSPIVSMTKIQKTPLPERKALPIRWITWMSYLEDPRIQFHYDKTLPELQQVPTVTDDIIAKIKHPSEFSMVFYTDGSAIKHPNVNKSHNAGMGIAQVQFKPEFTVINTWSIPLGDHTAQLAEVAAVEFACKKALKIDGPVLIVTDSFYVAESVNKELPYWQSNGFFNNKKKPLKHVSKWKSIADCIQLKPDIIIIHEKGHQPTASTFHTEGNNLADKLATQGSYVVNAGKRTADGSEFEKRTADGSEFESPKKKAKVE

SEQ ID NO: 622 - protein, 2176 aa, synthetic construct
MPAAKRVKLDGGDKKYSIGLDIGTNSVGWAVITDEYKVPSKKFKVLGNTDRHSIKKNLIGALLFDSGETAEATRLKRTARRRYTRRKNRICYLQEIFSNEMAKVDDSFFHRLEESFLVEEDKKHERHPIFGNIVDEVAYHEKYPTIYHLRKKLVDSTDKADLRLIYLALAHMIKFRGHFLIEGDLNPDNSDVDKLFIQLVQTYNQLFEENPINASGVDAKAILSARLSKSRRLENLIAQLPGEKKNGLFGNLIALSLGLTPNFKSNFDLAEDAKLQLSKDTYDDDLDNLLAQIGDQYADLFLAAKNLSDAILLSDILRVNTEITKAPLSASMIKRYDEHHQDLTLLKALVRQQLPEKYKEIFFDQSKNGYAGYIDGGASQEEFYKFIKPILEKMDGTEELLVKLNREDLLRKQRTFDNGSIPHQIHLGELHAILRRQEDFYPFLKDNREKIEKILTFRIPYYVGPLARGNSRFAWMTRKSEETITPWNFEEVVDKGASAQSFIERMTNFDKNLPNEKVLPKHSLLYEYFTVYNELTKVKYVTEGMRKPAFLSGEQKKAIVDLLFKTNRKVTVKQLKEDYFKKIECFDSVEISGVEDRFNASLGTYHDLLKIIKDKDFLDNEENEDILEDIVLTLTLFEDREMIEERLKTYAHLFDDKVMKQLKRRRYTGWGRLSRKLINGIRDKQSGKTILDFLKSDGFANRNFMQLIHDDSLTFKEDIQKAQVSGQGDSLHEHIANLAGSPAIKKGILQTVKVVDELVKVMGRHKPENIVIEMARENQTTQKGQKNSRERMKRIEEGIKELGSQILKEHPVENTQLQNEKLYLYYLQNGRDMYVDQELDINRLSDYDVDHIVPQSFLKDDSIDNKVLTRSDKARGKSDNVPSEEVVKKMKNYWRQLLNAKLITQRKFDNLTKAERGGLSELDKAGFIKRQLVETRQITKHVAQILDSRMNTKYDENDKLIREVKVITLKSKLVSDFRKDFQFYKVREINNYHHAHDAYLNAVVGTALIKKYPKLESEFVYGDYKVYDVRKMIAKSEQEIGKATAKYFFYSNIMNFFKTEITLANGEIRKRPLIETNGETGEIVWDKGRDFATVRKVLSMPQVNIVKKTEVQTGGFSKESILPKRNSDKLIARKKDWDPKKYGGFDSPTVAYSVLVVAKVEKGKSKKLKSVKELLGITIMERSSFEKNPIDFLEAKGYKEVKKDLIIKLPKYSLFELENGRKRMLASAGELQKGNELALPSKYVNFLYLASHYEKLKGSPEDNEQKQLFVEQHKHYLDEIIEQISEFSKRVILADANLDKVLSAYNKHRDKPIREQAENIIHLFTLTNLGAPAAFKYFDTTIDRKRYTSTKEVLDATLIHQSITGLYETRIDLSQLGGDGGPAPGGGEAAAKGGMDPLQLLQPLEAEIKGTKLKAHWNSGATITCVPQAFLEEEVPIKNIWIKTIHGEKEQPVYYLTFKIQGRKVEAEVISSPYDYILVSPSDIPWLMKKPLQLTTLVPLQEYEERLLKQTMLTGSYKEKLQSLFLKYDALWQHWENQVGHRRIKPHHIATGTVNPRPQKQYPINPKAKASIQTVINDLLKQGVLIQQNSIMNTPVYPVPKPDGKWRMVLDYREVNKTIPLIAAQNQHSAGILSSIFRGKYKTTLDLSNGFWAHSITPESYWLTAFTWLGQQYCWTRLPQGFLNSPALFNADVVDLLKEVPNVQVYVDDIYISHDDPREHLEQLEKVFSLLLNAGYVVSLKKSEIAQHEVEFLGFNITKEGRGLTETFKQKLLNITPPRDLKQLQSILGLLNFARNFIPNFSELVKPLYNIIATAPGKYITWTTDNSQQLQNIISMLNSAENLEERNPEVRLIMKVNTSPSAGYIRFYNEFAKRPIMYLNYVYTKAEVKFTNTEKLLTTIHKGLIKALDLGMGQEILVYSPIVSMTKIQKTPLPERKALPIRWITWMSYLEDPRIQFHYDKTLPELQQVPTVTDDIIAKIKHPSEFSMVFYTDGSAIKHPNVNKSHNAGMGIAQVQFKPEFTVINTWSIPLGDHTAQLAEVAAVEFACKKALKIDGPVLIVTDSFYVAESVNKELPYWQSNGFFNNKKKPLKHVSKWKSIADCIQLKPDIIIIHEKGHQPTASTFHTEGNNLADKLATQGSYVVNAGKRTADGSEFEKRTADGSEFESPKKKAKVE

SEQ ID NO: 623 - protein, 2168 aa, synthetic construct
MPAAKRVKLDGGDKKYSIGLDIGTNSVGWAVITDEYKVPSKKFKVLGNTDRHSIKKNLIGALLFDSGETAEATRLKRTARRRYTRRKNRICYLQEIFSNEMAKVDDSFFHRLEESFLVEEDKKHERHPIFGNIVDEVAYHEKYPTIYHLRKKLVDSTDKADLRLIYLALAHMIKFRGHFLIEGDLNPDNSDVDKLFIQLVQTYNQLFEENPINASGVDAKAILSARLSKSRRLENLIAQLPGEKKNGLFGNLIALSLGLTPNFKSNFDLAEDAKLQLSKDTYDDDLDNLLAQIGDQYADLFLAAKNLSDAILLSDILRVNTEITKAPLSASMIKRYDEHHQDLTLLKALVRQQLPEKYKEIFFDQSKNGYAGYIDGGASQEEFYKFIKPILEKMDGTEELLVKLNREDLLRKQRTFDNGSIPHQIHLGELHAILRRQEDFYPFLKDNREKIEKILTFRIPYYVGPLARGNSRFAWMTRKSEETITPWNFEEVVDKGASAQSFIERMTNFDKNLPNEKVLPKHSLLYEYFTVYNELTKVKYVTEGMRKPAFLSGEQKKAIVDLLFKTNRKVTVKQLKEDYFKKIECFDSVEISGVEDRFNASLGTYHDLLKIIKDKDFLDNEENEDILEDIVLTLTLFEDREMIEERLKTYAHLFDDKVMKQLKRRRYTGWGRLSRKLINGIRDKQSGKTILDFLKSDGFANRNFMQLIHDDSLTFKEDIQKAQVSGQGDSLHEHIANLAGSPAIKKGILQTVKVVDELVKVMGRHKPENIVIEMARENQTTQKGQKNSRERMKRIEEGIKELGSQILKEHPVENTQLQNEKLYLYYLQNGRDMYVDQELDINRLSDYDVDHIVPQSFLKDDSIDNKVLTRSDKARGKSDNVPSEEVVKKMKNYWRQLLNAKLITQRKFDNLTKAERGGLSELDKAGFIKRQLVETRQITKHVAQILDSRMNTKYDENDKLIREVKVITLKSKLVSDFRKDFQFYKVREINNYHHAHDAYLNAVVGTALIKKYPKLESEFVYGDYKVYDVRKMIAKSEQEIGKATAKYFFYSNIMNFFKTEITLANGEIRKRPLIETNGETGEIVWDKGRDFATVRKVLSMPQVNIVKKTEVQTGGFSKESILPKRNSDKLIARKKDWDPKKYGGFDSPTVAYSVLVVAKVEKGKSKKLKSVKELLGITIMERSSFEKNPIDFLEAKGYKEVKKDLIIKLPKYSLFELENGRKRMLASAGELQKGNELALPSKYVNFLYLASHYEKLKGSPEDNEQKQLFVEQHKHYLDEIIEQISEFSKRVILADANLDKVLSAYNKHRDKPIREQAENIIHLFTLTNLGAPAAFKYFDTTIDRKRYTSTKEVLDATLIHQSITGLYETRIDLSQLGGDGGGGGGGMDPLQLLQPLEAEIKGTKLKAHWNSGATITCVPQAFLEEEVPIKNIWIKTIHGEKEQPVYYLTFKIQGRKVEAEVISSPYDYILVSPSDIPWLMKKPLQLTTLVPLQEYEERLLKQTMLTGSYKEKLQSLFLKYDALWQHWENQVGHRRIKPHHIATGTVNPRPQKQYPINPKAKASIQTVINDLLKQGVLIQQNSIMNTPVYPVPKPDGKWRMVLDYREVNKTIPLIAAQNQHSAGILSSIFRGKYKTTLDLSNGFWAHSITPESYWLTAFTWLGQQYCWTRLPQGFLNSPALFNADVVDLLKEVPNVQVYVDDIYISHDDPREHLEQLEKVFSLLLNAGYVVSLKKSEIAQHEVEFLGFNITKEGRGLTETFKQKLLNITPPRDLKQLQSILGLLNFARNFIPNFSELVKPLYNIIATAPGKYITWTTDNSQQLQNIISMLNSAENLEERNPEVRLIMKVNTSPSAGYIRFYNEFAKRPIMYLNYVYTKAEVKFTNTEKLLTTIHKGLIKALDLGMGQEILVYSPIVSMTKIQKTPLPERKALPIRWITWMSYLEDPRIQFHYDKTLPELQQVPTVTDDIIAKIKHPSEFSMVFYTDGSAIKHPNVNKSHNAGMGIAQVQFKPEFTVINTWSIPLGDHTAQLAEVAAVEFACKKALKIDGPVLIVTDSFYVAESVNKELPYWQSNGFFNNKKKPLKHVSKWKSIADCIQLKPDIIIIHEKGHQPTASTFHTEGNNLADKLATQGSYVVNAGKRTADGSEFEKRTADGSEFESPKKKAKVE

SEQ ID NO: 624 - protein, 2180 aa, synthetic construct
MPAAKRVKLDGGDKKYSIGLDIGTNSVGWAVITDEYKVPSKKFKVLGNTDRHSIKKNLIGALLFDSGETAEATRLKRTARRRYTRRKNRICYLQEIFSNEMAKVDDSFFHRLEESFLVEEDKKHERHPIFGNIVDEVAYHEKYPTIYHLRKKLVDSTDKADLRLIYLALAHMIKFRGHFLIEGDLNPDNSDVDKLFIQLVQTYNQLFEENPINASGVDAKAILSARLSKSRRLENLIAQLPGEKKNGLFGNLIALSLGLTPNFKSNFDLAEDAKLQLSKDTYDDDLDNLLAQIGDQYADLFLAAKNLSDAILLSDILRVNTEITKAPLSASMIKRYDEHHQDLTLLKALVRQQLPEKYKEIFFDQSKNGYAGYIDGGASQEEFYKFIKPILEKMDGTEELLVKLNREDLLRKQRTFDNGSIPHQIHLGELHAILRRQEDFYPFLKDNREKIEKILTFRIPYYVGPLARGNSRFAWMTRKSEETITPWNFEEVVDKGASAQSFIERMTNFDKNLPNEKVLPKHSLLYEYFTVYNELTKVKYVTEGMRKPAFLSGEQKKAIVDLLFKTNRKVTVKQLKEDYFKKIECFDSVEISGVEDRFNASLGTYHDLLKIIKDKDFLDNEENEDILEDIVLTLTLFEDREMIEERLKTYAHLFDDKVMKQLKRRRYTGWGRLSRKLINGIRDKQSGKTILDFLKSDGFANRNFMQLIHDDSLTFKEDIQKAQVSGQGDSLHEHIANLAGSPAIKKGILQTVKVVDELVKVMGRHKPENIVIEMARENQTTQKGQKNSRERMKRIEEGIKELGSQILKEHPVENTQLQNEKLYLYYLQNGRDMYVDQELDINRLSDYDVDHIVPQSFLKDDSIDNKVLTRSDKARGKSDNVPSEEVVKKMKNYWRQLLNAKLITQRKFDNLTKAERGGLSELDKAGFIKRQLVETRQITKHVAQILDSRMNTKYDENDKLIREVKVITLKSKLVSDFRKDFQFYKVREINNYHHAHDAYLNAVVGTALIKKYPKLESEFVYGDYKVYDVRKMIAKSEQEIGKATAKYFFYSNIMNFFKTEITLANGEIRKRPLIETNGETGEIVWDKGRDFATVRKVLSMPQVNIVKKTEVQTGGFSKESILPKRNSDKLIARKKDWDPKKYGGFDSPTVAYSVLVVAKVEKGKSKKLKSVKELLGITIMERSSFEKNPIDFLEAKGYKEVKKDLIIKLPKYSLFELENGRKRMLASAGELQKGNELALPSKYVNFLYLASHYEKLKGSPEDNEQKQLFVEQHKHYLDEIIEQISEFSKRVILADANLDKVLSAYNKHRDKPIREQAENIIHLFTLTNLGAPAAFKYFDTTIDRKRYTSTKEVLDATLIHQSITGLYETRIDLSQLGGDGGEAAAKEAAAKEAAAKGGMDPLQLLQPLEAEIKGTKLKAHWNSGATITCVPQAFLEEEVPIKNIWIKTIHGEKEQPVYYLTFKIQGRKVEAEVISSPYDYILVSPSDIPWLMKKPLQLTTLVPLQEYEERLLKQTMLTGSYKEKLQSLFLKYDALWQHWENQVGHRRIKPHHIATGTVNPRPQKQYPINPKAKASIQTVINDLLKQGVLIQQNSIMNTPVYPVPKPDGKWRMVLDYREVNKTIPLIAAQNQHSAGILSSIFRGKYKTTLDLSNGFWAHSITPESYWLTAFTWLGQQYCWTRLPQGFLNSPALFNADVVDLLKEVPNVQVYVDDIYISHDDPREHLEQLEKVFSLLLNAGYVVSLKKSEIAQHEVEFLGFNITKEGRGLTETFKQKLLNITPPRDLKQLQSILGLLNFARNFIPNFSELVKPLYNIIATAPGKYITWTTDNSQQLQNIISMLNSAENLEERNPEVRLIMKVNTSPSAGYIRFYNEFAKRPIMYLNYVYTKAEVKFTNTEKLLTTIHKGLIKALDLGMGQEILVYSPIVSMTKIQKTPLPERKALPIRWITWMSYLEDPRIQFHYDKTLPELQQVPTVTDDIIAKIKHPSEFSMVFYTDGSAIKHPNVNKSHNAGMGIAQVQFKPEFTVINTWSIPLGDHTAQLAEVAAVEFACKKALKIDGPVLIVTDSFYVAESVNKELPYWQSNGFFNNKKKPLKHVSKWKSIADCIQLKPDIIIIHEKGHQPTASTFHTEGNNLADKLATQGSYVVNAGKRTADGSEFEKRTADGSEFESPKKKAKVE

SEQ ID NO: 625 - protein, 2173 aa, synthetic construct
MPAAKRVKLDGGDKKYSIGLDIGTNSVGWAVITDEYKVPSKKFKVLGNTDRHSIKKNLIGALLFDSGETAEATRLKRTARRRYTRRKNRICYLQEIFSNEMAKVDDSFFHRLEESFLVEEDKKHERHPIFGNIVDEVAYHEKYPTIYHLRKKLVDSTDKADLRLIYLALAHMIKFRGHFLIEGDLNPDNSDVDKLFIQLVQTYNQLFEENPINASGVDAKAILSARLSKSRRLENLIAQLPGEKKNGLFGNLIALSLGLTPNFKSNFDLAEDAKLQLSKDTYDDDLDNLLAQIGDQYADLFLAAKNLSDAILLSDILRVNTEITKAPLSASMIKRYDEHHQDLTLLKALVRQQLPEKYKEIFFDQSKNGYAGYIDGGASQEEFYKFIKPILEKMDGTEELLVKLNREDLLRKQRTFDNGSIPHQIHLGELHAILRRQEDFYPFLKDNREKIEKILTFRIPYYVGPLARGNSRFAWMTRKSEETITPWNFEEVVDKGASAQSFIERMTNFDKNLPNEKVLPKHSLLYEYFTVYNELTKVKYVTEGMRKPAFLSGEQKKAIVDLLFKTNRKVTVKQLKEDYFKKIECFDSVEISGVEDRFNASLGTYHDLLKIIKDKDFLDNEENEDILEDIVLTLTLFEDREMIEERLKTYAHLFDDKVMKQLKRRRYTGWGRLSRKLINGIRDKQSGKTILDFLKSDGFANRNFMQLIHDDSLTFKEDIQKAQVSGQGDSLHEHIANLAGSPAIKKGILQTVKVVDELVKVMGRHKPENIVIEMARENQTTQKGQKNSRERMKRIEEGIKELGSQILKEHPVENTQLQNEKLYLYYLQNGRDMYVDQELDINRLSDYDVDHIVPQSFLKDDSIDNKVLTRSDKARGKSDNVPSEEVVKKMKNYWRQLLNAKLITQRKFDNLTKAERGGLSELDKAGFIKRQLVETRQITKHVAQILDSRMNTKYDENDKLIREVKVITLKSKLVSDFRKDFQFYKVREINNYHHAHDAYLNAVVGTALIKKYPKLESEFVYGDYKVYDVRKMIAKSEQEIGKATAKYFFYSNIMNFFKTEITLANGEIRKRPLIETNGETGEIVWDKGRDFATVRKVLSMPQVNIVKKTEVQTGGFSKESILPKRNSDKLIARKKDWDPKKYGGFDSPTVAYSVLVVAKVEKGKSKKLKSVKELLGITIMERSSFEKNPIDFLEAKGYKEVKKDLIIKLPKYSLFELENGRKRMLASAGELQKGNELALPSKYVNFLYLASHYEKLKGSPEDNEQKQLFVEQHKHYLDEIIEQISEFSKRVILADANLDKVLSAYNKHRDKPIREQAENIIHLFTLTNLGAPAAFKYFDTTIDRKRYTSTKEVLDATLIHQSITGLYETRIDLSQLGGDGGEAAAKGGGGGMDPLQLLQPLEAEIKGTKLKAHWNSGATITCVPQAFLEEEVPIKNIWIKTIHGEKEQPVYYLTFKIQGRKVEAEVISSPYDYILVSPSDIPWLMKKPLQLTTLVPLQEYEERLLKQTMLTGSYKEKLQSLFLKYDALWQHWENQVGHRRIKPHHIATGTVNPRPQKQYPINPKAKASIQTVINDLLKQGVLIQQNSIMNTPVYPVPKPDGKWRMVLDYREVNKTIPLIAAQNQHSAGILSSIFRGKYKTTLDLSNGFWAHSITPESYWLTAFTWLGQQYCWTRLPQGFLNSPALFNADVVDLLKEVPNVQVYVDDIYISHDDPREHLEQLEKVFSLLLNAGYVVSLKKSEIAQHEVEFLGFNITKEGRGLTETFKQKLLNITPPRDLKQLQSILGLLNFARNFIPNFSELVKPLYNIIATAPGKYITWTTDNSQQLQNIISMLNSAENLEERNPEVRLIMKVNTSPSAGYIRFYNEFAKRPIMYLNYVYTKAEVKFTNTEKLLTTIHKGLIKALDLGMGQEILVYSPIVSMTKIQKTPLPERKALPIRWITWMSYLEDPRIQFHYDKTLPELQQVPTVTDDIIAKIKHPSEFSMVFYTDGSAIKHPNVNKSHNAGMGIAQVQFKPEFTVINTWSIPLGDHTAQLAEVAAVEFACKKALKIDGPVLIVTDSFYVAESVNKELPYWQSNGFFNNKKKPLKHVSKWKSIADCIQLKPDIIIIHEKGHQPTASTFHTEGNNLADKLATQGSYVVNAGKRTADGSEFEKRTADGSEFESPKKKAKVE

SEQ ID NO: 626 - protein, 2176 aa, synthetic construct
MPAAKRVKLDGGDKKYSIGLDIGTNSVGWAVITDEYKVPSKKFKVLGNTDRHSIKKNLIGALLFDSGETAEATRLKRTARRRYTRRKNRICYLQEIFSNEMAKVDDSFFHRLEESFLVEEDKKHERHPIFGNIVDEVAYHEKYPTIYHLRKKLVDSTDKADLRLIYLALAHMIKFRGHFLIEGDLNPDNSDVDKLFIQLVQTYNQLFEENPINASGVDAKAILSARLSKSRRLENLIAQLPGEKKNGLFGNLIALSLGLTPNFKSNFDLAEDAKLQLSKDTYDDDLDNLLAQIGDQYADLFLAAKNLSDAILLSDILRVNTEITKAPLSASMIKRYDEHHQDLTLLKALVRQQLPEKYKEIFFDQSKNGYAGYIDGGASQEEFYKFIKPILEKMDGTEELLVKLNREDLLRKQRTFDNGSIPHQIHLGELHAILRRQEDFYPFLKDNREKIEKILTFRIPYYVGPLARGNSRFAWMTRKSEETITPWNFEEVVDKGASAQSFIERMTNFDKNLPNEKVLPKHSLLYEYFTVYNELTKVKYVTEGMRKPAFLSGEQKKAIVDLLFKTNRKVTVKQLKEDYFKKIECFDSVEISGVEDRFNASLGTYHDLLKIIKDKDFLDNEENEDILEDIVLTLTLFEDREMIEERLKTYAHLFDDKVMKQLKRRRYTGWGRLSRKLINGIRDKQSGKTILDFLKSDGFANRNFMQLIHDDSLTFKEDIQKAQVSGQGDSLHEHIANLAGSPAIKKGILQTVKVVDELVKVMGRHKPENIVIEMARENQTTQKGQKNSRERMKRIEEGIKELGSQILKEHPVENTQLQNEKLYLYYLQNGRDMYVDQELDINRLSDYDVDHIVPQSFLKDDSIDNKVLTRSDKARGKSDNVPSEEVVKKMKNYWRQLLNAKLITQRKFDNLTKAERGGLSELDKAGFIKRQLVETRQITKHVAQILDSRMNTKYDENDKLIREVKVITLKSKLVSDFRKDFQFYKVREINNYHHAHDAYLNAVVGTALIKKYPKLESEFVYGDYKVYDVRKMIAKSEQEIGKATAKYFFYSNIMNFFKTEITLANGEIRKRPLIETNGETGEIVWDKGRDFATVRKVLSMPQVNIVKKTEVQTGGFSKESILPKRNSDKLIARKKDWDPKKYGGFDSPTVAYSVLVVAKVEKGKSKKLKSVKELLGITIMERSSFEKNPIDFLEAKGYKEVKKDLIIKLPKYSLFELENGRKRMLASAGELQKGNELALPSKYVNFLYLASHYEKLKGSPEDNEQKQLFVEQHKHYLDEIIEQISEFSKRVILADANLDKVLSAYNKHRDKPIREQAENIIHLFTLTNLGAPAAFKYFDTTIDRKRYTSTKEVLDATLIHQSITGLYETRIDLSQLGGDGGEAAAKGGGGGSGGMDPLQLLQPLEAEIKGTKLKAHWNSGATITCVPQAFLEEEVPIKNIWIKTIHGEKEQPVYYLTFKIQGRKVEAEVISSPYDYILVSPSDIPWLMKKPLQLTTLVPLQEYEERLLKQTMLTGSYKEKLQSLFLKYDALWQHWENQVGHRRIKPHHIATGTVNPRPQKQYPINPKAKASIQTVINDLLKQGVLIQQNSIMNTPVYPVPKPDGKWRMVLDYREVNKTIPLIAAQNQHSAGILSSIFRGKYKTTLDLSNGFWAHSITPESYWLTAFTWLGQQYCWTRLPQGFLNSPALFNADVVDLLKEVPNVQVYVDDIYISHDDPREHLEQLEKVFSLLLNAGYVVSLKKSEIAQHEVEFLGFNITKEGRGLTETFKQKLLNITPPRDLKQLQSILGLLNFARNFIPNFSELVKPLYNIIATAPGKYITWTTDNSQQLQNIISMLNSAENLEERNPEVRLIMKVNTSPSAGYIRFYNEFAKRPIMYLNYVYTKAEVKFTNTEKLLTTIHKGLIKALDLGMGQEILVYSPIVSMTKIQKTPLPERKALPIRWITWMSYLEDPRIQFHYDKTLPELQQVPTVTDDIIAKIKHPSEFSMVFYTDGSAIKHPNVNKSHNAGMGIAQVQFKPEFTVINTWSIPLGDHTAQLAEVAAVEFACKKALKIDGPVLIVTDSFYVAESVNKELPYWQSNGFFNNKKKPLKHVSKWKSIADCIQLKPDIIIIHEKGHQPTASTFHTEGNNLADKLATQGSYVVNAGKRTADGSEFEKRTADGSEFESPKKKAKVE

SEQ ID NO: 627 - protein, 2177 aa, synthetic construct
MPAAKRVKLDGGDKKYSIGLDIGTNSVGWAVITDEYKVPSKKFKVLGNTDRHSIKKNLIGALLFDSGETAEATRLKRTARRRYTRRKNRICYLQEIFSNEMAKVDDSFFHRLEESFLVEEDKKHERHPIFGNIVDEVAYHEKYPTIYHLRKKLVDSTDKADLRLIYLALAHMIKFRGHFLIEGDLNPDNSDVDKLFIQLVQTYNQLFEENPINASGVDAKAILSARLSKSRRLENLIAQLPGEKKNGLFGNLIALSLGLTPNFKSNFDLAEDAKLQLSKDTYDDDLDNLLAQIGDQYADLFLAAKNLSDAILLSDILRVNTEITKAPLSASMIKRYDEHHQDLTLLKALVRQQLPEKYKEIFFDQSKNGYAGYIDGGASQEEFYKFIKPILEKMDGTEELLVKLNREDLLRKQRTFDNGSIPHQIHLGELHAILRRQEDFYPFLKDNREKIEKILTFRIPYYVGPLARGNSRFAWMTRKSEETITPWNFEEVVDKGASAQSFIERMTNFDKNLPNEKVLPKHSLLYEYFTVYNELTKVKYVTEGMRKPAFLSGEQKKAIVDLLFKTNRKVTVKQLKEDYFKKIECFDSVEISGVEDRFNASLGTYHDLLKIIKDKDFLDNEENEDILEDIVLTLTLFEDREMIEERLKTYAHLFDDKVMKQLKRRRYTGWGRLSRKLINGIRDKQSGKTILDFLKSDGFANRNFMQLIHDDSLTFKEDIQKAQVSGQGDSLHEHIANLAGSPAIKKGILQTVKVVDELVKVMGRHKPENIVIEMARENQTTQKGQKNSRERMKRIEEGIKELGSQILKEHPVENTQLQNEKLYLYYLQNGRDMYVDQELDINRLSDYDVDHIVPQSFLKDDSIDNKVLTRSDKARGKSDNVPSEEVVKKMKNYWRQLLNAKLITQRKFDNLTKAERGGLSELDKAGFIKRQLVETRQITKHVAQILDSRMNTKYDENDKLIREVKVITLKSKLVSDFRKDFQFYKVREINNYHHAHDAYLNAVVGTALIKKYPKLESEFVYGDYKVYDVRKMIAKSEQEIGKATAKYFFYSNIMNFFKTEITLANGEIRKRPLIETNGETGEIVWDKGRDFATVRKVLSMPQVNIVKKTEVQTGGFSKESILPKRNSDKLIARKKDWDPKKYGGFDSPTVAYSVLVVAKVEKGKSKKLKSVKELLGITIMERSSFEKNPIDFLEAKGYKEVKKDLIIKLPKYSLFELENGRKRMLASAGELQKGNELALPSKYVNFLYLASHYEKLKGSPEDNEQKQLFVEQHKHYLDEIIEQISEFSKRVILADANLDKVLSAYNKHRDKPIREQAENIIHLFTLTNLGAPAAFKYFDTTIDRKRYTSTKEVLDATLIHQSITGLYETRIDLSQLGGDGGGSSGSSGSSGSSGGMDPLQLLQPLEAEIKGTKLKAHWNSGATITCVPQAFLEEEVPIKNIWIKTIHGEKEQPVYYLTFKIQGRKVEAEVISSPYDYILVSPSDIPWLMKKPLQLTTLVPLQEYEERLLKQTMLTGSYKEKLQSLFLKYDALWQHWENQVGHRRIKPHHIATGTVNPRPQKQYPINPKAKASIQTVINDLLKQGVLIQQNSIMNTPVYPVPKPDGKWRMVLDYREVNKTIPLIAAQNQHSAGILSSIFRGKYKTTLDLSNGFWAHSITPESYWLTAFTWLGQQYCWTRLPQGFLNSPALFNADVVDLLKEVPNVQVYVDDIYISHDDPREHLEQLEKVFSLLLNAGYVVSLKKSEIAQHEVEFLGFNITKEGRGLTETFKQKLLNITPPRDLKQLQSILGLLNFARNFIPNFSELVKPLYNIIATAPGKYITWTTDNSQQLQNIISMLNSAENLEERNPEVRLIMKVNTSPSAGYIRFYNEFAKRPIMYLNYVYTKAEVKFTNTEKLLTTIHKGLIKALDLGMGQEILVYSPIVSMTKIQKTPLPERKALPIRWITWMSYLEDPRIQFHYDKTLPELQQVPTVTDDIIAKIKHPSEFSMVFYTDGSAIKHPNVNKSHNAGMGIAQVQFKPEFTVINTWSIPLGDHTAQLAEVAAVEFACKKALKIDGPVLIVTDSFYVAESVNKELPYWQSNGFFNNKKKPLKHVSKWKSIADCIQLKPDIIIIHEKGHQPTASTFHTEGNNLADKLATQGSYVVNAGKRTADGSEFEKRTADGSEFESPKKKAKVE

SEQ ID NO: 628 - protein, 2176 aa, synthetic construct
MPAAKRVKLDGGDKKYSIGLDIGTNSVGWAVITDEYKVPSKKFKVLGNTDRHSIKKNLIGALLFDSGETAEATRLKRTARRRYTRRKNRICYLQEIFSNEMAKVDDSFFHRLEESFLVEEDKKHERHPIFGNIVDEVAYHEKYPTIYHLRKKLVDSTDKADLRLIYLALAHMIKFRGHFLIEGDLNPDNSDVDKLFIQLVQTYNQLFEENPINASGVDAKAILSARLSKSRRLENLIAQLPGEKKNGLFGNLIALSLGLTPNFKSNFDLAEDAKLQLSKDTYDDDLDNLLAQIGDQYADLFLAAKNLSDAILLSDILRVNTEITKAPLSASMIKRYDEHHQDLTLLKALVRQQLPEKYKEIFFDQSKNGYAGYIDGGASQEEFYKFIKPILEKMDGTEELLVKLNREDLLRKQRTFDNGSIPHQIHLGELHAILRRQEDFYPFLKDNREKIEKILTFRIPYYVGPLARGNSRFAWMTRKSEETITPWNFEEVVDKGASAQSFIERMTNFDKNLPNEKVLPKHSLLYEYFTVYNELTKVKYVTEGMRKPAFLSGEQKKAIVDLLFKTNRKVTVKQLKEDYFKKIECFDSVEISGVEDRFNASLGTYHDLLKIIKDKDFLDNEENEDILEDIVLTLTLFEDREMIEERLKTYAHLFDDKVMKQLKRRRYTGWGRLSRKLINGIRDKQSGKTILDFLKSDGFANRNFMQLIHDDSLTFKEDIQKAQVSGQGDSLHEHIANLAGSPAIKKGILQTVKVVDELVKVMGRHKPENIVIEMARENQTTQKGQKNSRERMKRIEEGIKELGSQILKEHPVENTQLQNEKLYLYYLQNGRDMYVDQELDINRLSDYDVDHIVPQSFLKDDSIDNKVLTRSDKARGKSDNVPSEEVVKKMKNYWRQLLNAKLITQRKFDNLTKAERGGLSELDKAGFIKRQLVETRQITKHVAQILDSRMNTKYDENDKLIREVKVITLKSKLVSDFRKDFQFYKVREINNYHHAHDAYLNAVVGTALIKKYPKLESEFVYGDYKVYDVRKMIAKSEQEIGKATAKYFFYSNIMNFFKTEITLANGEIRKRPLIETNGETGEIVWDKGRDFATVRKVLSMPQVNIVKKTEVQTGGFSKESILPKRNSDKLIARKKDWDPKKYGGFDSPTVAYSVLVVAKVEKGKSKKLKSVKELLGITIMERSSFEKNPIDFLEAKGYKEVKKDLIIKLPKYSLFELENGRKRMLASAGELQKGNELALPSKYVNFLYLASHYEKLKGSPEDNEQKQLFVEQHKHYLDEIIEQISEFSKRVILADANLDKVLSAYNKHRDKPIREQAENIIHLFTLTNLGAPAAFKYFDTTIDRKRYTSTKEVLDATLIHQSITGLYETRIDLSQLGGDGGGSSEAAAKGGSGGMDPLQLLQPLEAEIKGTKLKAHWNSGATITCVPQAFLEEEVPIKNIWIKTIHGEKEQPVYYLTFKIQGRKVEAEVISSPYDYILVSPSDIPWLMKKPLQLTTLVPLQEYEERLLKQTMLTGSYKEKLQSLFLKYDALWQHWENQVGHRRIKPHHIATGTVNPRPQKQYPINPKAKASIQTVINDLLKQGVLIQQNSIMNTPVYPVPKPDGKWRMVLDYREVNKTIPLIAAQNQHSAGILSSIFRGKYKTTLDLSNGFWAHSITPESYWLTAFTWLGQQYCWTRLPQGFLNSPALFNADVVDLLKEVPNVQVYVDDIYISHDDPREHLEQLEKVFSLLLNAGYVVSLKKSEIAQHEVEFLGFNITKEGRGLTETFKQKLLNITPPRDLKQLQSILGLLNFARNFIPNFSELVKPLYNIIATAPGKYITWTTDNSQQLQNIISMLNSAENLEERNPEVRLIMKVNTSPSAGYIRFYNEFAKRPIMYLNYVYTKAEVKFTNTEKLLTTIHKGLIKALDLGMGQEILVYSPIVSMTKIQKTPLPERKALPIRWITWMSYLEDPRIQFHYDKTLPELQQVPTVTDDIIAKIKHPSEFSMVFYTDGSAIKHPNVNKSHNAGMGIAQVQFKPEFTVINTWSIPLGDHTAQLAEVAAVEFACKKALKIDGPVLIVTDSFYVAESVNKELPYWQSNGFFNNKKKPLKHVSKWKSIADCIQLKPDIIIIHEKGHQPTASTFHTEGNNLADKLATQGSYVVNAGKRTADGSEFEKRTADGSEFESPKKKAKVE

SEQ ID NO: 629 - protein, 2176 aa, synthetic construct
MPAAKRVKLDGGDKKYSIGLDIGTNSVGWAVITDEYKVPSKKFKVLGNTDRHSIKKNLIGALLFDSGETAEATRLKRTARRRYTRRKNRICYLQEIFSNEMAKVDDSFFHRLEESFLVEEDKKHERHPIFGNIVDEVAYHEKYPTIYHLRKKLVDSTDKADLRLIYLALAHMIKFRGHFLIEGDLNPDNSDVDKLFIQLVQTYNQLFEENPINASGVDAKAILSARLSKSRRLENLIAQLPGEKKNGLFGNLIALSLGLTPNFKSNFDLAEDAKLQLSKDTYDDDLDNLLAQIGDQYADLFLAAKNLSDAILLSDILRVNTEITKAPLSASMIKRYDEHHQDLTLLKALVRQQLPEKYKEIFFDQSKNGYAGYIDGGASQEEFYKFIKPILEKMDGTEELLVKLNREDLLRKQRTFDNGSIPHQIHLGELHAILRRQEDFYPFLKDNREKIEKILTFRIPYYVGPLARGNSRFAWMTRKSEETITPWNFEEVVDKGASAQSFIERMTNFDKNLPNEKVLPKHSLLYEYFTVYNELTKVKYVTEGMRKPAFLSGEQKKAIVDLLFKTNRKVTVKQLKEDYFKKIECFDSVEISGVEDRFNASLGTYHDLLKIIKDKDFLDNEENEDILEDIVLTLTLFEDREMIEERLKTYAHLFDDKVMKQLKRRRYTGWGRLSRKLINGIRDKQSGKTILDFLKSDGFANRNFMQLIHDDSLTFKEDIQKAQVSGQGDSLHEHIANLAGSPAIKKGILQTVKVVDELVKVMGRHKPENIVIEMARENQTTQKGQKNSRERMKRIEEGIKELGSQILKEHPVENTQLQNEKLYLYYLQNGRDMYVDQELDINRLSDYDVDHIVPQSFLKDDSIDNKVLTRSDKARGKSDNVPSEEVVKKMKNYWRQLLNAKLITQRKFDNLTKAERGGLSELDKAGFIKRQLVETRQITKHVAQILDSRMNTKYDENDKLIREVKVITLKSKLVSDFRKDFQFYKVREINNYHHAHDAYLNAVVGTALIKKYPKLESEFVYGDYKVYDVRKMIAKSEQEIGKATAKYFFYSNIMNFFKTEITLANGEIRKRPLIETNGETGEIVWDKGRDFATVRKVLSMPQVNIVKKTEVQTGGFSKESILPKRNSDKLIARKKDWDPKKYGGFDSPTVAYSVLVVAKVEKGKSKKLKSVKELLGITIMERSSFEKNPIDFLEAKGYKEVKKDLIIKLPKYSLFELENGRKRMLASAGELQKGNELALPSKYVNFLYLASHYEKLKGSPEDNEQKQLFVEQHKHYLDEIIEQISEFSKRVILADANLDKVLSAYNKHRDKPIREQAENIIHLFTLTNLGAPAAFKYFDTTIDRKRYTSTKEVLDATLIHQSITGLYETRIDLSQLGGDGGEAAAKGGSPAPGGMDPLQLLQPLEAEIKGTKLKAHWNSGATITCVPQAFLEEEVPIKNIWIKTIHGEKEQPVYYLTFKIQGRKVEAEVISSPYDYILVSPSDIPWLMKKPLQLTTLVPLQEYEERLLKQTMLTGSYKEKLQSLFLKYDALWQHWENQVGHRRIKPHHIATGTVNPRPQKQYPINPKAKASIQTVINDLLKQGVLIQQNSIMNTPVYPVPKPDGKWRMVLDYREVNKTIPLIAAQNQHSAGILSSIFRGKYKTTLDLSNGFWAHSITPESYWLTAFTWLGQQYCWTRLPQGFLNSPALFNADVVDLLKEVPNVQVYVDDIYISHDDPREHLEQLEKVFSLLLNAGYVVSLKKSEIAQHEVEFLGFNITKEGRGLTETFKQKLLNITPPRDLKQLQSILGLLNFARNFIPNFSELVKPLYNIIATAPGKYITWTTDNSQQLQNIISMLNSAENLEERNPEVRLIMKVNTSPSAGYIRFYNEFAKRPIMYLNYVYTKAEVKFTNTEKLLTTIHKGLIKALDLGMGQEILVYSPIVSMTKIQKTPLPERKALPIRWITWMSYLEDPRIQFHYDKTLPELQQVPTVTDDIIAKIKHPSEFSMVFYTDGSAIKHPNVNKSHNAGMGIAQVQFKPEFTVINTWSIPLGDHTAQLAEVAAVEFACKKALKIDGPVLIVTDSFYVAESVNKELPYWQSNGFFNNKKKPLKHVSKWKSIADCIQLKPDIIIIHEKGHQPTASTFHTEGNNLADKLATQGSYVVNAGKRTADGSEFEKRTADGSEFESPKKKAKVE

SEQ ID NO: 630 - protein, 2176 aa, synthetic construct
MPAAKRVKLDGGDKKYSIGLDIGTNSVGWAVITDEYKVPSKKFKVLGNTDRHSIKKNLIGALLFDSGETAEATRLKRTARRRYTRRKNRICYLQEIFSNEMAKVDDSFFHRLEESFLVEEDKKHERHPIFGNIVDEVAYHEKYPTIYHLRKKLVDSTDKADLRLIYLALAHMIKFRGHFLIEGDLNPDNSDVDKLFIQLVQTYNQLFEENPINASGVDAKAILSARLSKSRRLENLIAQLPGEKKNGLFGNLIALSLGLTPNFKSNFDLAEDAKLQLSKDTYDDDLDNLLAQIGDQYADLFLAAKNLSDAILLSDILRVNTEITKAPLSASMIKRYDEHHQDLTLLKALVRQQLPEKYKEIFFDQSKNGYAGYIDGGASQEEFYKFIKPILEKMDGTEELLVKLNREDLLRKQRTFDNGSIPHQIHLGELHAILRRQEDFYPFLKDNREKIEKILTFRIPYYVGPLARGNSRFAWMTRKSEETITPWNFEEVVDKGASAQSFIERMTNFDKNLPNEKVLPKHSLLYEYFTVYNELTKVKYVTEGMRKPAFLSGEQKKAIVDLLFKTNRKVTVKQLKEDYFKKIECFDSVEISGVEDRFNASLGTYHDLLKIIKDKDFLDNEENEDILEDIVLTLTLFEDREMIEERLKTYAHLFDDKVMKQLKRRRYTGWGRLSRKLINGIRDKQSGKTILDFLKSDGFANRNFMQLIHDDSLTFKEDIQKAQVSGQGDSLHEHIANLAGSPAIKKGILQTVKVVDELVKVMGRHKPENIVIEMARENQTTQKGQKNSRERMKRIEEGIKELGSQILKEHPVENTQLQNEKLYLYYLQNGRDMYVDQELDINRLSDYDVDHIVPQSFLKDDSIDNKVLTRSDKARGKSDNVPSEEVVKKMKNYWRQLLNAKLITQRKFDNLTKAERGGLSELDKAGFIKRQLVETRQITKHVAQILDSRMNTKYDENDKLIREVKVITLKSKLVSDFRKDFQFYKVREINNYHHAHDAYLNAVVGTALIKKYPKLESEFVYGDYKVYDVRKMIAKSEQEIGKATAKYFFYSNIMNFFKTEITLANGEIRKRPLIETNGETGEIVWDKGRDFATVRKVLSMPQVNIVKKTEVQTGGFSKESILPKRNSDKLIARKKDWDPKKYGGFDSPTVAYSVLVVAKVEKGKSKKLKSVKELLGITIMERSSFEKNPIDFLEAKGYKEVKKDLIIKLPKYSLFELENGRKRMLASAGELQKGNELALPSKYVNFLYLASHYEKLKGSPEDNEQKQLFVEQHKHYLDEIIEQISEFSKRVILADANLDKVLSAYNKHRDKPIREQAENIIHLFTLTNLGAPAAFKYFDTTIDRKRYTSTKEVLDATLIHQSITGLYETRIDLSQLGGDGGGGGGGSEAAAKGGMDPLQLLQPLEAEIKGTKLKAHWNSGATITCVPQAFLEEEVPIKNIWIKTIHGEKEQPVYYLTFKIQGRKVEAEVISSPYDYILVSPSDIPWLMKKPLQLTTLVPLQEYEERLLKQTMLTGSYKEKLQSLFLKYDALWQHWENQVGHRRIKPHHIATGTVNPRPQKQYPINPKAKASIQTVINDLLKQGVLIQQNSIMNTPVYPVPKPDGKWRMVLDYREVNKTIPLIAAQNQHSAGILSSIFRGKYKTTLDLSNGFWAHSITPESYWLTAFTWLGQQYCWTRLPQGFLNSPALFNADVVDLLKEVPNVQVYVDDIYISHDDPREHLEQLEKVFSLLLNAGYVVSLKKSEIAQHEVEFLGFNITKEGRGLTETFKQKLLNITPPRDLKQLQSILGLLNFARNFIPNFSELVKPLYNIIATAPGKYITWTTDNSQQLQNIISMLNSAENLEERNPEVRLIMKVNTSPSAGYIRFYNEFAKRPIMYLNYVYTKAEVKFTNTEKLLTTIHKGLIKALDLGMGQEILVYSPIVSMTKIQKTPLPERKALPIRWITWMSYLEDPRIQFHYDKTLPELQQVPTVTDDIIAKIKHPSEFSMVFYTDGSAIKHPNVNKSHNAGMGIAQVQFKPEFTVINTWSIPLGDHTAQLAEVAAVEFACKKALKIDGPVLIVTDSFYVAESVNKELPYWQSNGFFNNKKKPLKHVSKWKSIADCIQLKPDIIIIHEKGHQPTASTFHTEGNNLADKLATQGSYVVNAGKRTADGSEFEKRTADGSEFESPKKKAKVE

SEQ ID NO: 631 - protein, 2174 aa, synthetic construct
MPAAKRVKLDGGDKKYSIGLDIGTNSVGWAVITDEYKVPSKKFKVLGNTDRHSIKKNLIGALLFDSGETAEATRLKRTARRRYTRRKNRICYLQEIFSNEMAKVDDSFFHRLEESFLVEEDKKHERHPIFGNIVDEVAYHEKYPTIYHLRKKLVDSTDKADLRLIYLALAHMIKFRGHFLIEGDLNPDNSDVDKLFIQLVQTYNQLFEENPINASGVDAKAILSARLSKSRRLENLIAQLPGEKKNGLFGNLIALSLGLTPNFKSNFDLAEDAKLQLSKDTYDDDLDNLLAQIGDQYADLFLAAKNLSDAILLSDILRVNTEITKAPLSASMIKRYDEHHQDLTLLKALVRQQLPEKYKEIFFDQSKNGYAGYIDGGASQEEFYKFIKPILEKMDGTEELLVKLNREDLLRKQRTFDNGSIPHQIHLGELHAILRRQEDFYPFLKDNREKIEKILTFRIPYYVGPLARGNSRFAWMTRKSEETITPWNFEEVVDKGASAQSFIERMTNFDKNLPNEKVLPKHSLLYEYFTVYNELTKVKYVTEGMRKPAFLSGEQKKAIVDLLFKTNRKVTVKQLKEDYFKKIECFDSVEISGVEDRFNASLGTYHDLLKIIKDKDFLDNEENEDILEDIVLTLTLFEDREMIEERLKTYAHLFDDKVMKQLKRRRYTGWGRLSRKLINGIRDKQSGKTILDFLKSDGFANRNFMQLIHDDSLTFKEDIQKAQVSGQGDSLHEHIANLAGSPAIKKGILQTVKVVDELVKVMGRHKPENIVIEMARENQTTQKGQKNSRERMKRIEEGIKELGSQILKEHPVENTQLQNEKLYLYYLQNGRDMYVDQELDINRLSDYDVDHIVPQSFLKDDSIDNKVLTRSDKARGKSDNVPSEEVVKKMKNYWRQLLNAKLITQRKFDNLTKAERGGLSELDKAGFIKRQLVETRQITKHVAQILDSRMNTKYDENDKLIREVKVITLKSKLVSDFRKDFQFYKVREINNYHHAHDAYLNAVVGTALIKKYPKLESEFVYGDYKVYDVRKMIAKSEQEIGKATAKYFFYSNIMNFFKTEITLANGEIRKRPLIETNGETGEIVWDKGRDFATVRKVLSMPQVNIVKKTEVQTGGFSKESILPKRNSDKLIARKKDWDPKKYGGFDSPTVAYSVLVVAKVEKGKSKKLKSVKELLGITIMERSSFEKNPIDFLEAKGYKEVKKDLIIKLPKYSLFELENGRKRMLASAGELQKGNELALPSKYVNFLYLASHYEKLKGSPEDNEQKQLFVEQHKHYLDEIIEQISEFSKRVILADANLDKVLSAYNKHRDKPIREQAENIIHLFTLTNLGAPAAFKYFDTTIDRKRYTSTKEVLDATLIHQSITGLYETRIDLSQLGGDGGGGGGSSPAPGGMDPLQLLQPLEAEIKGTKLKAHWNSGATITCVPQAFLEEEVPIKNIWIKTIHGEKEQPVYYLTFKIQGRKVEAEVISSPYDYILVSPSDIPWLMKKPLQLTTLVPLQEYEERLLKQTMLTGSYKEKLQSLFLKYDALWQHWENQVGHRRIKPHHIATGTVNPRPQKQYPINPKAKASIQTVINDLLKQGVLIQQNSIMNTPVYPVPKPDGKWRMVLDYREVNKTIPLIAAQNQHSAGILSSIFRGKYKTTLDLSNGFWAHSITPESYWLTAFTWLGQQYCWTRLPQGFLNSPALFNADVVDLLKEVPNVQVYVDDIYISHDDPREHLEQLEKVFSLLLNAGYVVSLKKSEIAQHEVEFLGFNITKEGRGLTETFKQKLLNITPPRDLKQLQSILGLLNFARNFIPNFSELVKPLYNIIATAPGKYITWTTDNSQQLQNIISMLNSAENLEERNPEVRLIMKVNTSPSAGYIRFYNEFAKRPIMYLNYVYTKAEVKFTNTEKLLTTIHKGLIKALDLGMGQEILVYSPIVSMTKIQKTPLPERKALPIRWITWMSYLEDPRIQFHYDKTLPELQQVPTVTDDIIAKIKHPSEFSMVFYTDGSAIKHPNVNKSHNAGMGIAQVQFKPEFTVINTWSIPLGDHTAQLAEVAAVEFACKKALKIDGPVLIVTDSFYVAESVNKELPYWQSNGFFNNKKKPLKHVSKWKSIADCIQLKPDIIIIHEKGHQPTASTFHTEGNNLADKLATQGSYVVNAGKRTADGSEFEKRTADGSEFESPKKKAKVE

SEQ ID NO: 632 - protein, 2176 aa, synthetic construct
MPAAKRVKLDGGDKKYSIGLDIGTNSVGWAVITDEYKVPSKKFKVLGNTDRHSIKKNLIGALLFDSGETAEATRLKRTARRRYTRRKNRICYLQEIFSNEMAKVDDSFFHRLEESFLVEEDKKHERHPIFGNIVDEVAYHEKYPTIYHLRKKLVDSTDKADLRLIYLALAHMIKFRGHFLIEGDLNPDNSDVDKLFIQLVQTYNQLFEENPINASGVDAKAILSARLSKSRRLENLIAQLPGEKKNGLFGNLIALSLGLTPNFKSNFDLAEDAKLQLSKDTYDDDLDNLLAQIGDQYADLFLAAKNLSDAILLSDILRVNTEITKAPLSASMIKRYDEHHQDLTLLKALVRQQLPEKYKEIFFDQSKNGYAGYIDGGASQEEFYKFIKPILEKMDGTEELLVKLNREDLLRKQRTFDNGSIPHQIHLGELHAILRRQEDFYPFLKDNREKIEKILTFRIPYYVGPLARGNSRFAWMTRKSEETITPWNFEEVVDKGASAQSFIERMTNFDKNLPNEKVLPKHSLLYEYFTVYNELTKVKYVTEGMRKPAFLSGEQKKAIVDLLFKTNRKVTVKQLKEDYFKKIECFDSVEISGVEDRFNASLGTYHDLLKIIKDKDFLDNEENEDILEDIVLTLTLFEDREMIEERLKTYAHLFDDKVMKQLKRRRYTGWGRLSRKLINGIRDKQSGKTILDFLKSDGFANRNFMQLIHDDSLTFKEDIQKAQVSGQGDSLHEHIANLAGSPAIKKGILQTVKVVDELVKVMGRHKPENIVIEMARENQTTQKGQKNSRERMKRIEEGIKELGSQILKEHPVENTQLQNEKLYLYYLQNGRDMYVDQELDINRLSDYDVDHIVPQSFLKDDSIDNKVLTRSDKARGKSDNVPSEEVVKKMKNYWRQLLNAKLITQRKFDNLTKAERGGLSELDKAGFIKRQLVETRQITKHVAQILDSRMNTKYDENDKLIREVKVITLKSKLVSDFRKDFQFYKVREINNYHHAHDAYLNAVVGTALIKKYPKLESEFVYGDYKVYDVRKMIAKSEQEIGKATAKYFFYSNIMNFFKTEITLANGEIRKRPLIETNGETGEIVWDKGRDFATVRKVLSMPQVNIVKKTEVQTGGFSKESILPKRNSDKLIARKKDWDPKKYGGFDSPTVAYSVLVVAKVEKGKSKKLKSVKELLGITIMERSSFEKNPIDFLEAKGYKEVKKDLIIKLPKYSLFELENGRKRMLASAGELQKGNELALPSKYVNFLYLASHYEKLKGSPEDNEQKQLFVEQHKHYLDEIIEQISEFSKRVILADANLDKVLSAYNKHRDKPIREQAENIIHLFTLTNLGAPAAFKYFDTTIDRKRYTSTKEVLDATLIHQSITGLYETRIDLSQLGGDGGEAAAKPAPGSSGGMDPLQLLQPLEAEIKGTKLKAHWNSGATITCVPQAFLEEEVPIKNIWIKTIHGEKEQPVYYLTFKIQGRKVEAEVISSPYDYILVSPSDIPWLMKKPLQLTTLVPLQEYEERLLKQTMLTGSYKEKLQSLFLKYDALWQHWENQVGHRRIKPHHIATGTVNPRPQKQYPINPKAKASIQTVINDLLKQGVLIQQNSIMNTPVYPVPKPDGKWRMVLDYREVNKTIPLIAAQNQHSAGILSSIFRGKYKTTLDLSNGFWAHSITPESYWLTAFTWLGQQYCWTRLPQGFLNSPALFNADVVDLLKEVPNVQVYVDDIYISHDDPREHLEQLEKVFSLLLNAGYVVSLKKSEIAQHEVEFLGFNITKEGRGLTETFKQKLLNITPPRDLKQLQSILGLLNFARNFIPNFSELVKPLYNIIATAPGKYITWTTDNSQQLQNIISMLNSAENLEERNPEVRLIMKVNTSPSAGYIRFYNEFAKRPIMYLNYVYTKAEVKFTNTEKLLTTIHKGLIKALDLGMGQEILVYSPIVSMTKIQKTPLPERKALPIRWITWMSYLEDPRIQFHYDKTLPELQQVPTVTDDIIAKIKHPSEFSMVFYTDGSAIKHPNVNKSHNAGMGIAQVQFKPEFTVINTWSIPLGDHTAQLAEVAAVEFACKKALKIDGPVLIVTDSFYVAESVNKELPYWQSNGFFNNKKKPLKHVSKWKSIADCIQLKPDIIIIHEKGHQPTASTFHTEGNNLADKLATQGSYVVNAGKRTADGSEFEKRTADGSEFESPKKKAKVE

SEQ ID NO: 633 - protein, 2176 aa, synthetic construct
MPAAKRVKLDGGDKKYSIGLDIGTNSVGWAVITDEYKVPSKKFKVLGNTDRHSIKKNLIGALLFDSGETAEATRLKRTARRRYTRRKNRICYLQEIFSNEMAKVDDSFFHRLEESFLVEEDKKHERHPIFGNIVDEVAYHEKYPTIYHLRKKLVDSTDKADLRLIYLALAHMIKFRGHFLIEGDLNPDNSDVDKLFIQLVQTYNQLFEENPINASGVDAKAILSARLSKSRRLENLIAQLPGEKKNGLFGNLIALSLGLTPNFKSNFDLAEDAKLQLSKDTYDDDLDNLLAQIGDQYADLFLAAKNLSDAILLSDILRVNTEITKAPLSASMIKRYDEHHQDLTLLKALVRQQLPEKYKEIFFDQSKNGYAGYIDGGASQEEFYKFIKPILEKMDGTEELLVKLNREDLLRKQRTFDNGSIPHQIHLGELHAILRRQEDFYPFLKDNREKIEKILTFRIPYYVGPLARGNSRFAWMTRKSEETITPWNFEEVVDKGASAQSFIERMTNFDKNLPNEKVLPKHSLLYEYFTVYNELTKVKYVTEGMRKPAFLSGEQKKAIVDLLFKTNRKVTVKQLKEDYFKKIECFDSVEISGVEDRFNASLGTYHDLLKIIKDKDFLDNEENEDILEDIVLTLTLFEDREMIEERLKTYAHLFDDKVMKQLKRRRYTGWGRLSRKLINGIRDKQSGKTILDFLKSDGFANRNFMQLIHDDSLTFKEDIQKAQVSGQGDSLHEHIANLAGSPAIKKGILQTVKVVDELVKVMGRHKPENIVIEMARENQTTQKGQKNSRERMKRIEEGIKELGSQILKEHPVENTQLQNEKLYLYYLQNGRDMYVDQELDINRLSDYDVDHIVPQSFLKDDSIDNKVLTRSDKARGKSDNVPSEEVVKKMKNYWRQLLNAKLITQRKFDNLTKAERGGLSELDKAGFIKRQLVETRQITKHVAQILDSRMNTKYDENDKLIREVKVITLKSKLVSDFRKDFQFYKVREINNYHHAHDAYLNAVVGTALIKKYPKLESEFVYGDYKVYDVRKMIAKSEQEIGKATAKYFFYSNIMNFFKTEITLANGEIRKRPLIETNGETGEIVWDKGRDFATVRKVLSMPQVNIVKKTEVQTGGFSKESILPKRNSDKLIARKKDWDPKKYGGFDSPTVAYSVLVVAKVEKGKSKKLKSVKELLGITIMERSSFEKNPIDFLEAKGYKEVKKDLIIKLPKYSLFELENGRKRMLASAGELQKGNELALPSKYVNFLYLASHYEKLKGSPEDNEQKQLFVEQHKHYLDEIIEQISEFSKRVILADANLDKVLSAYNKHRDKPIREQAENIIHLFTLTNLGAPAAFKYFDTTIDRKRYTSTKEVLDATLIHQSITGLYETRIDLSQLGGDGGGGSPAPEAAAKGGMDPLQLLQPLEAEIKGTKLKAHWNSGATITCVPQAFLEEEVPIKNIWIKTIHGEKEQPVYYLTFKIQGRKVEAEVISSPYDYILVSPSDIPWLMKKPLQLTTLVPLQEYEERLLKQTMLTGSYKEKLQSLFLKYDALWQHWENQVGHRRIKPHHIATGTVNPRPQKQYPINPKAKASIQTVINDLLKQGVLIQQNSIMNTPVYPVPKPDGKWRMVLDYREVNKTIPLIAAQNQHSAGILSSIFRGKYKTTLDLSNGFWAHSITPESYWLTAFTWLGQQYCWTRLPQGFLNSPALFNADVVDLLKEVPNVQVYVDDIYISHDDPREHLEQLEKVFSLLLNAGYVVSLKKSEIAQHEVEFLGFNITKEGRGLTETFKQKLLNITPPRDLKQLQSILGLLNFARNFIPNFSELVKPLYNIIATAPGKYITWTTDNSQQLQNIISMLNSAENLEERNPEVRLIMKVNTSPSAGYIRFYNEFAKRPIMYLNYVYTKAEVKFTNTEKLLTTIHKGLIKALDLGMGQEILVYSPIVSMTKIQKTPLPERKALPIRWITWMSYLEDPRIQFHYDKTLPELQQVPTVTDDIIAKIKHPSEFSMVFYTDGSAIKHPNVNKSHNAGMGIAQVQFKPEFTVINTWSIPLGDHTAQLAEVAAVEFACKKALKIDGPVLIVTDSFYVAESVNKELPYWQSNGFFNNKKKPLKHVSKWKSIADCIQLKPDIIIIHEKGHQPTASTFHTEGNNLADKLATQGSYVVNAGKRTADGSEFEKRTADGSEFESPKKKAKVE

SEQ ID NO: 634 - protein, 2174 aa, synthetic construct
MPAAKRVKLDGGDKKYSIGLDIGTNSVGWAVITDEYKVPSKKFKVLGNTDRHSIKKNLIGALLFDSGETAEATRLKRTARRRYTRRKNRICYLQEIFSNEMAKVDDSFFHRLEESFLVEEDKKHERHPIFGNIVDEVAYHEKYPTIYHLRKKLVDSTDKADLRLIYLALAHMIKFRGHFLIEGDLNPDNSDVDKLFIQLVQTYNQLFEENPINASGVDAKAILSARLSKSRRLENLIAQLPGEKKNGLFGNLIALSLGLTPNFKSNFDLAEDAKLQLSKDTYDDDLDNLLAQIGDQYADLFLAAKNLSDAILLSDILRVNTEITKAPLSASMIKRYDEHHQDLTLLKALVRQQLPEKYKEIFFDQSKNGYAGYIDGGASQEEFYKFIKPILEKMDGTEELLVKLNREDLLRKQRTFDNGSIPHQIHLGELHAILRRQEDFYPFLKDNREKIEKILTFRIPYYVGPLARGNSRFAWMTRKSEETITPWNFEEVVDKGASAQSFIERMTNFDKNLPNEKVLPKHSLLYEYFTVYNELTKVKYVTEGMRKPAFLSGEQKKAIVDLLFKTNRKVTVKQLKEDYFKKIECFDSVEISGVEDRFNASLGTYHDLLKIIKDKDFLDNEENEDILEDIVLTLTLFEDREMIEERLKTYAHLFDDKVMKQLKRRRYTGWGRLSRKLINGIRDKQSGKTILDFLKSDGFANRNFMQLIHDDSLTFKEDIQKAQVSGQGDSLHEHIANLAGSPAIKKGILQTVKVVDELVKVMGRHKPENIVIEMARENQTTQKGQKNSRERMKRIEEGIKELGSQILKEHPVENTQLQNEKLYLYYLQNGRDMYVDQELDINRLSDYDVDHIVPQSFLKDDSIDNKVLTRSDKARGKSDNVPSEEVVKKMKNYWRQLLNAKLITQRKFDNLTKAERGGLSELDKAGFIKRQLVETRQITKHVAQILDSRMNTKYDENDKLIREVKVITLKSKLVSDFRKDFQFYKVREINNYHHAHDAYLNAVVGTALIKKYPKLESEFVYGDYKVYDVRKMIAKSEQEIGKATAKYFFYSNIMNFFKTEITLANGEIRKRPLIETNGETGEIVWDKGRDFATVRKVLSMPQVNIVKKTEVQTGGFSKESILPKRNSDKLIARKKDWDPKKYGGFDSPTVAYSVLVVAKVEKGKSKKLKSVKELLGITIMERSSFEKNPIDFLEAKGYKEVKKDLIIKLPKYSLFELENGRKRMLASAGELQKGNELALPSKYVNFLYLASHYEKLKGSPEDNEQKQLFVEQHKHYLDEIIEQISEFSKRVILADANLDKVLSAYNKHRDKPIREQAENIIHLFTLTNLGAPAAFKYFDTTIDRKRYTSTKEVLDATLIHQSITGLYETRIDLSQLGGDGGGGGPAPGSSGGMDPLQLLQPLEAEIKGTKLKAHWNSGATITCVPQAFLEEEVPIKNIWIKTIHGEKEQPVYYLTFKIQGRKVEAEVISSPYDYILVSPSDIPWLMKKPLQLTTLVPLQEYEERLLKQTMLTGSYKEKLQSLFLKYDALWQHWENQVGHRRIKPHHIATGTVNPRPQKQYPINPKAKASIQTVINDLLKQGVLIQQNSIMNTPVYPVPKPDGKWRMVLDYREVNKTIPLIAAQNQHSAGILSSIFRGKYKTTLDLSNGFWAHSITPESYWLTAFTWLGQQYCWTRLPQGFLNSPALFNADVVDLLKEVPNVQVYVDDIYISHDDPREHLEQLEKVFSLLLNAGYVVSLKKSEIAQHEVEFLGFNITKEGRGLTETFKQKLLNITPPRDLKQLQSILGLLNFARNFIPNFSELVKPLYNIIATAPGKYITWTTDNSQQLQNIISMLNSAENLEERNPEVRLIMKVNTSPSAGYIRFYNEFAKRPIMYLNYVYTKAEVKFTNTEKLLTTIHKGLIKALDLGMGQEILVYSPIVSMTKIQKTPLPERKALPIRWITWMSYLEDPRIQFHYDKTLPELQQVPTVTDDIIAKIKHPSEFSMVFYTDGSAIKHPNVNKSHNAGMGIAQVQFKPEFTVINTWSIPLGDHTAQLAEVAAVEFACKKALKIDGPVLIVTDSFYVAESVNKELPYWQSNGFFNNKKKPLKHVSKWKSIADCIQLKPDIIIIHEKGHQPTASTFHTEGNNLADKLATQGSYVVNAGKRTADGSEFEKRTADGSEFESPKKKAKVE

SEQ ID NO: 635 - protein, 2174 aa, synthetic construct
MPAAKRVKLDGGDKKYSIGLDIGTNSVGWAVITDEYKVPSKKFKVLGNTDRHSIKKNLIGALLFDSGETAEATRLKRTARRRYTRRKNRICYLQEIFSNEMAKVDDSFFHRLEESFLVEEDKKHERHPIFGNIVDEVAYHEKYPTIYHLRKKLVDSTDKADLRLIYLALAHMIKFRGHFLIEGDLNPDNSDVDKLFIQLVQTYNQLFEENPINASGVDAKAILSARLSKSRRLENLIAQLPGEKKNGLFGNLIALSLGLTPNFKSNFDLAEDAKLQLSKDTYDDDLDNLLAQIGDQYADLFLAAKNLSDAILLSDILRVNTEITKAPLSASMIKRYDEHHQDLTLLKALVRQQLPEKYKEIFFDQSKNGYAGYIDGGASQEEFYKFIKPILEKMDGTEELLVKLNREDLLRKQRTFDNGSIPHQIHLGELHAILRRQEDFYPFLKDNREKIEKILTFRIPYYVGPLARGNSRFAWMTRKSEETITPWNFEEVVDKGASAQSFIERMTNFDKNLPNEKVLPKHSLLYEYFTVYNELTKVKYVTEGMRKPAFLSGEQKKAIVDLLFKTNRKVTVKQLKEDYFKKIECFDSVEISGVEDRFNASLGTYHDLLKIIKDKDFLDNEENEDILEDIVLTLTLFEDREMIEERLKTYAHLFDDKVMKQLKRRRYTGWGRLSRKLINGIRDKQSGKTILDFLKSDGFANRNFMQLIHDDSLTFKEDIQKAQVSGQGDSLHEHIANLAGSPAIKKGILQTVKVVDELVKVMGRHKPENIVIEMARENQTTQKGQKNSRERMKRIEEGIKELGSQILKEHPVENTQLQNEKLYLYYLQNGRDMYVDQELDINRLSDYDVDHIVPQSFLKDDSIDNKVLTRSDKARGKSDNVPSEEVVKKMKNYWRQLLNAKLITQRKFDNLTKAERGGLSELDKAGFIKRQLVETRQITKHVAQILDSRMNTKYDENDKLIREVKVITLKSKLVSDFRKDFQFYKVREINNYHHAHDAYLNAVVGTALIKKYPKLESEFVYGDYKVYDVRKMIAKSEQEIGKATAKYFFYSNIMNFFKTEITLANGEIRKRPLIETNGETGEIVWDKGRDFATVRKVLSMPQVNIVKKTEVQTGGFSKESILPKRNSDKLIARKKDWDPKKYGGFDSPTVAYSVLVVAKVEKGKSKKLKSVKELLGITIMERSSFEKNPIDFLEAKGYKEVKKDLIIKLPKYSLFELENGRKRMLASAGELQKGNELALPSKYVNFLYLASHYEKLKGSPEDNEQKQLFVEQHKHYLDEIIEQISEFSKRVILADANLDKVLSAYNKHRDKPIREQAENIIHLFTLTNLGAPAAFKYFDTTIDRKRYTSTKEVLDATLIHQSITGLYETRIDLSQLGGDGGGGSGSSPAPGGMDPLQLLQPLEAEIKGTKLKAHWNSGATITCVPQAFLEEEVPIKNIWIKTIHGEKEQPVYYLTFKIQGRKVEAEVISSPYDYILVSPSDIPWLMKKPLQLTTLVPLQEYEERLLKQTMLTGSYKEKLQSLFLKYDALWQHWENQVGHRRIKPHHIATGTVNPRPQKQYPINPKAKASIQTVINDLLKQGVLIQQNSIMNTPVYPVPKPDGKWRMVLDYREVNKTIPLIAAQNQHSAGILSSIFRGKYKTTLDLSNGFWAHSITPESYWLTAFTWLGQQYCWTRLPQGFLNSPALFNADVVDLLKEVPNVQVYVDDIYISHDDPREHLEQLEKVFSLLLNAGYVVSLKKSEIAQHEVEFLGFNITKEGRGLTETFKQKLLNITPPRDLKQLQSILGLLNFARNFIPNFSELVKPLYNIIATAPGKYITWTTDNSQQLQNIISMLNSAENLEERNPEVRLIMKVNTSPSAGYIRFYNEFAKRPIMYLNYVYTKAEVKFTNTEKLLTTIHKGLIKALDLGMGQEILVYSPIVSMTKIQKTPLPERKALPIRWITWMSYLEDPRIQFHYDKTLPELQQVPTVTDDIIAKIKHPSEFSMVFYTDGSAIKHPNVNKSHNAGMGIAQVQFKPEFTVINTWSIPLGDHTAQLAEVAAVEFACKKALKIDGPVLIVTDSFYVAESVNKELPYWQSNGFFNNKKKPLKHVSKWKSIADCIQLKPDIIIIHEKGHQPTASTFHTEGNNLADKLATQGSYVVNAGKRTADGSEFEKRTADGSEFESPKKKAKVE

SEQ ID NO: 636 - protein, 2176 aa, synthetic construct
MPAAKRVKLDGGDKKYSIGLDIGTNSVGWAVITDEYKVPSKKFKVLGNTDRHSIKKNLIGALLFDSGETAEATRLKRTARRRYTRRKNRICYLQEIFSNEMAKVDDSFFHRLEESFLVEEDKKHERHPIFGNIVDEVAYHEKYPTIYHLRKKLVDSTDKADLRLIYLALAHMIKFRGHFLIEGDLNPDNSDVDKLFIQLVQTYNQLFEENPINASGVDAKAILSARLSKSRRLENLIAQLPGEKKNGLFGNLIALSLGLTPNFKSNFDLAEDAKLQLSKDTYDDDLDNLLAQIGDQYADLFLAAKNLSDAILLSDILRVNTEITKAPLSASMIKRYDEHHQDLTLLKALVRQQLPEKYKEIFFDQSKNGYAGYIDGGASQEEFYKFIKPILEKMDGTEELLVKLNREDLLRKQRTFDNGSIPHQIHLGELHAILRRQEDFYPFLKDNREKIEKILTFRIPYYVGPLARGNSRFAWMTRKSEETITPWNFEEVVDKGASAQSFIERMTNFDKNLPNEKVLPKHSLLYEYFTVYNELTKVKYVTEGMRKPAFLSGEQKKAIVDLLFKTNRKVTVKQLKEDYFKKIECFDSVEISGVEDRFNASLGTYHDLLKIIKDKDFLDNEENEDILEDIVLTLTLFEDREMIEERLKTYAHLFDDKVMKQLKRRRYTGWGRLSRKLINGIRDKQSGKTILDFLKSDGFANRNFMQLIHDDSLTFKEDIQKAQVSGQGDSLHEHIANLAGSPAIKKGILQTVKVVDELVKVMGRHKPENIVIEMARENQTTQKGQKNSRERMKRIEEGIKELGSQILKEHPVENTQLQNEKLYLYYLQNGRDMYVDQELDINRLSDYDVDHIVPQSFLKDDSIDNKVLTRSDKARGKSDNVPSEEVVKKMKNYWRQLLNAKLITQRKFDNLTKAERGGLSELDKAGFIKRQLVETRQITKHVAQILDSRMNTKYDENDKLIREVKVITLKSKLVSDFRKDFQFYKVREINNYHHAHDAYLNAVVGTALIKKYPKLESEFVYGDYKVYDVRKMIAKSEQEIGKATAKYFFYSNIMNFFKTEITLANGEIRKRPLIETNGETGEIVWDKGRDFATVRKVLSMPQVNIVKKTEVQTGGFSKESILPKRNSDKLIARKKDWDPKKYGGFDSPTVAYSVLVVAKVEKGKSKKLKSVKELLGITIMERSSFEKNPIDFLEAKGYKEVKKDLIIKLPKYSLFELENGRKRMLASAGELQKGNELALPSKYVNFLYLASHYEKLKGSPEDNEQKQLFVEQHKHYLDEIIEQISEFSKRVILADANLDKVLSAYNKHRDKPIREQAENIIHLFTLTNLGAPAAFKYFDTTIDRKRYTSTKEVLDATLIHQSITGLYETRIDLSQLGGDGGEAAAKGGGPAPGGMDPLQLLQPLEAEIKGTKLKAHWNSGATITCVPQAFLEEEVPIKNIWIKTIHGEKEQPVYYLTFKIQGRKVEAEVISSPYDYILVSPSDIPWLMKKPLQLTTLVPLQEYEERLLKQTMLTGSYKEKLQSLFLKYDALWQHWENQVGHRRIKPHHIATGTVNPRPQKQYPINPKAKASIQTVINDLLKQGVLIQQNSIMNTPVYPVPKPDGKWRMVLDYREVNKTIPLIAAQNQHSAGILSSIFRGKYKTTLDLSNGFWAHSITPESYWLTAFTWLGQQYCWTRLPQGFLNSPALFNADVVDLLKEVPNVQVYVDDIYISHDDPREHLEQLEKVFSLLLNAGYVVSLKKSEIAQHEVEFLGFNITKEGRGLTETFKQKLLNITPPRDLKQLQSILGLLNFARNFIPNFSELVKPLYNIIATAPGKYITWTTDNSQQLQNIISMLNSAENLEERNPEVRLIMKVNTSPSAGYIRFYNEFAKRPIMYLNYVYTKAEVKFTNTEKLLTTIHKGLIKALDLGMGQEILVYSPIVSMTKIQKTPLPERKALPIRWITWMSYLEDPRIQFHYDKTLPELQQVPTVTDDIIAKIKHPSEFSMVFYTDGSAIKHPNVNKSHNAGMGIAQVQFKPEFTVINTWSIPLGDHTAQLAEVAAVEFACKKALKIDGPVLIVTDSFYVAESVNKELPYWQSNGFFNNKKKPLKHVSKWKSIADCIQLKPDIIIIHEKGHQPTASTFHTEGNNLADKLATQGSYVVNAGKRTADGSEFEKRTADGSEFESPKKKAKVE

SEQ ID NO: 637 - protein, 2180 aa, synthetic construct
MPAAKRVKLDGGDKKYSIGLDIGTNSVGWAVITDEYKVPSKKFKVLGNTDRHSIKKNLIGALLFDSGETAEATRLKRTARRRYTRRKNRICYLQEIFSNEMAKVDDSFFHRLEESFLVEEDKKHERHPIFGNIVDEVAYHEKYPTIYHLRKKLVDSTDKADLRLIYLALAHMIKFRGHFLIEGDLNPDNSDVDKLFIQLVQTYNQLFEENPINASGVDAKAILSARLSKSRRLENLIAQLPGEKKNGLFGNLIALSLGLTPNFKSNFDLAEDAKLQLSKDTYDDDLDNLLAQIGDQYADLFLAAKNLSDAILLSDILRVNTEITKAPLSASMIKRYDEHHQDLTLLKALVRQQLPEKYKEIFFDQSKNGYAGYIDGGASQEEFYKFIKPILEKMDGTEELLVKLNREDLLRKQRTFDNGSIPHQIHLGELHAILRRQEDFYPFLKDNREKIEKILTFRIPYYVGPLARGNSRFAWMTRKSEETITPWNFEEVVDKGASAQSFIERMTNFDKNLPNEKVLPKHSLLYEYFTVYNELTKVKYVTEGMRKPAFLSGEQKKAIVDLLFKTNRKVTVKQLKEDYFKKIECFDSVEISGVEDRFNASLGTYHDLLKIIKDKDFLDNEENEDILEDIVLTLTLFEDREMIEERLKTYAHLFDDKVMKQLKRRRYTGWGRLSRKLINGIRDKQSGKTILDFLKSDGFANRNFMQLIHDDSLTFKEDIQKAQVSGQGDSLHEHIANLAGSPAIKKGILQTVKVVDELVKVMGRHKPENIVIEMARENQTTQKGQKNSRERMKRIEEGIKELGSQILKEHPVENTQLQNEKLYLYYLQNGRDMYVDQELDINRLSDYDVDHIVPQSFLKDDSIDNKVLTRSDKARGKSDNVPSEEVVKKMKNYWRQLLNAKLITQRKFDNLTKAERGGLSELDKAGFIKRQLVETRQITKHVAQILDSRMNTKYDENDKLIREVKVITLKSKLVSDFRKDFQFYKVREINNYHHAHDAYLNAVVGTALIKKYPKLESEFVYGDYKVYDVRKMIAKSEQEIGKATAKYFFYSNIMNFFKTEITLANGEIRKRPLIETNGETGEIVWDKGRDFATVRKVLSMPQVNIVKKTEVQTGGFSKESILPKRNSDKLIARKKDWDPKKYGGFDSPTVAYSVLVVAKVEKGKSKKLKSVKELLGITIMERSSFEKNPIDFLEAKGYKEVKKDLIIKLPKYSLFELENGRKRMLASAGELQKGNELALPSKYVNFLYLASHYEKLKGSPEDNEQKQLFVEQHKHYLDEIIEQISEFSKRVILADANLDKVLSAYNKHRDKPIREQAENIIHLFTLTNLGAPAAFKYFDTTIDRKRYTSTKEVLDATLIHQSITGLYETRIDLSQLGGDGGGSSGSSGSSGSSGSSGGMDPLQLLQPLEAEIKGTKLKAHWNSGATITCVPQAFLEEEVPIKNIWIKTIHGEKEQPVYYLTFKIQGRKVEAEVISSPYDYILVSPSDIPWLMKKPLQLTTLVPLQEYEERLLKQTMLTGSYKEKLQSLFLKYDALWQHWENQVGHRRIKPHHIATGTVNPRPQKQYPINPKAKASIQTVINDLLKQGVLIQQNSIMNTPVYPVPKPDGKWRMVLDYREVNKTIPLIAAQNQHSAGILSSIFRGKYKTTLDLSNGFWAHSITPESYWLTAFTWLGQQYCWTRLPQGFLNSPALFNADVVDLLKEVPNVQVYVDDIYISHDDPREHLEQLEKVFSLLLNAGYVVSLKKSEIAQHEVEFLGFNITKEGRGLTETFKQKLLNITPPRDLKQLQSILGLLNFARNFIPNFSELVKPLYNIIATAPGKYITWTTDNSQQLQNIISMLNSAENLEERNPEVRLIMKVNTSPSAGYIRFYNEFAKRPIMYLNYVYTKAEVKFTNTEKLLTTIHKGLIKALDLGMGQEILVYSPIVSMTKIQKTPLPERKALPIRWITWMSYLEDPRIQFHYDKTLPELQQVPTVTDDIIAKIKHPSEFSMVFYTDGSAIKHPNVNKSHNAGMGIAQVQFKPEFTVINTWSIPLGDHTAQLAEVAAVEFACKKALKIDGPVLIVTDSFYVAESVNKELPYWQSNGFFNNKKKPLKHVSKWKSIADCIQLKPDIIIIHEKGHQPTASTFHTEGNNLADKLATQGSYVVNAGKRTADGSEFEKRTADGSEFESPKKKAKVE

SEQ ID NO: 638 - protein, 2173 aa, synthetic construct
MPAAKRVKLDGGDKKYSIGLDIGTNSVGWAVITDEYKVPSKKFKVLGNTDRHSIKKNLIGALLFDSGETAEATRLKRTARRRYTRRKNRICYLQEIFSNEMAKVDDSFFHRLEESFLVEEDKKHERHPIFGNIVDEVAYHEKYPTIYHLRKKLVDSTDKADLRLIYLALAHMIKFRGHFLIEGDLNPDNSDVDKLFIQLVQTYNQLFEENPINASGVDAKAILSARLSKSRRLENLIAQLPGEKKNGLFGNLIALSLGLTPNFKSNFDLAEDAKLQLSKDTYDDDLDNLLAQIGDQYADLFLAAKNLSDAILLSDILRVNTEITKAPLSASMIKRYDEHHQDLTLLKALVRQQLPEKYKEIFFDQSKNGYAGYIDGGASQEEFYKFIKPILEKMDGTEELLVKLNREDLLRKQRTFDNGSIPHQIHLGELHAILRRQEDFYPFLKDNREKIEKILTFRIPYYVGPLARGNSRFAWMTRKSEETITPWNFEEVVDKGASAQSFIERMTNFDKNLPNEKVLPKHSLLYEYFTVYNELTKVKYVTEGMRKPAFLSGEQKKAIVDLLFKTNRKVTVKQLKEDYFKKIECFDSVEISGVEDRFNASLGTYHDLLKIIKDKDFLDNEENEDILEDIVLTLTLFEDREMIEERLKTYAHLFDDKVMKQLKRRRYTGWGRLSRKLINGIRDKQSGKTILDFLKSDGFANRNFMQLIHDDSLTFKEDIQKAQVSGQGDSLHEHIANLAGSPAIKKGILQTVKVVDELVKVMGRHKPENIVIEMARENQTTQKGQKNSRERMKRIEEGIKELGSQILKEHPVENTQLQNEKLYLYYLQNGRDMYVDQELDINRLSDYDVDHIVPQSFLKDDSIDNKVLTRSDKARGKSDNVPSEEVVKKMKNYWRQLLNAKLITQRKFDNLTKAERGGLSELDKAGFIKRQLVETRQITKHVAQILDSRMNTKYDENDKLIREVKVITLKSKLVSDFRKDFQFYKVREINNYHHAHDAYLNAVVGTALIKKYPKLESEFVYGDYKVYDVRKMIAKSEQEIGKATAKYFFYSNIMNFFKTEITLANGEIRKRPLIETNGETGEIVWDKGRDFATVRKVLSMPQVNIVKKTEVQTGGFSKESILPKRNSDKLIARKKDWDPKKYGGFDSPTVAYSVLVVAKVEKGKSKKLKSVKELLGITIMERSSFEKNPIDFLEAKGYKEVKKDLIIKLPKYSLFELENGRKRMLASAGELQKGNELALPSKYVNFLYLASHYEKLKGSPEDNEQKQLFVEQHKHYLDEIIEQISEFSKRVILADANLDKVLSAYNKHRDKPIREQAENIIHLFTLTNLGAPAAFKYFDTTIDRKRYTSTKEVLDATLIHQSITGLYETRIDLSQLGGDGGEAAAKGSSGGMDPLQLLQPLEAEIKGTKLKAHWNSGATITCVPQAFLEEEVPIKNIWIKTIHGEKEQPVYYLTFKIQGRKVEAEVISSPYDYILVSPSDIPWLMKKPLQLTTLVPLQEYEERLLKQTMLTGSYKEKLQSLFLKYDALWQHWENQVGHRRIKPHHIATGTVNPRPQKQYPINPKAKASIQTVINDLLKQGVLIQQNSIMNTPVYPVPKPDGKWRMVLDYREVNKTIPLIAAQNQHSAGILSSIFRGKYKTTLDLSNGFWAHSITPESYWLTAFTWLGQQYCWTRLPQGFLNSPALFNADVVDLLKEVPNVQVYVDDIYISHDDPREHLEQLEKVFSLLLNAGYVVSLKKSEIAQHEVEFLGFNITKEGRGLTETFKQKLLNITPPRDLKQLQSILGLLNFARNFIPNFSELVKPLYNIIATAPGKYITWTTDNSQQLQNIISMLNSAENLEERNPEVRLIMKVNTSPSAGYIRFYNEFAKRPIMYLNYVYTKAEVKFTNTEKLLTTIHKGLIKALDLGMGQEILVYSPIVSMTKIQKTPLPERKALPIRWITWMSYLEDPRIQFHYDKTLPELQQVPTVTDDIIAKIKHPSEFSMVFYTDGSAIKHPNVNKSHNAGMGIAQVQFKPEFTVINTWSIPLGDHTAQLAEVAAVEFACKKALKIDGPVLIVTDSFYVAESVNKELPYWQSNGFFNNKKKPLKHVSKWKSIADCIQLKPDIIIIHEKGHQPTASTFHTEGNNLADKLATQGSYVVNAGKRTADGSEFEKRTADGSEFESPKKKAKVE

SEQ ID NO: 639 - protein, 2172 aa, synthetic construct
MPAAKRVKLDGGDKKYSIGLDIGTNSVGWAVITDEYKVPSKKFKVLGNTDRHSIKKNLIGALLFDSGETAEATRLKRTARRRYTRRKNRICYLQEIFSNEMAKVDDSFFHRLEESFLVEEDKKHERHPIFGNIVDEVAYHEKYPTIYHLRKKLVDSTDKADLRLIYLALAHMIKFRGHFLIEGDLNPDNSDVDKLFIQLVQTYNQLFEENPINASGVDAKAILSARLSKSRRLENLIAQLPGEKKNGLFGNLIALSLGLTPNFKSNFDLAEDAKLQLSKDTYDDDLDNLLAQIGDQYADLFLAAKNLSDAILLSDILRVNTEITKAPLSASMIKRYDEHHQDLTLLKALVRQQLPEKYKEIFFDQSKNGYAGYIDGGASQEEFYKFIKPILEKMDGTEELLVKLNREDLLRKQRTFDNGSIPHQIHLGELHAILRRQEDFYPFLKDNREKIEKILTFRIPYYVGPLARGNSRFAWMTRKSEETITPWNFEEVVDKGASAQSFIERMTNFDKNLPNEKVLPKHSLLYEYFTVYNELTKVKYVTEGMRKPAFLSGEQKKAIVDLLFKTNRKVTVKQLKEDYFKKIECFDSVEISGVEDRFNASLGTYHDLLKIIKDKDFLDNEENEDILEDIVLTLTLFEDREMIEERLKTYAHLFDDKVMKQLKRRRYTGWGRLSRKLINGIRDKQSGKTILDFLKSDGFANRNFMQLIHDDSLTFKEDIQKAQVSGQGDSLHEHIANLAGSPAIKKGILQTVKVVDELVKVMGRHKPENIVIEMARENQTTQKGQKNSRERMKRIEEGIKELGSQILKEHPVENTQLQNEKLYLYYLQNGRDMYVDQELDINRLSDYDVDHIVPQSFLKDDSIDNKVLTRSDKARGKSDNVPSEEVVKKMKNYWRQLLNAKLITQRKFDNLTKAERGGLSELDKAGFIKRQLVETRQITKHVAQILDSRMNTKYDENDKLIREVKVITLKSKLVSDFRKDFQFYKVREINNYHHAHDAYLNAVVGTALIKKYPKLESEFVYGDYKVYDVRKMIAKSEQEIGKATAKYFFYSNIMNFFKTEITLANGEIRKRPLIETNGETGEIVWDKGRDFATVRKVLSMPQVNIVKKTEVQTGGFSKESILPKRNSDKLIARKKDWDPKKYGGFDSPTVAYSVLVVAKVEKGKSKKLKSVKELLGITIMERSSFEKNPIDFLEAKGYKEVKKDLIIKLPKYSLFELENGRKRMLASAGELQKGNELALPSKYVNFLYLASHYEKLKGSPEDNEQKQLFVEQHKHYLDEIIEQISEFSKRVILADANLDKVLSAYNKHRDKPIREQAENIIHLFTLTNLGAPAAFKYFDTTIDRKRYTSTKEVLDATLIHQSITGLYETRIDLSQLGGDGGGGGGGGGGGMDPLQLLQPLEAEIKGTKLKAHWNSGATITCVPQAFLEEEVPIKNIWIKTIHGEKEQPVYYLTFKIQGRKVEAEVISSPYDYILVSPSDIPWLMKKPLQLTTLVPLQEYEERLLKQTMLTGSYKEKLQSLFLKYDALWQHWENQVGHRRIKPHHIATGTVNPRPQKQYPINPKAKASIQTVINDLLKQGVLIQQNSIMNTPVYPVPKPDGKWRMVLDYREVNKTIPLIAAQNQHSAGILSSIFRGKYKTTLDLSNGFWAHSITPESYWLTAFTWLGQQYCWTRLPQGFLNSPALFNADVVDLLKEVPNVQVYVDDIYISHDDPREHLEQLEKVFSLLLNAGYVVSLKKSEIAQHEVEFLGFNITKEGRGLTETFKQKLLNITPPRDLKQLQSILGLLNFARNFIPNFSELVKPLYNIIATAPGKYITWTTDNSQQLQNIISMLNSAENLEERNPEVRLIMKVNTSPSAGYIRFYNEFAKRPIMYLNYVYTKAEVKFTNTEKLLTTIHKGLIKALDLGMGQEILVYSPIVSMTKIQKTPLPERKALPIRWITWMSYLEDPRIQFHYDKTLPELQQVPTVTDDIIAKIKHPSEFSMVFYTDGSAIKHPNVNKSHNAGMGIAQVQFKPEFTVINTWSIPLGDHTAQLAEVAAVEFACKKALKIDGPVLIVTDSFYVAESVNKELPYWQSNGFFNNKKKPLKHVSKWKSIADCIQLKPDIIIIHEKGHQPTASTFHTEGNNLADKLATQGSYVVNAGKRTADGSEFEKRTADGSEFESPKKKAKVE

SEQ ID NO: 640 - protein, 2176 aa, synthetic construct
MPAAKRVKLDGGDKKYSIGLDIGTNSVGWAVITDEYKVPSKKFKVLGNTDRHSIKKNLIGALLFDSGETAEATRLKRTARRRYTRRKNRICYLQEIFSNEMAKVDDSFFHRLEESFLVEEDKKHERHPIFGNIVDEVAYHEKYPTIYHLRKKLVDSTDKADLRLIYLALAHMIKFRGHFLIEGDLNPDNSDVDKLFIQLVQTYNQLFEENPINASGVDAKAILSARLSKSRRLENLIAQLPGEKKNGLFGNLIALSLGLTPNFKSNFDLAEDAKLQLSKDTYDDDLDNLLAQIGDQYADLFLAAKNLSDAILLSDILRVNTEITKAPLSASMIKRYDEHHQDLTLLKALVRQQLPEKYKEIFFDQSKNGYAGYIDGGASQEEFYKFIKPILEKMDGTEELLVKLNREDLLRKQRTFDNGSIPHQIHLGELHAILRRQEDFYPFLKDNREKIEKILTFRIPYYVGPLARGNSRFAWMTRKSEETITPWNFEEVVDKGASAQSFIERMTNFDKNLPNEKVLPKHSLLYEYFTVYNELTKVKYVTEGMRKPAFLSGEQKKAIVDLLFKTNRKVTVKQLKEDYFKKIECFDSVEISGVEDRFNASLGTYHDLLKIIKDKDFLDNEENEDILEDIVLTLTLFEDREMIEERLKTYAHLFDDKVMKQLKRRRYTGWGRLSRKLINGIRDKQSGKTILDFLKSDGFANRNFMQLIHDDSLTFKEDIQKAQVSGQGDSLHEHIANLAGSPAIKKGILQTVKVVDELVKVMGRHKPENIVIEMARENQTTQKGQKNSRERMKRIEEGIKELGSQILKEHPVENTQLQNEKLYLYYLQNGRDMYVDQELDINRLSDYDVDHIVPQSFLKDDSIDNKVLTRSDKARGKSDNVPSEEVVKKMKNYWRQLLNAKLITQRKFDNLTKAERGGLSELDKAGFIKRQLVETRQITKHVAQILDSRMNTKYDENDKLIREVKVITLKSKLVSDFRKDFQFYKVREINNYHHAHDAYLNAVVGTALIKKYPKLESEFVYGDYKVYDVRKMIAKSEQEIGKATAKYFFYSNIMNFFKTEITLANGEIRKRPLIETNGETGEIVWDKGRDFATVRKVLSMPQVNIVKKTEVQTGGFSKESILPKRNSDKLIARKKDWDPKKYGGFDSPTVAYSVLVVAKVEKGKSKKLKSVKELLGITIMERSSFEKNPIDFLEAKGYKEVKKDLIIKLPKYSLFELENGRKRMLASAGELQKGNELALPSKYVNFLYLASHYEKLKGSPEDNEQKQLFVEQHKHYLDEIIEQISEFSKRVILADANLDKVLSAYNKHRDKPIREQAENIIHLFTLTNLGAPAAFKYFDTTIDRKRYTSTKEVLDATLIHQSITGLYETRIDLSQLGGDGGGGSEAAAKGSSGGMDPLQLLQPLEAEIKGTKLKAHWNSGATITCVPQAFLEEEVPIKNIWIKTIHGEKEQPVYYLTFKIQGRKVEAEVISSPYDYILVSPSDIPWLMKKPLQLTTLVPLQEYEERLLKQTMLTGSYKEKLQSLFLKYDALWQHWENQVGHRRIKPHHIATGTVNPRPQKQYPINPKAKASIQTVINDLLKQGVLIQQNSIMNTPVYPVPKPDGKWRMVLDYREVNKTIPLIAAQNQHSAGILSSIFRGKYKTTLDLSNGFWAHSITPESYWLTAFTWLGQQYCWTRLPQGFLNSPALFNADVVDLLKEVPNVQVYVDDIYISHDDPREHLEQLEKVFSLLLNAGYVVSLKKSEIAQHEVEFLGFNITKEGRGLTETFKQKLLNITPPRDLKQLQSILGLLNFARNFIPNFSELVKPLYNIIATAPGKYITWTTDNSQQLQNIISMLNSAENLEERNPEVRLIMKVNTSPSAGYIRFYNEFAKRPIMYLNYVYTKAEVKFTNTEKLLTTIHKGLIKALDLGMGQEILVYSPIVSMTKIQKTPLPERKALPIRWITWMSYLEDPRIQFHYDKTLPELQQVPTVTDDIIAKIKHPSEFSMVFYTDGSAIKHPNVNKSHNAGMGIAQVQFKPEFTVINTWSIPLGDHTAQLAEVAAVEFACKKALKIDGPVLIVTDSFYVAESVNKELPYWQSNGFFNNKKKPLKHVSKWKSIADCIQLKPDIIIIHEKGHQPTASTFHTEGNNLADKLATQGSYVVNAGKRTADGSEFEKRTADGSEFESPKKKAKVE

SEQ ID NO: 641 - protein, 2176 aa, synthetic construct
MPAAKRVKLDGGDKKYSIGLDIGTNSVGWAVITDEYKVPSKKFKVLGNTDRHSIKKNLIGALLFDSGETAEATRLKRTARRRYTRRKNRICYLQEIFSNEMAKVDDSFFHRLEESFLVEEDKKHERHPIFGNIVDEVAYHEKYPTIYHLRKKLVDSTDKADLRLIYLALAHMIKFRGHFLIEGDLNPDNSDVDKLFIQLVQTYNQLFEENPINASGVDAKAILSARLSKSRRLENLIAQLPGEKKNGLFGNLIALSLGLTPNFKSNFDLAEDAKLQLSKDTYDDDLDNLLAQIGDQYADLFLAAKNLSDAILLSDILRVNTEITKAPLSASMIKRYDEHHQDLTLLKALVRQQLPEKYKEIFFDQSKNGYAGYIDGGASQEEFYKFIKPILEKMDGTEELLVKLNREDLLRKQRTFDNGSIPHQIHLGELHAILRRQEDFYPFLKDNREKIEKILTFRIPYYVGPLARGNSRFAWMTRKSEETITPWNFEEVVDKGASAQSFIERMTNFDKNLPNEKVLPKHSLLYEYFTVYNELTKVKYVTEGMRKPAFLSGEQKKAIVDLLFKTNRKVTVKQLKEDYFKKIECFDSVEISGVEDRFNASLGTYHDLLKIIKDKDFLDNEENEDILEDIVLTLTLFEDREMIEERLKTYAHLFDDKVMKQLKRRRYTGWGRLSRKLINGIRDKQSGKTILDFLKSDGFANRNFMQLIHDDSLTFKEDIQKAQVSGQGDSLHEHIANLAGSPAIKKGILQTVKVVDELVKVMGRHKPENIVIEMARENQTTQKGQKNSRERMKRIEEGIKELGSQILKEHPVENTQLQNEKLYLYYLQNGRDMYVDQELDINRLSDYDVDHIVPQSFLKDDSIDNKVLTRSDKARGKSDNVPSEEVVKKMKNYWRQLLNAKLITQRKFDNLTKAERGGLSELDKAGFIKRQLVETRQITKHVAQILDSRMNTKYDENDKLIREVKVITLKSKLVSDFRKDFQFYKVREINNYHHAHDAYLNAVVGTALIKKYPKLESEFVYGDYKVYDVRKMIAKSEQEIGKATAKYFFYSNIMNFFKTEITLANGEIRKRPLIETNGETGEIVWDKGRDFATVRKVLSMPQVNIVKKTEVQTGGFSKESILPKRNSDKLIARKKDWDPKKYGGFDSPTVAYSVLVVAKVEKGKSKKLKSVKELLGITIMERSSFEKNPIDFLEAKGYKEVKKDLIIKLPKYSLFELENGRKRMLASAGELQKGNELALPSKYVNFLYLASHYEKLKGSPEDNEQKQLFVEQHKHYLDEIIEQISEFSKRVILADANLDKVLSAYNKHRDKPIREQAENIIHLFTLTNLGAPAAFKYFDTTIDRKRYTSTKEVLDATLIHQSITGLYETRIDLSQLGGDGGPAPEAAAKGGSGGMDPLQLLQPLEAEIKGTKLKAHWNSGATITCVPQAFLEEEVPIKNIWIKTIHGEKEQPVYYLTFKIQGRKVEAEVISSPYDYILVSPSDIPWLMKKPLQLTTLVPLQEYEERLLKQTMLTGSYKEKLQSLFLKYDALWQHWENQVGHRRIKPHHIATGTVNPRPQKQYPINPKAKASIQTVINDLLKQGVLIQQNSIMNTPVYPVPKPDGKWRMVLDYREVNKTIPLIAAQNQHSAGILSSIFRGKYKTTLDLSNGFWAHSITPESYWLTAFTWLGQQYCWTRLPQGFLNSPALFNADVVDLLKEVPNVQVYVDDIYISHDDPREHLEQLEKVFSLLLNAGYVVSLKKSEIAQHEVEFLGFNITKEGRGLTETFKQKLLNITPPRDLKQLQSILGLLNFARNFIPNFSELVKPLYNIIATAPGKYITWTTDNSQQLQNIISMLNSAENLEERNPEVRLIMKVNTSPSAGYIRFYNEFAKRPIMYLNYVYTKAEVKFTNTEKLLTTIHKGLIKALDLGMGQEILVYSPIVSMTKIQKTPLPERKALPIRWITWMSYLEDPRIQFHYDKTLPELQQVPTVTDDIIAKIKHPSEFSMVFYTDGSAIKHPNVNKSHNAGMGIAQVQFKPEFTVINTWSIPLGDHTAQLAEVAAVEFACKKALKIDGPVLIVTDSFYVAESVNKELPYWQSNGFFNNKKKPLKHVSKWKSIADCIQLKPDIIIIHEKGHQPTASTFHTEGNNLADKLATQGSYVVNAGKRTADGSEFEKRTADGSEFESPKKKAKVE

SEQ ID NO: 642 - protein, 2173 aa, synthetic construct
MPAAKRVKLDGGDKKYSIGLDIGTNSVGWAVITDEYKVPSKKFKVLGNTDRHSIKKNLIGALLFDSGETAEATRLKRTARRRYTRRKNRICYLQEIFSNEMAKVDDSFFHRLEESFLVEEDKKHERHPIFGNIVDEVAYHEKYPTIYHLRKKLVDSTDKADLRLIYLALAHMIKFRGHFLIEGDLNPDNSDVDKLFIQLVQTYNQLFEENPINASGVDAKAILSARLSKSRRLENLIAQLPGEKKNGLFGNLIALSLGLTPNFKSNFDLAEDAKLQLSKDTYDDDLDNLLAQIGDQYADLFLAAKNLSDAILLSDILRVNTEITKAPLSASMIKRYDEHHQDLTLLKALVRQQLPEKYKEIFFDQSKNGYAGYIDGGASQEEFYKFIKPILEKMDGTEELLVKLNREDLLRKQRTFDNGSIPHQIHLGELHAILRRQEDFYPFLKDNREKIEKILTFRIPYYVGPLARGNSRFAWMTRKSEETITPWNFEEVVDKGASAQSFIERMTNFDKNLPNEKVLPKHSLLYEYFTVYNELTKVKYVTEGMRKPAFLSGEQKKAIVDLLFKTNRKVTVKQLKEDYFKKIECFDSVEISGVEDRFNASLGTYHDLLKIIKDKDFLDNEENEDILEDIVLTLTLFEDREMIEERLKTYAHLFDDKVMKQLKRRRYTGWGRLSRKLINGIRDKQSGKTILDFLKSDGFANRNFMQLIHDDSLTFKEDIQKAQVSGQGDSLHEHIANLAGSPAIKKGILQTVKVVDELVKVMGRHKPENIVIEMARENQTTQKGQKNSRERMKRIEEGIKELGSQILKEHPVENTQLQNEKLYLYYLQNGRDMYVDQELDINRLSDYDVDHIVPQSFLKDDSIDNKVLTRSDKARGKSDNVPSEEVVKKMKNYWRQLLNAKLITQRKFDNLTKAERGGLSELDKAGFIKRQLVETRQITKHVAQILDSRMNTKYDENDKLIREVKVITLKSKLVSDFRKDFQFYKVREINNYHHAHDAYLNAVVGTALIKKYPKLESEFVYGDYKVYDVRKMIAKSEQEIGKATAKYFFYSNIMNFFKTEITLANGEIRKRPLIETNGETGEIVWDKGRDFATVRKVLSMPQVNIVKKTEVQTGGFSKESILPKRNSDKLIARKKDWDPKKYGGFDSPTVAYSVLVVAKVEKGKSKKLKSVKELLGITIMERSSFEKNPIDFLEAKGYKEVKKDLIIKLPKYSLFELENGRKRMLASAGELQKGNELALPSKYVNFLYLASHYEKLKGSPEDNEQKQLFVEQHKHYLDEIIEQISEFSKRVILADANLDKVLSAYNKHRDKPIREQAENIIHLFTLTNLGAPAAFKYFDTTIDRKRYTSTKEVLDATLIHQSITGLYETRIDLSQLGGDGGGGGGGGGGGGMDPLQLLQPLEAEIKGTKLKAHWNSGATITCVPQAFLEEEVPIKNIWIKTIHGEKEQPVYYLTFKIQGRKVEAEVISSPYDYILVSPSDIPWLMKKPLQLTTLVPLQEYEERLLKQTMLTGSYKEKLQSLFLKYDALWQHWENQVGHRRIKPHHIATGTVNPRPQKQYPINPKAKASIQTVINDLLKQGVLIQQNSIMNTPVYPVPKPDGKWRMVLDYREVNKTIPLIAAQNQHSAGILSSIFRGKYKTTLDLSNGFWAHSITPESYWLTAFTWLGQQYCWTRLPQGFLNSPALFNADVVDLLKEVPNVQVYVDDIYISHDDPREHLEQLEKVFSLLLNAGYVVSLKKSEIAQHEVEFLGFNITKEGRGLTETFKQKLLNITPPRDLKQLQSILGLLNFARNFIPNFSELVKPLYNIIATAPGKYITWTTDNSQQLQNIISMLNSAENLEERNPEVRLIMKVNTSPSAGYIRFYNEFAKRPIMYLNYVYTKAEVKFTNTEKLLTTIHKGLIKALDLGMGQEILVYSPIVSMTKIQKTPLPERKALPIRWITWMSYLEDPRIQFHYDKTLPELQQVPTVTDDIIAKIKHPSEFSMVFYTDGSAIKHPNVNKSHNAGMGIAQVQFKPEFTVINTWSIPLGDHTAQLAEVAAVEFACKKALKIDGPVLIVTDSFYVAESVNKELPYWQSNGFFNNKKKPLKHVSKWKSIADCIQLKPDIIIIHEKGHQPTASTFHTEGNNLADKLATQGSYVVNAGKRTADGSEFEKRTADGSEFESPKKKAKVE

SEQ ID NO: 643 - protein, 2171 aa, synthetic construct
MPAAKRVKLDGGDKKYSIGLDIGTNSVGWAVITDEYKVPSKKFKVLGNTDRHSIKKNLIGALLFDSGETAEATRLKRTARRRYTRRKNRICYLQEIFSNEMAKVDDSFFHRLEESFLVEEDKKHERHPIFGNIVDEVAYHEKYPTIYHLRKKLVDSTDKADLRLIYLALAHMIKFRGHFLIEGDLNPDNSDVDKLFIQLVQTYNQLFEENPINASGVDAKAILSARLSKSRRLENLIAQLPGEKKNGLFGNLIALSLGLTPNFKSNFDLAEDAKLQLSKDTYDDDLDNLLAQIGDQYADLFLAAKNLSDAILLSDILRVNTEITKAPLSASMIKRYDEHHQDLTLLKALVRQQLPEKYKEIFFDQSKNGYAGYIDGGASQEEFYKFIKPILEKMDGTEELLVKLNREDLLRKQRTFDNGSIPHQIHLGELHAILRRQEDFYPFLKDNREKIEKILTFRIPYYVGPLARGNSRFAWMTRKSEETITPWNFEEVVDKGASAQSFIERMTNFDKNLPNEKVLPKHSLLYEYFTVYNELTKVKYVTEGMRKPAFLSGEQKKAIVDLLFKTNRKVTVKQLKEDYFKKIECFDSVEISGVEDRFNASLGTYHDLLKIIKDKDFLDNEENEDILEDIVLTLTLFEDREMIEERLKTYAHLFDDKVMKQLKRRRYTGWGRLSRKLINGIRDKQSGKTILDFLKSDGFANRNFMQLIHDDSLTFKEDIQKAQVSGQGDSLHEHIANLAGSPAIKKGILQTVKVVDELVKVMGRHKPENIVIEMARENQTTQKGQKNSRERMKRIEEGIKELGSQILKEHPVENTQLQNEKLYLYYLQNGRDMYVDQELDINRLSDYDVDHIVPQSFLKDDSIDNKVLTRSDKARGKSDNVPSEEVVKKMKNYWRQLLNAKLITQRKFDNLTKAERGGLSELDKAGFIKRQLVETRQITKHVAQILDSRMNTKYDENDKLIREVKVITLKSKLVSDFRKDFQFYKVREINNYHHAHDAYLNAVVGTALIKKYPKLESEFVYGDYKVYDVRKMIAKSEQEIGKATAKYFFYSNIMNFFKTEITLANGEIRKRPLIETNGETGEIVWDKGRDFATVRKVLSMPQVNIVKKTEVQTGGFSKESILPKRNSDKLIARKKDWDPKKYGGFDSPTVAYSVLVVAKVEKGKSKKLKSVKELLGITIMERSSFEKNPIDFLEAKGYKEVKKDLIIKLPKYSLFELENGRKRMLASAGELQKGNELALPSKYVNFLYLASHYEKLKGSPEDNEQKQLFVEQHKHYLDEIIEQISEFSKRVILADANLDKVLSAYNKHRDKPIREQAENIIHLFTLTNLGAPAAFKYFDTTIDRKRYTSTKEVLDATLIHQSITGLYETRIDLSQLGGDGGGGSGSSGGMDPLQLLQPLEAEIKGTKLKAHWNSGATITCVPQAFLEEEVPIKNIWIKTIHGEKEQPVYYLTFKIQGRKVEAEVISSPYDYILVSPSDIPWLMKKPLQLTTLVPLQEYEERLLKQTMLTGSYKEKLQSLFLKYDALWQHWENQVGHRRIKPHHIATGTVNPRPQKQYPINPKAKASIQTVINDLLKQGVLIQQNSIMNTPVYPVPKPDGKWRMVLDYREVNKTIPLIAAQNQHSAGILSSIFRGKYKTTLDLSNGFWAHSITPESYWLTAFTWLGQQYCWTRLPQGFLNSPALFNADVVDLLKEVPNVQVYVDDIYISHDDPREHLEQLEKVFSLLLNAGYVVSLKKSEIAQHEVEFLGFNITKEGRGLTETFKQKLLNITPPRDLKQLQSILGLLNFARNFIPNFSELVKPLYNIIATAPGKYITWTTDNSQQLQNIISMLNSAENLEERNPEVRLIMKVNTSPSAGYIRFYNEFAKRPIMYLNYVYTKAEVKFTNTEKLLTTIHKGLIKALDLGMGQEILVYSPIVSMTKIQKTPLPERKALPIRWITWMSYLEDPRIQFHYDKTLPELQQVPTVTDDIIAKIKHPSEFSMVFYTDGSAIKHPNVNKSHNAGMGIAQVQFKPEFTVINTWSIPLGDHTAQLAEVAAVEFACKKALKIDGPVLIVTDSFYVAESVNKELPYWQSNGFFNNKKKPLKHVSKWKSIADCIQLKPDIIIIHEKGHQPTASTFHTEGNNLADKLATQGSYVVNAGKRTADGSEFEKRTADGSEFESPKKKAKVE

SEQ ID NO: 644 - protein, 2171 aa, synthetic construct
MPAAKRVKLDGGDKKYSIGLDIGTNSVGWAVITDEYKVPSKKFKVLGNTDRHSIKKNLIGALLFDSGETAEATRLKRTARRRYTRRKNRICYLQEIFSNEMAKVDDSFFHRLEESFLVEEDKKHERHPIFGNIVDEVAYHEKYPTIYHLRKKLVDSTDKADLRLIYLALAHMIKFRGHFLIEGDLNPDNSDVDKLFIQLVQTYNQLFEENPINASGVDAKAILSARLSKSRRLENLIAQLPGEKKNGLFGNLIALSLGLTPNFKSNFDLAEDAKLQLSKDTYDDDLDNLLAQIGDQYADLFLAAKNLSDAILLSDILRVNTEITKAPLSASMIKRYDEHHQDLTLLKALVRQQLPEKYKEIFFDQSKNGYAGYIDGGASQEEFYKFIKPILEKMDGTEELLVKLNREDLLRKQRTFDNGSIPHQIHLGELHAILRRQEDFYPFLKDNREKIEKILTFRIPYYVGPLARGNSRFAWMTRKSEETITPWNFEEVVDKGASAQSFIERMTNFDKNLPNEKVLPKHSLLYEYFTVYNELTKVKYVTEGMRKPAFLSGEQKKAIVDLLFKTNRKVTVKQLKEDYFKKIECFDSVEISGVEDRFNASLGTYHDLLKIIKDKDFLDNEENEDILEDIVLTLTLFEDREMIEERLKTYAHLFDDKVMKQLKRRRYTGWGRLSRKLINGIRDKQSGKTILDFLKSDGFANRNFMQLIHDDSLTFKEDIQKAQVSGQGDSLHEHIANLAGSPAIKKGILQTVKVVDELVKVMGRHKPENIVIEMARENQTTQKGQKNSRERMKRIEEGIKELGSQILKEHPVENTQLQNEKLYLYYLQNGRDMYVDQELDINRLSDYDVDHIVPQSFLKDDSIDNKVLTRSDKARGKSDNVPSEEVVKKMKNYWRQLLNAKLITQRKFDNLTKAERGGLSELDKAGFIKRQLVETRQITKHVAQILDSRMNTKYDENDKLIREVKVITLKSKLVSDFRKDFQFYKVREINNYHHAHDAYLNAVVGTALIKKYPKLESEFVYGDYKVYDVRKMIAKSEQEIGKATAKYFFYSNIMNFFKTEITLANGEIRKRPLIETNGETGEIVWDKGRDFATVRKVLSMPQVNIVKKTEVQTGGFSKESILPKRNSDKLIARKKDWDPKKYGGFDSPTVAYSVLVVAKVEKGKSKKLKSVKELLGITIMERSSFEKNPIDFLEAKGYKEVKKDLIIKLPKYSLFELENGRKRMLASAGELQKGNELALPSKYVNFLYLASHYEKLKGSPEDNEQKQLFVEQHKHYLDEIIEQISEFSKRVILADANLDKVLSAYNKHRDKPIREQAENIIHLFTLTNLGAPAAFKYFDTTIDRKRYTSTKEVLDATLIHQSITGLYETRIDLSQLGGDGGGGGGGGGGMDPLQLLQPLEAEIKGTKLKAHWNSGATITCVPQAFLEEEVPIKNIWIKTIHGEKEQPVYYLTFKIQGRKVEAEVISSPYDYILVSPSDIPWLMKKPLQLTTLVPLQEYEERLLKQTMLTGSYKEKLQSLFLKYDALWQHWENQVGHRRIKPHHIATGTVNPRPQKQYPINPKAKASIQTVINDLLKQGVLIQQNSIMNTPVYPVPKPDGKWRMVLDYREVNKTIPLIAAQNQHSAGILSSIFRGKYKTTLDLSNGFWAHSITPESYWLTAFTWLGQQYCWTRLPQGFLNSPALFNADVVDLLKEVPNVQVYVDDIYISHDDPREHLEQLEKVFSLLLNAGYVVSLKKSEIAQHEVEFLGFNITKEGRGLTETFKQKLLNITPPRDLKQLQSILGLLNFARNFIPNFSELVKPLYNIIATAPGKYITWTTDNSQQLQNIISMLNSAENLEERNPEVRLIMKVNTSPSAGYIRFYNEFAKRPIMYLNYVYTKAEVKFTNTEKLLTTIHKGLIKALDLGMGQEILVYSPIVSMTKIQKTPLPERKALPIRWITWMSYLEDPRIQFHYDKTLPELQQVPTVTDDIIAKIKHPSEFSMVFYTDGSAIKHPNVNKSHNAGMGIAQVQFKPEFTVINTWSIPLGDHTAQLAEVAAVEFACKKALKIDGPVLIVTDSFYVAESVNKELPYWQSNGFFNNKKKPLKHVSKWKSIADCIQLKPDIIIIHEKGHQPTASTFHTEGNNLADKLATQGSYVVNAGKRTADGSEFEKRTADGSEFESPKKKAKVE

SEQ ID NO: 645 - protein, 2174 aa, synthetic construct
MPAAKRVKLDGGDKKYSIGLDIGTNSVGWAVITDEYKVPSKKFKVLGNTDRHSIKKNLIGALLFDSGETAEATRLKRTARRRYTRRKNRICYLQEIFSNEMAKVDDSFFHRLEESFLVEEDKKHERHPIFGNIVDEVAYHEKYPTIYHLRKKLVDSTDKADLRLIYLALAHMIKFRGHFLIEGDLNPDNSDVDKLFIQLVQTYNQLFEENPINASGVDAKAILSARLSKSRRLENLIAQLPGEKKNGLFGNLIALSLGLTPNFKSNFDLAEDAKLQLSKDTYDDDLDNLLAQIGDQYADLFLAAKNLSDAILLSDILRVNTEITKAPLSASMIKRYDEHHQDLTLLKALVRQQLPEKYKEIFFDQSKNGYAGYIDGGASQEEFYKFIKPILEKMDGTEELLVKLNREDLLRKQRTFDNGSIPHQIHLGELHAILRRQEDFYPFLKDNREKIEKILTFRIPYYVGPLARGNSRFAWMTRKSEETITPWNFEEVVDKGASAQSFIERMTNFDKNLPNEKVLPKHSLLYEYFTVYNELTKVKYVTEGMRKPAFLSGEQKKAIVDLLFKTNRKVTVKQLKEDYFKKIECFDSVEISGVEDRFNASLGTYHDLLKIIKDKDFLDNEENEDILEDIVLTLTLFEDREMIEERLKTYAHLFDDKVMKQLKRRRYTGWGRLSRKLINGIRDKQSGKTILDFLKSDGFANRNFMQLIHDDSLTFKEDIQKAQVSGQGDSLHEHIANLAGSPAIKKGILQTVKVVDELVKVMGRHKPENIVIEMARENQTTQKGQKNSRERMKRIEEGIKELGSQILKEHPVENTQLQNEKLYLYYLQNGRDMYVDQELDINRLSDYDVDHIVPQSFLKDDSIDNKVLTRSDKARGKSDNVPSEEVVKKMKNYWRQLLNAKLITQRKFDNLTKAERGGLSELDKAGFIKRQLVETRQITKHVAQILDSRMNTKYDENDKLIREVKVITLKSKLVSDFRKDFQFYKVREINNYHHAHDAYLNAVVGTALIKKYPKLESEFVYGDYKVYDVRKMIAKSEQEIGKATAKYFFYSNIMNFFKTEITLANGEIRKRPLIETNGETGEIVWDKGRDFATVRKVLSMPQVNIVKKTEVQTGGFSKESILPKRNSDKLIARKKDWDPKKYGGFDSPTVAYSVLVVAKVEKGKSKKLKSVKELLGITIMERSSFEKNPIDFLEAKGYKEVKKDLIIKLPKYSLFELENGRKRMLASAGELQKGNELALPSKYVNFLYLASHYEKLKGSPEDNEQKQLFVEQHKHYLDEIIEQISEFSKRVILADANLDKVLSAYNKHRDKPIREQAENIIHLFTLTNLGAPAAFKYFDTTIDRKRYTSTKEVLDATLIHQSITGLYETRIDLSQLGGDGGGGSGGGPAPGGMDPLQLLQPLEAEIKGTKLKAHWNSGATITCVPQAFLEEEVPIKNIWIKTIHGEKEQPVYYLTFKIQGRKVEAEVISSPYDYILVSPSDIPWLMKKPLQLTTLVPLQEYEERLLKQTMLTGSYKEKLQSLFLKYDALWQHWENQVGHRRIKPHHIATGTVNPRPQKQYPINPKAKASIQTVINDLLKQGVLIQQNSIMNTPVYPVPKPDGKWRMVLDYREVNKTIPLIAAQNQHSAGILSSIFRGKYKTTLDLSNGFWAHSITPESYWLTAFTWLGQQYCWTRLPQGFLNSPALFNADVVDLLKEVPNVQVYVDDIYISHDDPREHLEQLEKVFSLLLNAGYVVSLKKSEIAQHEVEFLGFNITKEGRGLTETFKQKLLNITPPRDLKQLQSILGLLNFARNFIPNFSELVKPLYNIIATAPGKYITWTTDNSQQLQNIISMLNSAENLEERNPEVRLIMKVNTSPSAGYIRFYNEFAKRPIMYLNYVYTKAEVKFTNTEKLLTTIHKGLIKALDLGMGQEILVYSPIVSMTKIQKTPLPERKALPIRWITWMSYLEDPRIQFHYDKTLPELQQVPTVTDDIIAKIKHPSEFSMVFYTDGSAIKHPNVNKSHNAGMGIAQVQFKPEFTVINTWSIPLGDHTAQLAEVAAVEFACKKALKIDGPVLIVTDSFYVAESVNKELPYWQSNGFFNNKKKPLKHVSKWKSIADCIQLKPDIIIIHEKGHQPTASTFHTEGNNLADKLATQGSYVVNAGKRTADGSEFEKRTADGSEFESPKKKAKVE

SEQ ID NO: 646 - protein, 2176 aa, synthetic construct
MPAAKRVKLDGGDKKYSIGLDIGTNSVGWAVITDEYKVPSKKFKVLGNTDRHSIKKNLIGALLFDSGETAEATRLKRTARRRYTRRKNRICYLQEIFSNEMAKVDDSFFHRLEESFLVEEDKKHERHPIFGNIVDEVAYHEKYPTIYHLRKKLVDSTDKADLRLIYLALAHMIKFRGHFLIEGDLNPDNSDVDKLFIQLVQTYNQLFEENPINASGVDAKAILSARLSKSRRLENLIAQLPGEKKNGLFGNLIALSLGLTPNFKSNFDLAEDAKLQLSKDTYDDDLDNLLAQIGDQYADLFLAAKNLSDAILLSDILRVNTEITKAPLSASMIKRYDEHHQDLTLLKALVRQQLPEKYKEIFFDQSKNGYAGYIDGGASQEEFYKFIKPILEKMDGTEELLVKLNREDLLRKQRTFDNGSIPHQIHLGELHAILRRQEDFYPFLKDNREKIEKILTFRIPYYVGPLARGNSRFAWMTRKSEETITPWNFEEVVDKGASAQSFIERMTNFDKNLPNEKVLPKHSLLYEYFTVYNELTKVKYVTEGMRKPAFLSGEQKKAIVDLLFKTNRKVTVKQLKEDYFKKIECFDSVEISGVEDRFNASLGTYHDLLKIIKDKDFLDNEENEDILEDIVLTLTLFEDREMIEERLKTYAHLFDDKVMKQLKRRRYTGWGRLSRKLINGIRDKQSGKTILDFLKSDGFANRNFMQLIHDDSLTFKEDIQKAQVSGQGDSLHEHIANLAGSPAIKKGILQTVKVVDELVKVMGRHKPENIVIEMARENQTTQKGQKNSRERMKRIEEGIKELGSQILKEHPVENTQLQNEKLYLYYLQNGRDMYVDQELDINRLSDYDVDHIVPQSFLKDDSIDNKVLTRSDKARGKSDNVPSEEVVKKMKNYWRQLLNAKLITQRKFDNLTKAERGGLSELDKAGFIKRQLVETRQITKHVAQILDSRMNTKYDENDKLIREVKVITLKSKLVSDFRKDFQFYKVREINNYHHAHDAYLNAVVGTALIKKYPKLESEFVYGDYKVYDVRKMIAKSEQEIGKATAKYFFYSNIMNFFKTEITLANGEIRKRPLIETNGETGEIVWDKGRDFATVRKVLSMPQVNIVKKTEVQTGGFSKESILPKRNSDKLIARKKDWDPKKYGGFDSPTVAYSVLVVAKVEKGKSKKLKSVKELLGITIMERSSFEKNPIDFLEAKGYKEVKKDLIIKLPKYSLFELENGRKRMLASAGELQKGNELALPSKYVNFLYLASHYEKLKGSPEDNEQKQLFVEQHKHYLDEIIEQISEFSKRVILADANLDKVLSAYNKHRDKPIREQAENIIHLFTLTNLGAPAAFKYFDTTIDRKRYTSTKEVLDATLIHQSITGLYETRIDLSQLGGDGGEAAAKGGSGGGGGMDPLQLLQPLEAEIKGTKLKAHWNSGATITCVPQAFLEEEVPIKNIWIKTIHGEKEQPVYYLTFKIQGRKVEAEVISSPYDYILVSPSDIPWLMKKPLQLTTLVPLQEYEERLLKQTMLTGSYKEKLQSLFLKYDALWQHWENQVGHRRIKPHHIATGTVNPRPQKQYPINPKAKASIQTVINDLLKQGVLIQQNSIMNTPVYPVPKPDGKWRMVLDYREVNKTIPLIAAQNQHSAGILSSIFRGKYKTTLDLSNGFWAHSITPESYWLTAFTWLGQQYCWTRLPQGFLNSPALFNADVVDLLKEVPNVQVYVDDIYISHDDPREHLEQLEKVFSLLLNAGYVVSLKKSEIAQHEVEFLGFNITKEGRGLTETFKQKLLNITPPRDLKQLQSILGLLNFARNFIPNFSELVKPLYNIIATAPGKYITWTTDNSQQLQNIISMLNSAENLEERNPEVRLIMKVNTSPSAGYIRFYNEFAKRPIMYLNYVYTKAEVKFTNTEKLLTTIHKGLIKALDLGMGQEILVYSPIVSMTKIQKTPLPERKALPIRWITWMSYLEDPRIQFHYDKTLPELQQVPTVTDDIIAKIKHPSEFSMVFYTDGSAIKHPNVNKSHNAGMGIAQVQFKPEFTVINTWSIPLGDHTAQLAEVAAVEFACKKALKIDGPVLIVTDSFYVAESVNKELPYWQSNGFFNNKKKPLKHVSKWKSIADCIQLKPDIIIIHEKGHQPTASTFHTEGNNLADKLATQGSYVVNAGKRTADGSEFEKRTADGSEFESPKKKAKVE

SEQ ID NO: 647 - protein, 2211 aa, synthetic construct
MPAAKRVKLDGGDKKYSIGLDIGTNSVGWAVITDEYKVPSKKFKVLGNTDRHSIKKNLIGALLFDSGETAEATRLKRTARRRYTRRKNRICYLQEIFSNEMAKVDDSFFHRLEESFLVEEDKKHERHPIFGNIVDEVAYHEKYPTIYHLRKKLVDSTDKADLRLIYLALAHMIKFRGHFLIEGDLNPDNSDVDKLFIQLVQTYNQLFEENPINASGVDAKAILSARLSKSRRLENLIAQLPGEKKNGLFGNLIALSLGLTPNFKSNFDLAEDAKLQLSKDTYDDDLDNLLAQIGDQYADLFLAAKNLSDAILLSDILRVNTEITKAPLSASMIKRYDEHHQDLTLLKALVRQQLPEKYKEIFFDQSKNGYAGYIDGGASQEEFYKFIKPILEKMDGTEELLVKLNREDLLRKQRTFDNGSIPHQIHLGELHAILRRQEDFYPFLKDNREKIEKILTFRIPYYVGPLARGNSRFAWMTRKSEETITPWNFEEVVDKGASAQSFIERMTNFDKNLPNEKVLPKHSLLYEYFTVYNELTKVKYVTEGMRKPAFLSGEQKKAIVDLLFKTNRKVTVKQLKEDYFKKIECFDSVEISGVEDRFNASLGTYHDLLKIIKDKDFLDNEENEDILEDIVLTLTLFEDREMIEERLKTYAHLFDDKVMKQLKRRRYTGWGRLSRKLINGIRDKQSGKTILDFLKSDGFANRNFMQLIHDDSLTFKEDIQKAQVSGQGDSLHEHIANLAGSPAIKKGILQTVKVVDELVKVMGRHKPENIVIEMARENQTTQKGQKNSRERMKRIEEGIKELGSQILKEHPVENTQLQNEKLYLYYLQNGRDMYVDQELDINRLSDYDVDHIVPQSFLKDDSIDNKVLTRSDKARGKSDNVPSEEVVKKMKNYWRQLLNAKLITQRKFDNLTKAERGGLSELDKAGFIKRQLVETRQITKHVAQILDSRMNTKYDENDKLIREVKVITLKSKLVSDFRKDFQFYKVREINNYHHAHDAYLNAVVGTALIKKYPKLESEFVYGDYKVYDVRKMIAKSEQEIGKATAKYFFYSNIMNFFKTEITLANGEIRKRPLIETNGETGEIVWDKGRDFATVRKVLSMPQVNIVKKTEVQTGGFSKESILPKRNSDKLIARKKDWDPKKYGGFDSPTVAYSVLVVAKVEKGKSKKLKSVKELLGITIMERSSFEKNPIDFLEAKGYKEVKKDLIIKLPKYSLFELENGRKRMLASAGELQKGNELALPSKYVNFLYLASHYEKLKGSPEDNEQKQLFVEQHKHYLDEIIEQISEFSKRVILADANLDKVLSAYNKHRDKPIREQAENIIHLFTLTNLGAPAAFKYFDTTIDRKRYTSTKEVLDATLIHQSITGLYETRIDLSQLGGDGGAEAAAKEAAAKEAAAKEAAAKALEAEAAAKEAAAKEAAAKEAAAKAGGMDPLQLLQPLEAEIKGTKLKAHWNSGATITCVPQAFLEEEVPIKNIWIKTIHGEKEQPVYYLTFKIQGRKVEAEVISSPYDYILVSPSDIPWLMKKPLQLTTLVPLQEYEERLLKQTMLTGSYKEKLQSLFLKYDALWQHWENQVGHRRIKPHHIATGTVNPRPQKQYPINPKAKASIQTVINDLLKQGVLIQQNSIMNTPVYPVPKPDGKWRMVLDYREVNKTIPLIAAQNQHSAGILSSIFRGKYKTTLDLSNGFWAHSITPESYWLTAFTWLGQQYCWTRLPQGFLNSPALFNADVVDLLKEVPNVQVYVDDIYISHDDPREHLEQLEKVFSLLLNAGYVVSLKKSEIAQHEVEFLGFNITKEGRGLTETFKQKLLNITPPRDLKQLQSILGKLNFARNFIPNFSELVKPLYNIIATAPGKYITWTTDNSQQLQNIISMLNSAENLEERNPEVRLIMKVNTSPSAGYIRFYNEFAKRPIMYLNYVYTKAEVKFTNTEKLLTTIHKGLIKALDLGMGQEILVYSPIVSMTKIQKTPLPERKALPIRWITWMSYLEDPRIQFHYDKTLPELQQVPTVTDDIIAKIKHPSEFSMVFYTDGSAIKHPNVNKSHNAGMGIAQVQFKPEFTVINTWSIPLGDHTAQLAEVAAVEFACKKALKIDGPVLIVTDSFYVAESVNKELPYWQSNGFFNNKKKPLKHVSKWKSIADCIQLKPDIIIIHEKGHQPTASTFHTEGNNLADKLATQGSYVVNAGKRTADGSEFEKRTADGSEFESPKKKAKVE

SEQ ID NO: 648 - protein, 2195 aa, synthetic construct
MPAAKRVKLDGGDKKYSIGLDIGTNSVGWAVITDEYKVPSKKFKVLGNTDRHSIKKNLIGALLFDSGETAEATRLKRTARRRYTRRKNRICYLQEIFSNEMAKVDDSFFHRLEESFLVEEDKKHERHPIFGNIVDEVAYHEKYPTIYHLRKKLVDSTDKADLRLIYLALAHMIKFRGHFLIEGDLNPDNSDVDKLFIQLVQTYNQLFEENPINASGVDAKAILSARLSKSRRLENLIAQLPGEKKNGLFGNLIALSLGLTPNFKSNFDLAEDAKLQLSKDTYDDDLDNLLAQIGDQYADLFLAAKNLSDAILLSDILRVNTEITKAPLSASMIKRYDEHHQDLTLLKALVRQQLPEKYKEIFFDQSKNGYAGYIDGGASQEEFYKFIKPILEKMDGTEELLVKLNREDLLRKQRTFDNGSIPHQIHLGELHAILRRQEDFYPFLKDNREKIEKILTFRIPYYVGPLARGNSRFAWMTRKSEETITPWNFEEVVDKGASAQSFIERMTNFDKNLPNEKVLPKHSLLYEYFTVYNELTKVKYVTEGMRKPAFLSGEQKKAIVDLLFKTNRKVTVKQLKEDYFKKIECFDSVEISGVEDRFNASLGTYHDLLKIIKDKDFLDNEENEDILEDIVLTLTLFEDREMIEERLKTYAHLFDDKVMKQLKRRRYTGWGRLSRKLINGIRDKQSGKTILDFLKSDGFANRNFMQLIHDDSLTFKEDIQKAQVSGQGDSLHEHIANLAGSPAIKKGILQTVKVVDELVKVMGRHKPENIVIEMARENQTTQKGQKNSRERMKRIEEGIKELGSQILKEHPVENTQLQNEKLYLYYLQNGRDMYVDQELDINRLSDYDVDHIVPQSFLKDDSIDNKVLTRSDKARGKSDNVPSEEVVKKMKNYWRQLLNAKLITQRKFDNLTKAERGGLSELDKAGFIKRQLVETRQITKHVAQILDSRMNTKYDENDKLIREVKVITLKSKLVSDFRKDFQFYKVREINNYHHAHDAYLNAVVGTALIKKYPKLESEFVYGDYKVYDVRKMIAKSEQEIGKATAKYFFYSNIMNFFKTEITLANGEIRKRPLIETNGETGEIVWDKGRDFATVRKVLSMPQVNIVKKTEVQTGGFSKESILPKRNSDKLIARKKDWDPKKYGGFDSPTVAYSVLVVAKVEKGKSKKLKSVKELLGITIMERSSFEKNPIDFLEAKGYKEVKKDLIIKLPKYSLFELENGRKRMLASAGELQKGNELALPSKYVNFLYLASHYEKLKGSPEDNEQKQLFVEQHKHYLDEIIEQISEFSKRVILADANLDKVLSAYNKHRDKPIREQAENIIHLFTLTNLGAPAAFKYFDTTIDRKRYTSTKEVLDATLIHQSITGLYETRIDLSQLGGDGGGGGGSGGGGSGGGGSGGGGSGGGGSGGGGSGGMDPLQLLQPLEAEIKGTKLKAHWNSGATITCVPQAFLEEEVPIKNIWIKTIHGEKEQPVYYLTFKIQGRKVEAEVISSPYDYILVSPSDIPWLMKKPLQLTTLVPLQEYEERLLKQTMLTGSYKEKLQSLFLKYDALWQHWENQVGHRRIKPHHIATGTVNPRPQKQYPINPKAKASIQTVINDLLKQGVLIQQNSIMNTPVYPVPKPDGKWRMVLDYREVNKTIPLIAAQNQHSAGILSSIFRGKYKTTLDLSNGFWAHSITPESYWLTAFTWLGQQYCWTRLPQGFLNSPALFNADVVDLLKEVPNVQVYVDDIYISHDDPREHLEQLEKVFSLLLNAGYVVSLKKSEIAQHEVEFLGFNITKEGRGLTETFKQKLLNITPPRDLKQLQSILGKLNFARNFIPNFSELVKPLYNIIATAPGKYITWTTDNSQQLQNIISMLNSAENLEERNPEVRLIMKVNTSPSAGYIRFYNEFAKRPIMYLNYVYTKAEVKFTNTEKLLTTIHKGLIKALDLGMGQEILVYSPIVSMTKIQKTPLPERKALPIRWITWMSYLEDPRIQFHYDKTLPELQQVPTVTDDIIAKIKHPSEFSMVFYTDGSAIKHPNVNKSHNAGMGIAQVQFKPEFTVINTWSIPLGDHTAQLAEVAAVEFACKKALKIDGPVLIVTDSFYVAESVNKELPYWQSNGFFNNKKKPLKHVSKWKSIADCIQLKPDIIIIHEKGHQPTASTFHTEGNNLADKLATQGSYVVNAGKRTADGSEFEKRTADGSEFESPKKKAKVE

SEQ ID NO: 649 - protein, 2190 aa, synthetic construct
MPAAKRVKLDGGDKKYSIGLDIGTNSVGWAVITDEYKVPSKKFKVLGNTDRHSIKKNLIGALLFDSGETAEATRLKRTARRRYTRRKNRICYLQEIFSNEMAKVDDSFFHRLEESFLVEEDKKHERHPIFGNIVDEVAYHEKYPTIYHLRKKLVDSTDKADLRLIYLALAHMIKFRGHFLIEGDLNPDNSDVDKLFIQLVQTYNQLFEENPINASGVDAKAILSARLSKSRRLENLIAQLPGEKKNGLFGNLIALSLGLTPNFKSNFDLAEDAKLQLSKDTYDDDLDNLLAQIGDQYADLFLAAKNLSDAILLSDILRVNTEITKAPLSASMIKRYDEHHQDLTLLKALVRQQLPEKYKEIFFDQSKNGYAGYIDGGASQEEFYKFIKPILEKMDGTEELLVKLNREDLLRKQRTFDNGSIPHQIHLGELHAILRRQEDFYPFLKDNREKIEKILTFRIPYYVGPLARGNSRFAWMTRKSEETITPWNFEEVVDKGASAQSFIERMTNFDKNLPNEKVLPKHSLLYEYFTVYNELTKVKYVTEGMRKPAFLSGEQKKAIVDLLFKTNRKVTVKQLKEDYFKKIECFDSVEISGVEDRFNASLGTYHDLLKIIKDKDFLDNEENEDILEDIVLTLTLFEDREMIEERLKTYAHLFDDKVMKQLKRRRYTGWGRLSRKLINGIRDKQSGKTILDFLKSDGFANRNFMQLIHDDSLTFKEDIQKAQVSGQGDSLHEHIANLAGSPAIKKGILQTVKVVDELVKVMGRHKPENIVIEMARENQTTQKGQKNSRERMKRIEEGIKELGSQILKEHPVENTQLQNEKLYLYYLQNGRDMYVDQELDINRLSDYDVDHIVPQSFLKDDSIDNKVLTRSDKARGKSDNVPSEEVVKKMKNYWRQLLNAKLITQRKFDNLTKAERGGLSELDKAGFIKRQLVETRQITKHVAQILDSRMNTKYDENDKLIREVKVITLKSKLVSDFRKDFQFYKVREINNYHHAHDAYLNAVVGTALIKKYPKLESEFVYGDYKVYDVRKMIAKSEQEIGKATAKYFFYSNIMNFFKTEITLANGEIRKRPLIETNGETGEIVWDKGRDFATVRKVLSMPQVNIVKKTEVQTGGFSKESILPKRNSDKLIARKKDWDPKKYGGFDSPTVAYSVLVVAKVEKGKSKKLKSVKELLGITIMERSSFEKNPIDFLEAKGYKEVKKDLIIKLPKYSLFELENGRKRMLASAGELQKGNELALPSKYVNFLYLASHYEKLKGSPEDNEQKQLFVEQHKHYLDEIIEQISEFSKRVILADANLDKVLSAYNKHRDKPIREQAENIIHLFTLTNLGAPAAFKYFDTTIDRKRYTSTKEVLDATLIHQSITGLYETRIDLSQLGGDGGEAAAKEAAAKEAAAKEAAAKEAAAKGGMDPLQLLQPLEAEIKGTKLKAHWNSGATITCVPQAFLEEEVPIKNIWIKTIHGEKEQPVYYLTFKIQGRKVEAEVISSPYDYILVSPSDIPWLMKKPLQLTTLVPLQEYEERLLKQTMLTGSYKEKLQSLFLKYDALWQHWENQVGHRRIKPHHIATGTVNPRPQKQYPINPKAKASIQTVINDLLKQGVLIQQNSIMNTPVYPVPKPDGKWRMVLDYREVNKTIPLIAAQNQHSAGILSSIFRGKYKTTLDLSNGFWAHSITPESYWLTAFTWLGQQYCWTRLPQGFLNSPALFNADVVDLLKEVPNVQVYVDDIYISHDDPREHLEQLEKVFSLLLNAGYVVSLKKSEIAQHEVEFLGFNITKEGRGLTETFKQKLLNITPPRDLKQLQSILGKLNFARNFIPNFSELVKPLYNIIATAPGKYITWTTDNSQQLQNIISMLNSAENLEERNPEVRLIMKVNTSPSAGYIRFYNEFAKRPIMYLNYVYTKAEVKFTNTEKLLTTIHKGLIKALDLGMGQEILVYSPIVSMTKIQKTPLPERKALPIRWITWMSYLEDPRIQFHYDKTLPELQQVPTVTDDIIAKIKHPSEFSMVFYTDGSAIKHPNVNKSHNAGMGIAQVQFKPEFTVINTWSIPLGDHTAQLAEVAAVEFACKKALKIDGPVLIVTDSFYVAESVNKELPYWQSNGFFNNKKKPLKHVSKWKSIADCIQLKPDIIIIHEKGHQPTASTFHTEGNNLADKLATQGSYVVNAGKRTADGSEFEKRTADGSEFESPKKKAKVE

SEQ ID NO: 650 - protein, 2176 aa, synthetic construct
MPAAKRVKLDGGDKKYSIGLDIGTNSVGWAVITDEYKVPSKKFKVLGNTDRHSIKKNLIGALLFDSGETAEATRLKRTARRRYTRRKNRICYLQEIFSNEMAKVDDSFFHRLEESFLVEEDKKHERHPIFGNIVDEVAYHEKYPTIYHLRKKLVDSTDKADLRLIYLALAHMIKFRGHFLIEGDLNPDNSDVDKLFIQLVQTYNQLFEENPINASGVDAKAILSARLSKSRRLENLIAQLPGEKKNGLFGNLIALSLGLTPNFKSNFDLAEDAKLQLSKDTYDDDLDNLLAQIGDQYADLFLAAKNLSDAILLSDILRVNTEITKAPLSASMIKRYDEHHQDLTLLKALVRQQLPEKYKEIFFDQSKNGYAGYIDGGASQEEFYKFIKPILEKMDGTEELLVKLNREDLLRKQRTFDNGSIPHQIHLGELHAILRRQEDFYPFLKDNREKIEKILTFRIPYYVGPLARGNSRFAWMTRKSEETITPWNFEEVVDKGASAQSFIERMTNFDKNLPNEKVLPKHSLLYEYFTVYNELTKVKYVTEGMRKPAFLSGEQKKAIVDLLFKTNRKVTVKQLKEDYFKKIECFDSVEISGVEDRFNASLGTYHDLLKIIKDKDFLDNEENEDILEDIVLTLTLFEDREMIEERLKTYAHLFDDKVMKQLKRRRYTGWGRLSRKLINGIRDKQSGKTILDFLKSDGFANRNFMQLIHDDSLTFKEDIQKAQVSGQGDSLHEHIANLAGSPAIKKGILQTVKVVDELVKVMGRHKPENIVIEMARENQTTQKGQKNSRERMKRIEEGIKELGSQILKEHPVENTQLQNEKLYLYYLQNGRDMYVDQELDINRLSDYDVDHIVPQSFLKDDSIDNKVLTRSDKARGKSDNVPSEEVVKKMKNYWRQLLNAKLITQRKFDNLTKAERGGLSELDKAGFIKRQLVETRQITKHVAQILDSRMNTKYDENDKLIREVKVITLKSKLVSDFRKDFQFYKVREINNYHHAHDAYLNAVVGTALIKKYPKLESEFVYGDYKVYDVRKMIAKSEQEIGKATAKYFFYSNIMNFFKTEITLANGEIRKRPLIETNGETGEIVWDKGRDFATVRKVLSMPQVNIVKKTEVQTGGFSKESILPKRNSDKLIARKKDWDPKKYGGFDSPTVAYSVLVVAKVEKGKSKKLKSVKELLGITIMERSSFEKNPIDFLEAKGYKEVKKDLIIKLPKYSLFELENGRKRMLASAGELQKGNELALPSKYVNFLYLASHYEKLKGSPEDNEQKQLFVEQHKHYLDEIIEQISEFSKRVILADANLDKVLSAYNKHRDKPIREQAENIIHLFTLTNLGAPAAFKYFDTTIDRKRYTSTKEVLDATLIHQSITGLYETRIDLSQLGGDGGPAPGSSEAAAKGGMDPLQLLQPLEAEIKGTKLKAHWNSGATITCVPQAFLEEEVPIKNIWIKTIHGEKEQPVYYLTFKIQGRKVEAEVISSPYDYILVSPSDIPWLMKKPLQLTTLVPLQEYEERLLKQTMLTGSYKEKLQSLFLKYDALWQHWENQVGHRRIKPHHIATGTVNPRPQKQYPINPKAKASIQTVINDLLKQGVLIQQNSIMNTPVYPVPKPDGKWRMVLDYREVNKTIPLIAAQNQHSAGILSSIFRGKYKTTLDLSNGFWAHSITPESYWLTAFTWLGQQYCWTRLPQGFLNSPALFNADVVDLLKEVPNVQVYVDDIYISHDDPREHLEQLEKVFSLLLNAGYVVSLKKSEIAQHEVEFLGFNITKEGRGLTETFKQKLLNITPPRDLKQLQSILGKLNFARNFIPNFSELVKPLYNIIATAPGKYITWTTDNSQQLQNIISMLNSAENLEERNPEVRLIMKVNTSPSAGYIRFYNEFAKRPIMYLNYVYTKAEVKFTNTEKLLTTIHKGLIKALDLGMGQEILVYSPIVSMTKIQKTPLPERKALPIRWITWMSYLEDPRIQFHYDKTLPELQQVPTVTDDIIAKIKHPSEFSMVFYTDGSAIKHPNVNKSHNAGMGIAQVQFKPEFTVINTWSIPLGDHTAQLAEVAAVEFACKKALKIDGPVLIVTDSFYVAESVNKELPYWQSNGFFNNKKKPLKHVSKWKSIADCIQLKPDIIIIHEKGHQPTASTFHTEGNNLADKLATQGSYVVNAGKRTADGSEFEKRTADGSEFESPKKKAKVE

SEQ ID NO: 651 - protein, 2195 aa, synthetic construct
MPAAKRVKLDGGDKKYSIGLDIGTNSVGWAVITDEYKVPSKKFKVLGNTDRHSIKKNLIGALLFDSGETAEATRLKRTARRRYTRRKNRICYLQEIFSNEMAKVDDSFFHRLEESFLVEEDKKHERHPIFGNIVDEVAYHEKYPTIYHLRKKLVDSTDKADLRLIYLALAHMIKFRGHFLIEGDLNPDNSDVDKLFIQLVQTYNQLFEENPINASGVDAKAILSARLSKSRRLENLIAQLPGEKKNGLFGNLIALSLGLTPNFKSNFDLAEDAKLQLSKDTYDDDLDNLLAQIGDQYADLFLAAKNLSDAILLSDILRVNTEITKAPLSASMIKRYDEHHQDLTLLKALVRQQLPEKYKEIFFDQSKNGYAGYIDGGASQEEFYKFIKPILEKMDGTEELLVKLNREDLLRKQRTFDNGSIPHQIHLGELHAILRRQEDFYPFLKDNREKIEKILTFRIPYYVGPLARGNSRFAWMTRKSEETITPWNFEEVVDKGASAQSFIERMTNFDKNLPNEKVLPKHSLLYEYFTVYNELTKVKYVTEGMRKPAFLSGEQKKAIVDLLFKTNRKVTVKQLKEDYFKKIECFDSVEISGVEDRFNASLGTYHDLLKIIKDKDFLDNEENEDILEDIVLTLTLFEDREMIEERLKTYAHLFDDKVMKQLKRRRYTGWGRLSRKLINGIRDKQSGKTILDFLKSDGFANRNFMQLIHDDSLTFKEDIQKAQVSGQGDSLHEHIANLAGSPAIKKGILQTVKVVDELVKVMGRHKPENIVIEMARENQTTQKGQKNSRERMKRIEEGIKELGSQILKEHPVENTQLQNEKLYLYYLQNGRDMYVDQELDINRLSDYDVDHIVPQSFLKDDSIDNKVLTRSDKARGKSDNVPSEEVVKKMKNYWRQLLNAKLITQRKFDNLTKAERGGLSELDKAGFIKRQLVETRQITKHVAQILDSRMNTKYDENDKLIREVKVITLKSKLVSDFRKDFQFYKVREINNYHHAHDAYLNAVVGTALIKKYPKLESEFVYGDYKVYDVRKMIAKSEQEIGKATAKYFFYSNIMNFFKTEITLANGEIRKRPLIETNGETGEIVWDKGRDFATVRKVLSMPQVNIVKKTEVQTGGFSKESILPKRNSDKLIARKKDWDPKKYGGFDSPTVAYSVLVVAKVEKGKSKKLKSVKELLGITIMERSSFEKNPIDFLEAKGYKEVKKDLIIKLPKYSLFELENGRKRMLASAGELQKGNELALPSKYVNFLYLASHYEKLKGSPEDNEQKQLFVEQHKHYLDEIIEQISEFSKRVILADANLDKVLSAYNKHRDKPIREQAENIIHLFTLTNLGAPAAFKYFDTTIDRKRYTSTKEVLDATLIHQSITGLYETRIDLSQLGGDGGEAAAKEAAAKEAAAKEAAAKEAAAKEAAAKGGMDPLQLLQPLEAEIKGTKLKAHWNSGATITCVPQAFLEEEVPIKNIWIKTIHGEKEQPVYYLTFKIQGRKVEAEVISSPYDYILVSPSDIPWLMKKPLQLTTLVPLQEYEERLLKQTMLTGSYKEKLQSLFLKYDALWQHWENQVGHRRIKPHHIATGTVNPRPQKQYPINPKAKASIQTVINDLLKQGVLIQQNSIMNTPVYPVPKPDGKWRMVLDYREVNKTIPLIAAQNQHSAGILSSIFRGKYKTTLDLSNGFWAHSITPESYWLTAFTWLGQQYCWTRLPQGFLNSPALFNADVVDLLKEVPNVQVYVDDIYISHDDPREHLEQLEKVFSLLLNAGYVVSLKKSEIAQHEVEFLGFNITKEGRGLTETFKQKLLNITPPRDLKQLQSILGKLNFARNFIPNFSELVKPLYNIIATAPGKYITWTTDNSQQLQNIISMLNSAENLEERNPEVRLIMKVNTSPSAGYIRFYNEFAKRPIMYLNYVYTKAEVKFTNTEKLLTTIHKGLIKALDLGMGQEILVYSPIVSMTKIQKTPLPERKALPIRWITWMSYLEDPRIQFHYDKTLPELQQVPTVTDDIIAKIKHPSEFSMVFYTDGSAIKHPNVNKSHNAGMGIAQVQFKPEFTVINTWSIPLGDHTAQLAEVAAVEFACKKALKIDGPVLIVTDSFYVAESVNKELPYWQSNGFFNNKKKPLKHVSKWKSIADCIQLKPDIIIIHEKGHQPTASTFHTEGNNLADKLATQGSYVVNAGKRTADGSEFEKRTADGSEFESPKKKAKVE

SEQ ID NO: 652 - protein, 2198 aa, synthetic construct
MPAAKRVKLDGGDKKYSIGLDIGTNSVGWAVITDEYKVPSKKFKVLGNTDRHSIKKNLIGALLFDSGETAEATRLKRTARRRYTRRKNRICYLQEIFSNEMAKVDDSFFHRLEESFLVEEDKKHERHPIFGNIVDEVAYHEKYPTIYHLRKKLVDSTDKADLRLIYLALAHMIKFRGHFLIEGDLNPDNSDVDKLFIQLVQTYNQLFEENPINASGVDAKAILSARLSKSRRLENLIAQLPGEKKNGLFGNLIALSLGLTPNFKSNFDLAEDAKLQLSKDTYDDDLDNLLAQIGDQYADLFLAAKNLSDAILLSDILRVNTEITKAPLSASMIKRYDEHHQDLTLLKALVRQQLPEKYKEIFFDQSKNGYAGYIDGGASQEEFYKFIKPILEKMDGTEELLVKLNREDLLRKQRTFDNGSIPHQIHLGELHAILRRQEDFYPFLKDNREKIEKILTFRIPYYVGPLARGNSRFAWMTRKSEETITPWNFEEVVDKGASAQSFIERMTNFDKNLPNEKVLPKHSLLYEYFTVYNELTKVKYVTEGMRKPAFLSGEQKKAIVDLLFKTNRKVTVKQLKEDYFKKIECFDSVEISGVEDRFNASLGTYHDLLKIIKDKDFLDNEENEDILEDIVLTLTLFEDREMIEERLKTYAHLFDDKVMKQLKRRRYTGWGRLSRKLINGIRDKQSGKTILDFLKSDGFANRNFMQLIHDDSLTFKEDIQKAQVSGQGDSLHEHIANLAGSPAIKKGILQTVKVVDELVKVMGRHKPENIVIEMARENQTTQKGQKNSRERMKRIEEGIKELGSQILKEHPVENTQLQNEKLYLYYLQNGRDMYVDQELDINRLSDYDVDHIVPQSFLKDDSIDNKVLTRSDKARGKSDNVPSEEVVKKMKNYWRQLLNAKLITQRKFDNLTKAERGGLSELDKAGFIKRQLVETRQITKHVAQILDSRMNTKYDENDKLIREVKVITLKSKLVSDFRKDFQFYKVREINNYHHAHDAYLNAVVGTALIKKYPKLESEFVYGDYKVYDVRKMIAKSEQEIGKATAKYFFYSNIMNFFKTEITLANGEIRKRPLIETNGETGEIVWDKGRDFATVRKVLSMPQVNIVKKTEVQTGGFSKESILPKRNSDKLIARKKDWDPKKYGGFDSPTVAYSVLVVAKVEKGKSKKLKSVKELLGITIMERSSFEKNPIDFLEAKGYKEVKKDLIIKLPKYSLFELENGRKRMLASAGELQKGNELALPSKYVNFLYLASHYEKLKGSPEDNEQKQLFVEQHKHYLDEIIEQISEFSKRVILADANLDKVLSAYNKHRDKPIREQAENIIHLFTLTNLGAPAAFKYFDTTIDRKRYTSTKEVLDATLIHQSITGLYETRIDLSQLGGDGGSGGSSGGSSGSETPGTSESATPESSGGSSGGSSGGMDPLQLLQPLEAEIKGTKLKAHWNSGATITCVPQAFLEEEVPIKNIWIKTIHGEKEQPVYYLTFKIQGRKVEAEVISSPYDYILVSPSDIPWLMKKPLQLTTLVPLQEYEERLLKQTMLTGSYKEKLQSLFLKYDALWQHWENQVGHRRIKPHHIATGTVNPRPQKQYPINPKAKASIQTVINDLLKQGVLIQQNSIMNTPVYPVPKPDGKWRMVLDYREVNKTIPLIAAQNQHSAGILSSIFRGKYKTTLDLSNGFWAHSITPESYWLTAFTWLGQQYCWTRLPQGFLNSPALFNADVVDLLKEVPNVQVYVDDIYISHDDPREHLEQLEKVFSLLLNAGYVVSLKKSEIAQHEVEFLGFNITKEGRGLTETFKQKLLNITPPRDLKQLQSILGKLNFARNFIPNFSELVKPLYNIIATAPGKYITWTTDNSQQLQNIISMLNSAENLEERNPEVRLIMKVNTSPSAGYIRFYNEFAKRPIMYLNYVYTKAEVKFTNTEKLLTTIHKGLIKALDLGMGQEILVYSPIVSMTKIQKTPLPERKALPIRWITWMSYLEDPRIQFHYDKTLPELQQVPTVTDDIIAKIKHPSEFSMVFYTDGSAIKHPNVNKSHNAGMGIAQVQFKPEFTVINTWSIPLGDHTAQLAEVAAVEFACKKALKIDGPVLIVTDSFYVAESVNKELPYWQSNGFFNNKKKPLKHVSKWKSIADCIQLKPDIIIIHEKGHQPTASTFHTEGNNLADKLATQGSYVVNAGKRTADGSEFEKRTADGSEFESPKKKAKVE

SEQ ID NO: 653 - protein, 2176 aa, synthetic construct
MPAAKRVKLDGGDKKYSIGLDIGTNSVGWAVITDEYKVPSKKFKVLGNTDRHSIKKNLIGALLFDSGETAEATRLKRTARRRYTRRKNRICYLQEIFSNEMAKVDDSFFHRLEESFLVEEDKKHERHPIFGNIVDEVAYHEKYPTIYHLRKKLVDSTDKADLRLIYLALAHMIKFRGHFLIEGDLNPDNSDVDKLFIQLVQTYNQLFEENPINASGVDAKAILSARLSKSRRLENLIAQLPGEKKNGLFGNLIALSLGLTPNFKSNFDLAEDAKLQLSKDTYDDDLDNLLAQIGDQYADLFLAAKNLSDAILLSDILRVNTEITKAPLSASMIKRYDEHHQDLTLLKALVRQQLPEKYKEIFFDQSKNGYAGYIDGGASQEEFYKFIKPILEKMDGTEELLVKLNREDLLRKQRTFDNGSIPHQIHLGELHAILRRQEDFYPFLKDNREKIEKILTFRIPYYVGPLARGNSRFAWMTRKSEETITPWNFEEVVDKGASAQSFIERMTNFDKNLPNEKVLPKHSLLYEYFTVYNELTKVKYVTEGMRKPAFLSGEQKKAIVDLLFKTNRKVTVKQLKEDYFKKIECFDSVEISGVEDRFNASLGTYHDLLKIIKDKDFLDNEENEDILEDIVLTLTLFEDREMIEERLKTYAHLFDDKVMKQLKRRRYTGWGRLSRKLINGIRDKQSGKTILDFLKSDGFANRNFMQLIHDDSLTFKEDIQKAQVSGQGDSLHEHIANLAGSPAIKKGILQTVKVVDELVKVMGRHKPENIVIEMARENQTTQKGQKNSRERMKRIEEGIKELGSQILKEHPVENTQLQNEKLYLYYLQNGRDMYVDQELDINRLSDYDVDHIVPQSFLKDDSIDNKVLTRSDKARGKSDNVPSEEVVKKMKNYWRQLLNAKLITQRKFDNLTKAERGGLSELDKAGFIKRQLVETRQITKHVAQILDSRMNTKYDENDKLIREVKVITLKSKLVSDFRKDFQFYKVREINNYHHAHDAYLNAVVGTALIKKYPKLESEFVYGDYKVYDVRKMIAKSEQEIGKATAKYFFYSNIMNFFKTEITLANGEIRKRPLIETNGETGEIVWDKGRDFATVRKVLSMPQVNIVKKTEVQTGGFSKESILPKRNSDKLIARKKDWDPKKYGGFDSPTVAYSVLVVAKVEKGKSKKLKSVKELLGITIMERSSFEKNPIDFLEAKGYKEVKKDLIIKLPKYSLFELENGRKRMLASAGELQKGNELALPSKYVNFLYLASHYEKLKGSPEDNEQKQLFVEQHKHYLDEIIEQISEFSKRVILADANLDKVLSAYNKHRDKPIREQAENIIHLFTLTNLGAPAAFKYFDTTIDRKRYTSTKEVLDATLIHQSITGLYETRIDLSQLGGDGGGGGGGSEAAAKGGMDPLQLLQPLEAEIKGTKLKAHWNSGATITCVPQAFLEEEVPIKNIWIKTIHGEKEQPVYYLTFKIQGRKVEAEVISSPYDYILVSPSDIPWLMKKPLQLTTLVPLQEYEERLLKQTMLTGSYKEKLQSLFLKYDALWQHWENQVGHRRIKPHHIATGTVNPRPQKQYPINPKAKASIQTVINDLLKQGVLIQQNSIMNTPVYPVPKPDGKWRMVLDYREVNKTIPLIAAQNQHSAGILSSIFRGKYKTTLDLSNGFWAHSITPESYWLTAFTWLGQQYCWTRLPQGFLNSPALFNADVVDLLKEVPNVQVYVDDIYISHDDPREHLEQLEKVFSLLLNAGYVVSLKKSEIAQHEVEFLGFNITKEGRGLTETFKQKLLNITPPRDLKQLQSILGKLNFARNFIPNFSELVKPLYNIIATAPGKYITWTTDNSQQLQNIISMLNSAENLEERNPEVRLIMKVNTSPSAGYIRFYNEFAKRPIMYLNYVYTKAEVKFTNTEKLLTTIHKGLIKALDLGMGQEILVYSPIVSMTKIQKTPLPERKALPIRWITWMSYLEDPRIQFHYDKTLPELQQVPTVTDDIIAKIKHPSEFSMVFYTDGSAIKHPNVNKSHNAGMGIAQVQFKPEFTVINTWSIPLGDHTAQLAEVAAVEFACKKALKIDGPVLIVTDSFYVAESVNKELPYWQSNGFFNNKKKPLKHVSKWKSIADCIQLKPDIIIIHEKGHQPTASTFHTEGNNLADKLATQGSYVVNAGKRTADGSEFEKRTADGSEFESPKKKAKVE

SEQ ID NO: 654 - protein, 2178 aa, synthetic construct
MPAAKRVKLDGGDKKYSIGLDIGTNSVGWAVITDEYKVPSKKFKVLGNTDRHSIKKNLIGALLFDSGETAEATRLKRTARRRYTRRKNRICYLQEIFSNEMAKVDDSFFHRLEESFLVEEDKKHERHPIFGNIVDEVAYHEKYPTIYHLRKKLVDSTDKADLRLIYLALAHMIKFRGHFLIEGDLNPDNSDVDKLFIQLVQTYNQLFEENPINASGVDAKAILSARLSKSRRLENLIAQLPGEKKNGLFGNLIALSLGLTPNFKSNFDLAEDAKLQLSKDTYDDDLDNLLAQIGDQYADLFLAAKNLSDAILLSDILRVNTEITKAPLSASMIKRYDEHHQDLTLLKALVRQQLPEKYKEIFFDQSKNGYAGYIDGGASQEEFYKFIKPILEKMDGTEELLVKLNREDLLRKQRTFDNGSIPHQIHLGELHAILRRQEDFYPFLKDNREKIEKILTFRIPYYVGPLARGNSRFAWMTRKSEETITPWNFEEVVDKGASAQSFIERMTNFDKNLPNEKVLPKHSLLYEYFTVYNELTKVKYVTEGMRKPAFLSGEQKKAIVDLLFKTNRKVTVKQLKEDYFKKIECFDSVEISGVEDRFNASLGTYHDLLKIIKDKDFLDNEENEDILEDIVLTLTLFEDREMIEERLKTYAHLFDDKVMKQLKRRRYTGWGRLSRKLINGIRDKQSGKTILDFLKSDGFANRNFMQLIHDDSLTFKEDIQKAQVSGQGDSLHEHIANLAGSPAIKKGILQTVKVVDELVKVMGRHKPENIVIEMARENQTTQKGQKNSRERMKRIEEGIKELGSQILKEHPVENTQLQNEKLYLYYLQNGRDMYVDQELDINRLSDYDVDHIVPQSFLKDDSIDNKVLTRSDKARGKSDNVPSEEVVKKMKNYWRQLLNAKLITQRKFDNLTKAERGGLSELDKAGFIKRQLVETRQITKHVAQILDSRMNTKYDENDKLIREVKVITLKSKLVSDFRKDFQFYKVREINNYHHAHDAYLNAVVGTALIKKYPKLESEFVYGDYKVYDVRKMIAKSEQEIGKATAKYFFYSNIMNFFKTEITLANGEIRKRPLIETNGETGEIVWDKGRDFATVRKVLSMPQVNIVKKTEVQTGGFSKESILPKRNSDKLIARKKDWDPKKYGGFDSPTVAYSVLVVAKVEKGKSKKLKSVKELLGITIMERSSFEKNPIDFLEAKGYKEVKKDLIIKLPKYSLFELENGRKRMLASAGELQKGNELALPSKYVNFLYLASHYEKLKGSPEDNEQKQLFVEQHKHYLDEIIEQISEFSKRVILADANLDKVLSAYNKHRDKPIREQAENIIHLFTLTNLGAPAAFKYFDTTIDRKRYTSTKEVLDATLIHQSITGLYETRIDLSQLGGDGGPAPAPAPAPAPAPGGMDPLQLLQPLEAEIKGTKLKAHWNSGATITCVPQAFLEEEVPIKNIWIKTIHGEKEQPVYYLTFKIQGRKVEAEVISSPYDYILVSPSDIPWLMKKPLQLTTLVPLQEYEERLLKQTMLTGSYKEKLQSLFLKYDALWQHWENQVGHRRIKPHHIATGTVNPRPQKQYPINPKAKASIQTVINDLLKQGVLIQQNSIMNTPVYPVPKPDGKWRMVLDYREVNKTIPLIAAQNQHSAGILSSIFRGKYKTTLDLSNGFWAHSITPESYWLTAFTWLGQQYCWTRLPQGFLNSPALFNADVVDLLKEVPNVQVYVDDIYISHDDPREHLEQLEKVFSLLLNAGYVVSLKKSEIAQHEVEFLGFNITKEGRGLTETFKQKLLNITPPRDLKQLQSILGKLNFARNFIPNFSELVKPLYNIIATAPGKYITWTTDNSQQLQNIISMLNSAENLEERNPEVRLIMKVNTSPSAGYIRFYNEFAKRPIMYLNYVYTKAEVKFTNTEKLLTTIHKGLIKALDLGMGQEILVYSPIVSMTKIQKTPLPERKALPIRWITWMSYLEDPRIQFHYDKTLPELQQVPTVTDDIIAKIKHPSEFSMVFYTDGSAIKHPNVNKSHNAGMGIAQVQFKPEFTVINTWSIPLGDHTAQLAEVAAVEFACKKALKIDGPVLIVTDSFYVAESVNKELPYWQSNGFFNNKKKPLKHVSKWKSIADCIQLKPDIIIIHEKGHQPTASTFHTEGNNLADKLATQGSYVVNAGKRTADGSEFEKRTADGSEFESPKKKAKVE

SEQ ID NO: 655 - protein, 2176 aa, synthetic construct
MPAAKRVKLDGGDKKYSIGLDIGTNSVGWAVITDEYKVPSKKFKVLGNTDRHSIKKNLIGALLFDSGETAEATRLKRTARRRYTRRKNRICYLQEIFSNEMAKVDDSFFHRLEESFLVEEDKKHERHPIFGNIVDEVAYHEKYPTIYHLRKKLVDSTDKADLRLIYLALAHMIKFRGHFLIEGDLNPDNSDVDKLFIQLVQTYNQLFEENPINASGVDAKAILSARLSKSRRLENLIAQLPGEKKNGLFGNLIALSLGLTPNFKSNFDLAEDAKLQLSKDTYDDDLDNLLAQIGDQYADLFLAAKNLSDAILLSDILRVNTEITKAPLSASMIKRYDEHHQDLTLLKALVRQQLPEKYKEIFFDQSKNGYAGYIDGGASQEEFYKFIKPILEKMDGTEELLVKLNREDLLRKQRTFDNGSIPHQIHLGELHAILRRQEDFYPFLKDNREKIEKILTFRIPYYVGPLARGNSRFAWMTRKSEETITPWNFEEVVDKGASAQSFIERMTNFDKNLPNEKVLPKHSLLYEYFTVYNELTKVKYVTEGMRKPAFLSGEQKKAIVDLLFKTNRKVTVKQLKEDYFKKIECFDSVEISGVEDRFNASLGTYHDLLKIIKDKDFLDNEENEDILEDIVLTLTLFEDREMIEERLKTYAHLFDDKVMKQLKRRRYTGWGRLSRKLINGIRDKQSGKTILDFLKSDGFANRNFMQLIHDDSLTFKEDIQKAQVSGQGDSLHEHIANLAGSPAIKKGILQTVKVVDELVKVMGRHKPENIVIEMARENQTTQKGQKNSRERMKRIEEGIKELGSQILKEHPVENTQLQNEKLYLYYLQNGRDMYVDQELDINRLSDYDVDHIVPQSFLKDDSIDNKVLTRSDKARGKSDNVPSEEVVKKMKNYWRQLLNAKLITQRKFDNLTKAERGGLSELDKAGFIKRQLVETRQITKHVAQILDSRMNTKYDENDKLIREVKVITLKSKLVSDFRKDFQFYKVREINNYHHAHDAYLNAVVGTALIKKYPKLESEFVYGDYKVYDVRKMIAKSEQEIGKATAKYFFYSNIMNFFKTEITLANGEIRKRPLIETNGETGEIVWDKGRDFATVRKVLSMPQVNIVKKTEVQTGGFSKESILPKRNSDKLIARKKDWDPKKYGGFDSPTVAYSVLVVAKVEKGKSKKLKSVKELLGITIMERSSFEKNPIDFLEAKGYKEVKKDLIIKLPKYSLFELENGRKRMLASAGELQKGNELALPSKYVNFLYLASHYEKLKGSPEDNEQKQLFVEQHKHYLDEIIEQISEFSKRVILADANLDKVLSAYNKHRDKPIREQAENIIHLFTLTNLGAPAAFKYFDTTIDRKRYTSTKEVLDATLIHQSITGLYETRIDLSQLGGDGGGGGGSSEAAAKGGMDPLQLLQPLEAEIKGTKLKAHWNSGATITCVPQAFLEEEVPIKNIWIKTIHGEKEQPVYYLTFKIQGRKVEAEVISSPYDYILVSPSDIPWLMKKPLQLTTLVPLQEYEERLLKQTMLTGSYKEKLQSLFLKYDALWQHWENQVGHRRIKPHHIATGTVNPRPQKQYPINPKAKASIQTVINDLLKQGVLIQQNSIMNTPVYPVPKPDGKWRMVLDYREVNKTIPLIAAQNQHSAGILSSIFRGKYKTTLDLSNGFWAHSITPESYWLTAFTWLGQQYCWTRLPQGFLNSPALFNADVVDLLKEVPNVQVYVDDIYISHDDPREHLEQLEKVFSLLLNAGYVVSLKKSEIAQHEVEFLGFNITKEGRGLTETFKQKLLNITPPRDLKQLQSILGKLNFARNFIPNFSELVKPLYNIIATAPGKYITWTTDNSQQLQNIISMLNSAENLEERNPEVRLIMKVNTSPSAGYIRFYNEFAKRPIMYLNYVYTKAEVKFTNTEKLLTTIHKGLIKALDLGMGQEILVYSPIVSMTKIQKTPLPERKALPIRWITWMSYLEDPRIQFHYDKTLPELQQVPTVTDDIIAKIKHPSEFSMVFYTDGSAIKHPNVNKSHNAGMGIAQVQFKPEFTVINTWSIPLGDHTAQLAEVAAVEFACKKALKIDGPVLIVTDSFYVAESVNKELPYWQSNGFFNNKKKPLKHVSKWKSIADCIQLKPDIIIIHEKGHQPTASTFHTEGNNLADKLATQGSYVVNAGKRTADGSEFEKRTADGSEFESPKKKAKVE

SEQ ID NO: 656 - protein, 2181 aa, synthetic construct
MPAAKRVKLDGGDKKYSIGLDIGTNSVGWAVITDEYKVPSKKFKVLGNTDRHSIKKNLIGALLFDSGETAEATRLKRTARRRYTRRKNRICYLQEIFSNEMAKVDDSFFHRLEESFLVEEDKKHERHPIFGNIVDEVAYHEKYPTIYHLRKKLVDSTDKADLRLIYLALAHMIKFRGHFLIEGDLNPDNSDVDKLFIQLVQTYNQLFEENPINASGVDAKAILSARLSKSRRLENLIAQLPGEKKNGLFGNLIALSLGLTPNFKSNFDLAEDAKLQLSKDTYDDDLDNLLAQIGDQYADLFLAAKNLSDAILLSDILRVNTEITKAPLSASMIKRYDEHHQDLTLLKALVRQQLPEKYKEIFFDQSKNGYAGYIDGGASQEEFYKFIKPILEKMDGTEELLVKLNREDLLRKQRTFDNGSIPHQIHLGELHAILRRQEDFYPFLKDNREKIEKILTFRIPYYVGPLARGNSRFAWMTRKSEETITPWNFEEVVDKGASAQSFIERMTNFDKNLPNEKVLPKHSLLYEYFTVYNELTKVKYVTEGMRKPAFLSGEQKKAIVDLLFKTNRKVTVKQLKEDYFKKIECFDSVEISGVEDRFNASLGTYHDLLKIIKDKDFLDNEENEDILEDIVLTLTLFEDREMIEERLKTYAHLFDDKVMKQLKRRRYTGWGRLSRKLINGIRDKQSGKTILDFLKSDGFANRNFMQLIHDDSLTFKEDIQKAQVSGQGDSLHEHIANLAGSPAIKKGILQTVKVVDELVKVMGRHKPENIVIEMARENQTTQKGQKNSRERMKRIEEGIKELGSQILKEHPVENTQLQNEKLYLYYLQNGRDMYVDQELDINRLSDYDVDHIVPQSFLKDDSIDNKVLTRSDKARGKSDNVPSEEVVKKMKNYWRQLLNAKLITQRKFDNLTKAERGGLSELDKAGFIKRQLVETRQITKHVAQILDSRMNTKYDENDKLIREVKVITLKSKLVSDFRKDFQFYKVREINNYHHAHDAYLNAVVGTALIKKYPKLESEFVYGDYKVYDVRKMIAKSEQEIGKATAKYFFYSNIMNFFKTEITLANGEIRKRPLIETNGETGEIVWDKGRDFATVRKVLSMPQVNIVKKTEVQTGGFSKESILPKRNSDKLIARKKDWDPKKYGGFDSPTVAYSVLVVAKVEKGKSKKLKSVKELLGITIMERSSFEKNPIDFLEAKGYKEVKKDLIIKLPKYSLFELENGRKRMLASAGELQKGNELALPSKYVNFLYLASHYEKLKGSPEDNEQKQLFVEQHKHYLDEIIEQISEFSKRVILADANLDKVLSAYNKHRDKPIREQAENIIHLFTLTNLGAPAAFKYFDTTIDRKRYTSTKEVLDATLIHQSITGLYETRIDLSQLGGDGGSGSETPGTSESATPESGGMDPLQLLQPLEAEIKGTKLKAHWNSGATITCVPQAFLEEEVPIKNIWIKTIHGEKEQPVYYLTFKIQGRKVEAEVISSPYDYILVSPSDIPWLMKKPLQLTTLVPLQEYEERLLKQTMLTGSYKEKLQSLFLKYDALWQHWENQVGHRRIKPHHIATGTVNPRPQKQYPINPKAKASIQTVINDLLKQGVLIQQNSIMNTPVYPVPKPDGKWRMVLDYREVNKTIPLIAAQNQHSAGILSSIFRGKYKTTLDLSNGFWAHSITPESYWLTAFTWLGQQYCWTRLPQGFLNSPALFNADVVDLLKEVPNVQVYVDDIYISHDDPREHLEQLEKVFSLLLNAGYVVSLKKSEIAQHEVEFLGFNITKEGRGLTETFKQKLLNITPPRDLKQLQSILGKLNFARNFIPNFSELVKPLYNIIATAPGKYITWTTDNSQQLQNIISMLNSAENLEERNPEVRLIMKVNTSPSAGYIRFYNEFAKRPIMYLNYVYTKAEVKFTNTEKLLTTIHKGLIKALDLGMGQEILVYSPIVSMTKIQKTPLPERKALPIRWITWMSYLEDPRIQFHYDKTLPELQQVPTVTDDIIAKIKHPSEFSMVFYTDGSAIKHPNVNKSHNAGMGIAQVQFKPEFTVINTWSIPLGDHTAQLAEVAAVEFACKKALKIDGPVLIVTDSFYVAESVNKELPYWQSNGFFNNKKKPLKHVSKWKSIADCIQLKPDIIIIHEKGHQPTASTFHTEGNNLADKLATQGSYVVNAGKRTADGSEFEKRTADGSEFESPKKKAKVE

SEQ ID NO: 657 - protein, 2177 aa, synthetic construct
MPAAKRVKLDGGDKKYSIGLDIGTNSVGWAVITDEYKVPSKKFKVLGNTDRHSIKKNLIGALLFDSGETAEATRLKRTARRRYTRRKNRICYLQEIFSNEMAKVDDSFFHRLEESFLVEEDKKHERHPIFGNIVDEVAYHEKYPTIYHLRKKLVDSTDKADLRLIYLALAHMIKFRGHFLIEGDLNPDNSDVDKLFIQLVQTYNQLFEENPINASGVDAKAILSARLSKSRRLENLIAQLPGEKKNGLFGNLIALSLGLTPNFKSNFDLAEDAKLQLSKDTYDDDLDNLLAQIGDQYADLFLAAKNLSDAILLSDILRVNTEITKAPLSASMIKRYDEHHQDLTLLKALVRQQLPEKYKEIFFDQSKNGYAGYIDGGASQEEFYKFIKPILEKMDGTEELLVKLNREDLLRKQRTFDNGSIPHQIHLGELHAILRRQEDFYPFLKDNREKIEKILTFRIPYYVGPLARGNSRFAWMTRKSEETITPWNFEEVVDKGASAQSFIERMTNFDKNLPNEKVLPKHSLLYEYFTVYNELTKVKYVTEGMRKPAFLSGEQKKAIVDLLFKTNRKVTVKQLKEDYFKKIECFDSVEISGVEDRFNASLGTYHDLLKIIKDKDFLDNEENEDILEDIVLTLTLFEDREMIEERLKTYAHLFDDKVMKQLKRRRYTGWGRLSRKLINGIRDKQSGKTILDFLKSDGFANRNFMQLIHDDSLTFKEDIQKAQVSGQGDSLHEHIANLAGSPAIKKGILQTVKVVDELVKVMGRHKPENIVIEMARENQTTQKGQKNSRERMKRIEEGIKELGSQILKEHPVENTQLQNEKLYLYYLQNGRDMYVDQELDINRLSDYDVDHIVPQSFLKDDSIDNKVLTRSDKARGKSDNVPSEEVVKKMKNYWRQLLNAKLITQRKFDNLTKAERGGLSELDKAGFIKRQLVETRQITKHVAQILDSRMNTKYDENDKLIREVKVITLKSKLVSDFRKDFQFYKVREINNYHHAHDAYLNAVVGTALIKKYPKLESEFVYGDYKVYDVRKMIAKSEQEIGKATAKYFFYSNIMNFFKTEITLANGEIRKRPLIETNGETGEIVWDKGRDFATVRKVLSMPQVNIVKKTEVQTGGFSKESILPKRNSDKLIARKKDWDPKKYGGFDSPTVAYSVLVVAKVEKGKSKKLKSVKELLGITIMERSSFEKNPIDFLEAKGYKEVKKDLIIKLPKYSLFELENGRKRMLASAGELQKGNELALPSKYVNFLYLASHYEKLKGSPEDNEQKQLFVEQHKHYLDEIIEQISEFSKRVILADANLDKVLSAYNKHRDKPIREQAENIIHLFTLTNLGAPAAFKYFDTTIDRKRYTSTKEVLDATLIHQSITGLYETRIDLSQLGGDGGGSAGSAAGSGEFGGMDPLQLLQPLEAEIKGTKLKAHWNSGATITCVPQAFLEEEVPIKNIWIKTIHGEKEQPVYYLTFKIQGRKVEAEVISSPYDYILVSPSDIPWLMKKPLQLTTLVPLQEYEERLLKQTMLTGSYKEKLQSLFLKYDALWQHWENQVGHRRIKPHHIATGTVNPRPQKQYPINPKAKASIQTVINDLLKQGVLIQQNSIMNTPVYPVPKPDGKWRMVLDYREVNKTIPLIAAQNQHSAGILSSIFRGKYKTTLDLSNGFWAHSITPESYWLTAFTWLGQQYCWTRLPQGFLNSPALFNADVVDLLKEVPNVQVYVDDIYISHDDPREHLEQLEKVFSLLLNAGYVVSLKKSEIAQHEVEFLGFNITKEGRGLTETFKQKLLNITPPRDLKQLQSILGKLNFARNFIPNFSELVKPLYNIIATAPGKYITWTTDNSQQLQNIISMLNSAENLEERNPEVRLIMKVNTSPSAGYIRFYNEFAKRPIMYLNYVYTKAEVKFTNTEKLLTTIHKGLIKALDLGMGQEILVYSPIVSMTKIQKTPLPERKALPIRWITWMSYLEDPRIQFHYDKTLPELQQVPTVTDDIIAKIKHPSEFSMVFYTDGSAIKHPNVNKSHNAGMGIAQVQFKPEFTVINTWSIPLGDHTAQLAEVAAVEFACKKALKIDGPVLIVTDSFYVAESVNKELPYWQSNGFFNNKKKPLKHVSKWKSIADCIQLKPDIIIIHEKGHQPTASTFHTEGNNLADKLATQGSYVVNAGKRTADGSEFEKRTADGSEFESPKKKAKVE

SEQ ID NO: 658 - protein, 2168 aa, synthetic construct
MPAAKRVKLDGGDKKYSIGLDIGTNSVGWAVITDEYKVPSKKFKVLGNTDRHSIKKNLIGALLFDSGETAEATRLKRTARRRYTRRKNRICYLQEIFSNEMAKVDDSFFHRLEESFLVEEDKKHERHPIFGNIVDEVAYHEKYPTIYHLRKKLVDSTDKADLRLIYLALAHMIKFRGHFLIEGDLNPDNSDVDKLFIQLVQTYNQLFEENPINASGVDAKAILSARLSKSRRLENLIAQLPGEKKNGLFGNLIALSLGLTPNFKSNFDLAEDAKLQLSKDTYDDDLDNLLAQIGDQYADLFLAAKNLSDAILLSDILRVNTEITKAPLSASMIKRYDEHHQDLTLLKALVRQQLPEKYKEIFFDQSKNGYAGYIDGGASQEEFYKFIKPILEKMDGTEELLVKLNREDLLRKQRTFDNGSIPHQIHLGELHAILRRQEDFYPFLKDNREKIEKILTFRIPYYVGPLARGNSRFAWMTRKSEETITPWNFEEVVDKGASAQSFIERMTNFDKNLPNEKVLPKHSLLYEYFTVYNELTKVKYVTEGMRKPAFLSGEQKKAIVDLLFKTNRKVTVKQLKEDYFKKIECFDSVEISGVEDRFNASLGTYHDLLKIIKDKDFLDNEENEDILEDIVLTLTLFEDREMIEERLKTYAHLFDDKVMKQLKRRRYTGWGRLSRKLINGIRDKQSGKTILDFLKSDGFANRNFMQLIHDDSLTFKEDIQKAQVSGQGDSLHEHIANLAGSPAIKKGILQTVKVVDELVKVMGRHKPENIVIEMARENQTTQKGQKNSRERMKRIEEGIKELGSQILKEHPVENTQLQNEKLYLYYLQNGRDMYVDQELDINRLSDYDVDHIVPQSFLKDDSIDNKVLTRSDKARGKSDNVPSEEVVKKMKNYWRQLLNAKLITQRKFDNLTKAERGGLSELDKAGFIKRQLVETRQITKHVAQILDSRMNTKYDENDKLIREVKVITLKSKLVSDFRKDFQFYKVREINNYHHAHDAYLNAVVGTALIKKYPKLESEFVYGDYKVYDVRKMIAKSEQEIGKATAKYFFYSNIMNFFKTEITLANGEIRKRPLIETNGETGEIVWDKGRDFATVRKVLSMPQVNIVKKTEVQTGGFSKESILPKRNSDKLIARKKDWDPKKYGGFDSPTVAYSVLVVAKVEKGKSKKLKSVKELLGITIMERSSFEKNPIDFLEAKGYKEVKKDLIIKLPKYSLFELENGRKRMLASAGELQKGNELALPSKYVNFLYLASHYEKLKGSPEDNEQKQLFVEQHKHYLDEIIEQISEFSKRVILADANLDKVLSAYNKHRDKPIREQAENIIHLFTLTNLGAPAAFKYFDTTIDRKRYTSTKEVLDATLIHQSITGLYETRIDLSQLGGDGGGGGGGMDPLQLLQPLEAEIKGTKLKAHWNSGATITCVPQAFLEEEVPIKNIWIKTIHGEKEQPVYYLTFKIQGRKVEAEVISSPYDYILVSPSDIPWLMKKPLQLTTLVPLQEYEERLLKQTMLTGSYKEKLQSLFLKYDALWQHWENQVGHRRIKPHHIATGTVNPRPQKQYPINPKAKASIQTVINDLLKQGVLIQQNSIMNTPVYPVPKPDGKWRMVLDYREVNKTIPLIAAQNQHSAGILSSIFRGKYKTTLDLSNGFWAHSITPESYWLTAFTWLGQQYCWTRLPQGFLNSPALFNADVVDLLKEVPNVQVYVDDIYISHDDPREHLEQLEKVFSLLLNAGYVVSLKKSEIAQHEVEFLGFNITKEGRGLTETFKQKLLNITPPRDLKQLQSILGKLNFARNFIPNFSELVKPLYNIIATAPGKYITWTTDNSQQLQNIISMLNSAENLEERNPEVRLIMKVNTSPSAGYIRFYNEFAKRPIMYLNYVYTKAEVKFTNTEKLLTTIHKGLIKALDLGMGQEILVYSPIVSMTKIQKTPLPERKALPIRWITWMSYLEDPRIQFHYDKTLPELQQVPTVTDDIIAKIKHPSEFSMVFYTDGSAIKHPNVNKSHNAGMGIAQVQFKPEFTVINTWSIPLGDHTAQLAEVAAVEFACKKALKIDGPVLIVTDSFYVAESVNKELPYWQSNGFFNNKKKPLKHVSKWKSIADCIQLKPDIIIIHEKGHQPTASTFHTEGNNLADKLATQGSYVVNAGKRTADGSEFEKRTADGSEFESPKKKAKVE

SEQ ID NO: 659 - protein, 2176 aa, synthetic construct
MPAAKRVKLDGGDKKYSIGLDIGTNSVGWAVITDEYKVPSKKFKVLGNTDRHSIKKNLIGALLFDSGETAEATRLKRTARRRYTRRKNRICYLQEIFSNEMAKVDDSFFHRLEESFLVEEDKKHERHPIFGNIVDEVAYHEKYPTIYHLRKKLVDSTDKADLRLIYLALAHMIKFRGHFLIEGDLNPDNSDVDKLFIQLVQTYNQLFEENPINASGVDAKAILSARLSKSRRLENLIAQLPGEKKNGLFGNLIALSLGLTPNFKSNFDLAEDAKLQLSKDTYDDDLDNLLAQIGDQYADLFLAAKNLSDAILLSDILRVNTEITKAPLSASMIKRYDEHHQDLTLLKALVRQQLPEKYKEIFFDQSKNGYAGYIDGGASQEEFYKFIKPILEKMDGTEELLVKLNREDLLRKQRTFDNGSIPHQIHLGELHAILRRQEDFYPFLKDNREKIEKILTFRIPYYVGPLARGNSRFAWMTRKSEETITPWNFEEVVDKGASAQSFIERMTNFDKNLPNEKVLPKHSLLYEYFTVYNELTKVKYVTEGMRKPAFLSGEQKKAIVDLLFKTNRKVTVKQLKEDYFKKIECFDSVEISGVEDRFNASLGTYHDLLKIIKDKDFLDNEENEDILEDIVLTLTLFEDREMIEERLKTYAHLFDDKVMKQLKRRRYTGWGRLSRKLINGIRDKQSGKTILDFLKSDGFANRNFMQLIHDDSLTFKEDIQKAQVSGQGDSLHEHIANLAGSPAIKKGILQTVKVVDELVKVMGRHKPENIVIEMARENQTTQKGQKNSRERMKRIEEGIKELGSQILKEHPVENTQLQNEKLYLYYLQNGRDMYVDQELDINRLSDYDVDHIVPQSFLKDDSIDNKVLTRSDKARGKSDNVPSEEVVKKMKNYWRQLLNAKLITQRKFDNLTKAERGGLSELDKAGFIKRQLVETRQITKHVAQILDSRMNTKYDENDKLIREVKVITLKSKLVSDFRKDFQFYKVREINNYHHAHDAYLNAVVGTALIKKYPKLESEFVYGDYKVYDVRKMIAKSEQEIGKATAKYFFYSNIMNFFKTEITLANGEIRKRPLIETNGETGEIVWDKGRDFATVRKVLSMPQVNIVKKTEVQTGGFSKESILPKRNSDKLIARKKDWDPKKYGGFDSPTVAYSVLVVAKVEKGKSKKLKSVKELLGITIMERSSFEKNPIDFLEAKGYKEVKKDLIIKLPKYSLFELENGRKRMLASAGELQKGNELALPSKYVNFLYLASHYEKLKGSPEDNEQKQLFVEQHKHYLDEIIEQISEFSKRVILADANLDKVLSAYNKHRDKPIREQAENIIHLFTLTNLGAPAAFKYFDTTIDRKRYTSTKEVLDATLIHQSITGLYETRIDLSQLGGDGGGGSGGGEAAAKGGMDPLQLLQPLEAEIKGTKLKAHWNSGATITCVPQAFLEEEVPIKNIWIKTIHGEKEQPVYYLTFKIQGRKVEAEVISSPYDYILVSPSDIPWLMKKPLQLTTLVPLQEYEERLLKQTMLTGSYKEKLQSLFLKYDALWQHWENQVGHRRIKPHHIATGTVNPRPQKQYPINPKAKASIQTVINDLLKQGVLIQQNSIMNTPVYPVPKPDGKWRMVLDYREVNKTIPLIAAQNQHSAGILSSIFRGKYKTTLDLSNGFWAHSITPESYWLTAFTWLGQQYCWTRLPQGFLNSPALFNADVVDLLKEVPNVQVYVDDIYISHDDPREHLEQLEKVFSLLLNAGYVVSLKKSEIAQHEVEFLGFNITKEGRGLTETFKQKLLNITPPRDLKQLQSILGKLNFARNFIPNFSELVKPLYNIIATAPGKYITWTTDNSQQLQNIISMLNSAENLEERNPEVRLIMKVNTSPSAGYIRFYNEFAKRPIMYLNYVYTKAEVKFTNTEKLLTTIHKGLIKALDLGMGQEILVYSPIVSMTKIQKTPLPERKALPIRWITWMSYLEDPRIQFHYDKTLPELQQVPTVTDDIIAKIKHPSEFSMVFYTDGSAIKHPNVNKSHNAGMGIAQVQFKPEFTVINTWSIPLGDHTAQLAEVAAVEFACKKALKIDGPVLIVTDSFYVAESVNKELPYWQSNGFFNNKKKPLKHVSKWKSIADCIQLKPDIIIIHEKGHQPTASTFHTEGNNLADKLATQGSYVVNAGKRTADGSEFEKRTADGSEFESPKKKAKVE

SEQ ID NO: 660 - protein, 2180 aa, synthetic construct
MPAAKRVKLDGGDKKYSIGLDIGTNSVGWAVITDEYKVPSKKFKVLGNTDRHSIKKNLIGALLFDSGETAEATRLKRTARRRYTRRKNRICYLQEIFSNEMAKVDDSFFHRLEESFLVEEDKKHERHPIFGNIVDEVAYHEKYPTIYHLRKKLVDSTDKADLRLIYLALAHMIKFRGHFLIEGDLNPDNSDVDKLFIQLVQTYNQLFEENPINASGVDAKAILSARLSKSRRLENLIAQLPGEKKNGLFGNLIALSLGLTPNFKSNFDLAEDAKLQLSKDTYDDDLDNLLAQIGDQYADLFLAAKNLSDAILLSDILRVNTEITKAPLSASMIKRYDEHHQDLTLLKALVRQQLPEKYKEIFFDQSKNGYAGYIDGGASQEEFYKFIKPILEKMDGTEELLVKLNREDLLRKQRTFDNGSIPHQIHLGELHAILRRQEDFYPFLKDNREKIEKILTFRIPYYVGPLARGNSRFAWMTRKSEETITPWNFEEVVDKGASAQSFIERMTNFDKNLPNEKVLPKHSLLYEYFTVYNELTKVKYVTEGMRKPAFLSGEQKKAIVDLLFKTNRKVTVKQLKEDYFKKIECFDSVEISGVEDRFNASLGTYHDLLKIIKDKDFLDNEENEDILEDIVLTLTLFEDREMIEERLKTYAHLFDDKVMKQLKRRRYTGWGRLSRKLINGIRDKQSGKTILDFLKSDGFANRNFMQLIHDDSLTFKEDIQKAQVSGQGDSLHEHIANLAGSPAIKKGILQTVKVVDELVKVMGRHKPENIVIEMARENQTTQKGQKNSRERMKRIEEGIKELGSQILKEHPVENTQLQNEKLYLYYLQNGRDMYVDQELDINRLSDYDVDHIVPQSFLKDDSIDNKVLTRSDKARGKSDNVPSEEVVKKMKNYWRQLLNAKLITQRKFDNLTKAERGGLSELDKAGFIKRQLVETRQITKHVAQILDSRMNTKYDENDKLIREVKVITLKSKLVSDFRKDFQFYKVREINNYHHAHDAYLNAVVGTALIKKYPKLESEFVYGDYKVYDVRKMIAKSEQEIGKATAKYFFYSNIMNFFKTEITLANGEIRKRPLIETNGETGEIVWDKGRDFATVRKVLSMPQVNIVKKTEVQTGGFSKESILPKRNSDKLIARKKDWDPKKYGGFDSPTVAYSVLVVAKVEKGKSKKLKSVKELLGITIMERSSFEKNPIDFLEAKGYKEVKKDLIIKLPKYSLFELENGRKRMLASAGELQKGNELALPSKYVNFLYLASHYEKLKGSPEDNEQKQLFVEQHKHYLDEIIEQISEFSKRVILADANLDKVLSAYNKHRDKPIREQAENIIHLFTLTNLGAPAAFKYFDTTIDRKRYTSTKEVLDATLIHQSITGLYETRIDLSQLGGDGGEAAAKGGGGSEAAAKGGMDPLQLLQPLEAEIKGTKLKAHWNSGATITCVPQAFLEEEVPIKNIWIKTIHGEKEQPVYYLTFKIQGRKVEAEVISSPYDYILVSPSDIPWLMKKPLQLTTLVPLQEYEERLLKQTMLTGSYKEKLQSLFLKYDALWQHWENQVGHRRIKPHHIATGTVNPRPQKQYPINPKAKASIQTVINDLLKQGVLIQQNSIMNTPVYPVPKPDGKWRMVLDYREVNKTIPLIAAQNQHSAGILSSIFRGKYKTTLDLSNGFWAHSITPESYWLTAFTWLGQQYCWTRLPQGFLNSPALFNADVVDLLKEVPNVQVYVDDIYISHDDPREHLEQLEKVFSLLLNAGYVVSLKKSEIAQHEVEFLGFNITKEGRGLTETFKQKLLNITPPRDLKQLQSILGKLNFARNFIPNFSELVKPLYNIIATAPGKYITWTTDNSQQLQNIISMLNSAENLEERNPEVRLIMKVNTSPSAGYIRFYNEFAKRPIMYLNYVYTKAEVKFTNTEKLLTTIHKGLIKALDLGMGQEILVYSPIVSMTKIQKTPLPERKALPIRWITWMSYLEDPRIQFHYDKTLPELQQVPTVTDDIIAKIKHPSEFSMVFYTDGSAIKHPNVNKSHNAGMGIAQVQFKPEFTVINTWSIPLGDHTAQLAEVAAVEFACKKALKIDGPVLIVTDSFYVAESVNKELPYWQSNGFFNNKKKPLKHVSKWKSIADCIQLKPDIIIIHEKGHQPTASTFHTEGNNLADKLATQGSYVVNAGKRTADGSEFEKRTADGSEFESPKKKAKVE

SEQ ID NO: 661 - protein, 2176 aa, synthetic construct
MPAAKRVKLDGGDKKYSIGLDIGTNSVGWAVITDEYKVPSKKFKVLGNTDRHSIKKNLIGALLFDSGETAEATRLKRTARRRYTRRKNRICYLQEIFSNEMAKVDDSFFHRLEESFLVEEDKKHERHPIFGNIVDEVAYHEKYPTIYHLRKKLVDSTDKADLRLIYLALAHMIKFRGHFLIEGDLNPDNSDVDKLFIQLVQTYNQLFEENPINASGVDAKAILSARLSKSRRLENLIAQLPGEKKNGLFGNLIALSLGLTPNFKSNFDLAEDAKLQLSKDTYDDDLDNLLAQIGDQYADLFLAAKNLSDAILLSDILRVNTEITKAPLSASMIKRYDEHHQDLTLLKALVRQQLPEKYKEIFFDQSKNGYAGYIDGGASQEEFYKFIKPILEKMDGTEELLVKLNREDLLRKQRTFDNGSIPHQIHLGELHAILRRQEDFYPFLKDNREKIEKILTFRIPYYVGPLARGNSRFAWMTRKSEETITPWNFEEVVDKGASAQSFIERMTNFDKNLPNEKVLPKHSLLYEYFTVYNELTKVKYVTEGMRKPAFLSGEQKKAIVDLLFKTNRKVTVKQLKEDYFKKIECFDSVEISGVEDRFNASLGTYHDLLKIIKDKDFLDNEENEDILEDIVLTLTLFEDREMIEERLKTYAHLFDDKVMKQLKRRRYTGWGRLSRKLINGIRDKQSGKTILDFLKSDGFANRNFMQLIHDDSLTFKEDIQKAQVSGQGDSLHEHIANLAGSPAIKKGILQTVKVVDELVKVMGRHKPENIVIEMARENQTTQKGQKNSRERMKRIEEGIKELGSQILKEHPVENTQLQNEKLYLYYLQNGRDMYVDQELDINRLSDYDVDHIVPQSFLKDDSIDNKVLTRSDKARGKSDNVPSEEVVKKMKNYWRQLLNAKLITQRKFDNLTKAERGGLSELDKAGFIKRQLVETRQITKHVAQILDSRMNTKYDENDKLIREVKVITLKSKLVSDFRKDFQFYKVREINNYHHAHDAYLNAVVGTALIKKYPKLESEFVYGDYKVYDVRKMIAKSEQEIGKATAKYFFYSNIMNFFKTEITLANGEIRKRPLIETNGETGEIVWDKGRDFATVRKVLSMPQVNIVKKTEVQTGGFSKESILPKRNSDKLIARKKDWDPKKYGGFDSPTVAYSVLVVAKVEKGKSKKLKSVKELLGITIMERSSFEKNPIDFLEAKGYKEVKKDLIIKLPKYSLFELENGRKRMLASAGELQKGNELALPSKYVNFLYLASHYEKLKGSPEDNEQKQLFVEQHKHYLDEIIEQISEFSKRVILADANLDKVLSAYNKHRDKPIREQAENIIHLFTLTNLGAPAAFKYFDTTIDRKRYTSTKEVLDATLIHQSITGLYETRIDLSQLGGDGGGGSEAAAKGGGGGMDPLQLLQPLEAEIKGTKLKAHWNSGATITCVPQAFLEEEVPIKNIWIKTIHGEKEQPVYYLTFKIQGRKVEAEVISSPYDYILVSPSDIPWLMKKPLQLTTLVPLQEYEERLLKQTMLTGSYKEKLQSLFLKYDALWQHWENQVGHRRIKPHHIATGTVNPRPQKQYPINPKAKASIQTVINDLLKQGVLIQQNSIMNTPVYPVPKPDGKWRMVLDYREVNKTIPLIAAQNQHSAGILSSIFRGKYKTTLDLSNGFWAHSITPESYWLTAFTWLGQQYCWTRLPQGFLNSPALFNADVVDLLKEVPNVQVYVDDIYISHDDPREHLEQLEKVFSLLLNAGYVVSLKKSEIAQHEVEFLGFNITKEGRGLTETFKQKLLNITPPRDLKQLQSILGKLNFARNFIPNFSELVKPLYNIIATAPGKYITWTTDNSQQLQNIISMLNSAENLEERNPEVRLIMKVNTSPSAGYIRFYNEFAKRPIMYLNYVYTKAEVKFTNTEKLLTTIHKGLIKALDLGMGQEILVYSPIVSMTKIQKTPLPERKALPIRWITWMSYLEDPRIQFHYDKTLPELQQVPTVTDDIIAKIKHPSEFSMVFYTDGSAIKHPNVNKSHNAGMGIAQVQFKPEFTVINTWSIPLGDHTAQLAEVAAVEFACKKALKIDGPVLIVTDSFYVAESVNKELPYWQSNGFFNNKKKPLKHVSKWKSIADCIQLKPDIIIIHEKGHQPTASTFHTEGNNLADKLATQGSYVVNAGKRTADGSEFEKRTADGSEFESPKKKAKVE

SEQ ID NO: 662 - protein, 2183 aa, synthetic construct
MPAAKRVKLDGGDKKYSIGLDIGTNSVGWAVITDEYKVPSKKFKVLGNTDRHSIKKNLIGALLFDSGETAEATRLKRTARRRYTRRKNRICYLQEIFSNEMAKVDDSFFHRLEESFLVEEDKKHERHPIFGNIVDEVAYHEKYPTIYHLRKKLVDSTDKADLRLIYLALAHMIKFRGHFLIEGDLNPDNSDVDKLFIQLVQTYNQLFEENPINASGVDAKAILSARLSKSRRLENLIAQLPGEKKNGLFGNLIALSLGLTPNFKSNFDLAEDAKLQLSKDTYDDDLDNLLAQIGDQYADLFLAAKNLSDAILLSDILRVNTEITKAPLSASMIKRYDEHHQDLTLLKALVRQQLPEKYKEIFFDQSKNGYAGYIDGGASQEEFYKFIKPILEKMDGTEELLVKLNREDLLRKQRTFDNGSIPHQIHLGELHAILRRQEDFYPFLKDNREKIEKILTFRIPYYVGPLARGNSRFAWMTRKSEETITPWNFEEVVDKGASAQSFIERMTNFDKNLPNEKVLPKHSLLYEYFTVYNELTKVKYVTEGMRKPAFLSGEQKKAIVDLLFKTNRKVTVKQLKEDYFKKIECFDSVEISGVEDRFNASLGTYHDLLKIIKDKDFLDNEENEDILEDIVLTLTLFEDREMIEERLKTYAHLFDDKVMKQLKRRRYTGWGRLSRKLINGIRDKQSGKTILDFLKSDGFANRNFMQLIHDDSLTFKEDIQKAQVSGQGDSLHEHIANLAGSPAIKKGILQTVKVVDELVKVMGRHKPENIVIEMARENQTTQKGQKNSRERMKRIEEGIKELGSQILKEHPVENTQLQNEKLYLYYLQNGRDMYVDQELDINRLSDYDVDHIVPQSFLKDDSIDNKVLTRSDKARGKSDNVPSEEVVKKMKNYWRQLLNAKLITQRKFDNLTKAERGGLSELDKAGFIKRQLVETRQITKHVAQILDSRMNTKYDENDKLIREVKVITLKSKLVSDFRKDFQFYKVREINNYHHAHDAYLNAVVGTALIKKYPKLESEFVYGDYKVYDVRKMIAKSEQEIGKATAKYFFYSNIMNFFKTEITLANGEIRKRPLIETNGETGEIVWDKGRDFATVRKVLSMPQVNIVKKTEVQTGGFSKESILPKRNSDKLIARKKDWDPKKYGGFDSPTVAYSVLVVAKVEKGKSKKLKSVKELLGITIMERSSFEKNPIDFLEAKGYKEVKKDLIIKLPKYSLFELENGRKRMLASAGELQKGNELALPSKYVNFLYLASHYEKLKGSPEDNEQKQLFVEQHKHYLDEIIEQISEFSKRVILADANLDKVLSAYNKHRDKPIREQAENIIHLFTLTNLGAPAAFKYFDTTIDRKRYTSTKEVLDATLIHQSITGLYETRIDLSQLGGDGGGSSGSSGSSGSSGSSGSSGGMDPLQLLQPLEAEIKGTKLKAHWNSGATITCVPQAFLEEEVPIKNIWIKTIHGEKEQPVYYLTFKIQGRKVEAEVISSPYDYILVSPSDIPWLMKKPLQLTTLVPLQEYEERLLKQTMLTGSYKEKLQSLFLKYDALWQHWENQVGHRRIKPHHIATGTVNPRPQKQYPINPKAKASIQTVINDLLKQGVLIQQNSIMNTPVYPVPKPDGKWRMVLDYREVNKTIPLIAAQNQHSAGILSSIFRGKYKTTLDLSNGFWAHSITPESYWLTAFTWLGQQYCWTRLPQGFLNSPALFNADVVDLLKEVPNVQVYVDDIYISHDDPREHLEQLEKVFSLLLNAGYVVSLKKSEIAQHEVEFLGFNITKEGRGLTETFKQKLLNITPPRDLKQLQSILGKLNFARNFIPNFSELVKPLYNIIATAPGKYITWTTDNSQQLQNIISMLNSAENLEERNPEVRLIMKVNTSPSAGYIRFYNEFAKRPIMYLNYVYTKAEVKFTNTEKLLTTIHKGLIKALDLGMGQEILVYSPIVSMTKIQKTPLPERKALPIRWITWMSYLEDPRIQFHYDKTLPELQQVPTVTDDIIAKIKHPSEFSMVFYTDGSAIKHPNVNKSHNAGMGIAQVQFKPEFTVINTWSIPLGDHTAQLAEVAAVEFACKKALKIDGPVLIVTDSFYVAESVNKELPYWQSNGFFNNKKKPLKHVSKWKSIADCIQLKPDIIIIHEKGHQPTASTFHTEGNNLADKLATQGSYVVNAGKRTADGSEFEKRTADGSEFESPKKKAKVE

SEQ ID NO: 663 - protein, 2176 aa, synthetic construct
MPAAKRVKLDGGDKKYSIGLDIGTNSVGWAVITDEYKVPSKKFKVLGNTDRHSIKKNLIGALLFDSGETAEATRLKRTARRRYTRRKNRICYLQEIFSNEMAKVDDSFFHRLEESFLVEEDKKHERHPIFGNIVDEVAYHEKYPTIYHLRKKLVDSTDKADLRLIYLALAHMIKFRGHFLIEGDLNPDNSDVDKLFIQLVQTYNQLFEENPINASGVDAKAILSARLSKSRRLENLIAQLPGEKKNGLFGNLIALSLGLTPNFKSNFDLAEDAKLQLSKDTYDDDLDNLLAQIGDQYADLFLAAKNLSDAILLSDILRVNTEITKAPLSASMIKRYDEHHQDLTLLKALVRQQLPEKYKEIFFDQSKNGYAGYIDGGASQEEFYKFIKPILEKMDGTEELLVKLNREDLLRKQRTFDNGSIPHQIHLGELHAILRRQEDFYPFLKDNREKIEKILTFRIPYYVGPLARGNSRFAWMTRKSEETITPWNFEEVVDKGASAQSFIERMTNFDKNLPNEKVLPKHSLLYEYFTVYNELTKVKYVTEGMRKPAFLSGEQKKAIVDLLFKTNRKVTVKQLKEDYFKKIECFDSVEISGVEDRFNASLGTYHDLLKIIKDKDFLDNEENEDILEDIVLTLTLFEDREMIEERLKTYAHLFDDKVMKQLKRRRYTGWGRLSRKLINGIRDKQSGKTILDFLKSDGFANRNFMQLIHDDSLTFKEDIQKAQVSGQGDSLHEHIANLAGSPAIKKGILQTVKVVDELVKVMGRHKPENIVIEMARENQTTQKGQKNSRERMKRIEEGIKELGSQILKEHPVENTQLQNEKLYLYYLQNGRDMYVDQELDINRLSDYDVDHIVPQSFLKDDSIDNKVLTRSDKARGKSDNVPSEEVVKKMKNYWRQLLNAKLITQRKFDNLTKAERGGLSELDKAGFIKRQLVETRQITKHVAQILDSRMNTKYDENDKLIREVKVITLKSKLVSDFRKDFQFYKVREINNYHHAHDAYLNAVVGTALIKKYPKLESEFVYGDYKVYDVRKMIAKSEQEIGKATAKYFFYSNIMNFFKTEITLANGEIRKRPLIETNGETGEIVWDKGRDFATVRKVLSMPQVNIVKKTEVQTGGFSKESILPKRNSDKLIARKKDWDPKKYGGFDSPTVAYSVLVVAKVEKGKSKKLKSVKELLGITIMERSSFEKNPIDFLEAKGYKEVKKDLIIKLPKYSLFELENGRKRMLASAGELQKGNELALPSKYVNFLYLASHYEKLKGSPEDNEQKQLFVEQHKHYLDEIIEQISEFSKRVILADANLDKVLSAYNKHRDKPIREQAENIIHLFTLTNLGAPAAFKYFDTTIDRKRYTSTKEVLDATLIHQSITGLYETRIDLSQLGGDGGGGGPAPEAAAKGGMDPLQLLQPLEAEIKGTKLKAHWNSGATITCVPQAFLEEEVPIKNIWIKTIHGEKEQPVYYLTFKIQGRKVEAEVISSPYDYILVSPSDIPWLMKKPLQLTTLVPLQEYEERLLKQTMLTGSYKEKLQSLFLKYDALWQHWENQVGHRRIKPHHIATGTVNPRPQKQYPINPKAKASIQTVINDLLKQGVLIQQNSIMNTPVYPVPKPDGKWRMVLDYREVNKTIPLIAAQNQHSAGILSSIFRGKYKTTLDLSNGFWAHSITPESYWLTAFTWLGQQYCWTRLPQGFLNSPALFNADVVDLLKEVPNVQVYVDDIYISHDDPREHLEQLEKVFSLLLNAGYVVSLKKSEIAQHEVEFLGFNITKEGRGLTETFKQKLLNITPPRDLKQLQSILGKLNFARNFIPNFSELVKPLYNIIATAPGKYITWTTDNSQQLQNIISMLNSAENLEERNPEVRLIMKVNTSPSAGYIRFYNEFAKRPIMYLNYVYTKAEVKFTNTEKLLTTIHKGLIKALDLGMGQEILVYSPIVSMTKIQKTPLPERKALPIRWITWMSYLEDPRIQFHYDKTLPELQQVPTVTDDIIAKIKHPSEFSMVFYTDGSAIKHPNVNKSHNAGMGIAQVQFKPEFTVINTWSIPLGDHTAQLAEVAAVEFACKKALKIDGPVLIVTDSFYVAESVNKELPYWQSNGFFNNKKKPLKHVSKWKSIADCIQLKPDIIIIHEKGHQPTASTFHTEGNNLADKLATQGSYVVNAGKRTADGSEFEKRTADGSEFESPKKKAKVE

SEQ ID NO: 664 - protein, 2176 aa, synthetic construct
MPAAKRVKLDGGDKKYSIGLDIGTNSVGWAVITDEYKVPSKKFKVLGNTDRHSIKKNLIGALLFDSGETAEATRLKRTARRRYTRRKNRICYLQEIFSNEMAKVDDSFFHRLEESFLVEEDKKHERHPIFGNIVDEVAYHEKYPTIYHLRKKLVDSTDKADLRLIYLALAHMIKFRGHFLIEGDLNPDNSDVDKLFIQLVQTYNQLFEENPINASGVDAKAILSARLSKSRRLENLIAQLPGEKKNGLFGNLIALSLGLTPNFKSNFDLAEDAKLQLSKDTYDDDLDNLLAQIGDQYADLFLAAKNLSDAILLSDILRVNTEITKAPLSASMIKRYDEHHQDLTLLKALVRQQLPEKYKEIFFDQSKNGYAGYIDGGASQEEFYKFIKPILEKMDGTEELLVKLNREDLLRKQRTFDNGSIPHQIHLGELHAILRRQEDFYPFLKDNREKIEKILTFRIPYYVGPLARGNSRFAWMTRKSEETITPWNFEEVVDKGASAQSFIERMTNFDKNLPNEKVLPKHSLLYEYFTVYNELTKVKYVTEGMRKPAFLSGEQKKAIVDLLFKTNRKVTVKQLKEDYFKKIECFDSVEISGVEDRFNASLGTYHDLLKIIKDKDFLDNEENEDILEDIVLTLTLFEDREMIEERLKTYAHLFDDKVMKQLKRRRYTGWGRLSRKLINGIRDKQSGKTILDFLKSDGFANRNFMQLIHDDSLTFKEDIQKAQVSGQGDSLHEHIANLAGSPAIKKGILQTVKVVDELVKVMGRHKPENIVIEMARENQTTQKGQKNSRERMKRIEEGIKELGSQILKEHPVENTQLQNEKLYLYYLQNGRDMYVDQELDINRLSDYDVDHIVPQSFLKDDSIDNKVLTRSDKARGKSDNVPSEEVVKKMKNYWRQLLNAKLITQRKFDNLTKAERGGLSELDKAGFIKRQLVETRQITKHVAQILDSRMNTKYDENDKLIREVKVITLKSKLVSDFRKDFQFYKVREINNYHHAHDAYLNAVVGTALIKKYPKLESEFVYGDYKVYDVRKMIAKSEQEIGKATAKYFFYSNIMNFFKTEITLANGEIRKRPLIETNGETGEIVWDKGRDFATVRKVLSMPQVNIVKKTEVQTGGFSKESILPKRNSDKLIARKKDWDPKKYGGFDSPTVAYSVLVVAKVEKGKSKKLKSVKELLGITIMERSSFEKNPIDFLEAKGYKEVKKDLIIKLPKYSLFELENGRKRMLASAGELQKGNELALPSKYVNFLYLASHYEKLKGSPEDNEQKQLFVEQHKHYLDEIIEQISEFSKRVILADANLDKVLSAYNKHRDKPIREQAENIIHLFTLTNLGAPAAFKYFDTTIDRKRYTSTKEVLDATLIHQSITGLYETRIDLSQLGGDGGEAAAKPAPGGGGGMDPLQLLQPLEAEIKGTKLKAHWNSGATITCVPQAFLEEEVPIKNIWIKTIHGEKEQPVYYLTFKIQGRKVEAEVISSPYDYILVSPSDIPWLMKKPLQLTTLVPLQEYEERLLKQTMLTGSYKEKLQSLFLKYDALWQHWENQVGHRRIKPHHIATGTVNPRPQKQYPINPKAKASIQTVINDLLKQGVLIQQNSIMNTPVYPVPKPDGKWRMVLDYREVNKTIPLIAAQNQHSAGILSSIFRGKYKTTLDLSNGFWAHSITPESYWLTAFTWLGQQYCWTRLPQGFLNSPALFNADVVDLLKEVPNVQVYVDDIYISHDDPREHLEQLEKVFSLLLNAGYVVSLKKSEIAQHEVEFLGFNITKEGRGLTETFKQKLLNITPPRDLKQLQSILGKLNFARNFIPNFSELVKPLYNIIATAPGKYITWTTDNSQQLQNIISMLNSAENLEERNPEVRLIMKVNTSPSAGYIRFYNEFAKRPIMYLNYVYTKAEVKFTNTEKLLTTIHKGLIKALDLGMGQEILVYSPIVSMTKIQKTPLPERKALPIRWITWMSYLEDPRIQFHYDKTLPELQQVPTVTDDIIAKIKHPSEFSMVFYTDGSAIKHPNVNKSHNAGMGIAQVQFKPEFTVINTWSIPLGDHTAQLAEVAAVEFACKKALKIDGPVLIVTDSFYVAESVNKELPYWQSNGFFNNKKKPLKHVSKWKSIADCIQLKPDIIIIHEKGHQPTASTFHTEGNNLADKLATQGSYVVNAGKRTADGSEFEKRTADGSEFESPKKKAKVE

SEQ ID NO: 665 - protein, 2176 aa, synthetic construct
MPAAKRVKLDGGDKKYSIGLDIGTNSVGWAVITDEYKVPSKKFKVLGNTDRHSIKKNLIGALLFDSGETAEATRLKRTARRRYTRRKNRICYLQEIFSNEMAKVDDSFFHRLEESFLVEEDKKHERHPIFGNIVDEVAYHEKYPTIYHLRKKLVDSTDKADLRLIYLALAHMIKFRGHFLIEGDLNPDNSDVDKLFIQLVQTYNQLFEENPINASGVDAKAILSARLSKSRRLENLIAQLPGEKKNGLFGNLIALSLGLTPNFKSNFDLAEDAKLQLSKDTYDDDLDNLLAQIGDQYADLFLAAKNLSDAILLSDILRVNTEITKAPLSASMIKRYDEHHQDLTLLKALVRQQLPEKYKEIFFDQSKNGYAGYIDGGASQEEFYKFIKPILEKMDGTEELLVKLNREDLLRKQRTFDNGSIPHQIHLGELHAILRRQEDFYPFLKDNREKIEKILTFRIPYYVGPLARGNSRFAWMTRKSEETITPWNFEEVVDKGASAQSFIERMTNFDKNLPNEKVLPKHSLLYEYFTVYNELTKVKYVTEGMRKPAFLSGEQKKAIVDLLFKTNRKVTVKQLKEDYFKKIECFDSVEISGVEDRFNASLGTYHDLLKIIKDKDFLDNEENEDILEDIVLTLTLFEDREMIEERLKTYAHLFDDKVMKQLKRRRYTGWGRLSRKLINGIRDKQSGKTILDFLKSDGFANRNFMQLIHDDSLTFKEDIQKAQVSGQGDSLHEHIANLAGSPAIKKGILQTVKVVDELVKVMGRHKPENIVIEMARENQTTQKGQKNSRERMKRIEEGIKELGSQILKEHPVENTQLQNEKLYLYYLQNGRDMYVDQELDINRLSDYDVDHIVPQSFLKDDSIDNKVLTRSDKARGKSDNVPSEEVVKKMKNYWRQLLNAKLITQRKFDNLTKAERGGLSELDKAGFIKRQLVETRQITKHVAQILDSRMNTKYDENDKLIREVKVITLKSKLVSDFRKDFQFYKVREINNYHHAHDAYLNAVVGTALIKKYPKLESEFVYGDYKVYDVRKMIAKSEQEIGKATAKYFFYSNIMNFFKTEITLANGEIRKRPLIETNGETGEIVWDKGRDFATVRKVLSMPQVNIVKKTEVQTGGFSKESILPKRNSDKLIARKKDWDPKKYGGFDSPTVAYSVLVVAKVEKGKSKKLKSVKELLGITIMERSSFEKNPIDFLEAKGYKEVKKDLIIKLPKYSLFELENGRKRMLASAGELQKGNELALPSKYVNFLYLASHYEKLKGSPEDNEQKQLFVEQHKHYLDEIIEQISEFSKRVILADANLDKVLSAYNKHRDKPIREQAENIIHLFTLTNLGAPAAFKYFDTTIDRKRYTSTKEVLDATLIHQSITGLYETRIDLSQLGGDGGEAAAKGGSGSSGGMDPLQLLQPLEAEIKGTKLKAHWNSGATITCVPQAFLEEEVPIKNIWIKTIHGEKEQPVYYLTFKIQGRKVEAEVISSPYDYILVSPSDIPWLMKKPLQLTTLVPLQEYEERLLKQTMLTGSYKEKLQSLFLKYDALWQHWENQVGHRRIKPHHIATGTVNPRPQKQYPINPKAKASIQTVINDLLKQGVLIQQNSIMNTPVYPVPKPDGKWRMVLDYREVNKTIPLIAAQNQHSAGILSSIFRGKYKTTLDLSNGFWAHSITPESYWLTAFTWLGQQYCWTRLPQGFLNSPALFNADVVDLLKEVPNVQVYVDDIYISHDDPREHLEQLEKVFSLLLNAGYVVSLKKSEIAQHEVEFLGFNITKEGRGLTETFKQKLLNITPPRDLKQLQSILGKLNFARNFIPNFSELVKPLYNIIATAPGKYITWTTDNSQQLQNIISMLNSAENLEERNPEVRLIMKVNTSPSAGYIRFYNEFAKRPIMYLNYVYTKAEVKFTNTEKLLTTIHKGLIKALDLGMGQEILVYSPIVSMTKIQKTPLPERKALPIRWITWMSYLEDPRIQFHYDKTLPELQQVPTVTDDIIAKIKHPSEFSMVFYTDGSAIKHPNVNKSHNAGMGIAQVQFKPEFTVINTWSIPLGDHTAQLAEVAAVEFACKKALKIDGPVLIVTDSFYVAESVNKELPYWQSNGFFNNKKKPLKHVSKWKSIADCIQLKPDIIIIHEKGHQPTASTFHTEGNNLADKLATQGSYVVNAGKRTADGSEFEKRTADGSEFESPKKKAKVE

SEQ ID NO: 666 - protein, 2174 aa, synthetic construct
MPAAKRVKLDGGDKKYSIGLDIGTNSVGWAVITDEYKVPSKKFKVLGNTDRHSIKKNLIGALLFDSGETAEATRLKRTARRRYTRRKNRICYLQEIFSNEMAKVDDSFFHRLEESFLVEEDKKHERHPIFGNIVDEVAYHEKYPTIYHLRKKLVDSTDKADLRLIYLALAHMIKFRGHFLIEGDLNPDNSDVDKLFIQLVQTYNQLFEENPINASGVDAKAILSARLSKSRRLENLIAQLPGEKKNGLFGNLIALSLGLTPNFKSNFDLAEDAKLQLSKDTYDDDLDNLLAQIGDQYADLFLAAKNLSDAILLSDILRVNTEITKAPLSASMIKRYDEHHQDLTLLKALVRQQLPEKYKEIFFDQSKNGYAGYIDGGASQEEFYKFIKPILEKMDGTEELLVKLNREDLLRKQRTFDNGSIPHQIHLGELHAILRRQEDFYPFLKDNREKIEKILTFRIPYYVGPLARGNSRFAWMTRKSEETITPWNFEEVVDKGASAQSFIERMTNFDKNLPNEKVLPKHSLLYEYFTVYNELTKVKYVTEGMRKPAFLSGEQKKAIVDLLFKTNRKVTVKQLKEDYFKKIECFDSVEISGVEDRFNASLGTYHDLLKIIKDKDFLDNEENEDILEDIVLTLTLFEDREMIEERLKTYAHLFDDKVMKQLKRRRYTGWGRLSRKLINGIRDKQSGKTILDFLKSDGFANRNFMQLIHDDSLTFKEDIQKAQVSGQGDSLHEHIANLAGSPAIKKGILQTVKVVDELVKVMGRHKPENIVIEMARENQTTQKGQKNSRERMKRIEEGIKELGSQILKEHPVENTQLQNEKLYLYYLQNGRDMYVDQELDINRLSDYDVDHIVPQSFLKDDSIDNKVLTRSDKARGKSDNVPSEEVVKKMKNYWRQLLNAKLITQRKFDNLTKAERGGLSELDKAGFIKRQLVETRQITKHVAQILDSRMNTKYDENDKLIREVKVITLKSKLVSDFRKDFQFYKVREINNYHHAHDAYLNAVVGTALIKKYPKLESEFVYGDYKVYDVRKMIAKSEQEIGKATAKYFFYSNIMNFFKTEITLANGEIRKRPLIETNGETGEIVWDKGRDFATVRKVLSMPQVNIVKKTEVQTGGFSKESILPKRNSDKLIARKKDWDPKKYGGFDSPTVAYSVLVVAKVEKGKSKKLKSVKELLGITIMERSSFEKNPIDFLEAKGYKEVKKDLIIKLPKYSLFELENGRKRMLASAGELQKGNELALPSKYVNFLYLASHYEKLKGSPEDNEQKQLFVEQHKHYLDEIIEQISEFSKRVILADANLDKVLSAYNKHRDKPIREQAENIIHLFTLTNLGAPAAFKYFDTTIDRKRYTSTKEVLDATLIHQSITGLYETRIDLSQLGGDGGPAPAPAPAPGGMDPLQLLQPLEAEIKGTKLKAHWNSGATITCVPQAFLEEEVPIKNIWIKTIHGEKEQPVYYLTFKIQGRKVEAEVISSPYDYILVSPSDIPWLMKKPLQLTTLVPLQEYEERLLKQTMLTGSYKEKLQSLFLKYDALWQHWENQVGHRRIKPHHIATGTVNPRPQKQYPINPKAKASIQTVINDLLKQGVLIQQNSIMNTPVYPVPKPDGKWRMVLDYREVNKTIPLIAAQNQHSAGILSSIFRGKYKTTLDLSNGFWAHSITPESYWLTAFTWLGQQYCWTRLPQGFLNSPALFNADVVDLLKEVPNVQVYVDDIYISHDDPREHLEQLEKVFSLLLNAGYVVSLKKSEIAQHEVEFLGFNITKEGRGLTETFKQKLLNITPPRDLKQLQSILGKLNFARNFIPNFSELVKPLYNIIATAPGKYITWTTDNSQQLQNIISMLNSAENLEERNPEVRLIMKVNTSPSAGYIRFYNEFAKRPIMYLNYVYTKAEVKFTNTEKLLTTIHKGLIKALDLGMGQEILVYSPIVSMTKIQKTPLPERKALPIRWITWMSYLEDPRIQFHYDKTLPELQQVPTVTDDIIAKIKHPSEFSMVFYTDGSAIKHPNVNKSHNAGMGIAQVQFKPEFTVINTWSIPLGDHTAQLAEVAAVEFACKKALKIDGPVLIVTDSFYVAESVNKELPYWQSNGFFNNKKKPLKHVSKWKSIADCIQLKPDIIIIHEKGHQPTASTFHTEGNNLADKLATQGSYVVNAGKRTADGSEFEKRTADGSEFESPKKKAKVE

SEQ ID NO: 667 - protein, 2176 aa, synthetic construct
MPAAKRVKLDGGDKKYSIGLDIGTNSVGWAVITDEYKVPSKKFKVLGNTDRHSIKKNLIGALLFDSGETAEATRLKRTARRRYTRRKNRICYLQEIFSNEMAKVDDSFFHRLEESFLVEEDKKHERHPIFGNIVDEVAYHEKYPTIYHLRKKLVDSTDKADLRLIYLALAHMIKFRGHFLIEGDLNPDNSDVDKLFIQLVQTYNQLFEENPINASGVDAKAILSARLSKSRRLENLIAQLPGEKKNGLFGNLIALSLGLTPNFKSNFDLAEDAKLQLSKDTYDDDLDNLLAQIGDQYADLFLAAKNLSDAILLSDILRVNTEITKAPLSASMIKRYDEHHQDLTLLKALVRQQLPEKYKEIFFDQSKNGYAGYIDGGASQEEFYKFIKPILEKMDGTEELLVKLNREDLLRKQRTFDNGSIPHQIHLGELHAILRRQEDFYPFLKDNREKIEKILTFRIPYYVGPLARGNSRFAWMTRKSEETITPWNFEEVVDKGASAQSFIERMTNFDKNLPNEKVLPKHSLLYEYFTVYNELTKVKYVTEGMRKPAFLSGEQKKAIVDLLFKTNRKVTVKQLKEDYFKKIECFDSVEISGVEDRFNASLGTYHDLLKIIKDKDFLDNEENEDILEDIVLTLTLFEDREMIEERLKTYAHLFDDKVMKQLKRRRYTGWGRLSRKLINGIRDKQSGKTILDFLKSDGFANRNFMQLIHDDSLTFKEDIQKAQVSGQGDSLHEHIANLAGSPAIKKGILQTVKVVDELVKVMGRHKPENIVIEMARENQTTQKGQKNSRERMKRIEEGIKELGSQILKEHPVENTQLQNEKLYLYYLQNGRDMYVDQELDINRLSDYDVDHIVPQSFLKDDSIDNKVLTRSDKARGKSDNVPSEEVVKKMKNYWRQLLNAKLITQRKFDNLTKAERGGLSELDKAGFIKRQLVETRQITKHVAQILDSRMNTKYDENDKLIREVKVITLKSKLVSDFRKDFQFYKVREINNYHHAHDAYLNAVVGTALIKKYPKLESEFVYGDYKVYDVRKMIAKSEQEIGKATAKYFFYSNIMNFFKTEITLANGEIRKRPLIETNGETGEIVWDKGRDFATVRKVLSMPQVNIVKKTEVQTGGFSKESILPKRNSDKLIARKKDWDPKKYGGFDSPTVAYSVLVVAKVEKGKSKKLKSVKELLGITIMERSSFEKNPIDFLEAKGYKEVKKDLIIKLPKYSLFELENGRKRMLASAGELQKGNELALPSKYVNFLYLASHYEKLKGSPEDNEQKQLFVEQHKHYLDEIIEQISEFSKRVILADANLDKVLSAYNKHRDKPIREQAENIIHLFTLTNLGAPAAFKYFDTTIDRKRYTSTKEVLDATLIHQSITGLYETRIDLSQLGGDGGGSSGGGEAAAKGGMDPLQLLQPLEAEIKGTKLKAHWNSGATITCVPQAFLEEEVPIKNIWIKTIHGEKEQPVYYLTFKIQGRKVEAEVISSPYDYILVSPSDIPWLMKKPLQLTTLVPLQEYEERLLKQTMLTGSYKEKLQSLFLKYDALWQHWENQVGHRRIKPHHIATGTVNPRPQKQYPINPKAKASIQTVINDLLKQGVLIQQNSIMNTPVYPVPKPDGKWRMVLDYREVNKTIPLIAAQNQHSAGILSSIFRGKYKTTLDLSNGFWAHSITPESYWLTAFTWLGQQYCWTRLPQGFLNSPALFNADVVDLLKEVPNVQVYVDDIYISHDDPREHLEQLEKVFSLLLNAGYVVSLKKSEIAQHEVEFLGFNITKEGRGLTETFKQKLLNITPPRDLKQLQSILGKLNFARNFIPNFSELVKPLYNIIATAPGKYITWTTDNSQQLQNIISMLNSAENLEERNPEVRLIMKVNTSPSAGYIRFYNEFAKRPIMYLNYVYTKAEVKFTNTEKLLTTIHKGLIKALDLGMGQEILVYSPIVSMTKIQKTPLPERKALPIRWITWMSYLEDPRIQFHYDKTLPELQQVPTVTDDIIAKIKHPSEFSMVFYTDGSAIKHPNVNKSHNAGMGIAQVQFKPEFTVINTWSIPLGDHTAQLAEVAAVEFACKKALKIDGPVLIVTDSFYVAESVNKELPYWQSNGFFNNKKKPLKHVSKWKSIADCIQLKPDIIIIHEKGHQPTASTFHTEGNNLADKLATQGSYVVNAGKRTADGSEFEKRTADGSEFESPKKKAKVE

SEQ ID NO: 668 - protein, 2176 aa, synthetic construct
MPAAKRVKLDGGDKKYSIGLDIGTNSVGWAVITDEYKVPSKKFKVLGNTDRHSIKKNLIGALLFDSGETAEATRLKRTARRRYTRRKNRICYLQEIFSNEMAKVDDSFFHRLEESFLVEEDKKHERHPIFGNIVDEVAYHEKYPTIYHLRKKLVDSTDKADLRLIYLALAHMIKFRGHFLIEGDLNPDNSDVDKLFIQLVQTYNQLFEENPINASGVDAKAILSARLSKSRRLENLIAQLPGEKKNGLFGNLIALSLGLTPNFKSNFDLAEDAKLQLSKDTYDDDLDNLLAQIGDQYADLFLAAKNLSDAILLSDILRVNTEITKAPLSASMIKRYDEHHQDLTLLKALVRQQLPEKYKEIFFDQSKNGYAGYIDGGASQEEFYKFIKPILEKMDGTEELLVKLNREDLLRKQRTFDNGSIPHQIHLGELHAILRRQEDFYPFLKDNREKIEKILTFRIPYYVGPLARGNSRFAWMTRKSEETITPWNFEEVVDKGASAQSFIERMTNFDKNLPNEKVLPKHSLLYEYFTVYNELTKVKYVTEGMRKPAFLSGEQKKAIVDLLFKTNRKVTVKQLKEDYFKKIECFDSVEISGVEDRFNASLGTYHDLLKIIKDKDFLDNEENEDILEDIVLTLTLFEDREMIEERLKTYAHLFDDKVMKQLKRRRYTGWGRLSRKLINGIRDKQSGKTILDFLKSDGFANRNFMQLIHDDSLTFKEDIQKAQVSGQGDSLHEHIANLAGSPAIKKGILQTVKVVDELVKVMGRHKPENIVIEMARENQTTQKGQKNSRERMKRIEEGIKELGSQILKEHPVENTQLQNEKLYLYYLQNGRDMYVDQELDINRLSDYDVDHIVPQSFLKDDSIDNKVLTRSDKARGKSDNVPSEEVVKKMKNYWRQLLNAKLITQRKFDNLTKAERGGLSELDKAGFIKRQLVETRQITKHVAQILDSRMNTKYDENDKLIREVKVITLKSKLVSDFRKDFQFYKVREINNYHHAHDAYLNAVVGTALIKKYPKLESEFVYGDYKVYDVRKMIAKSEQEIGKATAKYFFYSNIMNFFKTEITLANGEIRKRPLIETNGETGEIVWDKGRDFATVRKVLSMPQVNIVKKTEVQTGGFSKESILPKRNSDKLIARKKDWDPKKYGGFDSPTVAYSVLVVAKVEKGKSKKLKSVKELLGITIMERSSFEKNPIDFLEAKGYKEVKKDLIIKLPKYSLFELENGRKRMLASAGELQKGNELALPSKYVNFLYLASHYEKLKGSPEDNEQKQLFVEQHKHYLDEIIEQISEFSKRVILADANLDKVLSAYNKHRDKPIREQAENIIHLFTLTNLGAPAAFKYFDTTIDRKRYTSTKEVLDATLIHQSITGLYETRIDLSQLGGDGGGGSEAAAKPAPGGMDPLQLLQPLEAEIKGTKLKAHWNSGATITCVPQAFLEEEVPIKNIWIKTIHGEKEQPVYYLTFKIQGRKVEAEVISSPYDYILVSPSDIPWLMKKPLQLTTLVPLQEYEERLLKQTMLTGSYKEKLQSLFLKYDALWQHWENQVGHRRIKPHHIATGTVNPRPQKQYPINPKAKASIQTVINDLLKQGVLIQQNSIMNTPVYPVPKPDGKWRMVLDYREVNKTIPLIAAQNQHSAGILSSIFRGKYKTTLDLSNGFWAHSITPESYWLTAFTWLGQQYCWTRLPQGFLNSPALFNADVVDLLKEVPNVQVYVDDIYISHDDPREHLEQLEKVFSLLLNAGYVVSLKKSEIAQHEVEFLGFNITKEGRGLTETFKQKLLNITPPRDLKQLQSILGKLNFARNFIPNFSELVKPLYNIIATAPGKYITWTTDNSQQLQNIISMLNSAENLEERNPEVRLIMKVNTSPSAGYIRFYNEFAKRPIMYLNYVYTKAEVKFTNTEKLLTTIHKGLIKALDLGMGQEILVYSPIVSMTKIQKTPLPERKALPIRWITWMSYLEDPRIQFHYDKTLPELQQVPTVTDDIIAKIKHPSEFSMVFYTDGSAIKHPNVNKSHNAGMGIAQVQFKPEFTVINTWSIPLGDHTAQLAEVAAVEFACKKALKIDGPVLIVTDSFYVAESVNKELPYWQSNGFFNNKKKPLKHVSKWKSIADCIQLKPDIIIIHEKGHQPTASTFHTEGNNLADKLATQGSYVVNAGKRTADGSEFEKRTADGSEFESPKKKAKVE

SEQ ID NO: 669 - protein, 2174 aa, synthetic construct
MPAAKRVKLDGGDKKYSIGLDIGTNSVGWAVITDEYKVPSKKFKVLGNTDRHSIKKNLIGALLFDSGETAEATRLKRTARRRYTRRKNRICYLQEIFSNEMAKVDDSFFHRLEESFLVEEDKKHERHPIFGNIVDEVAYHEKYPTIYHLRKKLVDSTDKADLRLIYLALAHMIKFRGHFLIEGDLNPDNSDVDKLFIQLVQTYNQLFEENPINASGVDAKAILSARLSKSRRLENLIAQLPGEKKNGLFGNLIALSLGLTPNFKSNFDLAEDAKLQLSKDTYDDDLDNLLAQIGDQYADLFLAAKNLSDAILLSDILRVNTEITKAPLSASMIKRYDEHHQDLTLLKALVRQQLPEKYKEIFFDQSKNGYAGYIDGGASQEEFYKFIKPILEKMDGTEELLVKLNREDLLRKQRTFDNGSIPHQIHLGELHAILRRQEDFYPFLKDNREKIEKILTFRIPYYVGPLARGNSRFAWMTRKSEETITPWNFEEVVDKGASAQSFIERMTNFDKNLPNEKVLPKHSLLYEYFTVYNELTKVKYVTEGMRKPAFLSGEQKKAIVDLLFKTNRKVTVKQLKEDYFKKIECFDSVEISGVEDRFNASLGTYHDLLKIIKDKDFLDNEENEDILEDIVLTLTLFEDREMIEERLKTYAHLFDDKVMKQLKRRRYTGWGRLSRKLINGIRDKQSGKTILDFLKSDGFANRNFMQLIHDDSLTFKEDIQKAQVSGQGDSLHEHIANLAGSPAIKKGILQTVKVVDELVKVMGRHKPENIVIEMARENQTTQKGQKNSRERMKRIEEGIKELGSQILKEHPVENTQLQNEKLYLYYLQNGRDMYVDQELDINRLSDYDVDHIVPQSFLKDDSIDNKVLTRSDKARGKSDNVPSEEVVKKMKNYWRQLLNAKLITQRKFDNLTKAERGGLSELDKAGFIKRQLVETRQITKHVAQILDSRMNTKYDENDKLIREVKVITLKSKLVSDFRKDFQFYKVREINNYHHAHDAYLNAVVGTALIKKYPKLESEFVYGDYKVYDVRKMIAKSEQEIGKATAKYFFYSNIMNFFKTEITLANGEIRKRPLIETNGETGEIVWDKGRDFATVRKVLSMPQVNIVKKTEVQTGGFSKESILPKRNSDKLIARKKDWDPKKYGGFDSPTVAYSVLVVAKVEKGKSKKLKSVKELLGITIMERSSFEKNPIDFLEAKGYKEVKKDLIIKLPKYSLFELENGRKRMLASAGELQKGNELALPSKYVNFLYLASHYEKLKGSPEDNEQKQLFVEQHKHYLDEIIEQISEFSKRVILADANLDKVLSAYNKHRDKPIREQAENIIHLFTLTNLGAPAAFKYFDTTIDRKRYTSTKEVLDATLIHQSITGLYETRIDLSQLGGDGGGGGGSSPAPGGMDPLQLLQPLEAEIKGTKLKAHWNSGATITCVPQAFLEEEVPIKNIWIKTIHGEKEQPVYYLTFKIQGRKVEAEVISSPYDYILVSPSDIPWLMKKPLQLTTLVPLQEYEERLLKQTMLTGSYKEKLQSLFLKYDALWQHWENQVGHRRIKPHHIATGTVNPRPQKQYPINPKAKASIQTVINDLLKQGVLIQQNSIMNTPVYPVPKPDGKWRMVLDYREVNKTIPLIAAQNQHSAGILSSIFRGKYKTTLDLSNGFWAHSITPESYWLTAFTWLGQQYCWTRLPQGFLNSPALFNADVVDLLKEVPNVQVYVDDIYISHDDPREHLEQLEKVFSLLLNAGYVVSLKKSEIAQHEVEFLGFNITKEGRGLTETFKQKLLNITPPRDLKQLQSILGKLNFARNFIPNFSELVKPLYNIIATAPGKYITWTTDNSQQLQNIISMLNSAENLEERNPEVRLIMKVNTSPSAGYIRFYNEFAKRPIMYLNYVYTKAEVKFTNTEKLLTTIHKGLIKALDLGMGQEILVYSPIVSMTKIQKTPLPERKALPIRWITWMSYLEDPRIQFHYDKTLPELQQVPTVTDDIIAKIKHPSEFSMVFYTDGSAIKHPNVNKSHNAGMGIAQVQFKPEFTVINTWSIPLGDHTAQLAEVAAVEFACKKALKIDGPVLIVTDSFYVAESVNKELPYWQSNGFFNNKKKPLKHVSKWKSIADCIQLKPDIIIIHEKGHQPTASTFHTEGNNLADKLATQGSYVVNAGKRTADGSEFEKRTADGSEFESPKKKAKVE

SEQ ID NO: 670 - protein, 2176 aa, synthetic construct
MPAAKRVKLDGGDKKYSIGLDIGTNSVGWAVITDEYKVPSKKFKVLGNTDRHSIKKNLIGALLFDSGETAEATRLKRTARRRYTRRKNRICYLQEIFSNEMAKVDDSFFHRLEESFLVEEDKKHERHPIFGNIVDEVAYHEKYPTIYHLRKKLVDSTDKADLRLIYLALAHMIKFRGHFLIEGDLNPDNSDVDKLFIQLVQTYNQLFEENPINASGVDAKAILSARLSKSRRLENLIAQLPGEKKNGLFGNLIALSLGLTPNFKSNFDLAEDAKLQLSKDTYDDDLDNLLAQIGDQYADLFLAAKNLSDAILLSDILRVNTEITKAPLSASMIKRYDEHHQDLTLLKALVRQQLPEKYKEIFFDQSKNGYAGYIDGGASQEEFYKFIKPILEKMDGTEELLVKLNREDLLRKQRTFDNGSIPHQIHLGELHAILRRQEDFYPFLKDNREKIEKILTFRIPYYVGPLARGNSRFAWMTRKSEETITPWNFEEVVDKGASAQSFIERMTNFDKNLPNEKVLPKHSLLYEYFTVYNELTKVKYVTEGMRKPAFLSGEQKKAIVDLLFKTNRKVTVKQLKEDYFKKIECFDSVEISGVEDRFNASLGTYHDLLKIIKDKDFLDNEENEDILEDIVLTLTLFEDREMIEERLKTYAHLFDDKVMKQLKRRRYTGWGRLSRKLINGIRDKQSGKTILDFLKSDGFANRNFMQLIHDDSLTFKEDIQKAQVSGQGDSLHEHIANLAGSPAIKKGILQTVKVVDELVKVMGRHKPENIVIEMARENQTTQKGQKNSRERMKRIEEGIKELGSQILKEHPVENTQLQNEKLYLYYLQNGRDMYVDQELDINRLSDYDVDHIVPQSFLKDDSIDNKVLTRSDKARGKSDNVPSEEVVKKMKNYWRQLLNAKLITQRKFDNLTKAERGGLSELDKAGFIKRQLVETRQITKHVAQILDSRMNTKYDENDKLIREVKVITLKSKLVSDFRKDFQFYKVREINNYHHAHDAYLNAVVGTALIKKYPKLESEFVYGDYKVYDVRKMIAKSEQEIGKATAKYFFYSNIMNFFKTEITLANGEIRKRPLIETNGETGEIVWDKGRDFATVRKVLSMPQVNIVKKTEVQTGGFSKESILPKRNSDKLIARKKDWDPKKYGGFDSPTVAYSVLVVAKVEKGKSKKLKSVKELLGITIMERSSFEKNPIDFLEAKGYKEVKKDLIIKLPKYSLFELENGRKRMLASAGELQKGNELALPSKYVNFLYLASHYEKLKGSPEDNEQKQLFVEQHKHYLDEIIEQISEFSKRVILADANLDKVLSAYNKHRDKPIREQAENIIHLFTLTNLGAPAAFKYFDTTIDRKRYTSTKEVLDATLIHQSITGLYETRIDLSQLGGDGGGSSGGSEAAAKGGMDPLQLLQPLEAEIKGTKLKAHWNSGATITCVPQAFLEEEVPIKNIWIKTIHGEKEQPVYYLTFKIQGRKVEAEVISSPYDYILVSPSDIPWLMKKPLQLTTLVPLQEYEERLLKQTMLTGSYKEKLQSLFLKYDALWQHWENQVGHRRIKPHHIATGTVNPRPQKQYPINPKAKASIQTVINDLLKQGVLIQQNSIMNTPVYPVPKPDGKWRMVLDYREVNKTIPLIAAQNQHSAGILSSIFRGKYKTTLDLSNGFWAHSITPESYWLTAFTWLGQQYCWTRLPQGFLNSPALFNADVVDLLKEVPNVQVYVDDIYISHDDPREHLEQLEKVFSLLLNAGYVVSLKKSEIAQHEVEFLGFNITKEGRGLTETFKQKLLNITPPRDLKQLQSILGKLNFARNFIPNFSELVKPLYNIIATAPGKYITWTTDNSQQLQNIISMLNSAENLEERNPEVRLIMKVNTSPSAGYIRFYNEFAKRPIMYLNYVYTKAEVKFTNTEKLLTTIHKGLIKALDLGMGQEILVYSPIVSMTKIQKTPLPERKALPIRWITWMSYLEDPRIQFHYDKTLPELQQVPTVTDDIIAKIKHPSEFSMVFYTDGSAIKHPNVNKSHNAGMGIAQVQFKPEFTVINTWSIPLGDHTAQLAEVAAVEFACKKALKIDGPVLIVTDSFYVAESVNKELPYWQSNGFFNNKKKPLKHVSKWKSIADCIQLKPDIIIIHEKGHQPTASTFHTEGNNLADKLATQGSYVVNAGKRTADGSEFEKRTADGSEFESPKKKAKVE

SEQ ID NO: 671 - protein, 2176 aa, synthetic construct
MPAAKRVKLDGGDKKYSIGLDIGTNSVGWAVITDEYKVPSKKFKVLGNTDRHSIKKNLIGALLFDSGETAEATRLKRTARRRYTRRKNRICYLQEIFSNEMAKVDDSFFHRLEESFLVEEDKKHERHPIFGNIVDEVAYHEKYPTIYHLRKKLVDSTDKADLRLIYLALAHMIKFRGHFLIEGDLNPDNSDVDKLFIQLVQTYNQLFEENPINASGVDAKAILSARLSKSRRLENLIAQLPGEKKNGLFGNLIALSLGLTPNFKSNFDLAEDAKLQLSKDTYDDDLDNLLAQIGDQYADLFLAAKNLSDAILLSDILRVNTEITKAPLSASMIKRYDEHHQDLTLLKALVRQQLPEKYKEIFFDQSKNGYAGYIDGGASQEEFYKFIKPILEKMDGTEELLVKLNREDLLRKQRTFDNGSIPHQIHLGELHAILRRQEDFYPFLKDNREKIEKILTFRIPYYVGPLARGNSRFAWMTRKSEETITPWNFEEVVDKGASAQSFIERMTNFDKNLPNEKVLPKHSLLYEYFTVYNELTKVKYVTEGMRKPAFLSGEQKKAIVDLLFKTNRKVTVKQLKEDYFKKIECFDSVEISGVEDRFNASLGTYHDLLKIIKDKDFLDNEENEDILEDIVLTLTLFEDREMIEERLKTYAHLFDDKVMKQLKRRRYTGWGRLSRKLINGIRDKQSGKTILDFLKSDGFANRNFMQLIHDDSLTFKEDIQKAQVSGQGDSLHEHIANLAGSPAIKKGILQTVKVVDELVKVMGRHKPENIVIEMARENQTTQKGQKNSRERMKRIEEGIKELGSQILKEHPVENTQLQNEKLYLYYLQNGRDMYVDQELDINRLSDYDVDHIVPQSFLKDDSIDNKVLTRSDKARGKSDNVPSEEVVKKMKNYWRQLLNAKLITQRKFDNLTKAERGGLSELDKAGFIKRQLVETRQITKHVAQILDSRMNTKYDENDKLIREVKVITLKSKLVSDFRKDFQFYKVREINNYHHAHDAYLNAVVGTALIKKYPKLESEFVYGDYKVYDVRKMIAKSEQEIGKATAKYFFYSNIMNFFKTEITLANGEIRKRPLIETNGETGEIVWDKGRDFATVRKVLSMPQVNIVKKTEVQTGGFSKESILPKRNSDKLIARKKDWDPKKYGGFDSPTVAYSVLVVAKVEKGKSKKLKSVKELLGITIMERSSFEKNPIDFLEAKGYKEVKKDLIIKLPKYSLFELENGRKRMLASAGELQKGNELALPSKYVNFLYLASHYEKLKGSPEDNEQKQLFVEQHKHYLDEIIEQISEFSKRVILADANLDKVLSAYNKHRDKPIREQAENIIHLFTLTNLGAPAAFKYFDTTIDRKRYTSTKEVLDATLIHQSITGLYETRIDLSQLGGDGGEAAAKGSSGGGGGMDPLQLLQPLEAEIKGTKLKAHWNSGATITCVPQAFLEEEVPIKNIWIKTIHGEKEQPVYYLTFKIQGRKVEAEVISSPYDYILVSPSDIPWLMKKPLQLTTLVPLQEYEERLLKQTMLTGSYKEKLQSLFLKYDALWQHWENQVGHRRIKPHHIATGTVNPRPQKQYPINPKAKASIQTVINDLLKQGVLIQQNSIMNTPVYPVPKPDGKWRMVLDYREVNKTIPLIAAQNQHSAGILSSIFRGKYKTTLDLSNGFWAHSITPESYWLTAFTWLGQQYCWTRLPQGFLNSPALFNADVVDLLKEVPNVQVYVDDIYISHDDPREHLEQLEKVFSLLLNAGYVVSLKKSEIAQHEVEFLGFNITKEGRGLTETFKQKLLNITPPRDLKQLQSILGKLNFARNFIPNFSELVKPLYNIIATAPGKYITWTTDNSQQLQNIISMLNSAENLEERNPEVRLIMKVNTSPSAGYIRFYNEFAKRPIMYLNYVYTKAEVKFTNTEKLLTTIHKGLIKALDLGMGQEILVYSPIVSMTKIQKTPLPERKALPIRWITWMSYLEDPRIQFHYDKTLPELQQVPTVTDDIIAKIKHPSEFSMVFYTDGSAIKHPNVNKSHNAGMGIAQVQFKPEFTVINTWSIPLGDHTAQLAEVAAVEFACKKALKIDGPVLIVTDSFYVAESVNKELPYWQSNGFFNNKKKPLKHVSKWKSIADCIQLKPDIIIIHEKGHQPTASTFHTEGNNLADKLATQGSYVVNAGKRTADGSEFEKRTADGSEFESPKKKAKVE

SEQ ID NO: 672 - protein, 2171 aa, synthetic construct
MPAAKRVKLDGGDKKYSIGLDIGTNSVGWAVITDEYKVPSKKFKVLGNTDRHSIKKNLIGALLFDSGETAEATRLKRTARRRYTRRKNRICYLQEIFSNEMAKVDDSFFHRLEESFLVEEDKKHERHPIFGNIVDEVAYHEKYPTIYHLRKKLVDSTDKADLRLIYLALAHMIKFRGHFLIEGDLNPDNSDVDKLFIQLVQTYNQLFEENPINASGVDAKAILSARLSKSRRLENLIAQLPGEKKNGLFGNLIALSLGLTPNFKSNFDLAEDAKLQLSKDTYDDDLDNLLAQIGDQYADLFLAAKNLSDAILLSDILRVNTEITKAPLSASMIKRYDEHHQDLTLLKALVRQQLPEKYKEIFFDQSKNGYAGYIDGGASQEEFYKFIKPILEKMDGTEELLVKLNREDLLRKQRTFDNGSIPHQIHLGELHAILRRQEDFYPFLKDNREKIEKILTFRIPYYVGPLARGNSRFAWMTRKSEETITPWNFEEVVDKGASAQSFIERMTNFDKNLPNEKVLPKHSLLYEYFTVYNELTKVKYVTEGMRKPAFLSGEQKKAIVDLLFKTNRKVTVKQLKEDYFKKIECFDSVEISGVEDRFNASLGTYHDLLKIIKDKDFLDNEENEDILEDIVLTLTLFEDREMIEERLKTYAHLFDDKVMKQLKRRRYTGWGRLSRKLINGIRDKQSGKTILDFLKSDGFANRNFMQLIHDDSLTFKEDIQKAQVSGQGDSLHEHIANLAGSPAIKKGILQTVKVVDELVKVMGRHKPENIVIEMARENQTTQKGQKNSRERMKRIEEGIKELGSQILKEHPVENTQLQNEKLYLYYLQNGRDMYVDQELDINRLSDYDVDHIVPQSFLKDDSIDNKVLTRSDKARGKSDNVPSEEVVKKMKNYWRQLLNAKLITQRKFDNLTKAERGGLSELDKAGFIKRQLVETRQITKHVAQILDSRMNTKYDENDKLIREVKVITLKSKLVSDFRKDFQFYKVREINNYHHAHDAYLNAVVGTALIKKYPKLESEFVYGDYKVYDVRKMIAKSEQEIGKATAKYFFYSNIMNFFKTEITLANGEIRKRPLIETNGETGEIVWDKGRDFATVRKVLSMPQVNIVKKTEVQTGGFSKESILPKRNSDKLIARKKDWDPKKYGGFDSPTVAYSVLVVAKVEKGKSKKLKSVKELLGITIMERSSFEKNPIDFLEAKGYKEVKKDLIIKLPKYSLFELENGRKRMLASAGELQKGNELALPSKYVNFLYLASHYEKLKGSPEDNEQKQLFVEQHKHYLDEIIEQISEFSKRVILADANLDKVLSAYNKHRDKPIREQAENIIHLFTLTNLGAPAAFKYFDTTIDRKRYTSTKEVLDATLIHQSITGLYETRIDLSQLGGDGGGGSPAPGGMDPLQLLQPLEAEIKGTKLKAHWNSGATITCVPQAFLEEEVPIKNIWIKTIHGEKEQPVYYLTFKIQGRKVEAEVISSPYDYILVSPSDIPWLMKKPLQLTTLVPLQEYEERLLKQTMLTGSYKEKLQSLFLKYDALWQHWENQVGHRRIKPHHIATGTVNPRPQKQYPINPKAKASIQTVINDLLKQGVLIQQNSIMNTPVYPVPKPDGKWRMVLDYREVNKTIPLIAAQNQHSAGILSSIFRGKYKTTLDLSNGFWAHSITPESYWLTAFTWLGQQYCWTRLPQGFLNSPALFNADVVDLLKEVPNVQVYVDDIYISHDDPREHLEQLEKVFSLLLNAGYVVSLKKSEIAQHEVEFLGFNITKEGRGLTETFKQKLLNITPPRDLKQLQSILGKLNFARNFIPNFSELVKPLYNIIATAPGKYITWTTDNSQQLQNIISMLNSAENLEERNPEVRLIMKVNTSPSAGYIRFYNEFAKRPIMYLNYVYTKAEVKFTNTEKLLTTIHKGLIKALDLGMGQEILVYSPIVSMTKIQKTPLPERKALPIRWITWMSYLEDPRIQFHYDKTLPELQQVPTVTDDIIAKIKHPSEFSMVFYTDGSAIKHPNVNKSHNAGMGIAQVQFKPEFTVINTWSIPLGDHTAQLAEVAAVEFACKKALKIDGPVLIVTDSFYVAESVNKELPYWQSNGFFNNKKKPLKHVSKWKSIADCIQLKPDIIIIHEKGHQPTASTFHTEGNNLADKLATQGSYVVNAGKRTADGSEFEKRTADGSEFESPKKKAKVE

SEQ ID NO: 673 - protein, 2185 aa, synthetic construct
MPAAKRVKLDGGDKKYSIGLDIGTNSVGWAVITDEYKVPSKKFKVLGNTDRHSIKKNLIGALLFDSGETAEATRLKRTARRRYTRRKNRICYLQEIFSNEMAKVDDSFFHRLEESFLVEEDKKHERHPIFGNIVDEVAYHEKYPTIYHLRKKLVDSTDKADLRLIYLALAHMIKFRGHFLIEGDLNPDNSDVDKLFIQLVQTYNQLFEENPINASGVDAKAILSARLSKSRRLENLIAQLPGEKKNGLFGNLIALSLGLTPNFKSNFDLAEDAKLQLSKDTYDDDLDNLLAQIGDQYADLFLAAKNLSDAILLSDILRVNTEITKAPLSASMIKRYDEHHQDLTLLKALVRQQLPEKYKEIFFDQSKNGYAGYIDGGASQEEFYKFIKPILEKMDGTEELLVKLNREDLLRKQRTFDNGSIPHQIHLGELHAILRRQEDFYPFLKDNREKIEKILTFRIPYYVGPLARGNSRFAWMTRKSEETITPWNFEEVVDKGASAQSFIERMTNFDKNLPNEKVLPKHSLLYEYFTVYNELTKVKYVTEGMRKPAFLSGEQKKAIVDLLFKTNRKVTVKQLKEDYFKKIECFDSVEISGVEDRFNASLGTYHDLLKIIKDKDFLDNEENEDILEDIVLTLTLFEDREMIEERLKTYAHLFDDKVMKQLKRRRYTGWGRLSRKLINGIRDKQSGKTILDFLKSDGFANRNFMQLIHDDSLTFKEDIQKAQVSGQGDSLHEHIANLAGSPAIKKGILQTVKVVDELVKVMGRHKPENIVIEMARENQTTQKGQKNSRERMKRIEEGIKELGSQILKEHPVENTQLQNEKLYLYYLQNGRDMYVDQELDINRLSDYDVDHIVPQSFLKDDSIDNKVLTRSDKARGKSDNVPSEEVVKKMKNYWRQLLNAKLITQRKFDNLTKAERGGLSELDKAGFIKRQLVETRQITKHVAQILDSRMNTKYDENDKLIREVKVITLKSKLVSDFRKDFQFYKVREINNYHHAHDAYLNAVVGTALIKKYPKLESEFVYGDYKVYDVRKMIAKSEQEIGKATAKYFFYSNIMNFFKTEITLANGEIRKRPLIETNGETGEIVWDKGRDFATVRKVLSMPQVNIVKKTEVQTGGFSKESILPKRNSDKLIARKKDWDPKKYGGFDSPTVAYSVLVVAKVEKGKSKKLKSVKELLGITIMERSSFEKNPIDFLEAKGYKEVKKDLIIKLPKYSLFELENGRKRMLASAGELQKGNELALPSKYVNFLYLASHYEKLKGSPEDNEQKQLFVEQHKHYLDEIIEQISEFSKRVILADANLDKVLSAYNKHRDKPIREQAENIIHLFTLTNLGAPAAFKYFDTTIDRKRYTSTKEVLDATLIHQSITGLYETRIDLSQLGGDGGGGGGSGGGGSGGGGSGGGGSGGMDPLQLLQPLEAEIKGTKLKAHWNSGATITCVPQAFLEEEVPIKNIWIKTIHGEKEQPVYYLTFKIQGRKVEAEVISSPYDYILVSPSDIPWLMKKPLQLTTLVPLQEYEERLLKQTMLTGSYKEKLQSLFLKYDALWQHWENQVGHRRIKPHHIATGTVNPRPQKQYPINPKAKASIQTVINDLLKQGVLIQQNSIMNTPVYPVPKPDGKWRMVLDYREVNKTIPLIAAQNQHSAGILSSIFRGKYKTTLDLSNGFWAHSITPESYWLTAFTWLGQQYCWTRLPQGFLNSPALFNADVVDLLKEVPNVQVYVDDIYISHDDPREHLEQLEKVFSLLLNAGYVVSLKKSEIAQHEVEFLGFNITKEGRGLTETFKQKLLNITPPRDLKQLQSILGKLNFARNFIPNFSELVKPLYNIIATAPGKYITWTTDNSQQLQNIISMLNSAENLEERNPEVRLIMKVNTSPSAGYIRFYNEFAKRPIMYLNYVYTKAEVKFTNTEKLLTTIHKGLIKALDLGMGQEILVYSPIVSMTKIQKTPLPERKALPIRWITWMSYLEDPRIQFHYDKTLPELQQVPTVTDDIIAKIKHPSEFSMVFYTDGSAIKHPNVNKSHNAGMGIAQVQFKPEFTVINTWSIPLGDHTAQLAEVAAVEFACKKALKIDGPVLIVTDSFYVAESVNKELPYWQSNGFFNNKKKPLKHVSKWKSIADCIQLKPDIIIIHEKGHQPTASTFHTEGNNLADKLATQGSYVVNAGKRTADGSEFEKRTADGSEFESPKKKAKVE

SEQ ID NO: 674 - protein, 2176 aa, synthetic construct
MPAAKRVKLDGGDKKYSIGLDIGTNSVGWAVITDEYKVPSKKFKVLGNTDRHSIKKNLIGALLFDSGETAEATRLKRTARRRYTRRKNRICYLQEIFSNEMAKVDDSFFHRLEESFLVEEDKKHERHPIFGNIVDEVAYHEKYPTIYHLRKKLVDSTDKADLRLIYLALAHMIKFRGHFLIEGDLNPDNSDVDKLFIQLVQTYNQLFEENPINASGVDAKAILSARLSKSRRLENLIAQLPGEKKNGLFGNLIALSLGLTPNFKSNFDLAEDAKLQLSKDTYDDDLDNLLAQIGDQYADLFLAAKNLSDAILLSDILRVNTEITKAPLSASMIKRYDEHHQDLTLLKALVRQQLPEKYKEIFFDQSKNGYAGYIDGGASQEEFYKFIKPILEKMDGTEELLVKLNREDLLRKQRTFDNGSIPHQIHLGELHAILRRQEDFYPFLKDNREKIEKILTFRIPYYVGPLARGNSRFAWMTRKSEETITPWNFEEVVDKGASAQSFIERMTNFDKNLPNEKVLPKHSLLYEYFTVYNELTKVKYVTEGMRKPAFLSGEQKKAIVDLLFKTNRKVTVKQLKEDYFKKIECFDSVEISGVEDRFNASLGTYHDLLKIIKDKDFLDNEENEDILEDIVLTLTLFEDREMIEERLKTYAHLFDDKVMKQLKRRRYTGWGRLSRKLINGIRDKQSGKTILDFLKSDGFANRNFMQLIHDDSLTFKEDIQKAQVSGQGDSLHEHIANLAGSPAIKKGILQTVKVVDELVKVMGRHKPENIVIEMARENQTTQKGQKNSRERMKRIEEGIKELGSQILKEHPVENTQLQNEKLYLYYLQNGRDMYVDQELDINRLSDYDVDHIVPQSFLKDDSIDNKVLTRSDKARGKSDNVPSEEVVKKMKNYWRQLLNAKLITQRKFDNLTKAERGGLSELDKAGFIKRQLVETRQITKHVAQILDSRMNTKYDENDKLIREVKVITLKSKLVSDFRKDFQFYKVREINNYHHAHDAYLNAVVGTALIKKYPKLESEFVYGDYKVYDVRKMIAKSEQEIGKATAKYFFYSNIMNFFKTEITLANGEIRKRPLIETNGETGEIVWDKGRDFATVRKVLSMPQVNIVKKTEVQTGGFSKESILPKRNSDKLIARKKDWDPKKYGGFDSPTVAYSVLVVAKVEKGKSKKLKSVKELLGITIMERSSFEKNPIDFLEAKGYKEVKKDLIIKLPKYSLFELENGRKRMLASAGELQKGNELALPSKYVNFLYLASHYEKLKGSPEDNEQKQLFVEQHKHYLDEIIEQISEFSKRVILADANLDKVLSAYNKHRDKPIREQAENIIHLFTLTNLGAPAAFKYFDTTIDRKRYTSTKEVLDATLIHQSITGLYETRIDLSQLGGDGGGSSEAAAKGGGGGMDPLQLLQPLEAEIKGTKLKAHWNSGATITCVPQAFLEEEVPIKNIWIKTIHGEKEQPVYYLTFKIQGRKVEAEVISSPYDYILVSPSDIPWLMKKPLQLTTLVPLQEYEERLLKQTMLTGSYKEKLQSLFLKYDALWQHWENQVGHRRIKPHHIATGTVNPRPQKQYPINPKAKASIQTVINDLLKQGVLIQQNSIMNTPVYPVPKPDGKWRMVLDYREVNKTIPLIAAQNQHSAGILSSIFRGKYKTTLDLSNGFWAHSITPESYWLTAFTWLGQQYCWTRLPQGFLNSPALFNADVVDLLKEVPNVQVYVDDIYISHDDPREHLEQLEKVFSLLLNAGYVVSLKKSEIAQHEVEFLGFNITKEGRGLTETFKQKLLNITPPRDLKQLQSILGKLNFARNFIPNFSELVKPLYNIIATAPGKYITWTTDNSQQLQNIISMLNSAENLEERNPEVRLIMKVNTSPSAGYIRFYNEFAKRPIMYLNYVYTKAEVKFTNTEKLLTTIHKGLIKALDLGMGQEILVYSPIVSMTKIQKTPLPERKALPIRWITWMSYLEDPRIQFHYDKTLPELQQVPTVTDDIIAKIKHPSEFSMVFYTDGSAIKHPNVNKSHNAGMGIAQVQFKPEFTVINTWSIPLGDHTAQLAEVAAVEFACKKALKIDGPVLIVTDSFYVAESVNKELPYWQSNGFFNNKKKPLKHVSKWKSIADCIQLKPDIIIIHEKGHQPTASTFHTEGNNLADKLATQGSYVVNAGKRTADGSEFEKRTADGSEFESPKKKAKVE

SEQ ID NO: 675 - protein, 2176 aa, synthetic construct
MPAAKRVKLDGGDKKYSIGLDIGTNSVGWAVITDEYKVPSKKFKVLGNTDRHSIKKNLIGALLFDSGETAEATRLKRTARRRYTRRKNRICYLQEIFSNEMAKVDDSFFHRLEESFLVEEDKKHERHPIFGNIVDEVAYHEKYPTIYHLRKKLVDSTDKADLRLIYLALAHMIKFRGHFLIEGDLNPDNSDVDKLFIQLVQTYNQLFEENPINASGVDAKAILSARLSKSRRLENLIAQLPGEKKNGLFGNLIALSLGLTPNFKSNFDLAEDAKLQLSKDTYDDDLDNLLAQIGDQYADLFLAAKNLSDAILLSDILRVNTEITKAPLSASMIKRYDEHHQDLTLLKALVRQQLPEKYKEIFFDQSKNGYAGYIDGGASQEEFYKFIKPILEKMDGTEELLVKLNREDLLRKQRTFDNGSIPHQIHLGELHAILRRQEDFYPFLKDNREKIEKILTFRIPYYVGPLARGNSRFAWMTRKSEETITPWNFEEVVDKGASAQSFIERMTNFDKNLPNEKVLPKHSLLYEYFTVYNELTKVKYVTEGMRKPAFLSGEQKKAIVDLLFKTNRKVTVKQLKEDYFKKIECFDSVEISGVEDRFNASLGTYHDLLKIIKDKDFLDNEENEDILEDIVLTLTLFEDREMIEERLKTYAHLFDDKVMKQLKRRRYTGWGRLSRKLINGIRDKQSGKTILDFLKSDGFANRNFMQLIHDDSLTFKEDIQKAQVSGQGDSLHEHIANLAGSPAIKKGILQTVKVVDELVKVMGRHKPENIVIEMARENQTTQKGQKNSRERMKRIEEGIKELGSQILKEHPVENTQLQNEKLYLYYLQNGRDMYVDQELDINRLSDYDVDHIVPQSFLKDDSIDNKVLTRSDKARGKSDNVPSEEVVKKMKNYWRQLLNAKLITQRKFDNLTKAERGGLSELDKAGFIKRQLVETRQITKHVAQILDSRMNTKYDENDKLIREVKVITLKSKLVSDFRKDFQFYKVREINNYHHAHDAYLNAVVGTALIKKYPKLESEFVYGDYKVYDVRKMIAKSEQEIGKATAKYFFYSNIMNFFKTEITLANGEIRKRPLIETNGETGEIVWDKGRDFATVRKVLSMPQVNIVKKTEVQTGGFSKESILPKRNSDKLIARKKDWDPKKYGGFDSPTVAYSVLVVAKVEKGKSKKLKSVKELLGITIMERSSFEKNPIDFLEAKGYKEVKKDLIIKLPKYSLFELENGRKRMLASAGELQKGNELALPSKYVNFLYLASHYEKLKGSPEDNEQKQLFVEQHKHYLDEIIEQISEFSKRVILADANLDKVLSAYNKHRDKPIREQAENIIHLFTLTNLGAPAAFKYFDTTIDRKRYTSTKEVLDATLIHQSITGLYETRIDLSQLGGDGGGSSPAPEAAAKGGMDPLQLLQPLEAEIKGTKLKAHWNSGATITCVPQAFLEEEVPIKNIWIKTIHGEKEQPVYYLTFKIQGRKVEAEVISSPYDYILVSPSDIPWLMKKPLQLTTLVPLQEYEERLLKQTMLTGSYKEKLQSLFLKYDALWQHWENQVGHRRIKPHHIATGTVNPRPQKQYPINPKAKASIQTVINDLLKQGVLIQQNSIMNTPVYPVPKPDGKWRMVLDYREVNKTIPLIAAQNQHSAGILSSIFRGKYKTTLDLSNGFWAHSITPESYWLTAFTWLGQQYCWTRLPQGFLNSPALFNADVVDLLKEVPNVQVYVDDIYISHDDPREHLEQLEKVFSLLLNAGYVVSLKKSEIAQHEVEFLGFNITKEGRGLTETFKQKLLNITPPRDLKQLQSILGKLNFARNFIPNFSELVKPLYNIIATAPGKYITWTTDNSQQLQNIISMLNSAENLEERNPEVRLIMKVNTSPSAGYIRFYNEFAKRPIMYLNYVYTKAEVKFTNTEKLLTTIHKGLIKALDLGMGQEILVYSPIVSMTKIQKTPLPERKALPIRWITWMSYLEDPRIQFHYDKTLPELQQVPTVTDDIIAKIKHPSEFSMVFYTDGSAIKHPNVNKSHNAGMGIAQVQFKPEFTVINTWSIPLGDHTAQLAEVAAVEFACKKALKIDGPVLIVTDSFYVAESVNKELPYWQSNGFFNNKKKPLKHVSKWKSIADCIQLKPDIIIIHEKGHQPTASTFHTEGNNLADKLATQGSYVVNAGKRTADGSEFEKRTADGSEFESPKKKAKVE

SEQ ID NO: 676 - protein, 2171 aa, synthetic construct
MPAAKRVKLDGGDKKYSIGLDIGTNSVGWAVITDEYKVPSKKFKVLGNTDRHSIKKNLIGALLFDSGETAEATRLKRTARRRYTRRKNRICYLQEIFSNEMAKVDDSFFHRLEESFLVEEDKKHERHPIFGNIVDEVAYHEKYPTIYHLRKKLVDSTDKADLRLIYLALAHMIKFRGHFLIEGDLNPDNSDVDKLFIQLVQTYNQLFEENPINASGVDAKAILSARLSKSRRLENLIAQLPGEKKNGLFGNLIALSLGLTPNFKSNFDLAEDAKLQLSKDTYDDDLDNLLAQIGDQYADLFLAAKNLSDAILLSDILRVNTEITKAPLSASMIKRYDEHHQDLTLLKALVRQQLPEKYKEIFFDQSKNGYAGYIDGGASQEEFYKFIKPILEKMDGTEELLVKLNREDLLRKQRTFDNGSIPHQIHLGELHAILRRQEDFYPFLKDNREKIEKILTFRIPYYVGPLARGNSRFAWMTRKSEETITPWNFEEVVDKGASAQSFIERMTNFDKNLPNEKVLPKHSLLYEYFTVYNELTKVKYVTEGMRKPAFLSGEQKKAIVDLLFKTNRKVTVKQLKEDYFKKIECFDSVEISGVEDRFNASLGTYHDLLKIIKDKDFLDNEENEDILEDIVLTLTLFEDREMIEERLKTYAHLFDDKVMKQLKRRRYTGWGRLSRKLINGIRDKQSGKTILDFLKSDGFANRNFMQLIHDDSLTFKEDIQKAQVSGQGDSLHEHIANLAGSPAIKKGILQTVKVVDELVKVMGRHKPENIVIEMARENQTTQKGQKNSRERMKRIEEGIKELGSQILKEHPVENTQLQNEKLYLYYLQNGRDMYVDQELDINRLSDYDVDHIVPQSFLKDDSIDNKVLTRSDKARGKSDNVPSEEVVKKMKNYWRQLLNAKLITQRKFDNLTKAERGGLSELDKAGFIKRQLVETRQITKHVAQILDSRMNTKYDENDKLIREVKVITLKSKLVSDFRKDFQFYKVREINNYHHAHDAYLNAVVGTALIKKYPKLESEFVYGDYKVYDVRKMIAKSEQEIGKATAKYFFYSNIMNFFKTEITLANGEIRKRPLIETNGETGEIVWDKGRDFATVRKVLSMPQVNIVKKTEVQTGGFSKESILPKRNSDKLIARKKDWDPKKYGGFDSPTVAYSVLVVAKVEKGKSKKLKSVKELLGITIMERSSFEKNPIDFLEAKGYKEVKKDLIIKLPKYSLFELENGRKRMLASAGELQKGNELALPSKYVNFLYLASHYEKLKGSPEDNEQKQLFVEQHKHYLDEIIEQISEFSKRVILADANLDKVLSAYNKHRDKPIREQAENIIHLFTLTNLGAPAAFKYFDTTIDRKRYTSTKEVLDATLIHQSITGLYETRIDLSQLGGDGGPAPGGGGGMDPLQLLQPLEAEIKGTKLKAHWNSGATITCVPQAFLEEEVPIKNIWIKTIHGEKEQPVYYLTFKIQGRKVEAEVISSPYDYILVSPSDIPWLMKKPLQLTTLVPLQEYEERLLKQTMLTGSYKEKLQSLFLKYDALWQHWENQVGHRRIKPHHIATGTVNPRPQKQYPINPKAKASIQTVINDLLKQGVLIQQNSIMNTPVYPVPKPDGKWRMVLDYREVNKTIPLIAAQNQHSAGILSSIFRGKYKTTLDLSNGFWAHSITPESYWLTAFTWLGQQYCWTRLPQGFLNSPALFNADVVDLLKEVPNVQVYVDDIYISHDDPREHLEQLEKVFSLLLNAGYVVSLKKSEIAQHEVEFLGFNITKEGRGLTETFKQKLLNITPPRDLKQLQSILGKLNFARNFIPNFSELVKPLYNIIATAPGKYITWTTDNSQQLQNIISMLNSAENLEERNPEVRLIMKVNTSPSAGYIRFYNEFAKRPIMYLNYVYTKAEVKFTNTEKLLTTIHKGLIKALDLGMGQEILVYSPIVSMTKIQKTPLPERKALPIRWITWMSYLEDPRIQFHYDKTLPELQQVPTVTDDIIAKIKHPSEFSMVFYTDGSAIKHPNVNKSHNAGMGIAQVQFKPEFTVINTWSIPLGDHTAQLAEVAAVEFACKKALKIDGPVLIVTDSFYVAESVNKELPYWQSNGFFNNKKKPLKHVSKWKSIADCIQLKPDIIIIHEKGHQPTASTFHTEGNNLADKLATQGSYVVNAGKRTADGSEFEKRTADGSEFESPKKKAKVE

SEQ ID NO: 677 - protein, 2180 aa, synthetic construct
MPAAKRVKLDGGDKKYSIGLDIGTNSVGWAVITDEYKVPSKKFKVLGNTDRHSIKKNLIGALLFDSGETAEATRLKRTARRRYTRRKNRICYLQEIFSNEMAKVDDSFFHRLEESFLVEEDKKHERHPIFGNIVDEVAYHEKYPTIYHLRKKLVDSTDKADLRLIYLALAHMIKFRGHFLIEGDLNPDNSDVDKLFIQLVQTYNQLFEENPINASGVDAKAILSARLSKSRRLENLIAQLPGEKKNGLFGNLIALSLGLTPNFKSNFDLAEDAKLQLSKDTYDDDLDNLLAQIGDQYADLFLAAKNLSDAILLSDILRVNTEITKAPLSASMIKRYDEHHQDLTLLKALVRQQLPEKYKEIFFDQSKNGYAGYIDGGASQEEFYKFIKPILEKMDGTEELLVKLNREDLLRKQRTFDNGSIPHQIHLGELHAILRRQEDFYPFLKDNREKIEKILTFRIPYYVGPLARGNSRFAWMTRKSEETITPWNFEEVVDKGASAQSFIERMTNFDKNLPNEKVLPKHSLLYEYFTVYNELTKVKYVTEGMRKPAFLSGEQKKAIVDLLFKTNRKVTVKQLKEDYFKKIECFDSVEISGVEDRFNASLGTYHDLLKIIKDKDFLDNEENEDILEDIVLTLTLFEDREMIEERLKTYAHLFDDKVMKQLKRRRYTGWGRLSRKLINGIRDKQSGKTILDFLKSDGFANRNFMQLIHDDSLTFKEDIQKAQVSGQGDSLHEHIANLAGSPAIKKGILQTVKVVDELVKVMGRHKPENIVIEMARENQTTQKGQKNSRERMKRIEEGIKELGSQILKEHPVENTQLQNEKLYLYYLQNGRDMYVDQELDINRLSDYDVDHIVPQSFLKDDSIDNKVLTRSDKARGKSDNVPSEEVVKKMKNYWRQLLNAKLITQRKFDNLTKAERGGLSELDKAGFIKRQLVETRQITKHVAQILDSRMNTKYDENDKLIREVKVITLKSKLVSDFRKDFQFYKVREINNYHHAHDAYLNAVVGTALIKKYPKLESEFVYGDYKVYDVRKMIAKSEQEIGKATAKYFFYSNIMNFFKTEITLANGEIRKRPLIETNGETGEIVWDKGRDFATVRKVLSMPQVNIVKKTEVQTGGFSKESILPKRNSDKLIARKKDWDPKKYGGFDSPTVAYSVLVVAKVEKGKSKKLKSVKELLGITIMERSSFEKNPIDFLEAKGYKEVKKDLIIKLPKYSLFELENGRKRMLASAGELQKGNELALPSKYVNFLYLASHYEKLKGSPEDNEQKQLFVEQHKHYLDEIIEQISEFSKRVILADANLDKVLSAYNKHRDKPIREQAENIIHLFTLTNLGAPAAFKYFDTTIDRKRYTSTKEVLDATLIHQSITGLYETRIDLSQLGGDGGGSSGSSGSSGSSGSSGGMDPLQLLQPLEAEIKGTKLKAHWNSGATITCVPQAFLEEEVPIKNIWIKTIHGEKEQPVYYLTFKIQGRKVEAEVISSPYDYILVSPSDIPWLMKKPLQLTTLVPLQEYEERLLKQTMLTGSYKEKLQSLFLKYDALWQHWENQVGHRRIKPHHIATGTVNPRPQKQYPINPKAKASIQTVINDLLKQGVLIQQNSIMNTPVYPVPKPDGKWRMVLDYREVNKTIPLIAAQNQHSAGILSSIFRGKYKTTLDLSNGFWAHSITPESYWLTAFTWLGQQYCWTRLPQGFLNSPALFNADVVDLLKEVPNVQVYVDDIYISHDDPREHLEQLEKVFSLLLNAGYVVSLKKSEIAQHEVEFLGFNITKEGRGLTETFKQKLLNITPPRDLKQLQSILGKLNFARNFIPNFSELVKPLYNIIATAPGKYITWTTDNSQQLQNIISMLNSAENLEERNPEVRLIMKVNTSPSAGYIRFYNEFAKRPIMYLNYVYTKAEVKFTNTEKLLTTIHKGLIKALDLGMGQEILVYSPIVSMTKIQKTPLPERKALPIRWITWMSYLEDPRIQFHYDKTLPELQQVPTVTDDIIAKIKHPSEFSMVFYTDGSAIKHPNVNKSHNAGMGIAQVQFKPEFTVINTWSIPLGDHTAQLAEVAAVEFACKKALKIDGPVLIVTDSFYVAESVNKELPYWQSNGFFNNKKKPLKHVSKWKSIADCIQLKPDIIIIHEKGHQPTASTFHTEGNNLADKLATQGSYVVNAGKRTADGSEFEKRTADGSEFESPKKKAKVE

SEQ ID NO: 678 - protein, 2174 aa, synthetic construct
MPAAKRVKLDGGDKKYSIGLDIGTNSVGWAVITDEYKVPSKKFKVLGNTDRHSIKKNLIGALLFDSGETAEATRLKRTARRRYTRRKNRICYLQEIFSNEMAKVDDSFFHRLEESFLVEEDKKHERHPIFGNIVDEVAYHEKYPTIYHLRKKLVDSTDKADLRLIYLALAHMIKFRGHFLIEGDLNPDNSDVDKLFIQLVQTYNQLFEENPINASGVDAKAILSARLSKSRRLENLIAQLPGEKKNGLFGNLIALSLGLTPNFKSNFDLAEDAKLQLSKDTYDDDLDNLLAQIGDQYADLFLAAKNLSDAILLSDILRVNTEITKAPLSASMIKRYDEHHQDLTLLKALVRQQLPEKYKEIFFDQSKNGYAGYIDGGASQEEFYKFIKPILEKMDGTEELLVKLNREDLLRKQRTFDNGSIPHQIHLGELHAILRRQEDFYPFLKDNREKIEKILTFRIPYYVGPLARGNSRFAWMTRKSEETITPWNFEEVVDKGASAQSFIERMTNFDKNLPNEKVLPKHSLLYEYFTVYNELTKVKYVTEGMRKPAFLSGEQKKAIVDLLFKTNRKVTVKQLKEDYFKKIECFDSVEISGVEDRFNASLGTYHDLLKIIKDKDFLDNEENEDILEDIVLTLTLFEDREMIEERLKTYAHLFDDKVMKQLKRRRYTGWGRLSRKLINGIRDKQSGKTILDFLKSDGFANRNFMQLIHDDSLTFKEDIQKAQVSGQGDSLHEHIANLAGSPAIKKGILQTVKVVDELVKVMGRHKPENIVIEMARENQTTQKGQKNSRERMKRIEEGIKELGSQILKEHPVENTQLQNEKLYLYYLQNGRDMYVDQELDINRLSDYDVDHIVPQSFLKDDSIDNKVLTRSDKARGKSDNVPSEEVVKKMKNYWRQLLNAKLITQRKFDNLTKAERGGLSELDKAGFIKRQLVETRQITKHVAQILDSRMNTKYDENDKLIREVKVITLKSKLVSDFRKDFQFYKVREINNYHHAHDAYLNAVVGTALIKKYPKLESEFVYGDYKVYDVRKMIAKSEQEIGKATAKYFFYSNIMNFFKTEITLANGEIRKRPLIETNGETGEIVWDKGRDFATVRKVLSMPQVNIVKKTEVQTGGFSKESILPKRNSDKLIARKKDWDPKKYGGFDSPTVAYSVLVVAKVEKGKSKKLKSVKELLGITIMERSSFEKNPIDFLEAKGYKEVKKDLIIKLPKYSLFELENGRKRMLASAGELQKGNELALPSKYVNFLYLASHYEKLKGSPEDNEQKQLFVEQHKHYLDEIIEQISEFSKRVILADANLDKVLSAYNKHRDKPIREQAENIIHLFTLTNLGAPAAFKYFDTTIDRKRYTSTKEVLDATLIHQSITGLYETRIDLSQLGGDGGGGGPAPGGSGGMDPLQLLQPLEAEIKGTKLKAHWNSGATITCVPQAFLEEEVPIKNIWIKTIHGEKEQPVYYLTFKIQGRKVEAEVISSPYDYILVSPSDIPWLMKKPLQLTTLVPLQEYEERLLKQTMLTGSYKEKLQSLFLKYDALWQHWENQVGHRRIKPHHIATGTVNPRPQKQYPINPKAKASIQTVINDLLKQGVLIQQNSIMNTPVYPVPKPDGKWRMVLDYREVNKTIPLIAAQNQHSAGILSSIFRGKYKTTLDLSNGFWAHSITPESYWLTAFTWLGQQYCWTRLPQGFLNSPALFNADVVDLLKEVPNVQVYVDDIYISHDDPREHLEQLEKVFSLLLNAGYVVSLKKSEIAQHEVEFLGFNITKEGRGLTETFKQKLLNITPPRDLKQLQSILGKLNFARNFIPNFSELVKPLYNIIATAPGKYITWTTDNSQQLQNIISMLNSAENLEERNPEVRLIMKVNTSPSAGYIRFYNEFAKRPIMYLNYVYTKAEVKFTNTEKLLTTIHKGLIKALDLGMGQEILVYSPIVSMTKIQKTPLPERKALPIRWITWMSYLEDPRIQFHYDKTLPELQQVPTVTDDIIAKIKHPSEFSMVFYTDGSAIKHPNVNKSHNAGMGIAQVQFKPEFTVINTWSIPLGDHTAQLAEVAAVEFACKKALKIDGPVLIVTDSFYVAESVNKELPYWQSNGFFNNKKKPLKHVSKWKSIADCIQLKPDIIIIHEKGHQPTASTFHTEGNNLADKLATQGSYVVNAGKRTADGSEFEKRTADGSEFESPKKKAKVE

SEQ ID NO: 679 - protein, 2176 aa, synthetic construct
MPAAKRVKLDGGDKKYSIGLDIGTNSVGWAVITDEYKVPSKKFKVLGNTDRHSIKKNLIGALLFDSGETAEATRLKRTARRRYTRRKNRICYLQEIFSNEMAKVDDSFFHRLEESFLVEEDKKHERHPIFGNIVDEVAYHEKYPTIYHLRKKLVDSTDKADLRLIYLALAHMIKFRGHFLIEGDLNPDNSDVDKLFIQLVQTYNQLFEENPINASGVDAKAILSARLSKSRRLENLIAQLPGEKKNGLFGNLIALSLGLTPNFKSNFDLAEDAKLQLSKDTYDDDLDNLLAQIGDQYADLFLAAKNLSDAILLSDILRVNTEITKAPLSASMIKRYDEHHQDLTLLKALVRQQLPEKYKEIFFDQSKNGYAGYIDGGASQEEFYKFIKPILEKMDGTEELLVKLNREDLLRKQRTFDNGSIPHQIHLGELHAILRRQEDFYPFLKDNREKIEKILTFRIPYYVGPLARGNSRFAWMTRKSEETITPWNFEEVVDKGASAQSFIERMTNFDKNLPNEKVLPKHSLLYEYFTVYNELTKVKYVTEGMRKPAFLSGEQKKAIVDLLFKTNRKVTVKQLKEDYFKKIECFDSVEISGVEDRFNASLGTYHDLLKIIKDKDFLDNEENEDILEDIVLTLTLFEDREMIEERLKTYAHLFDDKVMKQLKRRRYTGWGRLSRKLINGIRDKQSGKTILDFLKSDGFANRNFMQLIHDDSLTFKEDIQKAQVSGQGDSLHEHIANLAGSPAIKKGILQTVKVVDELVKVMGRHKPENIVIEMARENQTTQKGQKNSRERMKRIEEGIKELGSQILKEHPVENTQLQNEKLYLYYLQNGRDMYVDQELDINRLSDYDVDHIVPQSFLKDDSIDNKVLTRSDKARGKSDNVPSEEVVKKMKNYWRQLLNAKLITQRKFDNLTKAERGGLSELDKAGFIKRQLVETRQITKHVAQILDSRMNTKYDENDKLIREVKVITLKSKLVSDFRKDFQFYKVREINNYHHAHDAYLNAVVGTALIKKYPKLESEFVYGDYKVYDVRKMIAKSEQEIGKATAKYFFYSNIMNFFKTEITLANGEIRKRPLIETNGETGEIVWDKGRDFATVRKVLSMPQVNIVKKTEVQTGGFSKESILPKRNSDKLIARKKDWDPKKYGGFDSPTVAYSVLVVAKVEKGKSKKLKSVKELLGITIMERSSFEKNPIDFLEAKGYKEVKKDLIIKLPKYSLFELENGRKRMLASAGELQKGNELALPSKYVNFLYLASHYEKLKGSPEDNEQKQLFVEQHKHYLDEIIEQISEFSKRVILADANLDKVLSAYNKHRDKPIREQAENIIHLFTLTNLGAPAAFKYFDTTIDRKRYTSTKEVLDATLIHQSITGLYETRIDLSQLGGDGGGGSGSSEAAAKGGMDPLQLLQPLEAEIKGTKLKAHWNSGATITCVPQAFLEEEVPIKNIWIKTIHGEKEQPVYYLTFKIQGRKVEAEVISSPYDYILVSPSDIPWLMKKPLQLTTLVPLQEYEERLLKQTMLTGSYKEKLQSLFLKYDALWQHWENQVGHRRIKPHHIATGTVNPRPQKQYPINPKAKASIQTVINDLLKQGVLIQQNSIMNTPVYPVPKPDGKWRMVLDYREVNKTIPLIAAQNQHSAGILSSIFRGKYKTTLDLSNGFWAHSITPESYWLTAFTWLGQQYCWTRLPQGFLNSPALFNADVVDLLKEVPNVQVYVDDIYISHDDPREHLEQLEKVFSLLLNAGYVVSLKKSEIAQHEVEFLGFNITKEGRGLTETFKQKLLNITPPRDLKQLQSILGKLNFARNFIPNFSELVKPLYNIIATAPGKYITWTTDNSQQLQNIISMLNSAENLEERNPEVRLIMKVNTSPSAGYIRFYNEFAKRPIMYLNYVYTKAEVKFTNTEKLLTTIHKGLIKALDLGMGQEILVYSPIVSMTKIQKTPLPERKALPIRWITWMSYLEDPRIQFHYDKTLPELQQVPTVTDDIIAKIKHPSEFSMVFYTDGSAIKHPNVNKSHNAGMGIAQVQFKPEFTVINTWSIPLGDHTAQLAEVAAVEFACKKALKIDGPVLIVTDSFYVAESVNKELPYWQSNGFFNNKKKPLKHVSKWKSIADCIQLKPDIIIIHEKGHQPTASTFHTEGNNLADKLATQGSYVVNAGKRTADGSEFEKRTADGSEFESPKKKAKVE

SEQ ID NO: 680 - protein, 2176 aa, synthetic construct
MPAAKRVKLDGGDKKYSIGLDIGTNSVGWAVITDEYKVPSKKFKVLGNTDRHSIKKNLIGALLFDSGETAEATRLKRTARRRYTRRKNRICYLQEIFSNEMAKVDDSFFHRLEESFLVEEDKKHERHPIFGNIVDEVAYHEKYPTIYHLRKKLVDSTDKADLRLIYLALAHMIKFRGHFLIEGDLNPDNSDVDKLFIQLVQTYNQLFEENPINASGVDAKAILSARLSKSRRLENLIAQLPGEKKNGLFGNLIALSLGLTPNFKSNFDLAEDAKLQLSKDTYDDDLDNLLAQIGDQYADLFLAAKNLSDAILLSDILRVNTEITKAPLSASMIKRYDEHHQDLTLLKALVRQQLPEKYKEIFFDQSKNGYAGYIDGGASQEEFYKFIKPILEKMDGTEELLVKLNREDLLRKQRTFDNGSIPHQIHLGELHAILRRQEDFYPFLKDNREKIEKILTFRIPYYVGPLARGNSRFAWMTRKSEETITPWNFEEVVDKGASAQSFIERMTNFDKNLPNEKVLPKHSLLYEYFTVYNELTKVKYVTEGMRKPAFLSGEQKKAIVDLLFKTNRKVTVKQLKEDYFKKIECFDSVEISGVEDRFNASLGTYHDLLKIIKDKDFLDNEENEDILEDIVLTLTLFEDREMIEERLKTYAHLFDDKVMKQLKRRRYTGWGRLSRKLINGIRDKQSGKTILDFLKSDGFANRNFMQLIHDDSLTFKEDIQKAQVSGQGDSLHEHIANLAGSPAIKKGILQTVKVVDELVKVMGRHKPENIVIEMARENQTTQKGQKNSRERMKRIEEGIKELGSQILKEHPVENTQLQNEKLYLYYLQNGRDMYVDQELDINRLSDYDVDHIVPQSFLKDDSIDNKVLTRSDKARGKSDNVPSEEVVKKMKNYWRQLLNAKLITQRKFDNLTKAERGGLSELDKAGFIKRQLVETRQITKHVAQILDSRMNTKYDENDKLIREVKVITLKSKLVSDFRKDFQFYKVREINNYHHAHDAYLNAVVGTALIKKYPKLESEFVYGDYKVYDVRKMIAKSEQEIGKATAKYFFYSNIMNFFKTEITLANGEIRKRPLIETNGETGEIVWDKGRDFATVRKVLSMPQVNIVKKTEVQTGGFSKESILPKRNSDKLIARKKDWDPKKYGGFDSPTVAYSVLVVAKVEKGKSKKLKSVKELLGITIMERSSFEKNPIDFLEAKGYKEVKKDLIIKLPKYSLFELENGRKRMLASAGELQKGNELALPSKYVNFLYLASHYEKLKGSPEDNEQKQLFVEQHKHYLDEIIEQISEFSKRVILADANLDKVLSAYNKHRDKPIREQAENIIHLFTLTNLGAPAAFKYFDTTIDRKRYTSTKEVLDATLIHQSITGLYETRIDLSQLGGDGGEAAAKGGSPAPGGMDPLQLLQPLEAEIKGTKLKAHWNSGATITCVPQAFLEEEVPIKNIWIKTIHGEKEQPVYYLTFKIQGRKVEAEVISSPYDYILVSPSDIPWLMKKPLQLTTLVPLQEYEERLLKQTMLTGSYKEKLQSLFLKYDALWQHWENQVGHRRIKPHHIATGTVNPRPQKQYPINPKAKASIQTVINDLLKQGVLIQQNSIMNTPVYPVPKPDGKWRMVLDYREVNKTIPLIAAQNQHSAGILSSIFRGKYKTTLDLSNGFWAHSITPESYWLTAFTWLGQQYCWTRLPQGFLNSPALFNADVVDLLKEVPNVQVYVDDIYISHDDPREHLEQLEKVFSLLLNAGYVVSLKKSEIAQHEVEFLGFNITKEGRGLTETFKQKLLNITPPRDLKQLQSILGKLNFARNFIPNFSELVKPLYNIIATAPGKYITWTTDNSQQLQNIISMLNSAENLEERNPEVRLIMKVNTSPSAGYIRFYNEFAKRPIMYLNYVYTKAEVKFTNTEKLLTTIHKGLIKALDLGMGQEILVYSPIVSMTKIQKTPLPERKALPIRWITWMSYLEDPRIQFHYDKTLPELQQVPTVTDDIIAKIKHPSEFSMVFYTDGSAIKHPNVNKSHNAGMGIAQVQFKPEFTVINTWSIPLGDHTAQLAEVAAVEFACKKALKIDGPVLIVTDSFYVAESVNKELPYWQSNGFFNNKKKPLKHVSKWKSIADCIQLKPDIIIIHEKGHQPTASTFHTEGNNLADKLATQGSYVVNAGKRTADGSEFEKRTADGSEFESPKKKAKVE

SEQ ID NO: 681 - protein, 2175 aa, synthetic construct
MPAAKRVKLDGGDKKYSIGLDIGTNSVGWAVITDEYKVPSKKFKVLGNTDRHSIKKNLIGALLFDSGETAEATRLKRTARRRYTRRKNRICYLQEIFSNEMAKVDDSFFHRLEESFLVEEDKKHERHPIFGNIVDEVAYHEKYPTIYHLRKKLVDSTDKADLRLIYLALAHMIKFRGHFLIEGDLNPDNSDVDKLFIQLVQTYNQLFEENPINASGVDAKAILSARLSKSRRLENLIAQLPGEKKNGLFGNLIALSLGLTPNFKSNFDLAEDAKLQLSKDTYDDDLDNLLAQIGDQYADLFLAAKNLSDAILLSDILRVNTEITKAPLSASMIKRYDEHHQDLTLLKALVRQQLPEKYKEIFFDQSKNGYAGYIDGGASQEEFYKFIKPILEKMDGTEELLVKLNREDLLRKQRTFDNGSIPHQIHLGELHAILRRQEDFYPFLKDNREKIEKILTFRIPYYVGPLARGNSRFAWMTRKSEETITPWNFEEVVDKGASAQSFIERMTNFDKNLPNEKVLPKHSLLYEYFTVYNELTKVKYVTEGMRKPAFLSGEQKKAIVDLLFKTNRKVTVKQLKEDYFKKIECFDSVEISGVEDRFNASLGTYHDLLKIIKDKDFLDNEENEDILEDIVLTLTLFEDREMIEERLKTYAHLFDDKVMKQLKRRRYTGWGRLSRKLINGIRDKQSGKTILDFLKSDGFANRNFMQLIHDDSLTFKEDIQKAQVSGQGDSLHEHIANLAGSPAIKKGILQTVKVVDELVKVMGRHKPENIVIEMARENQTTQKGQKNSRERMKRIEEGIKELGSQILKEHPVENTQLQNEKLYLYYLQNGRDMYVDQELDINRLSDYDVDHIVPQSFLKDDSIDNKVLTRSDKARGKSDNVPSEEVVKKMKNYWRQLLNAKLITQRKFDNLTKAERGGLSELDKAGFIKRQLVETRQITKHVAQILDSRMNTKYDENDKLIREVKVITLKSKLVSDFRKDFQFYKVREINNYHHAHDAYLNAVVGTALIKKYPKLESEFVYGDYKVYDVRKMIAKSEQEIGKATAKYFFYSNIMNFFKTEITLANGEIRKRPLIETNGETGEIVWDKGRDFATVRKVLSMPQVNIVKKTEVQTGGFSKESILPKRNSDKLIARKKDWDPKKYGGFDSPTVAYSVLVVAKVEKGKSKKLKSVKELLGITIMERSSFEKNPIDFLEAKGYKEVKKDLIIKLPKYSLFELENGRKRMLASAGELQKGNELALPSKYVNFLYLASHYEKLKGSPEDNEQKQLFVEQHKHYLDEIIEQISEFSKRVILADANLDKVLSAYNKHRDKPIREQAENIIHLFTLTNLGAPAAFKYFDTTIDRKRYTSTKEVLDATLIHQSITGLYETRIDLSQLGGDGGGGGGSGGGGSGGMDPLQLLQPLEAEIKGTKLKAHWNSGATITCVPQAFLEEEVPIKNIWIKTIHGEKEQPVYYLTFKIQGRKVEAEVISSPYDYILVSPSDIPWLMKKPLQLTTLVPLQEYEERLLKQTMLTGSYKEKLQSLFLKYDALWQHWENQVGHRRIKPHHIATGTVNPRPQKQYPINPKAKASIQTVINDLLKQGVLIQQNSIMNTPVYPVPKPDGKWRMVLDYREVNKTIPLIAAQNQHSAGILSSIFRGKYKTTLDLSNGFWAHSITPESYWLTAFTWLGQQYCWTRLPQGFLNSPALFNADVVDLLKEVPNVQVYVDDIYISHDDPREHLEQLEKVFSLLLNAGYVVSLKKSEIAQHEVEFLGFNITKEGRGLTETFKQKLLNITPPRDLKQLQSILGKLNFARNFIPNFSELVKPLYNIIATAPGKYITWTTDNSQQLQNIISMLNSAENLEERNPEVRLIMKVNTSPSAGYIRFYNEFAKRPIMYLNYVYTKAEVKFTNTEKLLTTIHKGLIKALDLGMGQEILVYSPIVSMTKIQKTPLPERKALPIRWITWMSYLEDPRIQFHYDKTLPELQQVPTVTDDIIAKIKHPSEFSMVFYTDGSAIKHPNVNKSHNAGMGIAQVQFKPEFTVINTWSIPLGDHTAQLAEVAAVEFACKKALKIDGPVLIVTDSFYVAESVNKELPYWQSNGFFNNKKKPLKHVSKWKSIADCIQLKPDIIIIHEKGHQPTASTFHTEGNNLADKLATQGSYVVNAGKRTADGSEFEKRTADGSEFESPKKKAKVE

SEQ ID NO: 682 - protein, 2171 aa, synthetic construct
MPAAKRVKLDGGDKKYSIGLDIGTNSVGWAVITDEYKVPSKKFKVLGNTDRHSIKKNLIGALLFDSGETAEATRLKRTARRRYTRRKNRICYLQEIFSNEMAKVDDSFFHRLEESFLVEEDKKHERHPIFGNIVDEVAYHEKYPTIYHLRKKLVDSTDKADLRLIYLALAHMIKFRGHFLIEGDLNPDNSDVDKLFIQLVQTYNQLFEENPINASGVDAKAILSARLSKSRRLENLIAQLPGEKKNGLFGNLIALSLGLTPNFKSNFDLAEDAKLQLSKDTYDDDLDNLLAQIGDQYADLFLAAKNLSDAILLSDILRVNTEITKAPLSASMIKRYDEHHQDLTLLKALVRQQLPEKYKEIFFDQSKNGYAGYIDGGASQEEFYKFIKPILEKMDGTEELLVKLNREDLLRKQRTFDNGSIPHQIHLGELHAILRRQEDFYPFLKDNREKIEKILTFRIPYYVGPLARGNSRFAWMTRKSEETITPWNFEEVVDKGASAQSFIERMTNFDKNLPNEKVLPKHSLLYEYFTVYNELTKVKYVTEGMRKPAFLSGEQKKAIVDLLFKTNRKVTVKQLKEDYFKKIECFDSVEISGVEDRFNASLGTYHDLLKIIKDKDFLDNEENEDILEDIVLTLTLFEDREMIEERLKTYAHLFDDKVMKQLKRRRYTGWGRLSRKLINGIRDKQSGKTILDFLKSDGFANRNFMQLIHDDSLTFKEDIQKAQVSGQGDSLHEHIANLAGSPAIKKGILQTVKVVDELVKVMGRHKPENIVIEMARENQTTQKGQKNSRERMKRIEEGIKELGSQILKEHPVENTQLQNEKLYLYYLQNGRDMYVDQELDINRLSDYDVDHIVPQSFLKDDSIDNKVLTRSDKARGKSDNVPSEEVVKKMKNYWRQLLNAKLITQRKFDNLTKAERGGLSELDKAGFIKRQLVETRQITKHVAQILDSRMNTKYDENDKLIREVKVITLKSKLVSDFRKDFQFYKVREINNYHHAHDAYLNAVVGTALIKKYPKLESEFVYGDYKVYDVRKMIAKSEQEIGKATAKYFFYSNIMNFFKTEITLANGEIRKRPLIETNGETGEIVWDKGRDFATVRKVLSMPQVNIVKKTEVQTGGFSKESILPKRNSDKLIARKKDWDPKKYGGFDSPTVAYSVLVVAKVEKGKSKKLKSVKELLGITIMERSSFEKNPIDFLEAKGYKEVKKDLIIKLPKYSLFELENGRKRMLASAGELQKGNELALPSKYVNFLYLASHYEKLKGSPEDNEQKQLFVEQHKHYLDEIIEQISEFSKRVILADANLDKVLSAYNKHRDKPIREQAENIIHLFTLTNLGAPAAFKYFDTTIDRKRYTSTKEVLDATLIHQSITGLYETRIDLSQLGGDGGGGSGGSGGMDPLQLLQPLEAEIKGTKLKAHWNSGATITCVPQAFLEEEVPIKNIWIKTIHGEKEQPVYYLTFKIQGRKVEAEVISSPYDYILVSPSDIPWLMKKPLQLTTLVPLQEYEERLLKQTMLTGSYKEKLQSLFLKYDALWQHWENQVGHRRIKPHHIATGTVNPRPQKQYPINPKAKASIQTVINDLLKQGVLIQQNSIMNTPVYPVPKPDGKWRMVLDYREVNKTIPLIAAQNQHSAGILSSIFRGKYKTTLDLSNGFWAHSITPESYWLTAFTWLGQQYCWTRLPQGFLNSPALFNADVVDLLKEVPNVQVYVDDIYISHDDPREHLEQLEKVFSLLLNAGYVVSLKKSEIAQHEVEFLGFNITKEGRGLTETFKQKLLNITPPRDLKQLQSILGKLNFARNFIPNFSELVKPLYNIIATAPGKYITWTTDNSQQLQNIISMLNSAENLEERNPEVRLIMKVNTSPSAGYIRFYNEFAKRPIMYLNYVYTKAEVKFTNTEKLLTTIHKGLIKALDLGMGQEILVYSPIVSMTKIQKTPLPERKALPIRWITWMSYLEDPRIQFHYDKTLPELQQVPTVTDDIIAKIKHPSEFSMVFYTDGSAIKHPNVNKSHNAGMGIAQVQFKPEFTVINTWSIPLGDHTAQLAEVAAVEFACKKALKIDGPVLIVTDSFYVAESVNKELPYWQSNGFFNNKKKPLKHVSKWKSIADCIQLKPDIIIIHEKGHQPTASTFHTEGNNLADKLATQGSYVVNAGKRTADGSEFEKRTADGSEFESPKKKAKVE

SEQ ID NO: 683 - protein, 2174 aa, synthetic construct
MPAAKRVKLDGGDKKYSIGLDIGTNSVGWAVITDEYKVPSKKFKVLGNTDRHSIKKNLIGALLFDSGETAEATRLKRTARRRYTRRKNRICYLQEIFSNEMAKVDDSFFHRLEESFLVEEDKKHERHPIFGNIVDEVAYHEKYPTIYHLRKKLVDSTDKADLRLIYLALAHMIKFRGHFLIEGDLNPDNSDVDKLFIQLVQTYNQLFEENPINASGVDAKAILSARLSKSRRLENLIAQLPGEKKNGLFGNLIALSLGLTPNFKSNFDLAEDAKLQLSKDTYDDDLDNLLAQIGDQYADLFLAAKNLSDAILLSDILRVNTEITKAPLSASMIKRYDEHHQDLTLLKALVRQQLPEKYKEIFFDQSKNGYAGYIDGGASQEEFYKFIKPILEKMDGTEELLVKLNREDLLRKQRTFDNGSIPHQIHLGELHAILRRQEDFYPFLKDNREKIEKILTFRIPYYVGPLARGNSRFAWMTRKSEETITPWNFEEVVDKGASAQSFIERMTNFDKNLPNEKVLPKHSLLYEYFTVYNELTKVKYVTEGMRKPAFLSGEQKKAIVDLLFKTNRKVTVKQLKEDYFKKIECFDSVEISGVEDRFNASLGTYHDLLKIIKDKDFLDNEENEDILEDIVLTLTLFEDREMIEERLKTYAHLFDDKVMKQLKRRRYTGWGRLSRKLINGIRDKQSGKTILDFLKSDGFANRNFMQLIHDDSLTFKEDIQKAQVSGQGDSLHEHIANLAGSPAIKKGILQTVKVVDELVKVMGRHKPENIVIEMARENQTTQKGQKNSRERMKRIEEGIKELGSQILKEHPVENTQLQNEKLYLYYLQNGRDMYVDQELDINRLSDYDVDHIVPQSFLKDDSIDNKVLTRSDKARGKSDNVPSEEVVKKMKNYWRQLLNAKLITQRKFDNLTKAERGGLSELDKAGFIKRQLVETRQITKHVAQILDSRMNTKYDENDKLIREVKVITLKSKLVSDFRKDFQFYKVREINNYHHAHDAYLNAVVGTALIKKYPKLESEFVYGDYKVYDVRKMIAKSEQEIGKATAKYFFYSNIMNFFKTEITLANGEIRKRPLIETNGETGEIVWDKGRDFATVRKVLSMPQVNIVKKTEVQTGGFSKESILPKRNSDKLIARKKDWDPKKYGGFDSPTVAYSVLVVAKVEKGKSKKLKSVKELLGITIMERSSFEKNPIDFLEAKGYKEVKKDLIIKLPKYSLFELENGRKRMLASAGELQKGNELALPSKYVNFLYLASHYEKLKGSPEDNEQKQLFVEQHKHYLDEIIEQISEFSKRVILADANLDKVLSAYNKHRDKPIREQAENIIHLFTLTNLGAPAAFKYFDTTIDRKRYTSTKEVLDATLIHQSITGLYETRIDLSQLGGDGGGSSGGSPAPGGMDPLQLLQPLEAEIKGTKLKAHWNSGATITCVPQAFLEEEVPIKNIWIKTIHGEKEQPVYYLTFKIQGRKVEAEVISSPYDYILVSPSDIPWLMKKPLQLTTLVPLQEYEERLLKQTMLTGSYKEKLQSLFLKYDALWQHWENQVGHRRIKPHHIATGTVNPRPQKQYPINPKAKASIQTVINDLLKQGVLIQQNSIMNTPVYPVPKPDGKWRMVLDYREVNKTIPLIAAQNQHSAGILSSIFRGKYKTTLDLSNGFWAHSITPESYWLTAFTWLGQQYCWTRLPQGFLNSPALFNADVVDLLKEVPNVQVYVDDIYISHDDPREHLEQLEKVFSLLLNAGYVVSLKKSEIAQHEVEFLGFNITKEGRGLTETFKQKLLNITPPRDLKQLQSILGKLNFARNFIPNFSELVKPLYNIIATAPGKYITWTTDNSQQLQNIISMLNSAENLEERNPEVRLIMKVNTSPSAGYIRFYNEFAKRPIMYLNYVYTKAEVKFTNTEKLLTTIHKGLIKALDLGMGQEILVYSPIVSMTKIQKTPLPERKALPIRWITWMSYLEDPRIQFHYDKTLPELQQVPTVTDDIIAKIKHPSEFSMVFYTDGSAIKHPNVNKSHNAGMGIAQVQFKPEFTVINTWSIPLGDHTAQLAEVAAVEFACKKALKIDGPVLIVTDSFYVAESVNKELPYWQSNGFFNNKKKPLKHVSKWKSIADCIQLKPDIIIIHEKGHQPTASTFHTEGNNLADKLATQGSYVVNAGKRTADGSEFEKRTADGSEFESPKKKAKVE

SEQ ID NO: 684 - protein, 2176 aa, synthetic construct
MPAAKRVKLDGGDKKYSIGLDIGTNSVGWAVITDEYKVPSKKFKVLGNTDRHSIKKNLIGALLFDSGETAEATRLKRTARRRYTRRKNRICYLQEIFSNEMAKVDDSFFHRLEESFLVEEDKKHERHPIFGNIVDEVAYHEKYPTIYHLRKKLVDSTDKADLRLIYLALAHMIKFRGHFLIEGDLNPDNSDVDKLFIQLVQTYNQLFEENPINASGVDAKAILSARLSKSRRLENLIAQLPGEKKNGLFGNLIALSLGLTPNFKSNFDLAEDAKLQLSKDTYDDDLDNLLAQIGDQYADLFLAAKNLSDAILLSDILRVNTEITKAPLSASMIKRYDEHHQDLTLLKALVRQQLPEKYKEIFFDQSKNGYAGYIDGGASQEEFYKFIKPILEKMDGTEELLVKLNREDLLRKQRTFDNGSIPHQIHLGELHAILRRQEDFYPFLKDNREKIEKILTFRIPYYVGPLARGNSRFAWMTRKSEETITPWNFEEVVDKGASAQSFIERMTNFDKNLPNEKVLPKHSLLYEYFTVYNELTKVKYVTEGMRKPAFLSGEQKKAIVDLLFKTNRKVTVKQLKEDYFKKIECFDSVEISGVEDRFNASLGTYHDLLKIIKDKDFLDNEENEDILEDIVLTLTLFEDREMIEERLKTYAHLFDDKVMKQLKRRRYTGWGRLSRKLINGIRDKQSGKTILDFLKSDGFANRNFMQLIHDDSLTFKEDIQKAQVSGQGDSLHEHIANLAGSPAIKKGILQTVKVVDELVKVMGRHKPENIVIEMARENQTTQKGQKNSRERMKRIEEGIKELGSQILKEHPVENTQLQNEKLYLYYLQNGRDMYVDQELDINRLSDYDVDHIVPQSFLKDDSIDNKVLTRSDKARGKSDNVPSEEVVKKMKNYWRQLLNAKLITQRKFDNLTKAERGGLSELDKAGFIKRQLVETRQITKHVAQILDSRMNTKYDENDKLIREVKVITLKSKLVSDFRKDFQFYKVREINNYHHAHDAYLNAVVGTALIKKYPKLESEFVYGDYKVYDVRKMIAKSEQEIGKATAKYFFYSNIMNFFKTEITLANGEIRKRPLIETNGETGEIVWDKGRDFATVRKVLSMPQVNIVKKTEVQTGGFSKESILPKRNSDKLIARKKDWDPKKYGGFDSPTVAYSVLVVAKVEKGKSKKLKSVKELLGITIMERSSFEKNPIDFLEAKGYKEVKKDLIIKLPKYSLFELENGRKRMLASAGELQKGNELALPSKYVNFLYLASHYEKLKGSPEDNEQKQLFVEQHKHYLDEIIEQISEFSKRVILADANLDKVLSAYNKHRDKPIREQAENIIHLFTLTNLGAPAAFKYFDTTIDRKRYTSTKEVLDATLIHQSITGLYETRIDLSQLGGDGGGGSEAAAKGSSGGMDPLQLLQPLEAEIKGTKLKAHWNSGATITCVPQAFLEEEVPIKNIWIKTIHGEKEQPVYYLTFKIQGRKVEAEVISSPYDYILVSPSDIPWLMKKPLQLTTLVPLQEYEERLLKQTMLTGSYKEKLQSLFLKYDALWQHWENQVGHRRIKPHHIATGTVNPRPQKQYPINPKAKASIQTVINDLLKQGVLIQQNSIMNTPVYPVPKPDGKWRMVLDYREVNKTIPLIAAQNQHSAGILSSIFRGKYKTTLDLSNGFWAHSITPESYWLTAFTWLGQQYCWTRLPQGFLNSPALFNADVVDLLKEVPNVQVYVDDIYISHDDPREHLEQLEKVFSLLLNAGYVVSLKKSEIAQHEVEFLGFNITKEGRGLTETFKQKLLNITPPRDLKQLQSILGKLNFARNFIPNFSELVKPLYNIIATAPGKYITWTTDNSQQLQNIISMLNSAENLEERNPEVRLIMKVNTSPSAGYIRFYNEFAKRPIMYLNYVYTKAEVKFTNTEKLLTTIHKGLIKALDLGMGQEILVYSPIVSMTKIQKTPLPERKALPIRWITWMSYLEDPRIQFHYDKTLPELQQVPTVTDDIIAKIKHPSEFSMVFYTDGSAIKHPNVNKSHNAGMGIAQVQFKPEFTVINTWSIPLGDHTAQLAEVAAVEFACKKALKIDGPVLIVTDSFYVAESVNKELPYWQSNGFFNNKKKPLKHVSKWKSIADCIQLKPDIIIIHEKGHQPTASTFHTEGNNLADKLATQGSYVVNAGKRTADGSEFEKRTADGSEFESPKKKAKVE

SEQ ID NO: 685 - protein, 2176 aa, synthetic construct
MPAAKRVKLDGGDKKYSIGLDIGTNSVGWAVITDEYKVPSKKFKVLGNTDRHSIKKNLIGALLFDSGETAEATRLKRTARRRYTRRKNRICYLQEIFSNEMAKVDDSFFHRLEESFLVEEDKKHERHPIFGNIVDEVAYHEKYPTIYHLRKKLVDSTDKADLRLIYLALAHMIKFRGHFLIEGDLNPDNSDVDKLFIQLVQTYNQLFEENPINASGVDAKAILSARLSKSRRLENLIAQLPGEKKNGLFGNLIALSLGLTPNFKSNFDLAEDAKLQLSKDTYDDDLDNLLAQIGDQYADLFLAAKNLSDAILLSDILRVNTEITKAPLSASMIKRYDEHHQDLTLLKALVRQQLPEKYKEIFFDQSKNGYAGYIDGGASQEEFYKFIKPILEKMDGTEELLVKLNREDLLRKQRTFDNGSIPHQIHLGELHAILRRQEDFYPFLKDNREKIEKILTFRIPYYVGPLARGNSRFAWMTRKSEETITPWNFEEVVDKGASAQSFIERMTNFDKNLPNEKVLPKHSLLYEYFTVYNELTKVKYVTEGMRKPAFLSGEQKKAIVDLLFKTNRKVTVKQLKEDYFKKIECFDSVEISGVEDRFNASLGTYHDLLKIIKDKDFLDNEENEDILEDIVLTLTLFEDREMIEERLKTYAHLFDDKVMKQLKRRRYTGWGRLSRKLINGIRDKQSGKTILDFLKSDGFANRNFMQLIHDDSLTFKEDIQKAQVSGQGDSLHEHIANLAGSPAIKKGILQTVKVVDELVKVMGRHKPENIVIEMARENQTTQKGQKNSRERMKRIEEGIKELGSQILKEHPVENTQLQNEKLYLYYLQNGRDMYVDQELDINRLSDYDVDHIVPQSFLKDDSIDNKVLTRSDKARGKSDNVPSEEVVKKMKNYWRQLLNAKLITQRKFDNLTKAERGGLSELDKAGFIKRQLVETRQITKHVAQILDSRMNTKYDENDKLIREVKVITLKSKLVSDFRKDFQFYKVREINNYHHAHDAYLNAVVGTALIKKYPKLESEFVYGDYKVYDVRKMIAKSEQEIGKATAKYFFYSNIMNFFKTEITLANGEIRKRPLIETNGETGEIVWDKGRDFATVRKVLSMPQVNIVKKTEVQTGGFSKESILPKRNSDKLIARKKDWDPKKYGGFDSPTVAYSVLVVAKVEKGKSKKLKSVKELLGITIMERSSFEKNPIDFLEAKGYKEVKKDLIIKLPKYSLFELENGRKRMLASAGELQKGNELALPSKYVNFLYLASHYEKLKGSPEDNEQKQLFVEQHKHYLDEIIEQISEFSKRVILADANLDKVLSAYNKHRDKPIREQAENIIHLFTLTNLGAPAAFKYFDTTIDRKRYTSTKEVLDATLIHQSITGLYETRIDLSQLGGDGGGGGEAAAKGSSGGMDPLQLLQPLEAEIKGTKLKAHWNSGATITCVPQAFLEEEVPIKNIWIKTIHGEKEQPVYYLTFKIQGRKVEAEVISSPYDYILVSPSDIPWLMKKPLQLTTLVPLQEYEERLLKQTMLTGSYKEKLQSLFLKYDALWQHWENQVGHRRIKPHHIATGTVNPRPQKQYPINPKAKASIQTVINDLLKQGVLIQQNSIMNTPVYPVPKPDGKWRMVLDYREVNKTIPLIAAQNQHSAGILSSIFRGKYKTTLDLSNGFWAHSITPESYWLTAFTWLGQQYCWTRLPQGFLNSPALFNADVVDLLKEVPNVQVYVDDIYISHDDPREHLEQLEKVFSLLLNAGYVVSLKKSEIAQHEVEFLGFNITKEGRGLTETFKQKLLNITPPRDLKQLQSILGKLNFARNFIPNFSELVKPLYNIIATAPGKYITWTTDNSQQLQNIISMLNSAENLEERNPEVRLIMKVNTSPSAGYIRFYNEFAKRPIMYLNYVYTKAEVKFTNTEKLLTTIHKGLIKALDLGMGQEILVYSPIVSMTKIQKTPLPERKALPIRWITWMSYLEDPRIQFHYDKTLPELQQVPTVTDDIIAKIKHPSEFSMVFYTDGSAIKHPNVNKSHNAGMGIAQVQFKPEFTVINTWSIPLGDHTAQLAEVAAVEFACKKALKIDGPVLIVTDSFYVAESVNKELPYWQSNGFFNNKKKPLKHVSKWKSIADCIQLKPDIIIIHEKGHQPTASTFHTEGNNLADKLATQGSYVVNAGKRTADGSEFEKRTADGSEFESPKKKAKVE

SEQ ID NO: 686 - protein, 2176 aa, synthetic construct
MPAAKRVKLDGGDKKYSIGLDIGTNSVGWAVITDEYKVPSKKFKVLGNTDRHSIKKNLIGALLFDSGETAEATRLKRTARRRYTRRKNRICYLQEIFSNEMAKVDDSFFHRLEESFLVEEDKKHERHPIFGNIVDEVAYHEKYPTIYHLRKKLVDSTDKADLRLIYLALAHMIKFRGHFLIEGDLNPDNSDVDKLFIQLVQTYNQLFEENPINASGVDAKAILSARLSKSRRLENLIAQLPGEKKNGLFGNLIALSLGLTPNFKSNFDLAEDAKLQLSKDTYDDDLDNLLAQIGDQYADLFLAAKNLSDAILLSDILRVNTEITKAPLSASMIKRYDEHHQDLTLLKALVRQQLPEKYKEIFFDQSKNGYAGYIDGGASQEEFYKFIKPILEKMDGTEELLVKLNREDLLRKQRTFDNGSIPHQIHLGELHAILRRQEDFYPFLKDNREKIEKILTFRIPYYVGPLARGNSRFAWMTRKSEETITPWNFEEVVDKGASAQSFIERMTNFDKNLPNEKVLPKHSLLYEYFTVYNELTKVKYVTEGMRKPAFLSGEQKKAIVDLLFKTNRKVTVKQLKEDYFKKIECFDSVEISGVEDRFNASLGTYHDLLKIIKDKDFLDNEENEDILEDIVLTLTLFEDREMIEERLKTYAHLFDDKVMKQLKRRRYTGWGRLSRKLINGIRDKQSGKTILDFLKSDGFANRNFMQLIHDDSLTFKEDIQKAQVSGQGDSLHEHIANLAGSPAIKKGILQTVKVVDELVKVMGRHKPENIVIEMARENQTTQKGQKNSRERMKRIEEGIKELGSQILKEHPVENTQLQNEKLYLYYLQNGRDMYVDQELDINRLSDYDVDHIVPQSFLKDDSIDNKVLTRSDKARGKSDNVPSEEVVKKMKNYWRQLLNAKLITQRKFDNLTKAERGGLSELDKAGFIKRQLVETRQITKHVAQILDSRMNTKYDENDKLIREVKVITLKSKLVSDFRKDFQFYKVREINNYHHAHDAYLNAVVGTALIKKYPKLESEFVYGDYKVYDVRKMIAKSEQEIGKATAKYFFYSNIMNFFKTEITLANGEIRKRPLIETNGETGEIVWDKGRDFATVRKVLSMPQVNIVKKTEVQTGGFSKESILPKRNSDKLIARKKDWDPKKYGGFDSPTVAYSVLVVAKVEKGKSKKLKSVKELLGITIMERSSFEKNPIDFLEAKGYKEVKKDLIIKLPKYSLFELENGRKRMLASAGELQKGNELALPSKYVNFLYLASHYEKLKGSPEDNEQKQLFVEQHKHYLDEIIEQISEFSKRVILADANLDKVLSAYNKHRDKPIREQAENIIHLFTLTNLGAPAAFKYFDTTIDRKRYTSTKEVLDATLIHQSITGLYETRIDLSQLGGDGGEAAAKPAPGSSGGMDPLQLLQPLEAEIKGTKLKAHWNSGATITCVPQAFLEEEVPIKNIWIKTIHGEKEQPVYYLTFKIQGRKVEAEVISSPYDYILVSPSDIPWLMKKPLQLTTLVPLQEYEERLLKQTMLTGSYKEKLQSLFLKYDALWQHWENQVGHRRIKPHHIATGTVNPRPQKQYPINPKAKASIQTVINDLLKQGVLIQQNSIMNTPVYPVPKPDGKWRMVLDYREVNKTIPLIAAQNQHSAGILSSIFRGKYKTTLDLSNGFWAHSITPESYWLTAFTWLGQQYCWTRLPQGFLNSPALFNADVVDLLKEVPNVQVYVDDIYISHDDPREHLEQLEKVFSLLLNAGYVVSLKKSEIAQHEVEFLGFNITKEGRGLTETFKQKLLNITPPRDLKQLQSILGKLNFARNFIPNFSELVKPLYNIIATAPGKYITWTTDNSQQLQNIISMLNSAENLEERNPEVRLIMKVNTSPSAGYIRFYNEFAKRPIMYLNYVYTKAEVKFTNTEKLLTTIHKGLIKALDLGMGQEILVYSPIVSMTKIQKTPLPERKALPIRWITWMSYLEDPRIQFHYDKTLPELQQVPTVTDDIIAKIKHPSEFSMVFYTDGSAIKHPNVNKSHNAGMGIAQVQFKPEFTVINTWSIPLGDHTAQLAEVAAVEFACKKALKIDGPVLIVTDSFYVAESVNKELPYWQSNGFFNNKKKPLKHVSKWKSIADCIQLKPDIIIIHEKGHQPTASTFHTEGNNLADKLATQGSYVVNAGKRTADGSEFEKRTADGSEFESPKKKAKVE

SEQ ID NO: 687 - protein, 2174 aa, synthetic construct
MPAAKRVKLDGGDKKYSIGLDIGTNSVGWAVITDEYKVPSKKFKVLGNTDRHSIKKNLIGALLFDSGETAEATRLKRTARRRYTRRKNRICYLQEIFSNEMAKVDDSFFHRLEESFLVEEDKKHERHPIFGNIVDEVAYHEKYPTIYHLRKKLVDSTDKADLRLIYLALAHMIKFRGHFLIEGDLNPDNSDVDKLFIQLVQTYNQLFEENPINASGVDAKAILSARLSKSRRLENLIAQLPGEKKNGLFGNLIALSLGLTPNFKSNFDLAEDAKLQLSKDTYDDDLDNLLAQIGDQYADLFLAAKNLSDAILLSDILRVNTEITKAPLSASMIKRYDEHHQDLTLLKALVRQQLPEKYKEIFFDQSKNGYAGYIDGGASQEEFYKFIKPILEKMDGTEELLVKLNREDLLRKQRTFDNGSIPHQIHLGELHAILRRQEDFYPFLKDNREKIEKILTFRIPYYVGPLARGNSRFAWMTRKSEETITPWNFEEVVDKGASAQSFIERMTNFDKNLPNEKVLPKHSLLYEYFTVYNELTKVKYVTEGMRKPAFLSGEQKKAIVDLLFKTNRKVTVKQLKEDYFKKIECFDSVEISGVEDRFNASLGTYHDLLKIIKDKDFLDNEENEDILEDIVLTLTLFEDREMIEERLKTYAHLFDDKVMKQLKRRRYTGWGRLSRKLINGIRDKQSGKTILDFLKSDGFANRNFMQLIHDDSLTFKEDIQKAQVSGQGDSLHEHIANLAGSPAIKKGILQTVKVVDELVKVMGRHKPENIVIEMARENQTTQKGQKNSRERMKRIEEGIKELGSQILKEHPVENTQLQNEKLYLYYLQNGRDMYVDQELDINRLSDYDVDHIVPQSFLKDDSIDNKVLTRSDKARGKSDNVPSEEVVKKMKNYWRQLLNAKLITQRKFDNLTKAERGGLSELDKAGFIKRQLVETRQITKHVAQILDSRMNTKYDENDKLIREVKVITLKSKLVSDFRKDFQFYKVREINNYHHAHDAYLNAVVGTALIKKYPKLESEFVYGDYKVYDVRKMIAKSEQEIGKATAKYFFYSNIMNFFKTEITLANGEIRKRPLIETNGETGEIVWDKGRDFATVRKVLSMPQVNIVKKTEVQTGGFSKESILPKRNSDKLIARKKDWDPKKYGGFDSPTVAYSVLVVAKVEKGKSKKLKSVKELLGITIMERSSFEKNPIDFLEAKGYKEVKKDLIIKLPKYSLFELENGRKRMLASAGELQKGNELALPSKYVNFLYLASHYEKLKGSPEDNEQKQLFVEQHKHYLDEIIEQISEFSKRVILADANLDKVLSAYNKHRDKPIREQAENIIHLFTLTNLGAPAAFKYFDTTIDRKRYTSTKEVLDATLIHQSITGLYETRIDLSQLGGDGGGGGPAPGSSGGMDPLQLLQPLEAEIKGTKLKAHWNSGATITCVPQAFLEEEVPIKNIWIKTIHGEKEQPVYYLTFKIQGRKVEAEVISSPYDYILVSPSDIPWLMKKPLQLTTLVPLQEYEERLLKQTMLTGSYKEKLQSLFLKYDALWQHWENQVGHRRIKPHHIATGTVNPRPQKQYPINPKAKASIQTVINDLLKQGVLIQQNSIMNTPVYPVPKPDGKWRMVLDYREVNKTIPLIAAQNQHSAGILSSIFRGKYKTTLDLSNGFWAHSITPESYWLTAFTWLGQQYCWTRLPQGFLNSPALFNADVVDLLKEVPNVQVYVDDIYISHDDPREHLEQLEKVFSLLLNAGYVVSLKKSEIAQHEVEFLGFNITKEGRGLTETFKQKLLNITPPRDLKQLQSILGKLNFARNFIPNFSELVKPLYNIIATAPGKYITWTTDNSQQLQNIISMLNSAENLEERNPEVRLIMKVNTSPSAGYIRFYNEFAKRPIMYLNYVYTKAEVKFTNTEKLLTTIHKGLIKALDLGMGQEILVYSPIVSMTKIQKTPLPERKALPIRWITWMSYLEDPRIQFHYDKTLPELQQVPTVTDDIIAKIKHPSEFSMVFYTDGSAIKHPNVNKSHNAGMGIAQVQFKPEFTVINTWSIPLGDHTAQLAEVAAVEFACKKALKIDGPVLIVTDSFYVAESVNKELPYWQSNGFFNNKKKPLKHVSKWKSIADCIQLKPDIIIIHEKGHQPTASTFHTEGNNLADKLATQGSYVVNAGKRTADGSEFEKRTADGSEFESPKKKAKVE

SEQ ID NO: 688 - protein, 2173 aa, synthetic construct
MPAAKRVKLDGGDKKYSIGLDIGTNSVGWAVITDEYKVPSKKFKVLGNTDRHSIKKNLIGALLFDSGETAEATRLKRTARRRYTRRKNRICYLQEIFSNEMAKVDDSFFHRLEESFLVEEDKKHERHPIFGNIVDEVAYHEKYPTIYHLRKKLVDSTDKADLRLIYLALAHMIKFRGHFLIEGDLNPDNSDVDKLFIQLVQTYNQLFEENPINASGVDAKAILSARLSKSRRLENLIAQLPGEKKNGLFGNLIALSLGLTPNFKSNFDLAEDAKLQLSKDTYDDDLDNLLAQIGDQYADLFLAAKNLSDAILLSDILRVNTEITKAPLSASMIKRYDEHHQDLTLLKALVRQQLPEKYKEIFFDQSKNGYAGYIDGGASQEEFYKFIKPILEKMDGTEELLVKLNREDLLRKQRTFDNGSIPHQIHLGELHAILRRQEDFYPFLKDNREKIEKILTFRIPYYVGPLARGNSRFAWMTRKSEETITPWNFEEVVDKGASAQSFIERMTNFDKNLPNEKVLPKHSLLYEYFTVYNELTKVKYVTEGMRKPAFLSGEQKKAIVDLLFKTNRKVTVKQLKEDYFKKIECFDSVEISGVEDRFNASLGTYHDLLKIIKDKDFLDNEENEDILEDIVLTLTLFEDREMIEERLKTYAHLFDDKVMKQLKRRRYTGWGRLSRKLINGIRDKQSGKTILDFLKSDGFANRNFMQLIHDDSLTFKEDIQKAQVSGQGDSLHEHIANLAGSPAIKKGILQTVKVVDELVKVMGRHKPENIVIEMARENQTTQKGQKNSRERMKRIEEGIKELGSQILKEHPVENTQLQNEKLYLYYLQNGRDMYVDQELDINRLSDYDVDHIVPQSFLKDDSIDNKVLTRSDKARGKSDNVPSEEVVKKMKNYWRQLLNAKLITQRKFDNLTKAERGGLSELDKAGFIKRQLVETRQITKHVAQILDSRMNTKYDENDKLIREVKVITLKSKLVSDFRKDFQFYKVREINNYHHAHDAYLNAVVGTALIKKYPKLESEFVYGDYKVYDVRKMIAKSEQEIGKATAKYFFYSNIMNFFKTEITLANGEIRKRPLIETNGETGEIVWDKGRDFATVRKVLSMPQVNIVKKTEVQTGGFSKESILPKRNSDKLIARKKDWDPKKYGGFDSPTVAYSVLVVAKVEKGKSKKLKSVKELLGITIMERSSFEKNPIDFLEAKGYKEVKKDLIIKLPKYSLFELENGRKRMLASAGELQKGNELALPSKYVNFLYLASHYEKLKGSPEDNEQKQLFVEQHKHYLDEIIEQISEFSKRVILADANLDKVLSAYNKHRDKPIREQAENIIHLFTLTNLGAPAAFKYFDTTIDRKRYTSTKEVLDATLIHQSITGLYETRIDLSQLGGDGGEAAAKGSSGGMDPLQLLQPLEAEIKGTKLKAHWNSGATITCVPQAFLEEEVPIKNIWIKTIHGEKEQPVYYLTFKIQGRKVEAEVISSPYDYILVSPSDIPWLMKKPLQLTTLVPLQEYEERLLKQTMLTGSYKEKLQSLFLKYDALWQHWENQVGHRRIKPHHIATGTVNPRPQKQYPINPKAKASIQTVINDLLKQGVLIQQNSIMNTPVYPVPKPDGKWRMVLDYREVNKTIPLIAAQNQHSAGILSSIFRGKYKTTLDLSNGFWAHSITPESYWLTAFTWLGQQYCWTRLPQGFLNSPALFNADVVDLLKEVPNVQVYVDDIYISHDDPREHLEQLEKVFSLLLNAGYVVSLKKSEIAQHEVEFLGFNITKEGRGLTETFKQKLLNITPPRDLKQLQSILGKLNFARNFIPNFSELVKPLYNIIATAPGKYITWTTDNSQQLQNIISMLNSAENLEERNPEVRLIMKVNTSPSAGYIRFYNEFAKRPIMYLNYVYTKAEVKFTNTEKLLTTIHKGLIKALDLGMGQEILVYSPIVSMTKIQKTPLPERKALPIRWITWMSYLEDPRIQFHYDKTLPELQQVPTVTDDIIAKIKHPSEFSMVFYTDGSAIKHPNVNKSHNAGMGIAQVQFKPEFTVINTWSIPLGDHTAQLAEVAAVEFACKKALKIDGPVLIVTDSFYVAESVNKELPYWQSNGFFNNKKKPLKHVSKWKSIADCIQLKPDIIIIHEKGHQPTASTFHTEGNNLADKLATQGSYVVNAGKRTADGSEFEKRTADGSEFESPKKKAKVE

SEQ ID NO: 689 - protein, 2176 aa, synthetic construct
MPAAKRVKLDGGDKKYSIGLDIGTNSVGWAVITDEYKVPSKKFKVLGNTDRHSIKKNLIGALLFDSGETAEATRLKRTARRRYTRRKNRICYLQEIFSNEMAKVDDSFFHRLEESFLVEEDKKHERHPIFGNIVDEVAYHEKYPTIYHLRKKLVDSTDKADLRLIYLALAHMIKFRGHFLIEGDLNPDNSDVDKLFIQLVQTYNQLFEENPINASGVDAKAILSARLSKSRRLENLIAQLPGEKKNGLFGNLIALSLGLTPNFKSNFDLAEDAKLQLSKDTYDDDLDNLLAQIGDQYADLFLAAKNLSDAILLSDILRVNTEITKAPLSASMIKRYDEHHQDLTLLKALVRQQLPEKYKEIFFDQSKNGYAGYIDGGASQEEFYKFIKPILEKMDGTEELLVKLNREDLLRKQRTFDNGSIPHQIHLGELHAILRRQEDFYPFLKDNREKIEKILTFRIPYYVGPLARGNSRFAWMTRKSEETITPWNFEEVVDKGASAQSFIERMTNFDKNLPNEKVLPKHSLLYEYFTVYNELTKVKYVTEGMRKPAFLSGEQKKAIVDLLFKTNRKVTVKQLKEDYFKKIECFDSVEISGVEDRFNASLGTYHDLLKIIKDKDFLDNEENEDILEDIVLTLTLFEDREMIEERLKTYAHLFDDKVMKQLKRRRYTGWGRLSRKLINGIRDKQSGKTILDFLKSDGFANRNFMQLIHDDSLTFKEDIQKAQVSGQGDSLHEHIANLAGSPAIKKGILQTVKVVDELVKVMGRHKPENIVIEMARENQTTQKGQKNSRERMKRIEEGIKELGSQILKEHPVENTQLQNEKLYLYYLQNGRDMYVDQELDINRLSDYDVDHIVPQSFLKDDSIDNKVLTRSDKARGKSDNVPSEEVVKKMKNYWRQLLNAKLITQRKFDNLTKAERGGLSELDKAGFIKRQLVETRQITKHVAQILDSRMNTKYDENDKLIREVKVITLKSKLVSDFRKDFQFYKVREINNYHHAHDAYLNAVVGTALIKKYPKLESEFVYGDYKVYDVRKMIAKSEQEIGKATAKYFFYSNIMNFFKTEITLANGEIRKRPLIETNGETGEIVWDKGRDFATVRKVLSMPQVNIVKKTEVQTGGFSKESILPKRNSDKLIARKKDWDPKKYGGFDSPTVAYSVLVVAKVEKGKSKKLKSVKELLGITIMERSSFEKNPIDFLEAKGYKEVKKDLIIKLPKYSLFELENGRKRMLASAGELQKGNELALPSKYVNFLYLASHYEKLKGSPEDNEQKQLFVEQHKHYLDEIIEQISEFSKRVILADANLDKVLSAYNKHRDKPIREQAENIIHLFTLTNLGAPAAFKYFDTTIDRKRYTSTKEVLDATLIHQSITGLYETRIDLSQLGGDGGEAAAKPAPGGSGGMNPLQLLQPLPAEVKGTKLLAHWNSGATITCIPESFLEDEQPIKQTLIKTIHGEKQQNVYYLTFKVKGRKVEAEVIASPYEYILLSPTDVPWLTQQPLQLTILVPLQEYQDRILNKTALPEEQKQQLKALFTKYDNLWQHWENQVGHRKIRPHNIATGDYPPRPQKQYPINPKAKPSIQIVIDDLLKQGVLTPQNSTMNTPVYPVPKPDGRWRMVLDYREVNKTIPLTAAQNQHSAGILATIVRQKYKTTLDLANGFWAHPITPDSYWLTAFTWQGKQYCWTRLPQGFLNSPALFTADAVDLLKEVPNVQVYVDDIYLSHDNPHEHIQQLEKVFQILLQAGYVVSLKKSEIGQRTVEFLGFNITKEGRGLTDTFKTKLLNVTPPKDLKQLQSILGLLNFARNFIPNFAELVQTLYNLIASSKGKYIEWTEDNTKQLNKVIEALNTASNLEERLPDQRLVIKVNTSPSAGYVRYYNESGKKPIMYLNYVFSKAELKFSMLEKLLTTMHKALIKAMDLAMGQEILVYSPIVSMTKIQKTPLPERKALPIRWITWMTYLEDPRIQFHYDKTLPELKHIPDVYTSSIPPLKHPSQYEGVFCTDGSAIKSPDPTKSNNAGMGIVHAIYNPEYKILNQWSIPLGHHTAQMAEIAAVEFACKKALKVPGPVLVITDSFYVAESANKELPYWKSNGFVNNKKEPLKHISKWKSIAECLSIKPDITIQHEKGHQPINTSIHTEGNALADKLATQGSYVVNAGKRTADGSEFEKRTADGSEFESPKKKAKVE

SEQ ID NO: 690 - protein, 2176 aa, synthetic construct
MPAAKRVKLDGGDKKYSIGLDIGTNSVGWAVITDEYKVPSKKFKVLGNTDRHSIKKNLIGALLFDSGETAEATRLKRTARRRYTRRKNRICYLQEIFSNEMAKVDDSFFHRLEESFLVEEDKKHERHPIFGNIVDEVAYHEKYPTIYHLRKKLVDSTDKADLRLIYLALAHMIKFRGHFLIEGDLNPDNSDVDKLFIQLVQTYNQLFEENPINASGVDAKAILSARLSKSRRLENLIAQLPGEKKNGLFGNLIALSLGLTPNFKSNFDLAEDAKLQLSKDTYDDDLDNLLAQIGDQYADLFLAAKNLSDAILLSDILRVNTEITKAPLSASMIKRYDEHHQDLTLLKALVRQQLPEKYKEIFFDQSKNGYAGYIDGGASQEEFYKFIKPILEKMDGTEELLVKLNREDLLRKQRTFDNGSIPHQIHLGELHAILRRQEDFYPFLKDNREKIEKILTFRIPYYVGPLARGNSRFAWMTRKSEETITPWNFEEVVDKGASAQSFIERMTNFDKNLPNEKVLPKHSLLYEYFTVYNELTKVKYVTEGMRKPAFLSGEQKKAIVDLLFKTNRKVTVKQLKEDYFKKIECFDSVEISGVEDRFNASLGTYHDLLKIIKDKDFLDNEENEDILEDIVLTLTLFEDREMIEERLKTYAHLFDDKVMKQLKRRRYTGWGRLSRKLINGIRDKQSGKTILDFLKSDGFANRNFMQLIHDDSLTFKEDIQKAQVSGQGDSLHEHIANLAGSPAIKKGILQTVKVVDELVKVMGRHKPENIVIEMARENQTTQKGQKNSRERMKRIEEGIKELGSQILKEHPVENTQLQNEKLYLYYLQNGRDMYVDQELDINRLSDYDVDHIVPQSFLKDDSIDNKVLTRSDKARGKSDNVPSEEVVKKMKNYWRQLLNAKLITQRKFDNLTKAERGGLSELDKAGFIKRQLVETRQITKHVAQILDSRMNTKYDENDKLIREVKVITLKSKLVSDFRKDFQFYKVREINNYHHAHDAYLNAVVGTALIKKYPKLESEFVYGDYKVYDVRKMIAKSEQEIGKATAKYFFYSNIMNFFKTEITLANGEIRKRPLIETNGETGEIVWDKGRDFATVRKVLSMPQVNIVKKTEVQTGGFSKESILPKRNSDKLIARKKDWDPKKYGGFDSPTVAYSVLVVAKVEKGKSKKLKSVKELLGITIMERSSFEKNPIDFLEAKGYKEVKKDLIIKLPKYSLFELENGRKRMLASAGELQKGNELALPSKYVNFLYLASHYEKLKGSPEDNEQKQLFVEQHKHYLDEIIEQISEFSKRVILADANLDKVLSAYNKHRDKPIREQAENIIHLFTLTNLGAPAAFKYFDTTIDRKRYTSTKEVLDATLIHQSITGLYETRIDLSQLGGDGGGGSEAAAKPAPGGMNPLQLLQPLPAEVKGTKLLAHWNSGATITCIPESFLEDEQPIKQTLIKTIHGEKQQNVYYLTFKVKGRKVEAEVIASPYEYILLSPTDVPWLTQQPLQLTILVPLQEYQDRILNKTALPEEQKQQLKALFTKYDNLWQHWENQVGHRKIRPHNIATGDYPPRPQKQYPINPKAKPSIQIVIDDLLKQGVLTPQNSTMNTPVYPVPKPDGRWRMVLDYREVNKTIPLTAAQNQHSAGILATIVRQKYKTTLDLANGFWAHPITPDSYWLTAFTWQGKQYCWTRLPQGFLNSPALFTADAVDLLKEVPNVQVYVDDIYLSHDNPHEHIQQLEKVFQILLQAGYVVSLKKSEIGQRTVEFLGFNITKEGRGLTDTFKTKLLNVTPPKDLKQLQSILGLLNFARNFIPNFAELVQTLYNLIASSKGKYIEWTEDNTKQLNKVIEALNTASNLEERLPDQRLVIKVNTSPSAGYVRYYNESGKKPIMYLNYVFSKAELKFSMLEKLLTTMHKALIKAMDLAMGQEILVYSPIVSMTKIQKTPLPERKALPIRWITWMTYLEDPRIQFHYDKTLPELKHIPDVYTSSIPPLKHPSQYEGVFCTDGSAIKSPDPTKSNNAGMGIVHAIYNPEYKILNQWSIPLGHHTAQMAEIAAVEFACKKALKVPGPVLVITDSFYVAESANKELPYWKSNGFVNNKKEPLKHISKWKSIAECLSIKPDITIQHEKGHQPINTSIHTEGNALADKLATQGSYVVNAGKRTADGSEFEKRTADGSEFESPKKKAKVE

SEQ ID NO: 691 - protein, 2173 aa, synthetic construct
MPAAKRVKLDGGDKKYSIGLDIGTNSVGWAVITDEYKVPSKKFKVLGNTDRHSIKKNLIGALLFDSGETAEATRLKRTARRRYTRRKNRICYLQEIFSNEMAKVDDSFFHRLEESFLVEEDKKHERHPIFGNIVDEVAYHEKYPTIYHLRKKLVDSTDKADLRLIYLALAHMIKFRGHFLIEGDLNPDNSDVDKLFIQLVQTYNQLFEENPINASGVDAKAILSARLSKSRRLENLIAQLPGEKKNGLFGNLIALSLGLTPNFKSNFDLAEDAKLQLSKDTYDDDLDNLLAQIGDQYADLFLAAKNLSDAILLSDILRVNTEITKAPLSASMIKRYDEHHQDLTLLKALVRQQLPEKYKEIFFDQSKNGYAGYIDGGASQEEFYKFIKPILEKMDGTEELLVKLNREDLLRKQRTFDNGSIPHQIHLGELHAILRRQEDFYPFLKDNREKIEKILTFRIPYYVGPLARGNSRFAWMTRKSEETITPWNFEEVVDKGASAQSFIERMTNFDKNLPNEKVLPKHSLLYEYFTVYNELTKVKYVTEGMRKPAFLSGEQKKAIVDLLFKTNRKVTVKQLKEDYFKKIECFDSVEISGVEDRFNASLGTYHDLLKIIKDKDFLDNEENEDILEDIVLTLTLFEDREMIEERLKTYAHLFDDKVMKQLKRRRYTGWGRLSRKLINGIRDKQSGKTILDFLKSDGFANRNFMQLIHDDSLTFKEDIQKAQVSGQGDSLHEHIANLAGSPAIKKGILQTVKVVDELVKVMGRHKPENIVIEMARENQTTQKGQKNSRERMKRIEEGIKELGSQILKEHPVENTQLQNEKLYLYYLQNGRDMYVDQELDINRLSDYDVDHIVPQSFLKDDSIDNKVLTRSDKARGKSDNVPSEEVVKKMKNYWRQLLNAKLITQRKFDNLTKAERGGLSELDKAGFIKRQLVETRQITKHVAQILDSRMNTKYDENDKLIREVKVITLKSKLVSDFRKDFQFYKVREINNYHHAHDAYLNAVVGTALIKKYPKLESEFVYGDYKVYDVRKMIAKSEQEIGKATAKYFFYSNIMNFFKTEITLANGEIRKRPLIETNGETGEIVWDKGRDFATVRKVLSMPQVNIVKKTEVQTGGFSKESILPKRNSDKLIARKKDWDPKKYGGFDSPTVAYSVLVVAKVEKGKSKKLKSVKELLGITIMERSSFEKNPIDFLEAKGYKEVKKDLIIKLPKYSLFELENGRKRMLASAGELQKGNELALPSKYVNFLYLASHYEKLKGSPEDNEQKQLFVEQHKHYLDEIIEQISEFSKRVILADANLDKVLSAYNKHRDKPIREQAENIIHLFTLTNLGAPAAFKYFDTTIDRKRYTSTKEVLDATLIHQSITGLYETRIDLSQLGGDGGGSSEAAAKGGMNPLQLLQPLPAEVKGTKLLAHWNSGATITCIPESFLEDEQPIKQTLIKTIHGEKQQNVYYLTFKVKGRKVEAEVIASPYEYILLSPTDVPWLTQQPLQLTILVPLQEYQDRILNKTALPEEQKQQLKALFTKYDNLWQHWENQVGHRKIRPHNIATGDYPPRPQKQYPINPKAKPSIQIVIDDLLKQGVLTPQNSTMNTPVYPVPKPDGRWRMVLDYREVNKTIPLTAAQNQHSAGILATIVRQKYKTTLDLANGFWAHPITPDSYWLTAFTWQGKQYCWTRLPQGFLNSPALFTADAVDLLKEVPNVQVYVDDIYLSHDNPHEHIQQLEKVFQILLQAGYVVSLKKSEIGQRTVEFLGFNITKEGRGLTDTFKTKLLNVTPPKDLKQLQSILGLLNFARNFIPNFAELVQTLYNLIASSKGKYIEWTEDNTKQLNKVIEALNTASNLEERLPDQRLVIKVNTSPSAGYVRYYNESGKKPIMYLNYVFSKAELKFSMLEKLLTTMHKALIKAMDLAMGQEILVYSPIVSMTKIQKTPLPERKALPIRWITWMTYLEDPRIQFHYDKTLPELKHIPDVYTSSIPPLKHPSQYEGVFCTDGSAIKSPDPTKSNNAGMGIVHAIYNPEYKILNQWSIPLGHHTAQMAEIAAVEFACKKALKVPGPVLVITDSFYVAESANKELPYWKSNGFVNNKKEPLKHISKWKSIAECLSIKPDITIQHEKGHQPINTSIHTEGNALADKLATQGSYVVNAGKRTADGSEFEKRTADGSEFESPKKKAKVE

SEQ ID NO: 692 - protein, 2180 aa, synthetic construct
MPAAKRVKLDGGDKKYSIGLDIGTNSVGWAVITDEYKVPSKKFKVLGNTDRHSIKKNLIGALLFDSGETAEATRLKRTARRRYTRRKNRICYLQEIFSNEMAKVDDSFFHRLEESFLVEEDKKHERHPIFGNIVDEVAYHEKYPTIYHLRKKLVDSTDKADLRLIYLALAHMIKFRGHFLIEGDLNPDNSDVDKLFIQLVQTYNQLFEENPINASGVDAKAILSARLSKSRRLENLIAQLPGEKKNGLFGNLIALSLGLTPNFKSNFDLAEDAKLQLSKDTYDDDLDNLLAQIGDQYADLFLAAKNLSDAILLSDILRVNTEITKAPLSASMIKRYDEHHQDLTLLKALVRQQLPEKYKEIFFDQSKNGYAGYIDGGASQEEFYKFIKPILEKMDGTEELLVKLNREDLLRKQRTFDNGSIPHQIHLGELHAILRRQEDFYPFLKDNREKIEKILTFRIPYYVGPLARGNSRFAWMTRKSEETITPWNFEEVVDKGASAQSFIERMTNFDKNLPNEKVLPKHSLLYEYFTVYNELTKVKYVTEGMRKPAFLSGEQKKAIVDLLFKTNRKVTVKQLKEDYFKKIECFDSVEISGVEDRFNASLGTYHDLLKIIKDKDFLDNEENEDILEDIVLTLTLFEDREMIEERLKTYAHLFDDKVMKQLKRRRYTGWGRLSRKLINGIRDKQSGKTILDFLKSDGFANRNFMQLIHDDSLTFKEDIQKAQVSGQGDSLHEHIANLAGSPAIKKGILQTVKVVDELVKVMGRHKPENIVIEMARENQTTQKGQKNSRERMKRIEEGIKELGSQILKEHPVENTQLQNEKLYLYYLQNGRDMYVDQELDINRLSDYDVDHIVPQSFLKDDSIDNKVLTRSDKARGKSDNVPSEEVVKKMKNYWRQLLNAKLITQRKFDNLTKAERGGLSELDKAGFIKRQLVETRQITKHVAQILDSRMNTKYDENDKLIREVKVITLKSKLVSDFRKDFQFYKVREINNYHHAHDAYLNAVVGTALIKKYPKLESEFVYGDYKVYDVRKMIAKSEQEIGKATAKYFFYSNIMNFFKTEITLANGEIRKRPLIETNGETGEIVWDKGRDFATVRKVLSMPQVNIVKKTEVQTGGFSKESILPKRNSDKLIARKKDWDPKKYGGFDSPTVAYSVLVVAKVEKGKSKKLKSVKELLGITIMERSSFEKNPIDFLEAKGYKEVKKDLIIKLPKYSLFELENGRKRMLASAGELQKGNELALPSKYVNFLYLASHYEKLKGSPEDNEQKQLFVEQHKHYLDEIIEQISEFSKRVILADANLDKVLSAYNKHRDKPIREQAENIIHLFTLTNLGAPAAFKYFDTTIDRKRYTSTKEVLDATLIHQSITGLYETRIDLSQLGGDGGEAAAKGGGGSEAAAKGGMNPLQLLQPLPAEVKGTKLLAHWNSGATITCIPESFLEDEQPIKQTLIKTIHGEKQQNVYYLTFKVKGRKVEAEVIASPYEYILLSPTDVPWLTQQPLQLTILVPLQEYQDRILNKTALPEEQKQQLKALFTKYDNLWQHWENQVGHRKIRPHNIATGDYPPRPQKQYPINPKAKPSIQIVIDDLLKQGVLTPQNSTMNTPVYPVPKPDGRWRMVLDYREVNKTIPLTAAQNQHSAGILATIVRQKYKTTLDLANGFWAHPITPDSYWLTAFTWQGKQYCWTRLPQGFLNSPALFTADAVDLLKEVPNVQVYVDDIYLSHDNPHEHIQQLEKVFQILLQAGYVVSLKKSEIGQRTVEFLGFNITKEGRGLTDTFKTKLLNVTPPKDLKQLQSILGLLNFARNFIPNFAELVQTLYNLIASSKGKYIEWTEDNTKQLNKVIEALNTASNLEERLPDQRLVIKVNTSPSAGYVRYYNESGKKPIMYLNYVFSKAELKFSMLEKLLTTMHKALIKAMDLAMGQEILVYSPIVSMTKIQKTPLPERKALPIRWITWMTYLEDPRIQFHYDKTLPELKHIPDVYTSSIPPLKHPSQYEGVFCTDGSAIKSPDPTKSNNAGMGIVHAIYNPEYKILNQWSIPLGHHTAQMAEIAAVEFACKKALKVPGPVLVITDSFYVAESANKELPYWKSNGFVNNKKEPLKHISKWKSIAECLSIKPDITIQHEKGHQPINTSIHTEGNALADKLATQGSYVVNAGKRTADGSEFEKRTADGSEFESPKKKAKVE

SEQ ID NO: 693 - protein, 2170 aa, synthetic construct
MPAAKRVKLDGGDKKYSIGLDIGTNSVGWAVITDEYKVPSKKFKVLGNTDRHSIKKNLIGALLFDSGETAEATRLKRTARRRYTRRKNRICYLQEIFSNEMAKVDDSFFHRLEESFLVEEDKKHERHPIFGNIVDEVAYHEKYPTIYHLRKKLVDSTDKADLRLIYLALAHMIKFRGHFLIEGDLNPDNSDVDKLFIQLVQTYNQLFEENPINASGVDAKAILSARLSKSRRLENLIAQLPGEKKNGLFGNLIALSLGLTPNFKSNFDLAEDAKLQLSKDTYDDDLDNLLAQIGDQYADLFLAAKNLSDAILLSDILRVNTEITKAPLSASMIKRYDEHHQDLTLLKALVRQQLPEKYKEIFFDQSKNGYAGYIDGGASQEEFYKFIKPILEKMDGTEELLVKLNREDLLRKQRTFDNGSIPHQIHLGELHAILRRQEDFYPFLKDNREKIEKILTFRIPYYVGPLARGNSRFAWMTRKSEETITPWNFEEVVDKGASAQSFIERMTNFDKNLPNEKVLPKHSLLYEYFTVYNELTKVKYVTEGMRKPAFLSGEQKKAIVDLLFKTNRKVTVKQLKEDYFKKIECFDSVEISGVEDRFNASLGTYHDLLKIIKDKDFLDNEENEDILEDIVLTLTLFEDREMIEERLKTYAHLFDDKVMKQLKRRRYTGWGRLSRKLINGIRDKQSGKTILDFLKSDGFANRNFMQLIHDDSLTFKEDIQKAQVSGQGDSLHEHIANLAGSPAIKKGILQTVKVVDELVKVMGRHKPENIVIEMARENQTTQKGQKNSRERMKRIEEGIKELGSQILKEHPVENTQLQNEKLYLYYLQNGRDMYVDQELDINRLSDYDVDHIVPQSFLKDDSIDNKVLTRSDKARGKSDNVPSEEVVKKMKNYWRQLLNAKLITQRKFDNLTKAERGGLSELDKAGFIKRQLVETRQITKHVAQILDSRMNTKYDENDKLIREVKVITLKSKLVSDFRKDFQFYKVREINNYHHAHDAYLNAVVGTALIKKYPKLESEFVYGDYKVYDVRKMIAKSEQEIGKATAKYFFYSNIMNFFKTEITLANGEIRKRPLIETNGETGEIVWDKGRDFATVRKVLSMPQVNIVKKTEVQTGGFSKESILPKRNSDKLIARKKDWDPKKYGGFDSPTVAYSVLVVAKVEKGKSKKLKSVKELLGITIMERSSFEKNPIDFLEAKGYKEVKKDLIIKLPKYSLFELENGRKRMLASAGELQKGNELALPSKYVNFLYLASHYEKLKGSPEDNEQKQLFVEQHKHYLDEIIEQISEFSKRVILADANLDKVLSAYNKHRDKPIREQAENIIHLFTLTNLGAPAAFKYFDTTIDRKRYTSTKEVLDATLIHQSITGLYETRIDLSQLGGDGGPAPAPGGMNPLQLLQPLPAEVKGTKLLAHWNSGATITCIPESFLEDEQPIKQTLIKTIHGEKQQNVYYLTFKVKGRKVEAEVIASPYEYILLSPTDVPWLTQQPLQLTILVPLQEYQDRILNKTALPEEQKQQLKALFTKYDNLWQHWENQVGHRKIRPHNIATGDYPPRPQKQYPINPKAKPSIQIVIDDLLKQGVLTPQNSTMNTPVYPVPKPDGRWRMVLDYREVNKTIPLTAAQNQHSAGILATIVRQKYKTTLDLANGFWAHPITPDSYWLTAFTWQGKQYCWTRLPQGFLNSPALFTADAVDLLKEVPNVQVYVDDIYLSHDNPHEHIQQLEKVFQILLQAGYVVSLKKSEIGQRTVEFLGFNITKEGRGLTDTFKTKLLNVTPPKDLKQLQSILGLLNFARNFIPNFAELVQTLYNLIASSKGKYIEWTEDNTKQLNKVIEALNTASNLEERLPDQRLVIKVNTSPSAGYVRYYNESGKKPIMYLNYVFSKAELKFSMLEKLLTTMHKALIKAMDLAMGQEILVYSPIVSMTKIQKTPLPERKALPIRWITWMTYLEDPRIQFHYDKTLPELKHIPDVYTSSIPPLKHPSQYEGVFCTDGSAIKSPDPTKSNNAGMGIVHAIYNPEYKILNQWSIPLGHHTAQMAEIAAVEFACKKALKVPGPVLVITDSFYVAESANKELPYWKSNGFVNNKKEPLKHISKWKSIAECLSIKPDITIQHEKGHQPINTSIHTEGNALADKLATQGSYVVNAGKRTADGSEFEKRTADGSEFESPKKKAKVE

SEQ ID NO: 694 - protein, 2185 aa, synthetic construct
MPAAKRVKLDGGDKKYSIGLDIGTNSVGWAVITDEYKVPSKKFKVLGNTDRHSIKKNLIGALLFDSGETAEATRLKRTARRRYTRRKNRICYLQEIFSNEMAKVDDSFFHRLEESFLVEEDKKHERHPIFGNIVDEVAYHEKYPTIYHLRKKLVDSTDKADLRLIYLALAHMIKFRGHFLIEGDLNPDNSDVDKLFIQLVQTYNQLFEENPINASGVDAKAILSARLSKSRRLENLIAQLPGEKKNGLFGNLIALSLGLTPNFKSNFDLAEDAKLQLSKDTYDDDLDNLLAQIGDQYADLFLAAKNLSDAILLSDILRVNTEITKAPLSASMIKRYDEHHQDLTLLKALVRQQLPEKYKEIFFDQSKNGYAGYIDGGASQEEFYKFIKPILEKMDGTEELLVKLNREDLLRKQRTFDNGSIPHQIHLGELHAILRRQEDFYPFLKDNREKIEKILTFRIPYYVGPLARGNSRFAWMTRKSEETITPWNFEEVVDKGASAQSFIERMTNFDKNLPNEKVLPKHSLLYEYFTVYNELTKVKYVTEGMRKPAFLSGEQKKAIVDLLFKTNRKVTVKQLKEDYFKKIECFDSVEISGVEDRFNASLGTYHDLLKIIKDKDFLDNEENEDILEDIVLTLTLFEDREMIEERLKTYAHLFDDKVMKQLKRRRYTGWGRLSRKLINGIRDKQSGKTILDFLKSDGFANRNFMQLIHDDSLTFKEDIQKAQVSGQGDSLHEHIANLAGSPAIKKGILQTVKVVDELVKVMGRHKPENIVIEMARENQTTQKGQKNSRERMKRIEEGIKELGSQILKEHPVENTQLQNEKLYLYYLQNGRDMYVDQELDINRLSDYDVDHIVPQSFLKDDSIDNKVLTRSDKARGKSDNVPSEEVVKKMKNYWRQLLNAKLITQRKFDNLTKAERGGLSELDKAGFIKRQLVETRQITKHVAQILDSRMNTKYDENDKLIREVKVITLKSKLVSDFRKDFQFYKVREINNYHHAHDAYLNAVVGTALIKKYPKLESEFVYGDYKVYDVRKMIAKSEQEIGKATAKYFFYSNIMNFFKTEITLANGEIRKRPLIETNGETGEIVWDKGRDFATVRKVLSMPQVNIVKKTEVQTGGFSKESILPKRNSDKLIARKKDWDPKKYGGFDSPTVAYSVLVVAKVEKGKSKKLKSVKELLGITIMERSSFEKNPIDFLEAKGYKEVKKDLIIKLPKYSLFELENGRKRMLASAGELQKGNELALPSKYVNFLYLASHYEKLKGSPEDNEQKQLFVEQHKHYLDEIIEQISEFSKRVILADANLDKVLSAYNKHRDKPIREQAENIIHLFTLTNLGAPAAFKYFDTTIDRKRYTSTKEVLDATLIHQSITGLYETRIDLSQLGGDGGEAAAKEAAAKEAAAKEAAAKGGMNPLQLLQPLPAEVKGTKLLAHWNSGATITCIPESFLEDEQPIKQTLIKTIHGEKQQNVYYLTFKVKGRKVEAEVIASPYEYILLSPTDVPWLTQQPLQLTILVPLQEYQDRILNKTALPEEQKQQLKALFTKYDNLWQHWENQVGHRKIRPHNIATGDYPPRPQKQYPINPKAKPSIQIVIDDLLKQGVLTPQNSTMNTPVYPVPKPDGRWRMVLDYREVNKTIPLTAAQNQHSAGILATIVRQKYKTTLDLANGFWAHPITPDSYWLTAFTWQGKQYCWTRLPQGFLNSPALFTADAVDLLKEVPNVQVYVDDIYLSHDNPHEHIQQLEKVFQILLQAGYVVSLKKSEIGQRTVEFLGFNITKEGRGLTDTFKTKLLNVTPPKDLKQLQSILGLLNFARNFIPNFAELVQTLYNLIASSKGKYIEWTEDNTKQLNKVIEALNTASNLEERLPDQRLVIKVNTSPSAGYVRYYNESGKKPIMYLNYVFSKAELKFSMLEKLLTTMHKALIKAMDLAMGQEILVYSPIVSMTKIQKTPLPERKALPIRWITWMTYLEDPRIQFHYDKTLPELKHIPDVYTSSIPPLKHPSQYEGVFCTDGSAIKSPDPTKSNNAGMGIVHAIYNPEYKILNQWSIPLGHHTAQMAEIAAVEFACKKALKVPGPVLVITDSFYVAESANKELPYWKSNGFVNNKKEPLKHISKWKSIAECLSIKPDITIQHEKGHQPINTSIHTEGNALADKLATQGSYVVNAGKRTADGSEFEKRTADGSEFESPKKKAKVE

SEQ ID NO: 695 - protein, 2081 aa, synthetic construct
MPAAKRVKLDGGDKKYSIGLDIGTNSVGWAVITDEYKVPSKKFKVLGNTDRHSIKKNLIGALLFDSGETAEATRLKRTARRRYTRRKNRICYLQEIFSNEMAKVDDSFFHRLEESFLVEEDKKHERHPIFGNIVDEVAYHEKYPTIYHLRKKLVDSTDKADLRLIYLALAHMIKFRGHFLIEGDLNPDNSDVDKLFIQLVQTYNQLFEENPINASGVDAKAILSARLSKSRRLENLIAQLPGEKKNGLFGNLIALSLGLTPNFKSNFDLAEDAKLQLSKDTYDDDLDNLLAQIGDQYADLFLAAKNLSDAILLSDILRVNTEITKAPLSASMIKRYDEHHQDLTLLKALVRQQLPEKYKEIFFDQSKNGYAGYIDGGASQEEFYKFIKPILEKMDGTEELLVKLNREDLLRKQRTFDNGSIPHQIHLGELHAILRRQEDFYPFLKDNREKIEKILTFRIPYYVGPLARGNSRFAWMTRKSEETITPWNFEEVVDKGASAQSFIERMTNFDKNLPNEKVLPKHSLLYEYFTVYNELTKVKYVTEGMRKPAFLSGEQKKAIVDLLFKTNRKVTVKQLKEDYFKKIECFDSVEISGVEDRFNASLGTYHDLLKIIKDKDFLDNEENEDILEDIVLTLTLFEDREMIEERLKTYAHLFDDKVMKQLKRRRYTGWGRLSRKLINGIRDKQSGKTILDFLKSDGFANRNFMQLIHDDSLTFKEDIQKAQVSGQGDSLHEHIANLAGSPAIKKGILQTVKVVDELVKVMGRHKPENIVIEMARENQTTQKGQKNSRERMKRIEEGIKELGSQILKEHPVENTQLQNEKLYLYYLQNGRDMYVDQELDINRLSDYDVDHIVPQSFLKDDSIDNKVLTRSDKARGKSDNVPSEEVVKKMKNYWRQLLNAKLITQRKFDNLTKAERGGLSELDKAGFIKRQLVETRQITKHVAQILDSRMNTKYDENDKLIREVKVITLKSKLVSDFRKDFQFYKVREINNYHHAHDAYLNAVVGTALIKKYPKLESEFVYGDYKVYDVRKMIAKSEQEIGKATAKYFFYSNIMNFFKTEITLANGEIRKRPLIETNGETGEIVWDKGRDFATVRKVLSMPQVNIVKKTEVQTGGFSKESILPKRNSDKLIARKKDWDPKKYGGFDSPTVAYSVLVVAKVEKGKSKKLKSVKELLGITIMERSSFEKNPIDFLEAKGYKEVKKDLIIKLPKYSLFELENGRKRMLASAGELQKGNELALPSKYVNFLYLASHYEKLKGSPEDNEQKQLFVEQHKHYLDEIIEQISEFSKRVILADANLDKVLSAYNKHRDKPIREQAENIIHLFTLTNLGAPAAFKYFDTTIDRKRYTSTKEVLDATLIHQSITGLYETRIDLSQLGGDGGPAPAPGGVPWLTQQPLQLTILVPLQEYQDRILNKTALPEEQKQQLKALFTKYDNLWQHWENQVGHRKIRPHNIATGDYPPRPQKQYPINPKAKPSIQIVIDDLLKQGVLTPQNSTMNTPVYPVPKPDGRWRMVLDYREVNKTIPLTAAQNQHSAGILATIVRQKYKTTLDLANGFWAHPITPDSYWLTAFTWQGKQYCWTRLPQGFLNSPALFTADAVDLLKEVPNVQVYVDDIYLSHDNPHEHIQQLEKVFQILLQAGYVVSLKKSEIGQRTVEFLGFNITKEGRGLTDTFKTKLLNVTPPKDLKQLQSILGLLNFARNFIPNFAELVQTLYNLIASSKGKYIEWTEDNTKQLNKVIEALNTASNLEERLPDQRLVIKVNTSPSAGYVRYYNESGKKPIMYLNYVFSKAELKFSMLEKLLTTMHKALIKAMDLAMGQEILVYSPIVSMTKIQKTPLPERKALPIRWITWMTYLEDPRIQFHYDKTLPELKHIPDVYTSSIPPLKHPSQYEGVFCTDGSAIKSPDPTKSNNAGMGIVHAIYNPEYKILNQWSIPLGHHTAQMAEIAAVEFACKKALKVPGPVLVITDSFYVAESANKELPYWKSNGFVNNKKEPLKHISKWKSIAECLSIKPDITIQHEKGHQPINTSIHTEGNALADKLATQGSYVVNAGKRTADGSEFEKRTADGSEFESPKKKAKVE

SEQ ID NO: 696 - protein, 2087 aa, synthetic construct
MPAAKRVKLDGGDKKYSIGLDIGTNSVGWAVITDEYKVPSKKFKVLGNTDRHSIKKNLIGALLFDSGETAEATRLKRTARRRYTRRKNRICYLQEIFSNEMAKVDDSFFHRLEESFLVEEDKKHERHPIFGNIVDEVAYHEKYPTIYHLRKKLVDSTDKADLRLIYLALAHMIKFRGHFLIEGDLNPDNSDVDKLFIQLVQTYNQLFEENPINASGVDAKAILSARLSKSRRLENLIAQLPGEKKNGLFGNLIALSLGLTPNFKSNFDLAEDAKLQLSKDTYDDDLDNLLAQIGDQYADLFLAAKNLSDAILLSDILRVNTEITKAPLSASMIKRYDEHHQDLTLLKALVRQQLPEKYKEIFFDQSKNGYAGYIDGGASQEEFYKFIKPILEKMDGTEELLVKLNREDLLRKQRTFDNGSIPHQIHLGELHAILRRQEDFYPFLKDNREKIEKILTFRIPYYVGPLARGNSRFAWMTRKSEETITPWNFEEVVDKGASAQSFIERMTNFDKNLPNEKVLPKHSLLYEYFTVYNELTKVKYVTEGMRKPAFLSGEQKKAIVDLLFKTNRKVTVKQLKEDYFKKIECFDSVEISGVEDRFNASLGTYHDLLKIIKDKDFLDNEENEDILEDIVLTLTLFEDREMIEERLKTYAHLFDDKVMKQLKRRRYTGWGRLSRKLINGIRDKQSGKTILDFLKSDGFANRNFMQLIHDDSLTFKEDIQKAQVSGQGDSLHEHIANLAGSPAIKKGILQTVKVVDELVKVMGRHKPENIVIEMARENQTTQKGQKNSRERMKRIEEGIKELGSQILKEHPVENTQLQNEKLYLYYLQNGRDMYVDQELDINRLSDYDVDHIVPQSFLKDDSIDNKVLTRSDKARGKSDNVPSEEVVKKMKNYWRQLLNAKLITQRKFDNLTKAERGGLSELDKAGFIKRQLVETRQITKHVAQILDSRMNTKYDENDKLIREVKVITLKSKLVSDFRKDFQFYKVREINNYHHAHDAYLNAVVGTALIKKYPKLESEFVYGDYKVYDVRKMIAKSEQEIGKATAKYFFYSNIMNFFKTEITLANGEIRKRPLIETNGETGEIVWDKGRDFATVRKVLSMPQVNIVKKTEVQTGGFSKESILPKRNSDKLIARKKDWDPKKYGGFDSPTVAYSVLVVAKVEKGKSKKLKSVKELLGITIMERSSFEKNPIDFLEAKGYKEVKKDLIIKLPKYSLFELENGRKRMLASAGELQKGNELALPSKYVNFLYLASHYEKLKGSPEDNEQKQLFVEQHKHYLDEIIEQISEFSKRVILADANLDKVLSAYNKHRDKPIREQAENIIHLFTLTNLGAPAAFKYFDTTIDRKRYTSTKEVLDATLIHQSITGLYETRIDLSQLGGDGGPAPGGGEAAAKGGVPWLTQQPLQLTILVPLQEYQDRILNKTALPEEQKQQLKALFTKYDNLWQHWENQVGHRKIRPHNIATGDYPPRPQKQYPINPKAKPSIQIVIDDLLKQGVLTPQNSTMNTPVYPVPKPDGRWRMVLDYREVNKTIPLTAAQNQHSAGILATIVRQKYKTTLDLANGFWAHPITPDSYWLTAFTWQGKQYCWTRLPQGFLNSPALFTADAVDLLKEVPNVQVYVDDIYLSHDNPHEHIQQLEKVFQILLQAGYVVSLKKSEIGQRTVEFLGFNITKEGRGLTDTFKTKLLNVTPPKDLKQLQSILGLLNFARNFIPNFAELVQTLYNLIASSKGKYIEWTEDNTKQLNKVIEALNTASNLEERLPDQRLVIKVNTSPSAGYVRYYNESGKKPIMYLNYVFSKAELKFSMLEKLLTTMHKALIKAMDLAMGQEILVYSPIVSMTKIQKTPLPERKALPIRWITWMTYLEDPRIQFHYDKTLPELKHIPDVYTSSIPPLKHPSQYEGVFCTDGSAIKSPDPTKSNNAGMGIVHAIYNPEYKILNQWSIPLGHHTAQMAEIAAVEFACKKALKVPGPVLVITDSFYVAESANKELPYWKSNGFVNNKKEPLKHISKWKSIAECLSIKPDITIQHEKGHQPINTSIHTEGNALADKLATQGSYVVNAGKRTADGSEFEKRTADGSEFESPKKKAKVE

SEQ ID NO: 697 - protein, 2087 aa, synthetic construct
MPAAKRVKLDGGDKKYSIGLDIGTNSVGWAVITDEYKVPSKKFKVLGNTDRHSIKKNLIGALLFDSGETAEATRLKRTARRRYTRRKNRICYLQEIFSNEMAKVDDSFFHRLEESFLVEEDKKHERHPIFGNIVDEVAYHEKYPTIYHLRKKLVDSTDKADLRLIYLALAHMIKFRGHFLIEGDLNPDNSDVDKLFIQLVQTYNQLFEENPINASGVDAKAILSARLSKSRRLENLIAQLPGEKKNGLFGNLIALSLGLTPNFKSNFDLAEDAKLQLSKDTYDDDLDNLLAQIGDQYADLFLAAKNLSDAILLSDILRVNTEITKAPLSASMIKRYDEHHQDLTLLKALVRQQLPEKYKEIFFDQSKNGYAGYIDGGASQEEFYKFIKPILEKMDGTEELLVKLNREDLLRKQRTFDNGSIPHQIHLGELHAILRRQEDFYPFLKDNREKIEKILTFRIPYYVGPLARGNSRFAWMTRKSEETITPWNFEEVVDKGASAQSFIERMTNFDKNLPNEKVLPKHSLLYEYFTVYNELTKVKYVTEGMRKPAFLSGEQKKAIVDLLFKTNRKVTVKQLKEDYFKKIECFDSVEISGVEDRFNASLGTYHDLLKIIKDKDFLDNEENEDILEDIVLTLTLFEDREMIEERLKTYAHLFDDKVMKQLKRRRYTGWGRLSRKLINGIRDKQSGKTILDFLKSDGFANRNFMQLIHDDSLTFKEDIQKAQVSGQGDSLHEHIANLAGSPAIKKGILQTVKVVDELVKVMGRHKPENIVIEMARENQTTQKGQKNSRERMKRIEEGIKELGSQILKEHPVENTQLQNEKLYLYYLQNGRDMYVDQELDINRLSDYDVDHIVPQSFLKDDSIDNKVLTRSDKARGKSDNVPSEEVVKKMKNYWRQLLNAKLITQRKFDNLTKAERGGLSELDKAGFIKRQLVETRQITKHVAQILDSRMNTKYDENDKLIREVKVITLKSKLVSDFRKDFQFYKVREINNYHHAHDAYLNAVVGTALIKKYPKLESEFVYGDYKVYDVRKMIAKSEQEIGKATAKYFFYSNIMNFFKTEITLANGEIRKRPLIETNGETGEIVWDKGRDFATVRKVLSMPQVNIVKKTEVQTGGFSKESILPKRNSDKLIARKKDWDPKKYGGFDSPTVAYSVLVVAKVEKGKSKKLKSVKELLGITIMERSSFEKNPIDFLEAKGYKEVKKDLIIKLPKYSLFELENGRKRMLASAGELQKGNELALPSKYVNFLYLASHYEKLKGSPEDNEQKQLFVEQHKHYLDEIIEQISEFSKRVILADANLDKVLSAYNKHRDKPIREQAENIIHLFTLTNLGAPAAFKYFDTTIDRKRYTSTKEVLDATLIHQSITGLYETRIDLSQLGGDGGGGGEAAAKGGSGGVPWLTQQPLQLTILVPLQEYQDRILNKTALPEEQKQQLKALFTKYDNLWQHWENQVGHRKIRPHNIATGDYPPRPQKQYPINPKAKPSIQIVIDDLLKQGVLTPQNSTMNTPVYPVPKPDGRWRMVLDYREVNKTIPLTAAQNQHSAGILATIVRQKYKTTLDLANGFWAHPITPDSYWLTAFTWQGKQYCWTRLPQGFLNSPALFTADAVDLLKEVPNVQVYVDDIYLSHDNPHEHIQQLEKVFQILLQAGYVVSLKKSEIGQRTVEFLGFNITKEGRGLTDTFKTKLLNVTPPKDLKQLQSILGLLNFARNFIPNFAELVQTLYNLIASSKGKYIEWTEDNTKQLNKVIEALNTASNLEERLPDQRLVIKVNTSPSAGYVRYYNESGKKPIMYLNYVFSKAELKFSMLEKLLTTMHKALIKAMDLAMGQEILVYSPIVSMTKIQKTPLPERKALPIRWITWMTYLEDPRIQFHYDKTLPELKHIPDVYTSSIPPLKHPSQYEGVFCTDGSAIKSPDPTKSNNAGMGIVHAIYNPEYKILNQWSIPLGHHTAQMAEIAAVEFACKKALKVPGPVLVITDSFYVAESANKELPYWKSNGFVNNKKEPLKHISKWKSIAECLSIKPDITIQHEKGHQPINTSIHTEGNALADKLATQGSYVVNAGKRTADGSEFEKRTADGSEFESPKKKAKVE

SEQ ID NO: 698 - protein, 2087 aa, synthetic construct
MPAAKRVKLDGGDKKYSIGLDIGTNSVGWAVITDEYKVPSKKFKVLGNTDRHSIKKNLIGALLFDSGETAEATRLKRTARRRYTRRKNRICYLQEIFSNEMAKVDDSFFHRLEESFLVEEDKKHERHPIFGNIVDEVAYHEKYPTIYHLRKKLVDSTDKADLRLIYLALAHMIKFRGHFLIEGDLNPDNSDVDKLFIQLVQTYNQLFEENPINASGVDAKAILSARLSKSRRLENLIAQLPGEKKNGLFGNLIALSLGLTPNFKSNFDLAEDAKLQLSKDTYDDDLDNLLAQIGDQYADLFLAAKNLSDAILLSDILRVNTEITKAPLSASMIKRYDEHHQDLTLLKALVRQQLPEKYKEIFFDQSKNGYAGYIDGGASQEEFYKFIKPILEKMDGTEELLVKLNREDLLRKQRTFDNGSIPHQIHLGELHAILRRQEDFYPFLKDNREKIEKILTFRIPYYVGPLARGNSRFAWMTRKSEETITPWNFEEVVDKGASAQSFIERMTNFDKNLPNEKVLPKHSLLYEYFTVYNELTKVKYVTEGMRKPAFLSGEQKKAIVDLLFKTNRKVTVKQLKEDYFKKIECFDSVEISGVEDRFNASLGTYHDLLKIIKDKDFLDNEENEDILEDIVLTLTLFEDREMIEERLKTYAHLFDDKVMKQLKRRRYTGWGRLSRKLINGIRDKQSGKTILDFLKSDGFANRNFMQLIHDDSLTFKEDIQKAQVSGQGDSLHEHIANLAGSPAIKKGILQTVKVVDELVKVMGRHKPENIVIEMARENQTTQKGQKNSRERMKRIEEGIKELGSQILKEHPVENTQLQNEKLYLYYLQNGRDMYVDQELDINRLSDYDVDHIVPQSFLKDDSIDNKVLTRSDKARGKSDNVPSEEVVKKMKNYWRQLLNAKLITQRKFDNLTKAERGGLSELDKAGFIKRQLVETRQITKHVAQILDSRMNTKYDENDKLIREVKVITLKSKLVSDFRKDFQFYKVREINNYHHAHDAYLNAVVGTALIKKYPKLESEFVYGDYKVYDVRKMIAKSEQEIGKATAKYFFYSNIMNFFKTEITLANGEIRKRPLIETNGETGEIVWDKGRDFATVRKVLSMPQVNIVKKTEVQTGGFSKESILPKRNSDKLIARKKDWDPKKYGGFDSPTVAYSVLVVAKVEKGKSKKLKSVKELLGITIMERSSFEKNPIDFLEAKGYKEVKKDLIIKLPKYSLFELENGRKRMLASAGELQKGNELALPSKYVNFLYLASHYEKLKGSPEDNEQKQLFVEQHKHYLDEIIEQISEFSKRVILADANLDKVLSAYNKHRDKPIREQAENIIHLFTLTNLGAPAAFKYFDTTIDRKRYTSTKEVLDATLIHQSITGLYETRIDLSQLGGDGGGGGEAAAKGSSGGVPWLTQQPLQLTILVPLQEYQDRILNKTALPEEQKQQLKALFTKYDNLWQHWENQVGHRKIRPHNIATGDYPPRPQKQYPINPKAKPSIQIVIDDLLKQGVLTPQNSTMNTPVYPVPKPDGRWRMVLDYREVNKTIPLTAAQNQHSAGILATIVRQKYKTTLDLANGFWAHPITPDSYWLTAFTWQGKQYCWTRLPQGFLNSPALFTADAVDLLKEVPNVQVYVDDIYLSHDNPHEHIQQLEKVFQILLQAGYVVSLKKSEIGQRTVEFLGFNITKEGRGLTDTFKTKLLNVTPPKDLKQLQSILGLLNFARNFIPNFAELVQTLYNLIASSKGKYIEWTEDNTKQLNKVIEALNTASNLEERLPDQRLVIKVNTSPSAGYVRYYNESGKKPIMYLNYVFSKAELKFSMLEKLLTTMHKALIKAMDLAMGQEILVYSPIVSMTKIQKTPLPERKALPIRWITWMTYLEDPRIQFHYDKTLPELKHIPDVYTSSIPPLKHPSQYEGVFCTDGSAIKSPDPTKSNNAGMGIVHAIYNPEYKILNQWSIPLGHHTAQMAEIAAVEFACKKALKVPGPVLVITDSFYVAESANKELPYWKSNGFVNNKKEPLKHISKWKSIAECLSIKPDITIQHEKGHQPINTSIHTEGNALADKLATQGSYVVNAGKRTADGSEFEKRTADGSEFESPKKKAKVE

SEQ ID NO: 699 - protein, 2087 aa, synthetic construct
MPAAKRVKLDGGDKKYSIGLDIGTNSVGWAVITDEYKVPSKKFKVLGNTDRHSIKKNLIGALLFDSGETAEATRLKRTARRRYTRRKNRICYLQEIFSNEMAKVDDSFFHRLEESFLVEEDKKHERHPIFGNIVDEVAYHEKYPTIYHLRKKLVDSTDKADLRLIYLALAHMIKFRGHFLIEGDLNPDNSDVDKLFIQLVQTYNQLFEENPINASGVDAKAILSARLSKSRRLENLIAQLPGEKKNGLFGNLIALSLGLTPNFKSNFDLAEDAKLQLSKDTYDDDLDNLLAQIGDQYADLFLAAKNLSDAILLSDILRVNTEITKAPLSASMIKRYDEHHQDLTLLKALVRQQLPEKYKEIFFDQSKNGYAGYIDGGASQEEFYKFIKPILEKMDGTEELLVKLNREDLLRKQRTFDNGSIPHQIHLGELHAILRRQEDFYPFLKDNREKIEKILTFRIPYYVGPLARGNSRFAWMTRKSEETITPWNFEEVVDKGASAQSFIERMTNFDKNLPNEKVLPKHSLLYEYFTVYNELTKVKYVTEGMRKPAFLSGEQKKAIVDLLFKTNRKVTVKQLKEDYFKKIECFDSVEISGVEDRFNASLGTYHDLLKIIKDKDFLDNEENEDILEDIVLTLTLFEDREMIEERLKTYAHLFDDKVMKQLKRRRYTGWGRLSRKLINGIRDKQSGKTILDFLKSDGFANRNFMQLIHDDSLTFKEDIQKAQVSGQGDSLHEHIANLAGSPAIKKGILQTVKVVDELVKVMGRHKPENIVIEMARENQTTQKGQKNSRERMKRIEEGIKELGSQILKEHPVENTQLQNEKLYLYYLQNGRDMYVDQELDINRLSDYDVDHIVPQSFLKDDSIDNKVLTRSDKARGKSDNVPSEEVVKKMKNYWRQLLNAKLITQRKFDNLTKAERGGLSELDKAGFIKRQLVETRQITKHVAQILDSRMNTKYDENDKLIREVKVITLKSKLVSDFRKDFQFYKVREINNYHHAHDAYLNAVVGTALIKKYPKLESEFVYGDYKVYDVRKMIAKSEQEIGKATAKYFFYSNIMNFFKTEITLANGEIRKRPLIETNGETGEIVWDKGRDFATVRKVLSMPQVNIVKKTEVQTGGFSKESILPKRNSDKLIARKKDWDPKKYGGFDSPTVAYSVLVVAKVEKGKSKKLKSVKELLGITIMERSSFEKNPIDFLEAKGYKEVKKDLIIKLPKYSLFELENGRKRMLASAGELQKGNELALPSKYVNFLYLASHYEKLKGSPEDNEQKQLFVEQHKHYLDEIIEQISEFSKRVILADANLDKVLSAYNKHRDKPIREQAENIIHLFTLTNLGAPAAFKYFDTTIDRKRYTSTKEVLDATLIHQSITGLYETRIDLSQLGGDGGGSSGGGEAAAKGGVPWLTQQPLQLTILVPLQEYQDRILNKTALPEEQKQQLKALFTKYDNLWQHWENQVGHRKIRPHNIATGDYPPRPQKQYPINPKAKPSIQIVIDDLLKQGVLTPQNSTMNTPVYPVPKPDGRWRMVLDYREVNKTIPLTAAQNQHSAGILATIVRQKYKTTLDLANGFWAHPITPDSYWLTAFTWQGKQYCWTRLPQGFLNSPALFTADAVDLLKEVPNVQVYVDDIYLSHDNPHEHIQQLEKVFQILLQAGYVVSLKKSEIGQRTVEFLGFNITKEGRGLTDTFKTKLLNVTPPKDLKQLQSILGLLNFARNFIPNFAELVQTLYNLIASSKGKYIEWTEDNTKQLNKVIEALNTASNLEERLPDQRLVIKVNTSPSAGYVRYYNESGKKPIMYLNYVFSKAELKFSMLEKLLTTMHKALIKAMDLAMGQEILVYSPIVSMTKIQKTPLPERKALPIRWITWMTYLEDPRIQFHYDKTLPELKHIPDVYTSSIPPLKHPSQYEGVFCTDGSAIKSPDPTKSNNAGMGIVHAIYNPEYKILNQWSIPLGHHTAQMAEIAAVEFACKKALKVPGPVLVITDSFYVAESANKELPYWKSNGFVNNKKEPLKHISKWKSIAECLSIKPDITIQHEKGHQPINTSIHTEGNALADKLATQGSYVVNAGKRTADGSEFEKRTADGSEFESPKKKAKVE

SEQ ID NO: 700 - protein, 2094 aa, synthetic construct
MPAAKRVKLDGGDKKYSIGLDIGTNSVGWAVITDEYKVPSKKFKVLGNTDRHSIKKNLIGALLFDSGETAEATRLKRTARRRYTRRKNRICYLQEIFSNEMAKVDDSFFHRLEESFLVEEDKKHERHPIFGNIVDEVAYHEKYPTIYHLRKKLVDSTDKADLRLIYLALAHMIKFRGHFLIEGDLNPDNSDVDKLFIQLVQTYNQLFEENPINASGVDAKAILSARLSKSRRLENLIAQLPGEKKNGLFGNLIALSLGLTPNFKSNFDLAEDAKLQLSKDTYDDDLDNLLAQIGDQYADLFLAAKNLSDAILLSDILRVNTEITKAPLSASMIKRYDEHHQDLTLLKALVRQQLPEKYKEIFFDQSKNGYAGYIDGGASQEEFYKFIKPILEKMDGTEELLVKLNREDLLRKQRTFDNGSIPHQIHLGELHAILRRQEDFYPFLKDNREKIEKILTFRIPYYVGPLARGNSRFAWMTRKSEETITPWNFEEVVDKGASAQSFIERMTNFDKNLPNEKVLPKHSLLYEYFTVYNELTKVKYVTEGMRKPAFLSGEQKKAIVDLLFKTNRKVTVKQLKEDYFKKIECFDSVEISGVEDRFNASLGTYHDLLKIIKDKDFLDNEENEDILEDIVLTLTLFEDREMIEERLKTYAHLFDDKVMKQLKRRRYTGWGRLSRKLINGIRDKQSGKTILDFLKSDGFANRNFMQLIHDDSLTFKEDIQKAQVSGQGDSLHEHIANLAGSPAIKKGILQTVKVVDELVKVMGRHKPENIVIEMARENQTTQKGQKNSRERMKRIEEGIKELGSQILKEHPVENTQLQNEKLYLYYLQNGRDMYVDQELDINRLSDYDVDHIVPQSFLKDDSIDNKVLTRSDKARGKSDNVPSEEVVKKMKNYWRQLLNAKLITQRKFDNLTKAERGGLSELDKAGFIKRQLVETRQITKHVAQILDSRMNTKYDENDKLIREVKVITLKSKLVSDFRKDFQFYKVREINNYHHAHDAYLNAVVGTALIKKYPKLESEFVYGDYKVYDVRKMIAKSEQEIGKATAKYFFYSNIMNFFKTEITLANGEIRKRPLIETNGETGEIVWDKGRDFATVRKVLSMPQVNIVKKTEVQTGGFSKESILPKRNSDKLIARKKDWDPKKYGGFDSPTVAYSVLVVAKVEKGKSKKLKSVKELLGITIMERSSFEKNPIDFLEAKGYKEVKKDLIIKLPKYSLFELENGRKRMLASAGELQKGNELALPSKYVNFLYLASHYEKLKGSPEDNEQKQLFVEQHKHYLDEIIEQISEFSKRVILADANLDKVLSAYNKHRDKPIREQAENIIHLFTLTNLGAPAAFKYFDTTIDRKRYTSTKEVLDATLIHQSITGLYETRIDLSQLGGDGGGGSGGSGGSGGSGGSGGSGGVPWLTQQPLQLTILVPLQEYQDRILNKTALPEEQKQQLKALFTKYDNLWQHWENQVGHRKIRPHNIATGDYPPRPQKQYPINPKAKPSIQIVIDDLLKQGVLTPQNSTMNTPVYPVPKPDGRWRMVLDYREVNKTIPLTAAQNQHSAGILATIVRQKYKTTLDLANGFWAHPITPDSYWLTAFTWQGKQYCWTRLPQGFLNSPALFNADAVDLLKEVPNVQVYVDDIYLSHDNPHEHIQQLEKVFQILLQAGYVVSLKKSEIGQRTVEFLGFNITKEGRGLTDTFKTKLLNVTPPKDLKQLQSILGLLNFARNFIPNFAELVQTLYNLIASSPGKYIEWTEDNTKQLNKVIEALNTASNLEERLPDQRLVIKVNTSPSAGYVRYYNESGKKPIMYLNYVFSKAELKFSMLEKLLTTMHKALIKAMDLAMGQEILVYSPIVSMTKIQKTPLPERKALPIRWITWMTYLEDPRIQFHYDKTLPELKHIPDVYTSSIPPLKHPSQYEGVFCTDGSAIKSPDPTKSNNAGMGIVHAIYNPEYKILNQWSIPLGHHTAQMAEIAAVEFACKKALKVPGPVLVITDSFYVAESANKELPYWKSNGFVNNKKEPLKHISKWKSIAECLSIKPDITIQHEKGHQPINTSIHTEGNALADKLATQGSYVVNAGKRTADGSEFEKRTADGSEFESPKKKAKVE

SEQ ID NO: 701 - protein, 2091 aa, synthetic construct
MPAAKRVKLDGGDKKYSIGLDIGTNSVGWAVITDEYKVPSKKFKVLGNTDRHSIKKNLIGALLFDSGETAEATRLKRTARRRYTRRKNRICYLQEIFSNEMAKVDDSFFHRLEESFLVEEDKKHERHPIFGNIVDEVAYHEKYPTIYHLRKKLVDSTDKADLRLIYLALAHMIKFRGHFLIEGDLNPDNSDVDKLFIQLVQTYNQLFEENPINASGVDAKAILSARLSKSRRLENLIAQLPGEKKNGLFGNLIALSLGLTPNFKSNFDLAEDAKLQLSKDTYDDDLDNLLAQIGDQYADLFLAAKNLSDAILLSDILRVNTEITKAPLSASMIKRYDEHHQDLTLLKALVRQQLPEKYKEIFFDQSKNGYAGYIDGGASQEEFYKFIKPILEKMDGTEELLVKLNREDLLRKQRTFDNGSIPHQIHLGELHAILRRQEDFYPFLKDNREKIEKILTFRIPYYVGPLARGNSRFAWMTRKSEETITPWNFEEVVDKGASAQSFIERMTNFDKNLPNEKVLPKHSLLYEYFTVYNELTKVKYVTEGMRKPAFLSGEQKKAIVDLLFKTNRKVTVKQLKEDYFKKIECFDSVEISGVEDRFNASLGTYHDLLKIIKDKDFLDNEENEDILEDIVLTLTLFEDREMIEERLKTYAHLFDDKVMKQLKRRRYTGWGRLSRKLINGIRDKQSGKTILDFLKSDGFANRNFMQLIHDDSLTFKEDIQKAQVSGQGDSLHEHIANLAGSPAIKKGILQTVKVVDELVKVMGRHKPENIVIEMARENQTTQKGQKNSRERMKRIEEGIKELGSQILKEHPVENTQLQNEKLYLYYLQNGRDMYVDQELDINRLSDYDVDHIVPQSFLKDDSIDNKVLTRSDKARGKSDNVPSEEVVKKMKNYWRQLLNAKLITQRKFDNLTKAERGGLSELDKAGFIKRQLVETRQITKHVAQILDSRMNTKYDENDKLIREVKVITLKSKLVSDFRKDFQFYKVREINNYHHAHDAYLNAVVGTALIKKYPKLESEFVYGDYKVYDVRKMIAKSEQEIGKATAKYFFYSNIMNFFKTEITLANGEIRKRPLIETNGETGEIVWDKGRDFATVRKVLSMPQVNIVKKTEVQTGGFSKESILPKRNSDKLIARKKDWDPKKYGGFDSPTVAYSVLVVAKVEKGKSKKLKSVKELLGITIMERSSFEKNPIDFLEAKGYKEVKKDLIIKLPKYSLFELENGRKRMLASAGELQKGNELALPSKYVNFLYLASHYEKLKGSPEDNEQKQLFVEQHKHYLDEIIEQISEFSKRVILADANLDKVLSAYNKHRDKPIREQAENIIHLFTLTNLGAPAAFKYFDTTIDRKRYTSTKEVLDATLIHQSITGLYETRIDLSQLGGDGGEAAAKGGGGSEAAAKGGVPWLTQQPLQLTILVPLQEYQDRILNKTALPEEQKQQLKALFTKYDNLWQHWENQVGHRKIRPHNIATGDYPPRPQKQYPINPKAKPSIQIVIDDLLKQGVLTPQNSTMNTPVYPVPKPDGRWRMVLDYREVNKTIPLTAAQNQHSAGILATIVRQKYKTTLDLANGFWAHPITPDSYWLTAFTWQGKQYCWTRLPQGFLNSPALFNADAVDLLKEVPNVQVYVDDIYLSHDNPHEHIQQLEKVFQILLQAGYVVSLKKSEIGQRTVEFLGFNITKEGRGLTDTFKTKLLNVTPPKDLKQLQSILGLLNFARNFIPNFAELVQTLYNLIASSPGKYIEWTEDNTKQLNKVIEALNTASNLEERLPDQRLVIKVNTSPSAGYVRYYNESGKKPIMYLNYVFSKAELKFSMLEKLLTTMHKALIKAMDLAMGQEILVYSPIVSMTKIQKTPLPERKALPIRWITWMTYLEDPRIQFHYDKTLPELKHIPDVYTSSIPPLKHPSQYEGVFCTDGSAIKSPDPTKSNNAGMGIVHAIYNPEYKILNQWSIPLGHHTAQMAEIAAVEFACKKALKVPGPVLVITDSFYVAESANKELPYWKSNGFVNNKKEPLKHISKWKSIAECLSIKPDITIQHEKGHQPINTSIHTEGNALADKLATQGSYVVNAGKRTADGSEFEKRTADGSEFESPKKKAKVE

SEQ ID NO: 702 - protein, 2091 aa, synthetic construct
MPAAKRVKLDGGDKKYSIGLDIGTNSVGWAVITDEYKVPSKKFKVLGNTDRHSIKKNLIGALLFDSGETAEATRLKRTARRRYTRRKNRICYLQEIFSNEMAKVDDSFFHRLEESFLVEEDKKHERHPIFGNIVDEVAYHEKYPTIYHLRKKLVDSTDKADLRLIYLALAHMIKFRGHFLIEGDLNPDNSDVDKLFIQLVQTYNQLFEENPINASGVDAKAILSARLSKSRRLENLIAQLPGEKKNGLFGNLIALSLGLTPNFKSNFDLAEDAKLQLSKDTYDDDLDNLLAQIGDQYADLFLAAKNLSDAILLSDILRVNTEITKAPLSASMIKRYDEHHQDLTLLKALVRQQLPEKYKEIFFDQSKNGYAGYIDGGASQEEFYKFIKPILEKMDGTEELLVKLNREDLLRKQRTFDNGSIPHQIHLGELHAILRRQEDFYPFLKDNREKIEKILTFRIPYYVGPLARGNSRFAWMTRKSEETITPWNFEEVVDKGASAQSFIERMTNFDKNLPNEKVLPKHSLLYEYFTVYNELTKVKYVTEGMRKPAFLSGEQKKAIVDLLFKTNRKVTVKQLKEDYFKKIECFDSVEISGVEDRFNASLGTYHDLLKIIKDKDFLDNEENEDILEDIVLTLTLFEDREMIEERLKTYAHLFDDKVMKQLKRRRYTGWGRLSRKLINGIRDKQSGKTILDFLKSDGFANRNFMQLIHDDSLTFKEDIQKAQVSGQGDSLHEHIANLAGSPAIKKGILQTVKVVDELVKVMGRHKPENIVIEMARENQTTQKGQKNSRERMKRIEEGIKELGSQILKEHPVENTQLQNEKLYLYYLQNGRDMYVDQELDINRLSDYDVDHIVPQSFLKDDSIDNKVLTRSDKARGKSDNVPSEEVVKKMKNYWRQLLNAKLITQRKFDNLTKAERGGLSELDKAGFIKRQLVETRQITKHVAQILDSRMNTKYDENDKLIREVKVITLKSKLVSDFRKDFQFYKVREINNYHHAHDAYLNAVVGTALIKKYPKLESEFVYGDYKVYDVRKMIAKSEQEIGKATAKYFFYSNIMNFFKTEITLANGEIRKRPLIETNGETGEIVWDKGRDFATVRKVLSMPQVNIVKKTEVQTGGFSKESILPKRNSDKLIARKKDWDPKKYGGFDSPTVAYSVLVVAKVEKGKSKKLKSVKELLGITIMERSSFEKNPIDFLEAKGYKEVKKDLIIKLPKYSLFELENGRKRMLASAGELQKGNELALPSKYVNFLYLASHYEKLKGSPEDNEQKQLFVEQHKHYLDEIIEQISEFSKRVILADANLDKVLSAYNKHRDKPIREQAENIIHLFTLTNLGAPAAFKYFDTTIDRKRYTSTKEVLDATLIHQSITGLYETRIDLSQLGGDGGGGSGGSGGSGGSGGSGGVPWLTQQPLQLTILVPLQEYQDRILNKTALPEEQKQQLKALFTKYDNLWQHWENQVGHRKIRPHNIATGDYPPRPQKQYPINPKAKPSIQIVIDDLLKQGVLTPQNSTMNTPVYPVPKPDGRWRMVLDYREVNKTIPLTAAQNQHSAGILATIVRQKYKTTLDLANGFWAHPITPDSYWLTAFTWQGKQYCWTRLPQGFLNSPALFNADAVDLLKEVPNVQVYVDDIYLSHDNPHEHIQQLEKVFQILLQAGYVVSLKKSEIGQRTVEFLGFNITKEGRGLTDTFKTKLLNVTPPKDLKQLQSILGLLNFARNFIPNFAELVQTLYNLIASSPGKYIEWTEDNTKQLNKVIEALNTASNLEERLPDQRLVIKVNTSPSAGYVRYYNESGKKPIMYLNYVFSKAELKFSMLEKLLTTMHKALIKAMDLAMGQEILVYSPIVSMTKIQKTPLPERKALPIRWITWMTYLEDPRIQFHYDKTLPELKHIPDVYTSSIPPLKHPSQYEGVFCTDGSAIKSPDPTKSNNAGMGIVHAIYNPEYKILNQWSIPLGHHTAQMAEIAAVEFACKKALKVPGPVLVITDSFYVAESANKELPYWKSNGFVNNKKEPLKHISKWKSIAECLSIKPDITIQHEKGHQPINTSIHTEGNALADKLATQGSYVVNAGKRTADGSEFEKRTADGSEFESPKKKAKVE

SEQ ID NO: 703 - protein, 2082 aa, synthetic construct
MPAAKRVKLDGGDKKYSIGLDIGTNSVGWAVITDEYKVPSKKFKVLGNTDRHSIKKNLIGALLFDSGETAEATRLKRTARRRYTRRKNRICYLQEIFSNEMAKVDDSFFHRLEESFLVEEDKKHERHPIFGNIVDEVAYHEKYPTIYHLRKKLVDSTDKADLRLIYLALAHMIKFRGHFLIEGDLNPDNSDVDKLFIQLVQTYNQLFEENPINASGVDAKAILSARLSKSRRLENLIAQLPGEKKNGLFGNLIALSLGLTPNFKSNFDLAEDAKLQLSKDTYDDDLDNLLAQIGDQYADLFLAAKNLSDAILLSDILRVNTEITKAPLSASMIKRYDEHHQDLTLLKALVRQQLPEKYKEIFFDQSKNGYAGYIDGGASQEEFYKFIKPILEKMDGTEELLVKLNREDLLRKQRTFDNGSIPHQIHLGELHAILRRQEDFYPFLKDNREKIEKILTFRIPYYVGPLARGNSRFAWMTRKSEETITPWNFEEVVDKGASAQSFIERMTNFDKNLPNEKVLPKHSLLYEYFTVYNELTKVKYVTEGMRKPAFLSGEQKKAIVDLLFKTNRKVTVKQLKEDYFKKIECFDSVEISGVEDRFNASLGTYHDLLKIIKDKDFLDNEENEDILEDIVLTLTLFEDREMIEERLKTYAHLFDDKVMKQLKRRRYTGWGRLSRKLINGIRDKQSGKTILDFLKSDGFANRNFMQLIHDDSLTFKEDIQKAQVSGQGDSLHEHIANLAGSPAIKKGILQTVKVVDELVKVMGRHKPENIVIEMARENQTTQKGQKNSRERMKRIEEGIKELGSQILKEHPVENTQLQNEKLYLYYLQNGRDMYVDQELDINRLSDYDVDHIVPQSFLKDDSIDNKVLTRSDKARGKSDNVPSEEVVKKMKNYWRQLLNAKLITQRKFDNLTKAERGGLSELDKAGFIKRQLVETRQITKHVAQILDSRMNTKYDENDKLIREVKVITLKSKLVSDFRKDFQFYKVREINNYHHAHDAYLNAVVGTALIKKYPKLESEFVYGDYKVYDVRKMIAKSEQEIGKATAKYFFYSNIMNFFKTEITLANGEIRKRPLIETNGETGEIVWDKGRDFATVRKVLSMPQVNIVKKTEVQTGGFSKESILPKRNSDKLIARKKDWDPKKYGGFDSPTVAYSVLVVAKVEKGKSKKLKSVKELLGITIMERSSFEKNPIDFLEAKGYKEVKKDLIIKLPKYSLFELENGRKRMLASAGELQKGNELALPSKYVNFLYLASHYEKLKGSPEDNEQKQLFVEQHKHYLDEIIEQISEFSKRVILADANLDKVLSAYNKHRDKPIREQAENIIHLFTLTNLGAPAAFKYFDTTIDRKRYTSTKEVLDATLIHQSITGLYETRIDLSQLGGDGGGSSGGSGGVPWLTQQPLQLTILVPLQEYQDRILNKTALPEEQKQQLKALFTKYDNLWQHWENQVGHRKIRPHNIATGDYPPRPQKQYPINPKAKPSIQIVIDDLLKQGVLTPQNSTMNTPVYPVPKPDGRWRMVLDYREVNKTIPLTAAQNQHSAGILATIVRQKYKTTLDLANGFWAHPITPDSYWLTAFTWQGKQYCWTRLPQGFLNSPALFNADAVDLLKEVPNVQVYVDDIYLSHDNPHEHIQQLEKVFQILLQAGYVVSLKKSEIGQRTVEFLGFNITKEGRGLTDTFKTKLLNVTPPKDLKQLQSILGLLNFARNFIPNFAELVQTLYNLIASSPGKYIEWTEDNTKQLNKVIEALNTASNLEERLPDQRLVIKVNTSPSAGYVRYYNESGKKPIMYLNYVFSKAELKFSMLEKLLTTMHKALIKAMDLAMGQEILVYSPIVSMTKIQKTPLPERKALPIRWITWMTYLEDPRIQFHYDKTLPELKHIPDVYTSSIPPLKHPSQYEGVFCTDGSAIKSPDPTKSNNAGMGIVHAIYNPEYKILNQWSIPLGHHTAQMAEIAAVEFACKKALKVPGPVLVITDSFYVAESANKELPYWKSNGFVNNKKEPLKHISKWKSIAECLSIKPDITIQHEKGHQPINTSIHTEGNALADKLATQGSYVVNAGKRTADGSEFEKRTADGSEFESPKKKAKVE

SEQ ID NO: 704 - protein, 2092 aa, synthetic construct
MPAAKRVKLDGGDKKYSIGLDIGTNSVGWAVITDEYKVPSKKFKVLGNTDRHSIKKNLIGALLFDSGETAEATRLKRTARRRYTRRKNRICYLQEIFSNEMAKVDDSFFHRLEESFLVEEDKKHERHPIFGNIVDEVAYHEKYPTIYHLRKKLVDSTDKADLRLIYLALAHMIKFRGHFLIEGDLNPDNSDVDKLFIQLVQTYNQLFEENPINASGVDAKAILSARLSKSRRLENLIAQLPGEKKNGLFGNLIALSLGLTPNFKSNFDLAEDAKLQLSKDTYDDDLDNLLAQIGDQYADLFLAAKNLSDAILLSDILRVNTEITKAPLSASMIKRYDEHHQDLTLLKALVRQQLPEKYKEIFFDQSKNGYAGYIDGGASQEEFYKFIKPILEKMDGTEELLVKLNREDLLRKQRTFDNGSIPHQIHLGELHAILRRQEDFYPFLKDNREKIEKILTFRIPYYVGPLARGNSRFAWMTRKSEETITPWNFEEVVDKGASAQSFIERMTNFDKNLPNEKVLPKHSLLYEYFTVYNELTKVKYVTEGMRKPAFLSGEQKKAIVDLLFKTNRKVTVKQLKEDYFKKIECFDSVEISGVEDRFNASLGTYHDLLKIIKDKDFLDNEENEDILEDIVLTLTLFEDREMIEERLKTYAHLFDDKVMKQLKRRRYTGWGRLSRKLINGIRDKQSGKTILDFLKSDGFANRNFMQLIHDDSLTFKEDIQKAQVSGQGDSLHEHIANLAGSPAIKKGILQTVKVVDELVKVMGRHKPENIVIEMARENQTTQKGQKNSRERMKRIEEGIKELGSQILKEHPVENTQLQNEKLYLYYLQNGRDMYVDQELDINRLSDYDVDHIVPQSFLKDDSIDNKVLTRSDKARGKSDNVPSEEVVKKMKNYWRQLLNAKLITQRKFDNLTKAERGGLSELDKAGFIKRQLVETRQITKHVAQILDSRMNTKYDENDKLIREVKVITLKSKLVSDFRKDFQFYKVREINNYHHAHDAYLNAVVGTALIKKYPKLESEFVYGDYKVYDVRKMIAKSEQEIGKATAKYFFYSNIMNFFKTEITLANGEIRKRPLIETNGETGEIVWDKGRDFATVRKVLSMPQVNIVKKTEVQTGGFSKESILPKRNSDKLIARKKDWDPKKYGGFDSPTVAYSVLVVAKVEKGKSKKLKSVKELLGITIMERSSFEKNPIDFLEAKGYKEVKKDLIIKLPKYSLFELENGRKRMLASAGELQKGNELALPSKYVNFLYLASHYEKLKGSPEDNEQKQLFVEQHKHYLDEIIEQISEFSKRVILADANLDKVLSAYNKHRDKPIREQAENIIHLFTLTNLGAPAAFKYFDTTIDRKRYTSTKEVLDATLIHQSITGLYETRIDLSQLGGDGGSGSETPGTSESATPESGGVPWLTQQPLQLTILVPLQEYQDRILNKTALPEEQKQQLKALFTKYDNLWQHWENQVGHRKIRPHNIATGDYPPRPQKQYPINPKAKPSIQIVIDDLLKQGVLTPQNSTMNTPVYPVPKPDGRWRMVLDYREVNKTIPLTAAQNQHSAGILATIVRQKYKTTLDLANGFWAHPITPDSYWLTAFTWQGKQYCWTRLPQGFLNSPALFNADAVDLLKEVPNVQVYVDDIYLSHDNPHEHIQQLEKVFQILLQAGYVVSLKKSEIGQRTVEFLGFNITKEGRGLTDTFKTKLLNVTPPKDLKQLQSILGKLNFARNFIPNFAELVQTLYNLIASSPGKYIEWTEDNTKQLNKVIEALNTASNLEERLPDQRLVIKVNTSPSAGYVRYYNESGKKPIMYLNYVFSKAELKFSMLEKLLTTMHKALIKAMDLAMGQEILVYSPIVSMTKIQKTPLPERKALPIRWITWMTYLEDPRIQFHYDKTLPELKHIPDVYTSSIPPLKHPSQYEGVFCTDGSAIKSPDPTKSNNAGMGIVHAIYNPEYKILNQWSIPLGHHTAQMAEIAAVEFACKKALKVPGPVLVITDSFYVAESANKELPYWKSNGFVNNKKEPLKHISKWKSIAECLSIKPDITIQHEKGHQPINTSIHTEGNALADKLATQGSYVVNAGKRTADGSEFEKRTADGSEFESPKKKAKVE

SEQ ID NO: 705 - protein, 2087 aa, synthetic construct
MPAAKRVKLDGGDKKYSIGLDIGTNSVGWAVITDEYKVPSKKFKVLGNTDRHSIKKNLIGALLFDSGETAEATRLKRTARRRYTRRKNRICYLQEIFSNEMAKVDDSFFHRLEESFLVEEDKKHERHPIFGNIVDEVAYHEKYPTIYHLRKKLVDSTDKADLRLIYLALAHMIKFRGHFLIEGDLNPDNSDVDKLFIQLVQTYNQLFEENPINASGVDAKAILSARLSKSRRLENLIAQLPGEKKNGLFGNLIALSLGLTPNFKSNFDLAEDAKLQLSKDTYDDDLDNLLAQIGDQYADLFLAAKNLSDAILLSDILRVNTEITKAPLSASMIKRYDEHHQDLTLLKALVRQQLPEKYKEIFFDQSKNGYAGYIDGGASQEEFYKFIKPILEKMDGTEELLVKLNREDLLRKQRTFDNGSIPHQIHLGELHAILRRQEDFYPFLKDNREKIEKILTFRIPYYVGPLARGNSRFAWMTRKSEETITPWNFEEVVDKGASAQSFIERMTNFDKNLPNEKVLPKHSLLYEYFTVYNELTKVKYVTEGMRKPAFLSGEQKKAIVDLLFKTNRKVTVKQLKEDYFKKIECFDSVEISGVEDRFNASLGTYHDLLKIIKDKDFLDNEENEDILEDIVLTLTLFEDREMIEERLKTYAHLFDDKVMKQLKRRRYTGWGRLSRKLINGIRDKQSGKTILDFLKSDGFANRNFMQLIHDDSLTFKEDIQKAQVSGQGDSLHEHIANLAGSPAIKKGILQTVKVVDELVKVMGRHKPENIVIEMARENQTTQKGQKNSRERMKRIEEGIKELGSQILKEHPVENTQLQNEKLYLYYLQNGRDMYVDQELDINRLSDYDVDHIVPQSFLKDDSIDNKVLTRSDKARGKSDNVPSEEVVKKMKNYWRQLLNAKLITQRKFDNLTKAERGGLSELDKAGFIKRQLVETRQITKHVAQILDSRMNTKYDENDKLIREVKVITLKSKLVSDFRKDFQFYKVREINNYHHAHDAYLNAVVGTALIKKYPKLESEFVYGDYKVYDVRKMIAKSEQEIGKATAKYFFYSNIMNFFKTEITLANGEIRKRPLIETNGETGEIVWDKGRDFATVRKVLSMPQVNIVKKTEVQTGGFSKESILPKRNSDKLIARKKDWDPKKYGGFDSPTVAYSVLVVAKVEKGKSKKLKSVKELLGITIMERSSFEKNPIDFLEAKGYKEVKKDLIIKLPKYSLFELENGRKRMLASAGELQKGNELALPSKYVNFLYLASHYEKLKGSPEDNEQKQLFVEQHKHYLDEIIEQISEFSKRVILADANLDKVLSAYNKHRDKPIREQAENIIHLFTLTNLGAPAAFKYFDTTIDRKRYTSTKEVLDATLIHQSITGLYETRIDLSQLGGDGGPAPAPAPAPAPGGVPWLTQQPLQLTILVPLQEYQDRILNKTALPEEQKQQLKALFTKYDNLWQHWENQVGHRKIRPHNIATGDYPPRPQKQYPINPKAKPSIQIVIDDLLKQGVLTPQNSTMNTPVYPVPKPDGRWRMVLDYREVNKTIPLTAAQNQHSAGILATIVRQKYKTTLDLANGFWAHPITPDSYWLTAFTWQGKQYCWTRLPQGFLNSPALFNADAVDLLKEVPNVQVYVDDIYLSHDNPHEHIQQLEKVFQILLQAGYVVSLKKSEIGQRTVEFLGFNITKEGRGLTDTFKTKLLNVTPPKDLKQLQSILGKLNFARNFIPNFAELVQTLYNLIASSPGKYIEWTEDNTKQLNKVIEALNTASNLEERLPDQRLVIKVNTSPSAGYVRYYNESGKKPIMYLNYVFSKAELKFSMLEKLLTTMHKALIKAMDLAMGQEILVYSPIVSMTKIQKTPLPERKALPIRWITWMTYLEDPRIQFHYDKTLPELKHIPDVYTSSIPPLKHPSQYEGVFCTDGSAIKSPDPTKSNNAGMGIVHAIYNPEYKILNQWSIPLGHHTAQMAEIAAVEFACKKALKVPGPVLVITDSFYVAESANKELPYWKSNGFVNNKKEPLKHISKWKSIAECLSIKPDITIQHEKGHQPINTSIHTEGNALADKLATQGSYVVNAGKRTADGSEFEKRTADGSEFESPKKKAKVE

SEQ ID NO: 706 - protein, 2085 aa, synthetic construct
MPAAKRVKLDGGDKKYSIGLDIGTNSVGWAVITDEYKVPSKKFKVLGNTDRHSIKKNLIGALLFDSGETAEATRLKRTARRRYTRRKNRICYLQEIFSNEMAKVDDSFFHRLEESFLVEEDKKHERHPIFGNIVDEVAYHEKYPTIYHLRKKLVDSTDKADLRLIYLALAHMIKFRGHFLIEGDLNPDNSDVDKLFIQLVQTYNQLFEENPINASGVDAKAILSARLSKSRRLENLIAQLPGEKKNGLFGNLIALSLGLTPNFKSNFDLAEDAKLQLSKDTYDDDLDNLLAQIGDQYADLFLAAKNLSDAILLSDILRVNTEITKAPLSASMIKRYDEHHQDLTLLKALVRQQLPEKYKEIFFDQSKNGYAGYIDGGASQEEFYKFIKPILEKMDGTEELLVKLNREDLLRKQRTFDNGSIPHQIHLGELHAILRRQEDFYPFLKDNREKIEKILTFRIPYYVGPLARGNSRFAWMTRKSEETITPWNFEEVVDKGASAQSFIERMTNFDKNLPNEKVLPKHSLLYEYFTVYNELTKVKYVTEGMRKPAFLSGEQKKAIVDLLFKTNRKVTVKQLKEDYFKKIECFDSVEISGVEDRFNASLGTYHDLLKIIKDKDFLDNEENEDILEDIVLTLTLFEDREMIEERLKTYAHLFDDKVMKQLKRRRYTGWGRLSRKLINGIRDKQSGKTILDFLKSDGFANRNFMQLIHDDSLTFKEDIQKAQVSGQGDSLHEHIANLAGSPAIKKGILQTVKVVDELVKVMGRHKPENIVIEMARENQTTQKGQKNSRERMKRIEEGIKELGSQILKEHPVENTQLQNEKLYLYYLQNGRDMYVDQELDINRLSDYDVDHIVPQSFLKDDSIDNKVLTRSDKARGKSDNVPSEEVVKKMKNYWRQLLNAKLITQRKFDNLTKAERGGLSELDKAGFIKRQLVETRQITKHVAQILDSRMNTKYDENDKLIREVKVITLKSKLVSDFRKDFQFYKVREINNYHHAHDAYLNAVVGTALIKKYPKLESEFVYGDYKVYDVRKMIAKSEQEIGKATAKYFFYSNIMNFFKTEITLANGEIRKRPLIETNGETGEIVWDKGRDFATVRKVLSMPQVNIVKKTEVQTGGFSKESILPKRNSDKLIARKKDWDPKKYGGFDSPTVAYSVLVVAKVEKGKSKKLKSVKELLGITIMERSSFEKNPIDFLEAKGYKEVKKDLIIKLPKYSLFELENGRKRMLASAGELQKGNELALPSKYVNFLYLASHYEKLKGSPEDNEQKQLFVEQHKHYLDEIIEQISEFSKRVILADANLDKVLSAYNKHRDKPIREQAENIIHLFTLTNLGAPAAFKYFDTTIDRKRYTSTKEVLDATLIHQSITGLYETRIDLSQLGGDGGPAPGGGGSSGGVPWLTQQPLQLTILVPLQEYQDRILNKTALPEEQKQQLKALFTKYDNLWQHWENQVGHRKIRPHNIATGDYPPRPQKQYPINPKAKPSIQIVIDDLLKQGVLTPQNSTMNTPVYPVPKPDGRWRMVLDYREVNKTIPLTAAQNQHSAGILATIVRQKYKTTLDLANGFWAHPITPDSYWLTAFTWQGKQYCWTRLPQGFLNSPALFNADAVDLLKEVPNVQVYVDDIYLSHDNPHEHIQQLEKVFQILLQAGYVVSLKKSEIGQRTVEFLGFNITKEGRGLTDTFKTKLLNVTPPKDLKQLQSILGKLNFARNFIPNFAELVQTLYNLIASSPGKYIEWTEDNTKQLNKVIEALNTASNLEERLPDQRLVIKVNTSPSAGYVRYYNESGKKPIMYLNYVFSKAELKFSMLEKLLTTMHKALIKAMDLAMGQEILVYSPIVSMTKIQKTPLPERKALPIRWITWMTYLEDPRIQFHYDKTLPELKHIPDVYTSSIPPLKHPSQYEGVFCTDGSAIKSPDPTKSNNAGMGIVHAIYNPEYKILNQWSIPLGHHTAQMAEIAAVEFACKKALKVPGPVLVITDSFYVAESANKELPYWKSNGFVNNKKEPLKHISKWKSIAECLSIKPDITIQHEKGHQPINTSIHTEGNALADKLATQGSYVVNAGKRTADGSEFEKRTADGSEFESPKKKAKVE

SEQ ID NO: 707 - protein, 2168 aa, synthetic construct
MPAAKRVKLDGGDKKYSIGLDIGTNSVGWAVITDEYKVPSKKFKVLGNTDRHSIKKNLIGALLFDSGETAEATRLKRTARRRYTRRKNRICYLQEIFSNEMAKVDDSFFHRLEESFLVEEDKKHERHPIFGNIVDEVAYHEKYPTIYHLRKKLVDSTDKADLRLIYLALAHMIKFRGHFLIEGDLNPDNSDVDKLFIQLVQTYNQLFEENPINASGVDAKAILSARLSKSRRLENLIAQLPGEKKNGLFGNLIALSLGLTPNFKSNFDLAEDAKLQLSKDTYDDDLDNLLAQIGDQYADLFLAAKNLSDAILLSDILRVNTEITKAPLSASMIKRYDEHHQDLTLLKALVRQQLPEKYKEIFFDQSKNGYAGYIDGGASQEEFYKFIKPILEKMDGTEELLVKLNREDLLRKQRTFDNGSIPHQIHLGELHAILRRQEDFYPFLKDNREKIEKILTFRIPYYVGPLARGNSRFAWMTRKSEETITPWNFEEVVDKGASAQSFIERMTNFDKNLPNEKVLPKHSLLYEYFTVYNELTKVKYVTEGMRKPAFLSGEQKKAIVDLLFKTNRKVTVKQLKEDYFKKIECFDSVEISGVEDRFNASLGTYHDLLKIIKDKDFLDNEENEDILEDIVLTLTLFEDREMIEERLKTYAHLFDDKVMKQLKRRRYTGWGRLSRKLINGIRDKQSGKTILDFLKSDGFANRNFMQLIHDDSLTFKEDIQKAQVSGQGDSLHEHIANLAGSPAIKKGILQTVKVVDELVKVMGRHKPENIVIEMARENQTTQKGQKNSRERMKRIEEGIKELGSQILKEHPVENTQLQNEKLYLYYLQNGRDMYVDQELDINRLSDYDVDHIVPQSFLKDDSIDNKVLTRSDKARGKSDNVPSEEVVKKMKNYWRQLLNAKLITQRKFDNLTKAERGGLSELDKAGFIKRQLVETRQITKHVAQILDSRMNTKYDENDKLIREVKVITLKSKLVSDFRKDFQFYKVREINNYHHAHDAYLNAVVGTALIKKYPKLESEFVYGDYKVYDVRKMIAKSEQEIGKATAKYFFYSNIMNFFKTEITLANGEIRKRPLIETNGETGEIVWDKGRDFATVRKVLSMPQVNIVKKTEVQTGGFSKESILPKRNSDKLIARKKDWDPKKYGGFDSPTVAYSVLVVAKVEKGKSKKLKSVKELLGITIMERSSFEKNPIDFLEAKGYKEVKKDLIIKLPKYSLFELENGRKRMLASAGELQKGNELALPSKYVNFLYLASHYEKLKGSPEDNEQKQLFVEQHKHYLDEIIEQISEFSKRVILADANLDKVLSAYNKHRDKPIREQAENIIHLFTLTNLGAPAAFKYFDTTIDRKRYTSTKEVLDATLIHQSITGLYETRIDLSQLGGDGGGSSGGMNPLQLLQPLPAEVKGTKLLAHWNSGATITCIPESFLEDEQPIKQTLIKTIHGEKQQNVYYLTFKVKGRKVEAEVIASPYEYILLSPTDVPWLTQQPLQLTILVPLQEYQDRILNKTALPEEQKQQLKALFTKYDNLWQHWENQVGHRKIRPHNIATGDYPPRPQKQYPINPKAKPSIQIVIDDLLKQGVLTPQNSTMNTPVYPVPKPDGRWRMVLDYREVNKTIPLTAAQNQHSAGILATIVRQKYKTTLDLANGFWAHPITPDSYWLTAFTWQGKQYCWTRLPQGFLNSPALFNADAVDLLKEVPNVQVYVDDIYLSHDNPHEHIQQLEKVFQILLQAGYVVSLKKSEIGQRTVEFLGFNITKEGRGLTDTFKTKLLNVTPPKDLKQLQSILGLLNFARNFIPNFAELVQTLYNLIASSPGKYIEWTEDNTKQLNKVIEALNTASNLEERLPDQRLVIKVNTSPSAGYVRYYNESGKKPIMYLNYVFSKAELKFSMLEKLLTTMHKALIKAMDLAMGQEILVYSPIVSMTKIQKTPLPERKALPIRWITWMTYLEDPRIQFHYDKTLPELKHIPDVYTSSIPPLKHPSQYEGVFCTDGSAIKSPDPTKSNNAGMGIVHAIYNPEYKILNQWSIPLGHHTAQMAEIAAVEFACKKALKVPGPVLVITDSFYVAESANKELPYWKSNGFVNNKKEPLKHISKWKSIAECLSIKPDITIQHEKGHQPINTSIHTEGNALADKLATQGSYVVNAGKRTADGSEFEKRTADGSEFESPKKKAKVE

SEQ ID NO: 708 - protein, 2174 aa, synthetic construct
MPAAKRVKLDGGDKKYSIGLDIGTNSVGWAVITDEYKVPSKKFKVLGNTDRHSIKKNLIGALLFDSGETAEATRLKRTARRRYTRRKNRICYLQEIFSNEMAKVDDSFFHRLEESFLVEEDKKHERHPIFGNIVDEVAYHEKYPTIYHLRKKLVDSTDKADLRLIYLALAHMIKFRGHFLIEGDLNPDNSDVDKLFIQLVQTYNQLFEENPINASGVDAKAILSARLSKSRRLENLIAQLPGEKKNGLFGNLIALSLGLTPNFKSNFDLAEDAKLQLSKDTYDDDLDNLLAQIGDQYADLFLAAKNLSDAILLSDILRVNTEITKAPLSASMIKRYDEHHQDLTLLKALVRQQLPEKYKEIFFDQSKNGYAGYIDGGASQEEFYKFIKPILEKMDGTEELLVKLNREDLLRKQRTFDNGSIPHQIHLGELHAILRRQEDFYPFLKDNREKIEKILTFRIPYYVGPLARGNSRFAWMTRKSEETITPWNFEEVVDKGASAQSFIERMTNFDKNLPNEKVLPKHSLLYEYFTVYNELTKVKYVTEGMRKPAFLSGEQKKAIVDLLFKTNRKVTVKQLKEDYFKKIECFDSVEISGVEDRFNASLGTYHDLLKIIKDKDFLDNEENEDILEDIVLTLTLFEDREMIEERLKTYAHLFDDKVMKQLKRRRYTGWGRLSRKLINGIRDKQSGKTILDFLKSDGFANRNFMQLIHDDSLTFKEDIQKAQVSGQGDSLHEHIANLAGSPAIKKGILQTVKVVDELVKVMGRHKPENIVIEMARENQTTQKGQKNSRERMKRIEEGIKELGSQILKEHPVENTQLQNEKLYLYYLQNGRDMYVDQELDINRLSDYDVDHIVPQSFLKDDSIDNKVLTRSDKARGKSDNVPSEEVVKKMKNYWRQLLNAKLITQRKFDNLTKAERGGLSELDKAGFIKRQLVETRQITKHVAQILDSRMNTKYDENDKLIREVKVITLKSKLVSDFRKDFQFYKVREINNYHHAHDAYLNAVVGTALIKKYPKLESEFVYGDYKVYDVRKMIAKSEQEIGKATAKYFFYSNIMNFFKTEITLANGEIRKRPLIETNGETGEIVWDKGRDFATVRKVLSMPQVNIVKKTEVQTGGFSKESILPKRNSDKLIARKKDWDPKKYGGFDSPTVAYSVLVVAKVEKGKSKKLKSVKELLGITIMERSSFEKNPIDFLEAKGYKEVKKDLIIKLPKYSLFELENGRKRMLASAGELQKGNELALPSKYVNFLYLASHYEKLKGSPEDNEQKQLFVEQHKHYLDEIIEQISEFSKRVILADANLDKVLSAYNKHRDKPIREQAENIIHLFTLTNLGAPAAFKYFDTTIDRKRYTSTKEVLDATLIHQSITGLYETRIDLSQLGGDGGGGGPAPGSSGGMNPLQLLQPLPAEVKGTKLLAHWNSGATITCIPESFLEDEQPIKQTLIKTIHGEKQQNVYYLTFKVKGRKVEAEVIASPYEYILLSPTDVPWLTQQPLQLTILVPLQEYQDRILNKTALPEEQKQQLKALFTKYDNLWQHWENQVGHRKIRPHNIATGDYPPRPQKQYPINPKAKPSIQIVIDDLLKQGVLTPQNSTMNTPVYPVPKPDGRWRMVLDYREVNKTIPLTAAQNQHSAGILATIVRQKYKTTLDLANGFWAHPITPDSYWLTAFTWQGKQYCWTRLPQGFLNSPALFNADAVDLLKEVPNVQVYVDDIYLSHDNPHEHIQQLEKVFQILLQAGYVVSLKKSEIGQRTVEFLGFNITKEGRGLTDTFKTKLLNVTPPKDLKQLQSILGLLNFARNFIPNFAELVQTLYNLIASSPGKYIEWTEDNTKQLNKVIEALNTASNLEERLPDQRLVIKVNTSPSAGYVRYYNESGKKPIMYLNYVFSKAELKFSMLEKLLTTMHKALIKAMDLAMGQEILVYSPIVSMTKIQKTPLPERKALPIRWITWMTYLEDPRIQFHYDKTLPELKHIPDVYTSSIPPLKHPSQYEGVFCTDGSAIKSPDPTKSNNAGMGIVHAIYNPEYKILNQWSIPLGHHTAQMAEIAAVEFACKKALKVPGPVLVITDSFYVAESANKELPYWKSNGFVNNKKEPLKHISKWKSIAECLSIKPDITIQHEKGHQPINTSIHTEGNALADKLATQGSYVVNAGKRTADGSEFEKRTADGSEFESPKKKAKVE

SEQ ID NO: 709 - protein, 2176 aa, synthetic construct
MPAAKRVKLDGGDKKYSIGLDIGTNSVGWAVITDEYKVPSKKFKVLGNTDRHSIKKNLIGALLFDSGETAEATRLKRTARRRYTRRKNRICYLQEIFSNEMAKVDDSFFHRLEESFLVEEDKKHERHPIFGNIVDEVAYHEKYPTIYHLRKKLVDSTDKADLRLIYLALAHMIKFRGHFLIEGDLNPDNSDVDKLFIQLVQTYNQLFEENPINASGVDAKAILSARLSKSRRLENLIAQLPGEKKNGLFGNLIALSLGLTPNFKSNFDLAEDAKLQLSKDTYDDDLDNLLAQIGDQYADLFLAAKNLSDAILLSDILRVNTEITKAPLSASMIKRYDEHHQDLTLLKALVRQQLPEKYKEIFFDQSKNGYAGYIDGGASQEEFYKFIKPILEKMDGTEELLVKLNREDLLRKQRTFDNGSIPHQIHLGELHAILRRQEDFYPFLKDNREKIEKILTFRIPYYVGPLARGNSRFAWMTRKSEETITPWNFEEVVDKGASAQSFIERMTNFDKNLPNEKVLPKHSLLYEYFTVYNELTKVKYVTEGMRKPAFLSGEQKKAIVDLLFKTNRKVTVKQLKEDYFKKIECFDSVEISGVEDRFNASLGTYHDLLKIIKDKDFLDNEENEDILEDIVLTLTLFEDREMIEERLKTYAHLFDDKVMKQLKRRRYTGWGRLSRKLINGIRDKQSGKTILDFLKSDGFANRNFMQLIHDDSLTFKEDIQKAQVSGQGDSLHEHIANLAGSPAIKKGILQTVKVVDELVKVMGRHKPENIVIEMARENQTTQKGQKNSRERMKRIEEGIKELGSQILKEHPVENTQLQNEKLYLYYLQNGRDMYVDQELDINRLSDYDVDHIVPQSFLKDDSIDNKVLTRSDKARGKSDNVPSEEVVKKMKNYWRQLLNAKLITQRKFDNLTKAERGGLSELDKAGFIKRQLVETRQITKHVAQILDSRMNTKYDENDKLIREVKVITLKSKLVSDFRKDFQFYKVREINNYHHAHDAYLNAVVGTALIKKYPKLESEFVYGDYKVYDVRKMIAKSEQEIGKATAKYFFYSNIMNFFKTEITLANGEIRKRPLIETNGETGEIVWDKGRDFATVRKVLSMPQVNIVKKTEVQTGGFSKESILPKRNSDKLIARKKDWDPKKYGGFDSPTVAYSVLVVAKVEKGKSKKLKSVKELLGITIMERSSFEKNPIDFLEAKGYKEVKKDLIIKLPKYSLFELENGRKRMLASAGELQKGNELALPSKYVNFLYLASHYEKLKGSPEDNEQKQLFVEQHKHYLDEIIEQISEFSKRVILADANLDKVLSAYNKHRDKPIREQAENIIHLFTLTNLGAPAAFKYFDTTIDRKRYTSTKEVLDATLIHQSITGLYETRIDLSQLGGDGGPAPEAAAKGSSGGMNPLQLLQPLPAEVKGTKLLAHWNSGATITCIPESFLEDEQPIKQTLIKTIHGEKQQNVYYLTFKVKGRKVEAEVIASPYEYILLSPTDVPWLTQQPLQLTILVPLQEYQDRILNKTALPEEQKQQLKALFTKYDNLWQHWENQVGHRKIRPHNIATGDYPPRPQKQYPINPKAKPSIQIVIDDLLKQGVLTPQNSTMNTPVYPVPKPDGRWRMVLDYREVNKTIPLTAAQNQHSAGILATIVRQKYKTTLDLANGFWAHPITPDSYWLTAFTWQGKQYCWTRLPQGFLNSPALFNADAVDLLKEVPNVQVYVDDIYLSHDNPHEHIQQLEKVFQILLQAGYVVSLKKSEIGQRTVEFLGFNITKEGRGLTDTFKTKLLNVTPPKDLKQLQSILGLLNFARNFIPNFAELVQTLYNLIASSPGKYIEWTEDNTKQLNKVIEALNTASNLEERLPDQRLVIKVNTSPSAGYVRYYNESGKKPIMYLNYVFSKAELKFSMLEKLLTTMHKALIKAMDLAMGQEILVYSPIVSMTKIQKTPLPERKALPIRWITWMTYLEDPRIQFHYDKTLPELKHIPDVYTSSIPPLKHPSQYEGVFCTDGSAIKSPDPTKSNNAGMGIVHAIYNPEYKILNQWSIPLGHHTAQMAEIAAVEFACKKALKVPGPVLVITDSFYVAESANKELPYWKSNGFVNNKKEPLKHISKWKSIAECLSIKPDITIQHEKGHQPINTSIHTEGNALADKLATQGSYVVNAGKRTADGSEFEKRTADGSEFESPKKKAKVE

SEQ ID NO: 710 - protein, 2171 aa, synthetic construct
MPAAKRVKLDGGDKKYSIGLDIGTNSVGWAVITDEYKVPSKKFKVLGNTDRHSIKKNLIGALLFDSGETAEATRLKRTARRRYTRRKNRICYLQEIFSNEMAKVDDSFFHRLEESFLVEEDKKHERHPIFGNIVDEVAYHEKYPTIYHLRKKLVDSTDKADLRLIYLALAHMIKFRGHFLIEGDLNPDNSDVDKLFIQLVQTYNQLFEENPINASGVDAKAILSARLSKSRRLENLIAQLPGEKKNGLFGNLIALSLGLTPNFKSNFDLAEDAKLQLSKDTYDDDLDNLLAQIGDQYADLFLAAKNLSDAILLSDILRVNTEITKAPLSASMIKRYDEHHQDLTLLKALVRQQLPEKYKEIFFDQSKNGYAGYIDGGASQEEFYKFIKPILEKMDGTEELLVKLNREDLLRKQRTFDNGSIPHQIHLGELHAILRRQEDFYPFLKDNREKIEKILTFRIPYYVGPLARGNSRFAWMTRKSEETITPWNFEEVVDKGASAQSFIERMTNFDKNLPNEKVLPKHSLLYEYFTVYNELTKVKYVTEGMRKPAFLSGEQKKAIVDLLFKTNRKVTVKQLKEDYFKKIECFDSVEISGVEDRFNASLGTYHDLLKIIKDKDFLDNEENEDILEDIVLTLTLFEDREMIEERLKTYAHLFDDKVMKQLKRRRYTGWGRLSRKLINGIRDKQSGKTILDFLKSDGFANRNFMQLIHDDSLTFKEDIQKAQVSGQGDSLHEHIANLAGSPAIKKGILQTVKVVDELVKVMGRHKPENIVIEMARENQTTQKGQKNSRERMKRIEEGIKELGSQILKEHPVENTQLQNEKLYLYYLQNGRDMYVDQELDINRLSDYDVDHIVPQSFLKDDSIDNKVLTRSDKARGKSDNVPSEEVVKKMKNYWRQLLNAKLITQRKFDNLTKAERGGLSELDKAGFIKRQLVETRQITKHVAQILDSRMNTKYDENDKLIREVKVITLKSKLVSDFRKDFQFYKVREINNYHHAHDAYLNAVVGTALIKKYPKLESEFVYGDYKVYDVRKMIAKSEQEIGKATAKYFFYSNIMNFFKTEITLANGEIRKRPLIETNGETGEIVWDKGRDFATVRKVLSMPQVNIVKKTEVQTGGFSKESILPKRNSDKLIARKKDWDPKKYGGFDSPTVAYSVLVVAKVEKGKSKKLKSVKELLGITIMERSSFEKNPIDFLEAKGYKEVKKDLIIKLPKYSLFELENGRKRMLASAGELQKGNELALPSKYVNFLYLASHYEKLKGSPEDNEQKQLFVEQHKHYLDEIIEQISEFSKRVILADANLDKVLSAYNKHRDKPIREQAENIIHLFTLTNLGAPAAFKYFDTTIDRKRYTSTKEVLDATLIHQSITGLYETRIDLSQLGGDGGGGGGSSGGMNPLQLLQPLPAEVKGTKLLAHWNSGATITCIPESFLEDEQPIKQTLIKTIHGEKQQNVYYLTFKVKGRKVEAEVIASPYEYILLSPTDVPWLTQQPLQLTILVPLQEYQDRILNKTALPEEQKQQLKALFTKYDNLWQHWENQVGHRKIRPHNIATGDYPPRPQKQYPINPKAKPSIQIVIDDLLKQGVLTPQNSTMNTPVYPVPKPDGRWRMVLDYREVNKTIPLTAAQNQHSAGILATIVRQKYKTTLDLANGFWAHPITPDSYWLTAFTWQGKQYCWTRLPQGFLNSPALFNADAVDLLKEVPNVQVYVDDIYLSHDNPHEHIQQLEKVFQILLQAGYVVSLKKSEIGQRTVEFLGFNITKEGRGLTDTFKTKLLNVTPPKDLKQLQSILGLLNFARNFIPNFAELVQTLYNLIASSPGKYIEWTEDNTKQLNKVIEALNTASNLEERLPDQRLVIKVNTSPSAGYVRYYNESGKKPIMYLNYVFSKAELKFSMLEKLLTTMHKALIKAMDLAMGQEILVYSPIVSMTKIQKTPLPERKALPIRWITWMTYLEDPRIQFHYDKTLPELKHIPDVYTSSIPPLKHPSQYEGVFCTDGSAIKSPDPTKSNNAGMGIVHAIYNPEYKILNQWSIPLGHHTAQMAEIAAVEFACKKALKVPGPVLVITDSFYVAESANKELPYWKSNGFVNNKKEPLKHISKWKSIAECLSIKPDITIQHEKGHQPINTSIHTEGNALADKLATQGSYVVNAGKRTADGSEFEKRTADGSEFESPKKKAKVE

SEQ ID NO: 711 - protein, 2174 aa, synthetic construct
MPAAKRVKLDGGDKKYSIGLDIGTNSVGWAVITDEYKVPSKKFKVLGNTDRHSIKKNLIGALLFDSGETAEATRLKRTARRRYTRRKNRICYLQEIFSNEMAKVDDSFFHRLEESFLVEEDKKHERHPIFGNIVDEVAYHEKYPTIYHLRKKLVDSTDKADLRLIYLALAHMIKFRGHFLIEGDLNPDNSDVDKLFIQLVQTYNQLFEENPINASGVDAKAILSARLSKSRRLENLIAQLPGEKKNGLFGNLIALSLGLTPNFKSNFDLAEDAKLQLSKDTYDDDLDNLLAQIGDQYADLFLAAKNLSDAILLSDILRVNTEITKAPLSASMIKRYDEHHQDLTLLKALVRQQLPEKYKEIFFDQSKNGYAGYIDGGASQEEFYKFIKPILEKMDGTEELLVKLNREDLLRKQRTFDNGSIPHQIHLGELHAILRRQEDFYPFLKDNREKIEKILTFRIPYYVGPLARGNSRFAWMTRKSEETITPWNFEEVVDKGASAQSFIERMTNFDKNLPNEKVLPKHSLLYEYFTVYNELTKVKYVTEGMRKPAFLSGEQKKAIVDLLFKTNRKVTVKQLKEDYFKKIECFDSVEISGVEDRFNASLGTYHDLLKIIKDKDFLDNEENEDILEDIVLTLTLFEDREMIEERLKTYAHLFDDKVMKQLKRRRYTGWGRLSRKLINGIRDKQSGKTILDFLKSDGFANRNFMQLIHDDSLTFKEDIQKAQVSGQGDSLHEHIANLAGSPAIKKGILQTVKVVDELVKVMGRHKPENIVIEMARENQTTQKGQKNSRERMKRIEEGIKELGSQILKEHPVENTQLQNEKLYLYYLQNGRDMYVDQELDINRLSDYDVDHIVPQSFLKDDSIDNKVLTRSDKARGKSDNVPSEEVVKKMKNYWRQLLNAKLITQRKFDNLTKAERGGLSELDKAGFIKRQLVETRQITKHVAQILDSRMNTKYDENDKLIREVKVITLKSKLVSDFRKDFQFYKVREINNYHHAHDAYLNAVVGTALIKKYPKLESEFVYGDYKVYDVRKMIAKSEQEIGKATAKYFFYSNIMNFFKTEITLANGEIRKRPLIETNGETGEIVWDKGRDFATVRKVLSMPQVNIVKKTEVQTGGFSKESILPKRNSDKLIARKKDWDPKKYGGFDSPTVAYSVLVVAKVEKGKSKKLKSVKELLGITIMERSSFEKNPIDFLEAKGYKEVKKDLIIKLPKYSLFELENGRKRMLASAGELQKGNELALPSKYVNFLYLASHYEKLKGSPEDNEQKQLFVEQHKHYLDEIIEQISEFSKRVILADANLDKVLSAYNKHRDKPIREQAENIIHLFTLTNLGAPAAFKYFDTTIDRKRYTSTKEVLDATLIHQSITGLYETRIDLSQLGGDGGGSSGGGGGSGGMNPLQLLQPLPAEVKGTKLLAHWNSGATITCIPESFLEDEQPIKQTLIKTIHGEKQQNVYYLTFKVKGRKVEAEVIASPYEYILLSPTDVPWLTQQPLQLTILVPLQEYQDRILNKTALPEEQKQQLKALFTKYDNLWQHWENQVGHRKIRPHNIATGDYPPRPQKQYPINPKAKPSIQIVIDDLLKQGVLTPQNSTMNTPVYPVPKPDGRWRMVLDYREVNKTIPLTAAQNQHSAGILATIVRQKYKTTLDLANGFWAHPITPDSYWLTAFTWQGKQYCWTRLPQGFLNSPALFNADAVDLLKEVPNVQVYVDDIYLSHDNPHEHIQQLEKVFQILLQAGYVVSLKKSEIGQRTVEFLGFNITKEGRGLTDTFKTKLLNVTPPKDLKQLQSILGLLNFARNFIPNFAELVQTLYNLIASSPGKYIEWTEDNTKQLNKVIEALNTASNLEERLPDQRLVIKVNTSPSAGYVRYYNESGKKPIMYLNYVFSKAELKFSMLEKLLTTMHKALIKAMDLAMGQEILVYSPIVSMTKIQKTPLPERKALPIRWITWMTYLEDPRIQFHYDKTLPELKHIPDVYTSSIPPLKHPSQYEGVFCTDGSAIKSPDPTKSNNAGMGIVHAIYNPEYKILNQWSIPLGHHTAQMAEIAAVEFACKKALKVPGPVLVITDSFYVAESANKELPYWKSNGFVNNKKEPLKHISKWKSIAECLSIKPDITIQHEKGHQPINTSIHTEGNALADKLATQGSYVVNAGKRTADGSEFEKRTADGSEFESPKKKAKVE

SEQ ID NO: 712 - protein, 2176 aa, synthetic construct
MPAAKRVKLDGGDKKYSIGLDIGTNSVGWAVITDEYKVPSKKFKVLGNTDRHSIKKNLIGALLFDSGETAEATRLKRTARRRYTRRKNRICYLQEIFSNEMAKVDDSFFHRLEESFLVEEDKKHERHPIFGNIVDEVAYHEKYPTIYHLRKKLVDSTDKADLRLIYLALAHMIKFRGHFLIEGDLNPDNSDVDKLFIQLVQTYNQLFEENPINASGVDAKAILSARLSKSRRLENLIAQLPGEKKNGLFGNLIALSLGLTPNFKSNFDLAEDAKLQLSKDTYDDDLDNLLAQIGDQYADLFLAAKNLSDAILLSDILRVNTEITKAPLSASMIKRYDEHHQDLTLLKALVRQQLPEKYKEIFFDQSKNGYAGYIDGGASQEEFYKFIKPILEKMDGTEELLVKLNREDLLRKQRTFDNGSIPHQIHLGELHAILRRQEDFYPFLKDNREKIEKILTFRIPYYVGPLARGNSRFAWMTRKSEETITPWNFEEVVDKGASAQSFIERMTNFDKNLPNEKVLPKHSLLYEYFTVYNELTKVKYVTEGMRKPAFLSGEQKKAIVDLLFKTNRKVTVKQLKEDYFKKIECFDSVEISGVEDRFNASLGTYHDLLKIIKDKDFLDNEENEDILEDIVLTLTLFEDREMIEERLKTYAHLFDDKVMKQLKRRRYTGWGRLSRKLINGIRDKQSGKTILDFLKSDGFANRNFMQLIHDDSLTFKEDIQKAQVSGQGDSLHEHIANLAGSPAIKKGILQTVKVVDELVKVMGRHKPENIVIEMARENQTTQKGQKNSRERMKRIEEGIKELGSQILKEHPVENTQLQNEKLYLYYLQNGRDMYVDQELDINRLSDYDVDHIVPQSFLKDDSIDNKVLTRSDKARGKSDNVPSEEVVKKMKNYWRQLLNAKLITQRKFDNLTKAERGGLSELDKAGFIKRQLVETRQITKHVAQILDSRMNTKYDENDKLIREVKVITLKSKLVSDFRKDFQFYKVREINNYHHAHDAYLNAVVGTALIKKYPKLESEFVYGDYKVYDVRKMIAKSEQEIGKATAKYFFYSNIMNFFKTEITLANGEIRKRPLIETNGETGEIVWDKGRDFATVRKVLSMPQVNIVKKTEVQTGGFSKESILPKRNSDKLIARKKDWDPKKYGGFDSPTVAYSVLVVAKVEKGKSKKLKSVKELLGITIMERSSFEKNPIDFLEAKGYKEVKKDLIIKLPKYSLFELENGRKRMLASAGELQKGNELALPSKYVNFLYLASHYEKLKGSPEDNEQKQLFVEQHKHYLDEIIEQISEFSKRVILADANLDKVLSAYNKHRDKPIREQAENIIHLFTLTNLGAPAAFKYFDTTIDRKRYTSTKEVLDATLIHQSITGLYETRIDLSQLGGDGGGSSGGSEAAAKGGMNPLQLLQPLPAEVKGTKLLAHWNSGATITCIPESFLEDEQPIKQTLIKTIHGEKQQNVYYLTFKVKGRKVEAEVIASPYEYILLSPTDVPWLTQQPLQLTILVPLQEYQDRILNKTALPEEQKQQLKALFTKYDNLWQHWENQVGHRKIRPHNIATGDYPPRPQKQYPINPKAKPSIQIVIDDLLKQGVLTPQNSTMNTPVYPVPKPDGRWRMVLDYREVNKTIPLTAAQNQHSAGILATIVRQKYKTTLDLANGFWAHPITPDSYWLTAFTWQGKQYCWTRLPQGFLNSPALFNADAVDLLKEVPNVQVYVDDIYLSHDNPHEHIQQLEKVFQILLQAGYVVSLKKSEIGQRTVEFLGFNITKEGRGLTDTFKTKLLNVTPPKDLKQLQSILGLLNFARNFIPNFAELVQTLYNLIASSPGKYIEWTEDNTKQLNKVIEALNTASNLEERLPDQRLVIKVNTSPSAGYVRYYNESGKKPIMYLNYVFSKAELKFSMLEKLLTTMHKALIKAMDLAMGQEILVYSPIVSMTKIQKTPLPERKALPIRWITWMTYLEDPRIQFHYDKTLPELKHIPDVYTSSIPPLKHPSQYEGVFCTDGSAIKSPDPTKSNNAGMGIVHAIYNPEYKILNQWSIPLGHHTAQMAEIAAVEFACKKALKVPGPVLVITDSFYVAESANKELPYWKSNGFVNNKKEPLKHISKWKSIAECLSIKPDITIQHEKGHQPINTSIHTEGNALADKLATQGSYVVNAGKRTADGSEFEKRTADGSEFESPKKKAKVE

SEQ ID NO: 713 - protein, 2181 aa, synthetic construct
MPAAKRVKLDGGDKKYSIGLDIGTNSVGWAVITDEYKVPSKKFKVLGNTDRHSIKKNLIGALLFDSGETAEATRLKRTARRRYTRRKNRICYLQEIFSNEMAKVDDSFFHRLEESFLVEEDKKHERHPIFGNIVDEVAYHEKYPTIYHLRKKLVDSTDKADLRLIYLALAHMIKFRGHFLIEGDLNPDNSDVDKLFIQLVQTYNQLFEENPINASGVDAKAILSARLSKSRRLENLIAQLPGEKKNGLFGNLIALSLGLTPNFKSNFDLAEDAKLQLSKDTYDDDLDNLLAQIGDQYADLFLAAKNLSDAILLSDILRVNTEITKAPLSASMIKRYDEHHQDLTLLKALVRQQLPEKYKEIFFDQSKNGYAGYIDGGASQEEFYKFIKPILEKMDGTEELLVKLNREDLLRKQRTFDNGSIPHQIHLGELHAILRRQEDFYPFLKDNREKIEKILTFRIPYYVGPLARGNSRFAWMTRKSEETITPWNFEEVVDKGASAQSFIERMTNFDKNLPNEKVLPKHSLLYEYFTVYNELTKVKYVTEGMRKPAFLSGEQKKAIVDLLFKTNRKVTVKQLKEDYFKKIECFDSVEISGVEDRFNASLGTYHDLLKIIKDKDFLDNEENEDILEDIVLTLTLFEDREMIEERLKTYAHLFDDKVMKQLKRRRYTGWGRLSRKLINGIRDKQSGKTILDFLKSDGFANRNFMQLIHDDSLTFKEDIQKAQVSGQGDSLHEHIANLAGSPAIKKGILQTVKVVDELVKVMGRHKPENIVIEMARENQTTQKGQKNSRERMKRIEEGIKELGSQILKEHPVENTQLQNEKLYLYYLQNGRDMYVDQELDINRLSDYDVDHIVPQSFLKDDSIDNKVLTRSDKARGKSDNVPSEEVVKKMKNYWRQLLNAKLITQRKFDNLTKAERGGLSELDKAGFIKRQLVETRQITKHVAQILDSRMNTKYDENDKLIREVKVITLKSKLVSDFRKDFQFYKVREINNYHHAHDAYLNAVVGTALIKKYPKLESEFVYGDYKVYDVRKMIAKSEQEIGKATAKYFFYSNIMNFFKTEITLANGEIRKRPLIETNGETGEIVWDKGRDFATVRKVLSMPQVNIVKKTEVQTGGFSKESILPKRNSDKLIARKKDWDPKKYGGFDSPTVAYSVLVVAKVEKGKSKKLKSVKELLGITIMERSSFEKNPIDFLEAKGYKEVKKDLIIKLPKYSLFELENGRKRMLASAGELQKGNELALPSKYVNFLYLASHYEKLKGSPEDNEQKQLFVEQHKHYLDEIIEQISEFSKRVILADANLDKVLSAYNKHRDKPIREQAENIIHLFTLTNLGAPAAFKYFDTTIDRKRYTSTKEVLDATLIHQSITGLYETRIDLSQLGGDGGSGSETPGTSESATPESGGMNPLQLLQPLPAEVKGTKLLAHWNSGATITCIPESFLEDEQPIKQTLIKTIHGEKQQNVYYLTFKVKGRKVEAEVIASPYEYILLSPTDVPWLTQQPLQLTILVPLQEYQDRILNKTALPEEQKQQLKALFTKYDNLWQHWENQVGHRKIRPHNIATGDYPPRPQKQYPINPKAKPSIQIVIDDLLKQGVLTPQNSTMNTPVYPVPKPDGRWRMVLDYREVNKTIPLTAAQNQHSAGILATIVRQKYKTTLDLANGFWAHPITPDSYWLTAFTWQGKQYCWTRLPQGFLNSPALFNADAVDLLKEVPNVQVYVDDIYLSHDNPHEHIQQLEKVFQILLQAGYVVSLKKSEIGQRTVEFLGFNITKEGRGLTDTFKTKLLNVTPPKDLKQLQSILGLLNFARNFIPNFAELVQTLYNLIASSPGKYIEWTEDNTKQLNKVIEALNTASNLEERLPDQRLVIKVNTSPSAGYVRYYNESGKKPIMYLNYVFSKAELKFSMLEKLLTTMHKALIKAMDLAMGQEILVYSPIVSMTKIQKTPLPERKALPIRWITWMTYLEDPRIQFHYDKTLPELKHIPDVYTSSIPPLKHPSQYEGVFCTDGSAIKSPDPTKSNNAGMGIVHAIYNPEYKILNQWSIPLGHHTAQMAEIAAVEFACKKALKVPGPVLVITDSFYVAESANKELPYWKSNGFVNNKKEPLKHISKWKSIAECLSIKPDITIQHEKGHQPINTSIHTEGNALADKLATQGSYVVNAGKRTADGSEFEKRTADGSEFESPKKKAKVE

SEQ ID NO: 714 - protein, 2176 aa, synthetic construct
MPAAKRVKLDGGDKKYSIGLDIGTNSVGWAVITDEYKVPSKKFKVLGNTDRHSIKKNLIGALLFDSGETAEATRLKRTARRRYTRRKNRICYLQEIFSNEMAKVDDSFFHRLEESFLVEEDKKHERHPIFGNIVDEVAYHEKYPTIYHLRKKLVDSTDKADLRLIYLALAHMIKFRGHFLIEGDLNPDNSDVDKLFIQLVQTYNQLFEENPINASGVDAKAILSARLSKSRRLENLIAQLPGEKKNGLFGNLIALSLGLTPNFKSNFDLAEDAKLQLSKDTYDDDLDNLLAQIGDQYADLFLAAKNLSDAILLSDILRVNTEITKAPLSASMIKRYDEHHQDLTLLKALVRQQLPEKYKEIFFDQSKNGYAGYIDGGASQEEFYKFIKPILEKMDGTEELLVKLNREDLLRKQRTFDNGSIPHQIHLGELHAILRRQEDFYPFLKDNREKIEKILTFRIPYYVGPLARGNSRFAWMTRKSEETITPWNFEEVVDKGASAQSFIERMTNFDKNLPNEKVLPKHSLLYEYFTVYNELTKVKYVTEGMRKPAFLSGEQKKAIVDLLFKTNRKVTVKQLKEDYFKKIECFDSVEISGVEDRFNASLGTYHDLLKIIKDKDFLDNEENEDILEDIVLTLTLFEDREMIEERLKTYAHLFDDKVMKQLKRRRYTGWGRLSRKLINGIRDKQSGKTILDFLKSDGFANRNFMQLIHDDSLTFKEDIQKAQVSGQGDSLHEHIANLAGSPAIKKGILQTVKVVDELVKVMGRHKPENIVIEMARENQTTQKGQKNSRERMKRIEEGIKELGSQILKEHPVENTQLQNEKLYLYYLQNGRDMYVDQELDINRLSDYDVDHIVPQSFLKDDSIDNKVLTRSDKARGKSDNVPSEEVVKKMKNYWRQLLNAKLITQRKFDNLTKAERGGLSELDKAGFIKRQLVETRQITKHVAQILDSRMNTKYDENDKLIREVKVITLKSKLVSDFRKDFQFYKVREINNYHHAHDAYLNAVVGTALIKKYPKLESEFVYGDYKVYDVRKMIAKSEQEIGKATAKYFFYSNIMNFFKTEITLANGEIRKRPLIETNGETGEIVWDKGRDFATVRKVLSMPQVNIVKKTEVQTGGFSKESILPKRNSDKLIARKKDWDPKKYGGFDSPTVAYSVLVVAKVEKGKSKKLKSVKELLGITIMERSSFEKNPIDFLEAKGYKEVKKDLIIKLPKYSLFELENGRKRMLASAGELQKGNELALPSKYVNFLYLASHYEKLKGSPEDNEQKQLFVEQHKHYLDEIIEQISEFSKRVILADANLDKVLSAYNKHRDKPIREQAENIIHLFTLTNLGAPAAFKYFDTTIDRKRYTSTKEVLDATLIHQSITGLYETRIDLSQLGGDGGGGSEAAAKPAPGGMNPLQLLQPLPAEVKGTKLLAHWNSGATITCIPESFLEDEQPIKQTLIKTIHGEKQQNVYYLTFKVKGRKVEAEVIASPYEYILLSPTDVPWLTQQPLQLTILVPLQEYQDRILNKTALPEEQKQQLKALFTKYDNLWQHWENQVGHRKIRPHNIATGDYPPRPQKQYPINPKAKPSIQIVIDDLLKQGVLTPQNSTMNTPVYPVPKPDGRWRMVLDYREVNKTIPLTAAQNQHSAGILATIVRQKYKTTLDLANGFWAHPITPDSYWLTAFTWQGKQYCWTRLPQGFLNSPALFNADAVDLLKEVPNVQVYVDDIYLSHDNPHEHIQQLEKVFQILLQAGYVVSLKKSEIGQRTVEFLGFNITKEGRGLTDTFKTKLLNVTPPKDLKQLQSILGLLNFARNFIPNFAELVQTLYNLIASSPGKYIEWTEDNTKQLNKVIEALNTASNLEERLPDQRLVIKVNTSPSAGYVRYYNESGKKPIMYLNYVFSKAELKFSMLEKLLTTMHKALIKAMDLAMGQEILVYSPIVSMTKIQKTPLPERKALPIRWITWMTYLEDPRIQFHYDKTLPELKHIPDVYTSSIPPLKHPSQYEGVFCTDGSAIKSPDPTKSNNAGMGIVHAIYNPEYKILNQWSIPLGHHTAQMAEIAAVEFACKKALKVPGPVLVITDSFYVAESANKELPYWKSNGFVNNKKEPLKHISKWKSIAECLSIKPDITIQHEKGHQPINTSIHTEGNALADKLATQGSYVVNAGKRTADGSEFEKRTADGSEFESPKKKAKVE

SEQ ID NO: 715 - protein, 2208 aa, synthetic construct
MPAAKRVKLDGGDKKYSIGLDIGTNSVGWAVITDEYKVPSKKFKVLGNTDRHSIKKNLIGALLFDSGETAEATRLKRTARRRYTRRKNRICYLQEIFSNEMAKVDDSFFHRLEESFLVEEDKKHERHPIFGNIVDEVAYHEKYPTIYHLRKKLVDSTDKADLRLIYLALAHMIKFRGHFLIEGDLNPDNSDVDKLFIQLVQTYNQLFEENPINASGVDAKAILSARLSKSRRLENLIAQLPGEKKNGLFGNLIALSLGLTPNFKSNFDLAEDAKLQLSKDTYDDDLDNLLAQIGDQYADLFLAAKNLSDAILLSDILRVNTEITKAPLSASMIKRYDEHHQDLTLLKALVRQQLPEKYKEIFFDQSKNGYAGYIDGGASQEEFYKFIKPILEKMDGTEELLVKLNREDLLRKQRTFDNGSIPHQIHLGELHAILRRQEDFYPFLKDNREKIEKILTFRIPYYVGPLARGNSRFAWMTRKSEETITPWNFEEVVDKGASAQSFIERMTNFDKNLPNEKVLPKHSLLYEYFTVYNELTKVKYVTEGMRKPAFLSGEQKKAIVDLLFKTNRKVTVKQLKEDYFKKIECFDSVEISGVEDRFNASLGTYHDLLKIIKDKDFLDNEENEDILEDIVLTLTLFEDREMIEERLKTYAHLFDDKVMKQLKRRRYTGWGRLSRKLINGIRDKQSGKTILDFLKSDGFANRNFMQLIHDDSLTFKEDIQKAQVSGQGDSLHEHIANLAGSPAIKKGILQTVKVVDELVKVMGRHKPENIVIEMARENQTTQKGQKNSRERMKRIEEGIKELGSQILKEHPVENTQLQNEKLYLYYLQNGRDMYVDQELDINRLSDYDVDHIVPQSFLKDDSIDNKVLTRSDKARGKSDNVPSEEVVKKMKNYWRQLLNAKLITQRKFDNLTKAERGGLSELDKAGFIKRQLVETRQITKHVAQILDSRMNTKYDENDKLIREVKVITLKSKLVSDFRKDFQFYKVREINNYHHAHDAYLNAVVGTALIKKYPKLESEFVYGDYKVYDVRKMIAKSEQEIGKATAKYFFYSNIMNFFKTEITLANGEIRKRPLIETNGETGEIVWDKGRDFATVRKVLSMPQVNIVKKTEVQTGGFSKESILPKRNSDKLIARKKDWDPKKYGGFDSPTVAYSVLVVAKVEKGKSKKLKSVKELLGITIMERSSFEKNPIDFLEAKGYKEVKKDLIIKLPKYSLFELENGRKRMLASAGELQKGNELALPSKYVNFLYLASHYEKLKGSPEDNEQKQLFVEQHKHYLDEIIEQISEFSKRVILADANLDKVLSAYNKHRDKPIREQAENIIHLFTLTNLGAPAAFKYFDTTIDRKRYTSTKEVLDATLIHQSITGLYETRIDLSQLGGDGGAEAAAKEAAAKEAAAKEAAAKALEAEAAAKEAAAKEAAAKEAAAKAGGMDLLKPLTVERKGVKIKGYWNSQADITCVPKDLLQGEEPVRQQNVTTIHGTQEGDVYYVNLKIDGRRINTEVIGTTLDYAIITPGDVPWILKKPLELTIKLDLEEQQGTLLNNSILSKKGKEELKQLFEKYSALWQSWENQVGHRRIRPHKIATGTVKPTPQKQYHINPKAKPDIQIVINDLLKQGVLIQKESTMNTPVYPVPKPNGRWRMVLDYRAVNKVTPLIAVQNQHSYGILGSLFKGRYKTTIDLSNGFWAHPIVPEDYWITAFTWQGKQYCWTVLPQGFLNSPGLFTGDVVDLLQGIPNVEVYVDDVYISHDSEKEHLEYLDILFNRLKEAGYIISLKKSNIANSIVDFLGFQITNEGRGLTDTFKEKLENITAPTTLKQLQSILGLLNFARNFIPDFTELIAPLYALIPKSTKNYVPWQIEHSTTLETLITKLNGAEYLQGRKGDKTLIMKVNASYTTGYIRYYNEGEKKPISYVSIVFSKTELKFTELEKLLTTVHKGLLKALDLSMGQNIHVYSPIVSMQNIQKTPQTAKKALASRWLSWLSYLEDPRIRFFYDPQMPALKDLPAVDTGKDNKKHPSNFQHIFYTDGSAITSPTKEGHLNAGMGIVYFINKDGNLQKQQEWSISLGNHTAQFAEIAAFEFALKKCLPLGGNILVVTDSNYVAKAYNEELDVWASNGFVNNRKKPLKHISKWKSVADLKRLRPDVVVTHEPGHQKLDSSPHAYGNNLADQLATQASFKVHAGKRTADGSEFEKRTADGSEFESPKKKAKVE

SEQ ID NO: 716 - protein, 2192 aa, synthetic construct
MPAAKRVKLDGGDKKYSIGLDIGTNSVGWAVITDEYKVPSKKFKVLGNTDRHSIKKNLIGALLFDSGETAEATRLKRTARRRYTRRKNRICYLQEIFSNEMAKVDDSFFHRLEESFLVEEDKKHERHPIFGNIVDEVAYHEKYPTIYHLRKKLVDSTDKADLRLIYLALAHMIKFRGHFLIEGDLNPDNSDVDKLFIQLVQTYNQLFEENPINASGVDAKAILSARLSKSRRLENLIAQLPGEKKNGLFGNLIALSLGLTPNFKSNFDLAEDAKLQLSKDTYDDDLDNLLAQIGDQYADLFLAAKNLSDAILLSDILRVNTEITKAPLSASMIKRYDEHHQDLTLLKALVRQQLPEKYKEIFFDQSKNGYAGYIDGGASQEEFYKFIKPILEKMDGTEELLVKLNREDLLRKQRTFDNGSIPHQIHLGELHAILRRQEDFYPFLKDNREKIEKILTFRIPYYVGPLARGNSRFAWMTRKSEETITPWNFEEVVDKGASAQSFIERMTNFDKNLPNEKVLPKHSLLYEYFTVYNELTKVKYVTEGMRKPAFLSGEQKKAIVDLLFKTNRKVTVKQLKEDYFKKIECFDSVEISGVEDRFNASLGTYHDLLKIIKDKDFLDNEENEDILEDIVLTLTLFEDREMIEERLKTYAHLFDDKVMKQLKRRRYTGWGRLSRKLINGIRDKQSGKTILDFLKSDGFANRNFMQLIHDDSLTFKEDIQKAQVSGQGDSLHEHIANLAGSPAIKKGILQTVKVVDELVKVMGRHKPENIVIEMARENQTTQKGQKNSRERMKRIEEGIKELGSQILKEHPVENTQLQNEKLYLYYLQNGRDMYVDQELDINRLSDYDVDHIVPQSFLKDDSIDNKVLTRSDKARGKSDNVPSEEVVKKMKNYWRQLLNAKLITQRKFDNLTKAERGGLSELDKAGFIKRQLVETRQITKHVAQILDSRMNTKYDENDKLIREVKVITLKSKLVSDFRKDFQFYKVREINNYHHAHDAYLNAVVGTALIKKYPKLESEFVYGDYKVYDVRKMIAKSEQEIGKATAKYFFYSNIMNFFKTEITLANGEIRKRPLIETNGETGEIVWDKGRDFATVRKVLSMPQVNIVKKTEVQTGGFSKESILPKRNSDKLIARKKDWDPKKYGGFDSPTVAYSVLVVAKVEKGKSKKLKSVKELLGITIMERSSFEKNPIDFLEAKGYKEVKKDLIIKLPKYSLFELENGRKRMLASAGELQKGNELALPSKYVNFLYLASHYEKLKGSPEDNEQKQLFVEQHKHYLDEIIEQISEFSKRVILADANLDKVLSAYNKHRDKPIREQAENIIHLFTLTNLGAPAAFKYFDTTIDRKRYTSTKEVLDATLIHQSITGLYETRIDLSQLGGDGGGGGGSGGGGSGGGGSGGGGSGGGGSGGGGSGGMDLLKPLTVERKGVKIKGYWNSQADITCVPKDLLQGEEPVRQQNVTTIHGTQEGDVYYVNLKIDGRRINTEVIGTTLDYAIITPGDVPWILKKPLELTIKLDLEEQQGTLLNNSILSKKGKEELKQLFEKYSALWQSWENQVGHRRIRPHKIATGTVKPTPQKQYHINPKAKPDIQIVINDLLKQGVLIQKESTMNTPVYPVPKPNGRWRMVLDYRAVNKVTPLIAVQNQHSYGILGSLFKGRYKTTIDLSNGFWAHPIVPEDYWITAFTWQGKQYCWTVLPQGFLNSPGLFTGDVVDLLQGIPNVEVYVDDVYISHDSEKEHLEYLDILFNRLKEAGYIISLKKSNIANSIVDFLGFQITNEGRGLTDTFKEKLENITAPTTLKQLQSILGLLNFARNFIPDFTELIAPLYALIPKSTKNYVPWQIEHSTTLETLITKLNGAEYLQGRKGDKTLIMKVNASYTTGYIRYYNEGEKKPISYVSIVFSKTELKFTELEKLLTTVHKGLLKALDLSMGQNIHVYSPIVSMQNIQKTPQTAKKALASRWLSWLSYLEDPRIRFFYDPQMPALKDLPAVDTGKDNKKHPSNFQHIFYTDGSAITSPTKEGHLNAGMGIVYFINKDGNLQKQQEWSISLGNHTAQFAEIAAFEFALKKCLPLGGNILVVTDSNYVAKAYNEELDVWASNGFVNNRKKPLKHISKWKSVADLKRLRPDVVVTHEPGHQKLDSSPHAYGNNLADQLATQASFKVHAGKRTADGSEFEKRTADGSEFESPKKKAKVE

SEQ ID NO: 717 - protein, 2171 aa, synthetic construct
MPAAKRVKLDGGDKKYSIGLDIGTNSVGWAVITDEYKVPSKKFKVLGNTDRHSIKKNLIGALLFDSGETAEATRLKRTARRRYTRRKNRICYLQEIFSNEMAKVDDSFFHRLEESFLVEEDKKHERHPIFGNIVDEVAYHEKYPTIYHLRKKLVDSTDKADLRLIYLALAHMIKFRGHFLIEGDLNPDNSDVDKLFIQLVQTYNQLFEENPINASGVDAKAILSARLSKSRRLENLIAQLPGEKKNGLFGNLIALSLGLTPNFKSNFDLAEDAKLQLSKDTYDDDLDNLLAQIGDQYADLFLAAKNLSDAILLSDILRVNTEITKAPLSASMIKRYDEHHQDLTLLKALVRQQLPEKYKEIFFDQSKNGYAGYIDGGASQEEFYKFIKPILEKMDGTEELLVKLNREDLLRKQRTFDNGSIPHQIHLGELHAILRRQEDFYPFLKDNREKIEKILTFRIPYYVGPLARGNSRFAWMTRKSEETITPWNFEEVVDKGASAQSFIERMTNFDKNLPNEKVLPKHSLLYEYFTVYNELTKVKYVTEGMRKPAFLSGEQKKAIVDLLFKTNRKVTVKQLKEDYFKKIECFDSVEISGVEDRFNASLGTYHDLLKIIKDKDFLDNEENEDILEDIVLTLTLFEDREMIEERLKTYAHLFDDKVMKQLKRRRYTGWGRLSRKLINGIRDKQSGKTILDFLKSDGFANRNFMQLIHDDSLTFKEDIQKAQVSGQGDSLHEHIANLAGSPAIKKGILQTVKVVDELVKVMGRHKPENIVIEMARENQTTQKGQKNSRERMKRIEEGIKELGSQILKEHPVENTQLQNEKLYLYYLQNGRDMYVDQELDINRLSDYDVDHIVPQSFLKDDSIDNKVLTRSDKARGKSDNVPSEEVVKKMKNYWRQLLNAKLITQRKFDNLTKAERGGLSELDKAGFIKRQLVETRQITKHVAQILDSRMNTKYDENDKLIREVKVITLKSKLVSDFRKDFQFYKVREINNYHHAHDAYLNAVVGTALIKKYPKLESEFVYGDYKVYDVRKMIAKSEQEIGKATAKYFFYSNIMNFFKTEITLANGEIRKRPLIETNGETGEIVWDKGRDFATVRKVLSMPQVNIVKKTEVQTGGFSKESILPKRNSDKLIARKKDWDPKKYGGFDSPTVAYSVLVVAKVEKGKSKKLKSVKELLGITIMERSSFEKNPIDFLEAKGYKEVKKDLIIKLPKYSLFELENGRKRMLASAGELQKGNELALPSKYVNFLYLASHYEKLKGSPEDNEQKQLFVEQHKHYLDEIIEQISEFSKRVILADANLDKVLSAYNKHRDKPIREQAENIIHLFTLTNLGAPAAFKYFDTTIDRKRYTSTKEVLDATLIHQSITGLYETRIDLSQLGGDGGGSSGGSPAPGGMDLLKPLTVERKGVKIKGYWNSQADITCVPKDLLQGEEPVRQQNVTTIHGTQEGDVYYVNLKIDGRRINTEVIGTTLDYAIITPGDVPWILKKPLELTIKLDLEEQQGTLLNNSILSKKGKEELKQLFEKYSALWQSWENQVGHRRIRPHKIATGTVKPTPQKQYHINPKAKPDIQIVINDLLKQGVLIQKESTMNTPVYPVPKPNGRWRMVLDYRAVNKVTPLIAVQNQHSYGILGSLFKGRYKTTIDLSNGFWAHPIVPEDYWITAFTWQGKQYCWTVLPQGFLNSPGLFTGDVVDLLQGIPNVEVYVDDVYISHDSEKEHLEYLDILFNRLKEAGYIISLKKSNIANSIVDFLGFQITNEGRGLTDTFKEKLENITAPTTLKQLQSILGLLNFARNFIPDFTELIAPLYALIPKSTKNYVPWQIEHSTTLETLITKLNGAEYLQGRKGDKTLIMKVNASYTTGYIRYYNEGEKKPISYVSIVFSKTELKFTELEKLLTTVHKGLLKALDLSMGQNIHVYSPIVSMQNIQKTPQTAKKALASRWLSWLSYLEDPRIRFFYDPQMPALKDLPAVDTGKDNKKHPSNFQHIFYTDGSAITSPTKEGHLNAGMGIVYFINKDGNLQKQQEWSISLGNHTAQFAEIAAFEFALKKCLPLGGNILVVTDSNYVAKAYNEELDVWASNGFVNNRKKPLKHISKWKSVADLKRLRPDVVVTHEPGHQKLDSSPHAYGNNLADQLATQASFKVHAGKRTADGSEFEKRTADGSEFESPKKKAKVE

SEQ ID NO: 718 - protein, 2177 aa, synthetic construct
MPAAKRVKLDGGDKKYSIGLDIGTNSVGWAVITDEYKVPSKKFKVLGNTDRHSIKKNLIGALLFDSGETAEATRLKRTARRRYTRRKNRICYLQEIFSNEMAKVDDSFFHRLEESFLVEEDKKHERHPIFGNIVDEVAYHEKYPTIYHLRKKLVDSTDKADLRLIYLALAHMIKFRGHFLIEGDLNPDNSDVDKLFIQLVQTYNQLFEENPINASGVDAKAILSARLSKSRRLENLIAQLPGEKKNGLFGNLIALSLGLTPNFKSNFDLAEDAKLQLSKDTYDDDLDNLLAQIGDQYADLFLAAKNLSDAILLSDILRVNTEITKAPLSASMIKRYDEHHQDLTLLKALVRQQLPEKYKEIFFDQSKNGYAGYIDGGASQEEFYKFIKPILEKMDGTEELLVKLNREDLLRKQRTFDNGSIPHQIHLGELHAILRRQEDFYPFLKDNREKIEKILTFRIPYYVGPLARGNSRFAWMTRKSEETITPWNFEEVVDKGASAQSFIERMTNFDKNLPNEKVLPKHSLLYEYFTVYNELTKVKYVTEGMRKPAFLSGEQKKAIVDLLFKTNRKVTVKQLKEDYFKKIECFDSVEISGVEDRFNASLGTYHDLLKIIKDKDFLDNEENEDILEDIVLTLTLFEDREMIEERLKTYAHLFDDKVMKQLKRRRYTGWGRLSRKLINGIRDKQSGKTILDFLKSDGFANRNFMQLIHDDSLTFKEDIQKAQVSGQGDSLHEHIANLAGSPAIKKGILQTVKVVDELVKVMGRHKPENIVIEMARENQTTQKGQKNSRERMKRIEEGIKELGSQILKEHPVENTQLQNEKLYLYYLQNGRDMYVDQELDINRLSDYDVDHIVPQSFLKDDSIDNKVLTRSDKARGKSDNVPSEEVVKKMKNYWRQLLNAKLITQRKFDNLTKAERGGLSELDKAGFIKRQLVETRQITKHVAQILDSRMNTKYDENDKLIREVKVITLKSKLVSDFRKDFQFYKVREINNYHHAHDAYLNAVVGTALIKKYPKLESEFVYGDYKVYDVRKMIAKSEQEIGKATAKYFFYSNIMNFFKTEITLANGEIRKRPLIETNGETGEIVWDKGRDFATVRKVLSMPQVNIVKKTEVQTGGFSKESILPKRNSDKLIARKKDWDPKKYGGFDSPTVAYSVLVVAKVEKGKSKKLKSVKELLGITIMERSSFEKNPIDFLEAKGYKEVKKDLIIKLPKYSLFELENGRKRMLASAGELQKGNELALPSKYVNFLYLASHYEKLKGSPEDNEQKQLFVEQHKHYLDEIIEQISEFSKRVILADANLDKVLSAYNKHRDKPIREQAENIIHLFTLTNLGAPAAFKYFDTTIDRKRYTSTKEVLDATLIHQSITGLYETRIDLSQLGGDGGEAAAKEAAAKEAAAKGGMDLLKPLTVERKGVKIKGYWNSQADITCVPKDLLQGEEPVRQQNVTTIHGTQEGDVYYVNLKIDGRRINTEVIGTTLDYAIITPGDVPWILKKPLELTIKLDLEEQQGTLLNNSILSKKGKEELKQLFEKYSALWQSWENQVGHRRIRPHKIATGTVKPTPQKQYHINPKAKPDIQIVINDLLKQGVLIQKESTMNTPVYPVPKPNGRWRMVLDYRAVNKVTPLIAVQNQHSYGILGSLFKGRYKTTIDLSNGFWAHPIVPEDYWITAFTWQGKQYCWTVLPQGFLNSPGLFTGDVVDLLQGIPNVEVYVDDVYISHDSEKEHLEYLDILFNRLKEAGYIISLKKSNIANSIVDFLGFQITNEGRGLTDTFKEKLENITAPTTLKQLQSILGLLNFARNFIPDFTELIAPLYALIPKSTKNYVPWQIEHSTTLETLITKLNGAEYLQGRKGDKTLIMKVNASYTTGYIRYYNEGEKKPISYVSIVFSKTELKFTELEKLLTTVHKGLLKALDLSMGQNIHVYSPIVSMQNIQKTPQTAKKALASRWLSWLSYLEDPRIRFFYDPQMPALKDLPAVDTGKDNKKHPSNFQHIFYTDGSAITSPTKEGHLNAGMGIVYFINKDGNLQKQQEWSISLGNHTAQFAEIAAFEFALKKCLPLGGNILVVTDSNYVAKAYNEELDVWASNGFVNNRKKPLKHISKWKSVADLKRLRPDVVVTHEPGHQKLDSSPHAYGNNLADQLATQASFKVHAGKRTADGSEFEKRTADGSEFESPKKKAKVE

SEQ ID NO: 719 - protein, 2177 aa, synthetic construct
MPAAKRVKLDGGDKKYSIGLDIGTNSVGWAVITDEYKVPSKKFKVLGNTDRHSIKKNLIGALLFDSGETAEATRLKRTARRRYTRRKNRICYLQEIFSNEMAKVDDSFFHRLEESFLVEEDKKHERHPIFGNIVDEVAYHEKYPTIYHLRKKLVDSTDKADLRLIYLALAHMIKFRGHFLIEGDLNPDNSDVDKLFIQLVQTYNQLFEENPINASGVDAKAILSARLSKSRRLENLIAQLPGEKKNGLFGNLIALSLGLTPNFKSNFDLAEDAKLQLSKDTYDDDLDNLLAQIGDQYADLFLAAKNLSDAILLSDILRVNTEITKAPLSASMIKRYDEHHQDLTLLKALVRQQLPEKYKEIFFDQSKNGYAGYIDGGASQEEFYKFIKPILEKMDGTEELLVKLNREDLLRKQRTFDNGSIPHQIHLGELHAILRRQEDFYPFLKDNREKIEKILTFRIPYYVGPLARGNSRFAWMTRKSEETITPWNFEEVVDKGASAQSFIERMTNFDKNLPNEKVLPKHSLLYEYFTVYNELTKVKYVTEGMRKPAFLSGEQKKAIVDLLFKTNRKVTVKQLKEDYFKKIECFDSVEISGVEDRFNASLGTYHDLLKIIKDKDFLDNEENEDILEDIVLTLTLFEDREMIEERLKTYAHLFDDKVMKQLKRRRYTGWGRLSRKLINGIRDKQSGKTILDFLKSDGFANRNFMQLIHDDSLTFKEDIQKAQVSGQGDSLHEHIANLAGSPAIKKGILQTVKVVDELVKVMGRHKPENIVIEMARENQTTQKGQKNSRERMKRIEEGIKELGSQILKEHPVENTQLQNEKLYLYYLQNGRDMYVDQELDINRLSDYDVDHIVPQSFLKDDSIDNKVLTRSDKARGKSDNVPSEEVVKKMKNYWRQLLNAKLITQRKFDNLTKAERGGLSELDKAGFIKRQLVETRQITKHVAQILDSRMNTKYDENDKLIREVKVITLKSKLVSDFRKDFQFYKVREINNYHHAHDAYLNAVVGTALIKKYPKLESEFVYGDYKVYDVRKMIAKSEQEIGKATAKYFFYSNIMNFFKTEITLANGEIRKRPLIETNGETGEIVWDKGRDFATVRKVLSMPQVNIVKKTEVQTGGFSKESILPKRNSDKLIARKKDWDPKKYGGFDSPTVAYSVLVVAKVEKGKSKKLKSVKELLGITIMERSSFEKNPIDFLEAKGYKEVKKDLIIKLPKYSLFELENGRKRMLASAGELQKGNELALPSKYVNFLYLASHYEKLKGSPEDNEQKQLFVEQHKHYLDEIIEQISEFSKRVILADANLDKVLSAYNKHRDKPIREQAENIIHLFTLTNLGAPAAFKYFDTTIDRKRYTSTKEVLDATLIHQSITGLYETRIDLSQLGGDGGGSSGSSGSSGSSGSSGGMDLLKPLTVERKGVKIKGYWNSQADITCVPKDLLQGEEPVRQQNVTTIHGTQEGDVYYVNLKIDGRRINTEVIGTTLDYAIITPGDVPWILKKPLELTIKLDLEEQQGTLLNNSILSKKGKEELKQLFEKYSALWQSWENQVGHRRIRPHKIATGTVKPTPQKQYHINPKAKPDIQIVINDLLKQGVLIQKESTMNTPVYPVPKPNGRWRMVLDYRAVNKVTPLIAVQNQHSYGILGSLFKGRYKTTIDLSNGFWAHPIVPEDYWITAFTWQGKQYCWTVLPQGFLNSPGLFTGDVVDLLQGIPNVEVYVDDVYISHDSEKEHLEYLDILFNRLKEAGYIISLKKSNIANSIVDFLGFQITNEGRGLTDTFKEKLENITAPTTLKQLQSILGLLNFARNFIPDFTELIAPLYALIPKSTKNYVPWQIEHSTTLETLITKLNGAEYLQGRKGDKTLIMKVNASYTTGYIRYYNEGEKKPISYVSIVFSKTELKFTELEKLLTTVHKGLLKALDLSMGQNIHVYSPIVSMQNIQKTPQTAKKALASRWLSWLSYLEDPRIRFFYDPQMPALKDLPAVDTGKDNKKHPSNFQHIFYTDGSAITSPTKEGHLNAGMGIVYFINKDGNLQKQQEWSISLGNHTAQFAEIAAFEFALKKCLPLGGNILVVTDSNYVAKAYNEELDVWASNGFVNNRKKPLKHISKWKSVADLKRLRPDVVVTHEPGHQKLDSSPHAYGNNLADQLATQASFKVHAGKRTADGSEFEKRTADGSEFESPKKKAKVE

SEQ ID NO: 720 - protein, 2171 aa, synthetic construct
MPAAKRVKLDGGDKKYSIGLDIGTNSVGWAVITDEYKVPSKKFKVLGNTDRHSIKKNLIGALLFDSGETAEATRLKRTARRRYTRRKNRICYLQEIFSNEMAKVDDSFFHRLEESFLVEEDKKHERHPIFGNIVDEVAYHEKYPTIYHLRKKLVDSTDKADLRLIYLALAHMIKFRGHFLIEGDLNPDNSDVDKLFIQLVQTYNQLFEENPINASGVDAKAILSARLSKSRRLENLIAQLPGEKKNGLFGNLIALSLGLTPNFKSNFDLAEDAKLQLSKDTYDDDLDNLLAQIGDQYADLFLAAKNLSDAILLSDILRVNTEITKAPLSASMIKRYDEHHQDLTLLKALVRQQLPEKYKEIFFDQSKNGYAGYIDGGASQEEFYKFIKPILEKMDGTEELLVKLNREDLLRKQRTFDNGSIPHQIHLGELHAILRRQEDFYPFLKDNREKIEKILTFRIPYYVGPLARGNSRFAWMTRKSEETITPWNFEEVVDKGASAQSFIERMTNFDKNLPNEKVLPKHSLLYEYFTVYNELTKVKYVTEGMRKPAFLSGEQKKAIVDLLFKTNRKVTVKQLKEDYFKKIECFDSVEISGVEDRFNASLGTYHDLLKIIKDKDFLDNEENEDILEDIVLTLTLFEDREMIEERLKTYAHLFDDKVMKQLKRRRYTGWGRLSRKLINGIRDKQSGKTILDFLKSDGFANRNFMQLIHDDSLTFKEDIQKAQVSGQGDSLHEHIANLAGSPAIKKGILQTVKVVDELVKVMGRHKPENIVIEMARENQTTQKGQKNSRERMKRIEEGIKELGSQILKEHPVENTQLQNEKLYLYYLQNGRDMYVDQELDINRLSDYDVDHIVPQSFLKDDSIDNKVLTRSDKARGKSDNVPSEEVVKKMKNYWRQLLNAKLITQRKFDNLTKAERGGLSELDKAGFIKRQLVETRQITKHVAQILDSRMNTKYDENDKLIREVKVITLKSKLVSDFRKDFQFYKVREINNYHHAHDAYLNAVVGTALIKKYPKLESEFVYGDYKVYDVRKMIAKSEQEIGKATAKYFFYSNIMNFFKTEITLANGEIRKRPLIETNGETGEIVWDKGRDFATVRKVLSMPQVNIVKKTEVQTGGFSKESILPKRNSDKLIARKKDWDPKKYGGFDSPTVAYSVLVVAKVEKGKSKKLKSVKELLGITIMERSSFEKNPIDFLEAKGYKEVKKDLIIKLPKYSLFELENGRKRMLASAGELQKGNELALPSKYVNFLYLASHYEKLKGSPEDNEQKQLFVEQHKHYLDEIIEQISEFSKRVILADANLDKVLSAYNKHRDKPIREQAENIIHLFTLTNLGAPAAFKYFDTTIDRKRYTSTKEVLDATLIHQSITGLYETRIDLSQLGGDGGGGGGSSPAPGGMDLLKPLTVERKGVKIKGYWNSQADITCVPKDLLQGEEPVRQQNVTTIHGTQEGDVYYVNLKIDGRRINTEVIGTTLDYAIITPGDVPWILKKPLELTIKLDLEEQQGTLLNNSILSKKGKEELKQLFEKYSALWQSWENQVGHRRIRPHKIATGTVKPTPQKQYHINPKAKPDIQIVINDLLKQGVLIQKESTMNTPVYPVPKPNGRWRMVLDYRAVNKVTPLIAVQNQHSYGILGSLFKGRYKTTIDLSNGFWAHPIVPEDYWITAFTWQGKQYCWTVLPQGFLNSPGLFTGDVVDLLQGIPNVEVYVDDVYISHDSEKEHLEYLDILFNRLKEAGYIISLKKSNIANSIVDFLGFQITNEGRGLTDTFKEKLENITAPTTLKQLQSILGLLNFARNFIPDFTELIAPLYALIPKSTKNYVPWQIEHSTTLETLITKLNGAEYLQGRKGDKTLIMKVNASYTTGYIRYYNEGEKKPISYVSIVFSKTELKFTELEKLLTTVHKGLLKALDLSMGQNIHVYSPIVSMQNIQKTPQTAKKALASRWLSWLSYLEDPRIRFFYDPQMPALKDLPAVDTGKDNKKHPSNFQHIFYTDGSAITSPTKEGHLNAGMGIVYFINKDGNLQKQQEWSISLGNHTAQFAEIAAFEFALKKCLPLGGNILVVTDSNYVAKAYNEELDVWASNGFVNNRKKPLKHISKWKSVADLKRLRPDVVVTHEPGHQKLDSSPHAYGNNLADQLATQASFKVHAGKRTADGSEFEKRTADGSEFESPKKKAKVE

SEQ ID NO: 721 - protein, 2173 aa, synthetic construct
MPAAKRVKLDGGDKKYSIGLDIGTNSVGWAVITDEYKVPSKKFKVLGNTDRHSIKKNLIGALLFDSGETAEATRLKRTARRRYTRRKNRICYLQEIFSNEMAKVDDSFFHRLEESFLVEEDKKHERHPIFGNIVDEVAYHEKYPTIYHLRKKLVDSTDKADLRLIYLALAHMIKFRGHFLIEGDLNPDNSDVDKLFIQLVQTYNQLFEENPINASGVDAKAILSARLSKSRRLENLIAQLPGEKKNGLFGNLIALSLGLTPNFKSNFDLAEDAKLQLSKDTYDDDLDNLLAQIGDQYADLFLAAKNLSDAILLSDILRVNTEITKAPLSASMIKRYDEHHQDLTLLKALVRQQLPEKYKEIFFDQSKNGYAGYIDGGASQEEFYKFIKPILEKMDGTEELLVKLNREDLLRKQRTFDNGSIPHQIHLGELHAILRRQEDFYPFLKDNREKIEKILTFRIPYYVGPLARGNSRFAWMTRKSEETITPWNFEEVVDKGASAQSFIERMTNFDKNLPNEKVLPKHSLLYEYFTVYNELTKVKYVTEGMRKPAFLSGEQKKAIVDLLFKTNRKVTVKQLKEDYFKKIECFDSVEISGVEDRFNASLGTYHDLLKIIKDKDFLDNEENEDILEDIVLTLTLFEDREMIEERLKTYAHLFDDKVMKQLKRRRYTGWGRLSRKLINGIRDKQSGKTILDFLKSDGFANRNFMQLIHDDSLTFKEDIQKAQVSGQGDSLHEHIANLAGSPAIKKGILQTVKVVDELVKVMGRHKPENIVIEMARENQTTQKGQKNSRERMKRIEEGIKELGSQILKEHPVENTQLQNEKLYLYYLQNGRDMYVDQELDINRLSDYDVDHIVPQSFLKDDSIDNKVLTRSDKARGKSDNVPSEEVVKKMKNYWRQLLNAKLITQRKFDNLTKAERGGLSELDKAGFIKRQLVETRQITKHVAQILDSRMNTKYDENDKLIREVKVITLKSKLVSDFRKDFQFYKVREINNYHHAHDAYLNAVVGTALIKKYPKLESEFVYGDYKVYDVRKMIAKSEQEIGKATAKYFFYSNIMNFFKTEITLANGEIRKRPLIETNGETGEIVWDKGRDFATVRKVLSMPQVNIVKKTEVQTGGFSKESILPKRNSDKLIARKKDWDPKKYGGFDSPTVAYSVLVVAKVEKGKSKKLKSVKELLGITIMERSSFEKNPIDFLEAKGYKEVKKDLIIKLPKYSLFELENGRKRMLASAGELQKGNELALPSKYVNFLYLASHYEKLKGSPEDNEQKQLFVEQHKHYLDEIIEQISEFSKRVILADANLDKVLSAYNKHRDKPIREQAENIIHLFTLTNLGAPAAFKYFDTTIDRKRYTSTKEVLDATLIHQSITGLYETRIDLSQLGGDGGEAAAKGSSPAPGGMDLLKPLTVERKGVKIKGYWNSQADITCVPKDLLQGEEPVRQQNVTTIHGTQEGDVYYVNLKIDGRRINTEVIGTTLDYAIITPGDVPWILKKPLELTIKLDLEEQQGTLLNNSILSKKGKEELKQLFEKYSALWQSWENQVGHRRIRPHKIATGTVKPTPQKQYHINPKAKPDIQIVINDLLKQGVLIQKESTMNTPVYPVPKPNGRWRMVLDYRAVNKVTPLIAVQNQHSYGILGSLFKGRYKTTIDLSNGFWAHPIVPEDYWITAFTWQGKQYCWTVLPQGFLNSPGLFTGDVVDLLQGIPNVEVYVDDVYISHDSEKEHLEYLDILFNRLKEAGYIISLKKSNIANSIVDFLGFQITNEGRGLTDTFKEKLENITAPTTLKQLQSILGLLNFARNFIPDFTELIAPLYALIPKSTKNYVPWQIEHSTTLETLITKLNGAEYLQGRKGDKTLIMKVNASYTTGYIRYYNEGEKKPISYVSIVFSKTELKFTELEKLLTTVHKGLLKALDLSMGQNIHVYSPIVSMQNIQKTPQTAKKALASRWLSWLSYLEDPRIRFFYDPQMPALKDLPAVDTGKDNKKHPSNFQHIFYTDGSAITSPTKEGHLNAGMGIVYFINKDGNLQKQQEWSISLGNHTAQFAEIAAFEFALKKCLPLGGNILVVTDSNYVAKAYNEELDVWASNGFVNNRKKPLKHISKWKSVADLKRLRPDVVVTHEPGHQKLDSSPHAYGNNLADQLATQASFKVHAGKRTADGSEFEKRTADGSEFESPKKKAKVE

SEQ ID NO: 722 - protein, 2180 aa, synthetic construct
MPAAKRVKLDGGDKKYSIGLDIGTNSVGWAVITDEYKVPSKKFKVLGNTDRHSIKKNLIGALLFDSGETAEATRLKRTARRRYTRRKNRICYLQEIFSNEMAKVDDSFFHRLEESFLVEEDKKHERHPIFGNIVDEVAYHEKYPTIYHLRKKLVDSTDKADLRLIYLALAHMIKFRGHFLIEGDLNPDNSDVDKLFIQLVQTYNQLFEENPINASGVDAKAILSARLSKSRRLENLIAQLPGEKKNGLFGNLIALSLGLTPNFKSNFDLAEDAKLQLSKDTYDDDLDNLLAQIGDQYADLFLAAKNLSDAILLSDILRVNTEITKAPLSASMIKRYDEHHQDLTLLKALVRQQLPEKYKEIFFDQSKNGYAGYIDGGASQEEFYKFIKPILEKMDGTEELLVKLNREDLLRKQRTFDNGSIPHQIHLGELHAILRRQEDFYPFLKDNREKIEKILTFRIPYYVGPLARGNSRFAWMTRKSEETITPWNFEEVVDKGASAQSFIERMTNFDKNLPNEKVLPKHSLLYEYFTVYNELTKVKYVTEGMRKPAFLSGEQKKAIVDLLFKTNRKVTVKQLKEDYFKKIECFDSVEISGVEDRFNASLGTYHDLLKIIKDKDFLDNEENEDILEDIVLTLTLFEDREMIEERLKTYAHLFDDKVMKQLKRRRYTGWGRLSRKLINGIRDKQSGKTILDFLKSDGFANRNFMQLIHDDSLTFKEDIQKAQVSGQGDSLHEHIANLAGSPAIKKGILQTVKVVDELVKVMGRHKPENIVIEMARENQTTQKGQKNSRERMKRIEEGIKELGSQILKEHPVENTQLQNEKLYLYYLQNGRDMYVDQELDINRLSDYDVDHIVPQSFLKDDSIDNKVLTRSDKARGKSDNVPSEEVVKKMKNYWRQLLNAKLITQRKFDNLTKAERGGLSELDKAGFIKRQLVETRQITKHVAQILDSRMNTKYDENDKLIREVKVITLKSKLVSDFRKDFQFYKVREINNYHHAHDAYLNAVVGTALIKKYPKLESEFVYGDYKVYDVRKMIAKSEQEIGKATAKYFFYSNIMNFFKTEITLANGEIRKRPLIETNGETGEIVWDKGRDFATVRKVLSMPQVNIVKKTEVQTGGFSKESILPKRNSDKLIARKKDWDPKKYGGFDSPTVAYSVLVVAKVEKGKSKKLKSVKELLGITIMERSSFEKNPIDFLEAKGYKEVKKDLIIKLPKYSLFELENGRKRMLASAGELQKGNELALPSKYVNFLYLASHYEKLKGSPEDNEQKQLFVEQHKHYLDEIIEQISEFSKRVILADANLDKVLSAYNKHRDKPIREQAENIIHLFTLTNLGAPAAFKYFDTTIDRKRYTSTKEVLDATLIHQSITGLYETRIDLSQLGGDGGGSSGSSGSSGSSGSSGSSGGMDLLKPLTVERKGVKIKGYWNSQADITCVPKDLLQGEEPVRQQNVTTIHGTQEGDVYYVNLKIDGRRINTEVIGTTLDYAIITPGDVPWILKKPLELTIKLDLEEQQGTLLNNSILSKKGKEELKQLFEKYSALWQSWENQVGHRRIRPHKIATGTVKPTPQKQYHINPKAKPDIQIVINDLLKQGVLIQKESTMNTPVYPVPKPNGRWRMVLDYRAVNKVTPLIAVQNQHSYGILGSLFKGRYKTTIDLSNGFWAHPIVPEDYWITAFTWQGKQYCWTVLPQGFLNSPGLFTGDVVDLLQGIPNVEVYVDDVYISHDSEKEHLEYLDILFNRLKEAGYIISLKKSNIANSIVDFLGFQITNEGRGLTDTFKEKLENITAPTTLKQLQSILGLLNFARNFIPDFTELIAPLYALIPKSTKNYVPWQIEHSTTLETLITKLNGAEYLQGRKGDKTLIMKVNASYTTGYIRYYNEGEKKPISYVSIVFSKTELKFTELEKLLTTVHKGLLKALDLSMGQNIHVYSPIVSMQNIQKTPQTAKKALASRWLSWLSYLEDPRIRFFYDPQMPALKDLPAVDTGKDNKKHPSNFQHIFYTDGSAITSPTKEGHLNAGMGIVYFINKDGNLQKQQEWSISLGNHTAQFAEIAAFEFALKKCLPLGGNILVVTDSNYVAKAYNEELDVWASNGFVNNRKKPLKHISKWKSVADLKRLRPDVVVTHEPGHQKLDSSPHAYGNNLADQLATQASFKVHAGKRTADGSEFEKRTADGSEFESPKKKAKVE

SEQ ID NO: 723 - protein, 2171 aa, synthetic construct
MPAAKRVKLDGGDKKYSIGLDIGTNSVGWAVITDEYKVPSKKFKVLGNTDRHSIKKNLIGALLFDSGETAEATRLKRTARRRYTRRKNRICYLQEIFSNEMAKVDDSFFHRLEESFLVEEDKKHERHPIFGNIVDEVAYHEKYPTIYHLRKKLVDSTDKADLRLIYLALAHMIKFRGHFLIEGDLNPDNSDVDKLFIQLVQTYNQLFEENPINASGVDAKAILSARLSKSRRLENLIAQLPGEKKNGLFGNLIALSLGLTPNFKSNFDLAEDAKLQLSKDTYDDDLDNLLAQIGDQYADLFLAAKNLSDAILLSDILRVNTEITKAPLSASMIKRYDEHHQDLTLLKALVRQQLPEKYKEIFFDQSKNGYAGYIDGGASQEEFYKFIKPILEKMDGTEELLVKLNREDLLRKQRTFDNGSIPHQIHLGELHAILRRQEDFYPFLKDNREKIEKILTFRIPYYVGPLARGNSRFAWMTRKSEETITPWNFEEVVDKGASAQSFIERMTNFDKNLPNEKVLPKHSLLYEYFTVYNELTKVKYVTEGMRKPAFLSGEQKKAIVDLLFKTNRKVTVKQLKEDYFKKIECFDSVEISGVEDRFNASLGTYHDLLKIIKDKDFLDNEENEDILEDIVLTLTLFEDREMIEERLKTYAHLFDDKVMKQLKRRRYTGWGRLSRKLINGIRDKQSGKTILDFLKSDGFANRNFMQLIHDDSLTFKEDIQKAQVSGQGDSLHEHIANLAGSPAIKKGILQTVKVVDELVKVMGRHKPENIVIEMARENQTTQKGQKNSRERMKRIEEGIKELGSQILKEHPVENTQLQNEKLYLYYLQNGRDMYVDQELDINRLSDYDVDHIVPQSFLKDDSIDNKVLTRSDKARGKSDNVPSEEVVKKMKNYWRQLLNAKLITQRKFDNLTKAERGGLSELDKAGFIKRQLVETRQITKHVAQILDSRMNTKYDENDKLIREVKVITLKSKLVSDFRKDFQFYKVREINNYHHAHDAYLNAVVGTALIKKYPKLESEFVYGDYKVYDVRKMIAKSEQEIGKATAKYFFYSNIMNFFKTEITLANGEIRKRPLIETNGETGEIVWDKGRDFATVRKVLSMPQVNIVKKTEVQTGGFSKESILPKRNSDKLIARKKDWDPKKYGGFDSPTVAYSVLVVAKVEKGKSKKLKSVKELLGITIMERSSFEKNPIDFLEAKGYKEVKKDLIIKLPKYSLFELENGRKRMLASAGELQKGNELALPSKYVNFLYLASHYEKLKGSPEDNEQKQLFVEQHKHYLDEIIEQISEFSKRVILADANLDKVLSAYNKHRDKPIREQAENIIHLFTLTNLGAPAAFKYFDTTIDRKRYTSTKEVLDATLIHQSITGLYETRIDLSQLGGDGGPAPAPAPAPGGMDLLKPLTVERKGVKIKGYWNSQADITCVPKDLLQGEEPVRQQNVTTIHGTQEGDVYYVNLKIDGRRINTEVIGTTLDYAIITPGDVPWILKKPLELTIKLDLEEQQGTLLNNSILSKKGKEELKQLFEKYSALWQSWENQVGHRRIRPHKIATGTVKPTPQKQYHINPKAKPDIQIVINDLLKQGVLIQKESTMNTPVYPVPKPNGRWRMVLDYRAVNKVTPLIAVQNQHSYGILGSLFKGRYKTTIDLSNGFWAHPIVPEDYWITAFTWQGKQYCWTVLPQGFLNSPGLFTGDVVDLLQGIPNVEVYVDDVYISHDSEKEHLEYLDILFNRLKEAGYIISLKKSNIANSIVDFLGFQITNEGRGLTDTFKEKLENITAPTTLKQLQSILGLLNFARNFIPDFTELIAPLYALIPKSTKNYVPWQIEHSTTLETLITKLNGAEYLQGRKGDKTLIMKVNASYTTGYIRYYNEGEKKPISYVSIVFSKTELKFTELEKLLTTVHKGLLKALDLSMGQNIHVYSPIVSMQNIQKTPQTAKKALASRWLSWLSYLEDPRIRFFYDPQMPALKDLPAVDTGKDNKKHPSNFQHIFYTDGSAITSPTKEGHLNAGMGIVYFINKDGNLQKQQEWSISLGNHTAQFAEIAAFEFALKKCLPLGGNILVVTDSNYVAKAYNEELDVWASNGFVNNRKKPLKHISKWKSVADLKRLRPDVVVTHEPGHQKLDSSPHAYGNNLADQLATQASFKVHAGKRTADGSEFEKRTADGSEFESPKKKAKVE

SEQ ID NO: 724 - protein, 2170 aa, synthetic construct
MPAAKRVKLDGGDKKYSIGLDIGTNSVGWAVITDEYKVPSKKFKVLGNTDRHSIKKNLIGALLFDSGETAEATRLKRTARRRYTRRKNRICYLQEIFSNEMAKVDDSFFHRLEESFLVEEDKKHERHPIFGNIVDEVAYHEKYPTIYHLRKKLVDSTDKADLRLIYLALAHMIKFRGHFLIEGDLNPDNSDVDKLFIQLVQTYNQLFEENPINASGVDAKAILSARLSKSRRLENLIAQLPGEKKNGLFGNLIALSLGLTPNFKSNFDLAEDAKLQLSKDTYDDDLDNLLAQIGDQYADLFLAAKNLSDAILLSDILRVNTEITKAPLSASMIKRYDEHHQDLTLLKALVRQQLPEKYKEIFFDQSKNGYAGYIDGGASQEEFYKFIKPILEKMDGTEELLVKLNREDLLRKQRTFDNGSIPHQIHLGELHAILRRQEDFYPFLKDNREKIEKILTFRIPYYVGPLARGNSRFAWMTRKSEETITPWNFEEVVDKGASAQSFIERMTNFDKNLPNEKVLPKHSLLYEYFTVYNELTKVKYVTEGMRKPAFLSGEQKKAIVDLLFKTNRKVTVKQLKEDYFKKIECFDSVEISGVEDRFNASLGTYHDLLKIIKDKDFLDNEENEDILEDIVLTLTLFEDREMIEERLKTYAHLFDDKVMKQLKRRRYTGWGRLSRKLINGIRDKQSGKTILDFLKSDGFANRNFMQLIHDDSLTFKEDIQKAQVSGQGDSLHEHIANLAGSPAIKKGILQTVKVVDELVKVMGRHKPENIVIEMARENQTTQKGQKNSRERMKRIEEGIKELGSQILKEHPVENTQLQNEKLYLYYLQNGRDMYVDQELDINRLSDYDVDHIVPQSFLKDDSIDNKVLTRSDKARGKSDNVPSEEVVKKMKNYWRQLLNAKLITQRKFDNLTKAERGGLSELDKAGFIKRQLVETRQITKHVAQILDSRMNTKYDENDKLIREVKVITLKSKLVSDFRKDFQFYKVREINNYHHAHDAYLNAVVGTALIKKYPKLESEFVYGDYKVYDVRKMIAKSEQEIGKATAKYFFYSNIMNFFKTEITLANGEIRKRPLIETNGETGEIVWDKGRDFATVRKVLSMPQVNIVKKTEVQTGGFSKESILPKRNSDKLIARKKDWDPKKYGGFDSPTVAYSVLVVAKVEKGKSKKLKSVKELLGITIMERSSFEKNPIDFLEAKGYKEVKKDLIIKLPKYSLFELENGRKRMLASAGELQKGNELALPSKYVNFLYLASHYEKLKGSPEDNEQKQLFVEQHKHYLDEIIEQISEFSKRVILADANLDKVLSAYNKHRDKPIREQAENIIHLFTLTNLGAPAAFKYFDTTIDRKRYTSTKEVLDATLIHQSITGLYETRIDLSQLGGDGGGSSEAAAKGGMDLLKPLTVERKGVKIKGYWNSQADITCVPKDLLQGEEPVRQQNVTTIHGTQEGDVYYVNLKIDGRRINTEVIGTTLDYAIITPGDVPWILKKPLELTIKLDLEEQQGTLLNNSILSKKGKEELKQLFEKYSALWQSWENQVGHRRIRPHKIATGTVKPTPQKQYHINPKAKPDIQIVINDLLKQGVLIQKESTMNTPVYPVPKPNGRWRMVLDYRAVNKVTPLIAVQNQHSYGILGSLFKGRYKTTIDLSNGFWAHPIVPEDYWITAFTWQGKQYCWTVLPQGFLNSPGLFTGDVVDLLQGIPNVEVYVDDVYISHDSEKEHLEYLDILFNRLKEAGYIISLKKSNIANSIVDFLGFQITNEGRGLTDTFKEKLENITAPTTLKQLQSILGLLNFARNFIPDFTELIAPLYALIPKSTKNYVPWQIEHSTTLETLITKLNGAEYLQGRKGDKTLIMKVNASYTTGYIRYYNEGEKKPISYVSIVFSKTELKFTELEKLLTTVHKGLLKALDLSMGQNIHVYSPIVSMQNIQKTPQTAKKALASRWLSWLSYLEDPRIRFFYDPQMPALKDLPAVDTGKDNKKHPSNFQHIFYTDGSAITSPTKEGHLNAGMGIVYFINKDGNLQKQQEWSISLGNHTAQFAEIAAFEFALKKCLPLGGNILVVTDSNYVAKAYNEELDVWASNGFVNNRKKPLKHISKWKSVADLKRLRPDVVVTHEPGHQKLDSSPHAYGNNLADQLATQASFKVHAGKRTADGSEFEKRTADGSEFESPKKKAKVE

SEQ ID NO: 725 - protein, 2165 aa, synthetic construct
MPAAKRVKLDGGDKKYSIGLDIGTNSVGWAVITDEYKVPSKKFKVLGNTDRHSIKKNLIGALLFDSGETAEATRLKRTARRRYTRRKNRICYLQEIFSNEMAKVDDSFFHRLEESFLVEEDKKHERHPIFGNIVDEVAYHEKYPTIYHLRKKLVDSTDKADLRLIYLALAHMIKFRGHFLIEGDLNPDNSDVDKLFIQLVQTYNQLFEENPINASGVDAKAILSARLSKSRRLENLIAQLPGEKKNGLFGNLIALSLGLTPNFKSNFDLAEDAKLQLSKDTYDDDLDNLLAQIGDQYADLFLAAKNLSDAILLSDILRVNTEITKAPLSASMIKRYDEHHQDLTLLKALVRQQLPEKYKEIFFDQSKNGYAGYIDGGASQEEFYKFIKPILEKMDGTEELLVKLNREDLLRKQRTFDNGSIPHQIHLGELHAILRRQEDFYPFLKDNREKIEKILTFRIPYYVGPLARGNSRFAWMTRKSEETITPWNFEEVVDKGASAQSFIERMTNFDKNLPNEKVLPKHSLLYEYFTVYNELTKVKYVTEGMRKPAFLSGEQKKAIVDLLFKTNRKVTVKQLKEDYFKKIECFDSVEISGVEDRFNASLGTYHDLLKIIKDKDFLDNEENEDILEDIVLTLTLFEDREMIEERLKTYAHLFDDKVMKQLKRRRYTGWGRLSRKLINGIRDKQSGKTILDFLKSDGFANRNFMQLIHDDSLTFKEDIQKAQVSGQGDSLHEHIANLAGSPAIKKGILQTVKVVDELVKVMGRHKPENIVIEMARENQTTQKGQKNSRERMKRIEEGIKELGSQILKEHPVENTQLQNEKLYLYYLQNGRDMYVDQELDINRLSDYDVDHIVPQSFLKDDSIDNKVLTRSDKARGKSDNVPSEEVVKKMKNYWRQLLNAKLITQRKFDNLTKAERGGLSELDKAGFIKRQLVETRQITKHVAQILDSRMNTKYDENDKLIREVKVITLKSKLVSDFRKDFQFYKVREINNYHHAHDAYLNAVVGTALIKKYPKLESEFVYGDYKVYDVRKMIAKSEQEIGKATAKYFFYSNIMNFFKTEITLANGEIRKRPLIETNGETGEIVWDKGRDFATVRKVLSMPQVNIVKKTEVQTGGFSKESILPKRNSDKLIARKKDWDPKKYGGFDSPTVAYSVLVVAKVEKGKSKKLKSVKELLGITIMERSSFEKNPIDFLEAKGYKEVKKDLIIKLPKYSLFELENGRKRMLASAGELQKGNELALPSKYVNFLYLASHYEKLKGSPEDNEQKQLFVEQHKHYLDEIIEQISEFSKRVILADANLDKVLSAYNKHRDKPIREQAENIIHLFTLTNLGAPAAFKYFDTTIDRKRYTSTKEVLDATLIHQSITGLYETRIDLSQLGGDGGGSSGGMDLLKPLTVERKGVKIKGYWNSQADITCVPKDLLQGEEPVRQQNVTTIHGTQEGDVYYVNLKIDGRRINTEVIGTTLDYAIITPGDVPWILKKPLELTIKLDLEEQQGTLLNNSILSKKGKEELKQLFEKYSALWQSWENQVGHRRIRPHKIATGTVKPTPQKQYHINPKAKPDIQIVINDLLKQGVLIQKESTMNTPVYPVPKPNGRWRMVLDYRAVNKVTPLIAVQNQHSYGILGSLFKGRYKTTIDLSNGFWAHPIVPEDYWITAFTWQGKQYCWTVLPQGFLNSPGLFTGDVVDLLQGIPNVEVYVDDVYISHDSEKEHLEYLDILFNRLKEAGYIISLKKSNIANSIVDFLGFQITNEGRGLTDTFKEKLENITAPTTLKQLQSILGLLNFARNFIPDFTELIAPLYALIPKSTKNYVPWQIEHSTTLETLITKLNGAEYLQGRKGDKTLIMKVNASYTTGYIRYYNEGEKKPISYVSIVFSKTELKFTELEKLLTTVHKGLLKALDLSMGQNIHVYSPIVSMQNIQKTPQTAKKALASRWLSWLSYLEDPRIRFFYDPQMPALKDLPAVDTGKDNKKHPSNFQHIFYTDGSAITSPTKEGHLNAGMGIVYFINKDGNLQKQQEWSISLGNHTAQFAEIAAFEFALKKCLPLGGNILVVTDSNYVAKAYNEELDVWASNGFVNNRKKPLKHISKWKSVADLKRLRPDVVVTHEPGHQKLDSSPHAYGNNLADQLATQASFKVHAGKRTADGSEFEKRTADGSEFESPKKKAKVE

SEQ ID NO: 726 - protein, 2173 aa, synthetic construct
MPAAKRVKLDGGDKKYSIGLDIGTNSVGWAVITDEYKVPSKKFKVLGNTDRHSIKKNLIGALLFDSGETAEATRLKRTARRRYTRRKNRICYLQEIFSNEMAKVDDSFFHRLEESFLVEEDKKHERHPIFGNIVDEVAYHEKYPTIYHLRKKLVDSTDKADLRLIYLALAHMIKFRGHFLIEGDLNPDNSDVDKLFIQLVQTYNQLFEENPINASGVDAKAILSARLSKSRRLENLIAQLPGEKKNGLFGNLIALSLGLTPNFKSNFDLAEDAKLQLSKDTYDDDLDNLLAQIGDQYADLFLAAKNLSDAILLSDILRVNTEITKAPLSASMIKRYDEHHQDLTLLKALVRQQLPEKYKEIFFDQSKNGYAGYIDGGASQEEFYKFIKPILEKMDGTEELLVKLNREDLLRKQRTFDNGSIPHQIHLGELHAILRRQEDFYPFLKDNREKIEKILTFRIPYYVGPLARGNSRFAWMTRKSEETITPWNFEEVVDKGASAQSFIERMTNFDKNLPNEKVLPKHSLLYEYFTVYNELTKVKYVTEGMRKPAFLSGEQKKAIVDLLFKTNRKVTVKQLKEDYFKKIECFDSVEISGVEDRFNASLGTYHDLLKIIKDKDFLDNEENEDILEDIVLTLTLFEDREMIEERLKTYAHLFDDKVMKQLKRRRYTGWGRLSRKLINGIRDKQSGKTILDFLKSDGFANRNFMQLIHDDSLTFKEDIQKAQVSGQGDSLHEHIANLAGSPAIKKGILQTVKVVDELVKVMGRHKPENIVIEMARENQTTQKGQKNSRERMKRIEEGIKELGSQILKEHPVENTQLQNEKLYLYYLQNGRDMYVDQELDINRLSDYDVDHIVPQSFLKDDSIDNKVLTRSDKARGKSDNVPSEEVVKKMKNYWRQLLNAKLITQRKFDNLTKAERGGLSELDKAGFIKRQLVETRQITKHVAQILDSRMNTKYDENDKLIREVKVITLKSKLVSDFRKDFQFYKVREINNYHHAHDAYLNAVVGTALIKKYPKLESEFVYGDYKVYDVRKMIAKSEQEIGKATAKYFFYSNIMNFFKTEITLANGEIRKRPLIETNGETGEIVWDKGRDFATVRKVLSMPQVNIVKKTEVQTGGFSKESILPKRNSDKLIARKKDWDPKKYGGFDSPTVAYSVLVVAKVEKGKSKKLKSVKELLGITIMERSSFEKNPIDFLEAKGYKEVKKDLIIKLPKYSLFELENGRKRMLASAGELQKGNELALPSKYVNFLYLASHYEKLKGSPEDNEQKQLFVEQHKHYLDEIIEQISEFSKRVILADANLDKVLSAYNKHRDKPIREQAENIIHLFTLTNLGAPAAFKYFDTTIDRKRYTSTKEVLDATLIHQSITGLYETRIDLSQLGGDGGEAAAKGGSGGGGGMDLLKPLTVERKGVKIKGYWNSQADITCVPKDLLQGEEPVRQQNVTTIHGTQEGDVYYVNLKIDGRRINTEVIGTTLDYAIITPGDVPWILKKPLELTIKLDLEEQQGTLLNNSILSKKGKEELKQLFEKYSALWQSWENQVGHRRIRPHKIATGTVKPTPQKQYHINPKAKPDIQIVINDLLKQGVLIQKESTMNTPVYPVPKPNGRWRMVLDYRAVNKVTPLIAVQNQHSYGILGSLFKGRYKTTIDLSNGFWAHPIVPEDYWITAFTWQGKQYCWTVLPQGFLNSPGLFTGDVVDLLQGIPNVEVYVDDVYISHDSEKEHLEYLDILFNRLKEAGYIISLKKSNIANSIVDFLGFQITNEGRGLTDTFKEKLENITAPTTLKQLQSILGLLNFARNFIPDFTELIAPLYALIPKSTKNYVPWQIEHSTTLETLITKLNGAEYLQGRKGDKTLIMKVNASYTTGYIRYYNEGEKKPISYVSIVFSKTELKFTELEKLLTTVHKGLLKALDLSMGQNIHVYSPIVSMQNIQKTPQTAKKALASRWLSWLSYLEDPRIRFFYDPQMPALKDLPAVDTGKDNKKHPSNFQHIFYTDGSAITSPTKEGHLNAGMGIVYFINKDGNLQKQQEWSISLGNHTAQFAEIAAFEFALKKCLPLGGNILVVTDSNYVAKAYNEELDVWASNGFVNNRKKPLKHISKWKSVADLKRLRPDVVVTHEPGHQKLDSSPHAYGNNLADQLATQASFKVHAGKRTADGSEFEKRTADGSEFESPKKKAKVE

SEQ ID NO: 727 - protein, 2173 aa, synthetic construct
MPAAKRVKLDGGDKKYSIGLDIGTNSVGWAVITDEYKVPSKKFKVLGNTDRHSIKKNLIGALLFDSGETAEATRLKRTARRRYTRRKNRICYLQEIFSNEMAKVDDSFFHRLEESFLVEEDKKHERHPIFGNIVDEVAYHEKYPTIYHLRKKLVDSTDKADLRLIYLALAHMIKFRGHFLIEGDLNPDNSDVDKLFIQLVQTYNQLFEENPINASGVDAKAILSARLSKSRRLENLIAQLPGEKKNGLFGNLIALSLGLTPNFKSNFDLAEDAKLQLSKDTYDDDLDNLLAQIGDQYADLFLAAKNLSDAILLSDILRVNTEITKAPLSASMIKRYDEHHQDLTLLKALVRQQLPEKYKEIFFDQSKNGYAGYIDGGASQEEFYKFIKPILEKMDGTEELLVKLNREDLLRKQRTFDNGSIPHQIHLGELHAILRRQEDFYPFLKDNREKIEKILTFRIPYYVGPLARGNSRFAWMTRKSEETITPWNFEEVVDKGASAQSFIERMTNFDKNLPNEKVLPKHSLLYEYFTVYNELTKVKYVTEGMRKPAFLSGEQKKAIVDLLFKTNRKVTVKQLKEDYFKKIECFDSVEISGVEDRFNASLGTYHDLLKIIKDKDFLDNEENEDILEDIVLTLTLFEDREMIEERLKTYAHLFDDKVMKQLKRRRYTGWGRLSRKLINGIRDKQSGKTILDFLKSDGFANRNFMQLIHDDSLTFKEDIQKAQVSGQGDSLHEHIANLAGSPAIKKGILQTVKVVDELVKVMGRHKPENIVIEMARENQTTQKGQKNSRERMKRIEEGIKELGSQILKEHPVENTQLQNEKLYLYYLQNGRDMYVDQELDINRLSDYDVDHIVPQSFLKDDSIDNKVLTRSDKARGKSDNVPSEEVVKKMKNYWRQLLNAKLITQRKFDNLTKAERGGLSELDKAGFIKRQLVETRQITKHVAQILDSRMNTKYDENDKLIREVKVITLKSKLVSDFRKDFQFYKVREINNYHHAHDAYLNAVVGTALIKKYPKLESEFVYGDYKVYDVRKMIAKSEQEIGKATAKYFFYSNIMNFFKTEITLANGEIRKRPLIETNGETGEIVWDKGRDFATVRKVLSMPQVNIVKKTEVQTGGFSKESILPKRNSDKLIARKKDWDPKKYGGFDSPTVAYSVLVVAKVEKGKSKKLKSVKELLGITIMERSSFEKNPIDFLEAKGYKEVKKDLIIKLPKYSLFELENGRKRMLASAGELQKGNELALPSKYVNFLYLASHYEKLKGSPEDNEQKQLFVEQHKHYLDEIIEQISEFSKRVILADANLDKVLSAYNKHRDKPIREQAENIIHLFTLTNLGAPAAFKYFDTTIDRKRYTSTKEVLDATLIHQSITGLYETRIDLSQLGGDGGGSSEAAAKPAPGGMDLLKPLTVERKGVKIKGYWNSQADITCVPKDLLQGEEPVRQQNVTTIHGTQEGDVYYVNLKIDGRRINTEVIGTTLDYAIITPGDVPWILKKPLELTIKLDLEEQQGTLLNNSILSKKGKEELKQLFEKYSALWQSWENQVGHRRIRPHKIATGTVKPTPQKQYHINPKAKPDIQIVINDLLKQGVLIQKESTMNTPVYPVPKPNGRWRMVLDYRAVNKVTPLIAVQNQHSYGILGSLFKGRYKTTIDLSNGFWAHPIVPEDYWITAFTWQGKQYCWTVLPQGFLNSPGLFTGDVVDLLQGIPNVEVYVDDVYISHDSEKEHLEYLDILFNRLKEAGYIISLKKSNIANSIVDFLGFQITNEGRGLTDTFKEKLENITAPTTLKQLQSILGLLNFARNFIPDFTELIAPLYALIPKSTKNYVPWQIEHSTTLETLITKLNGAEYLQGRKGDKTLIMKVNASYTTGYIRYYNEGEKKPISYVSIVFSKTELKFTELEKLLTTVHKGLLKALDLSMGQNIHVYSPIVSMQNIQKTPQTAKKALASRWLSWLSYLEDPRIRFFYDPQMPALKDLPAVDTGKDNKKHPSNFQHIFYTDGSAITSPTKEGHLNAGMGIVYFINKDGNLQKQQEWSISLGNHTAQFAEIAAFEFALKKCLPLGGNILVVTDSNYVAKAYNEELDVWASNGFVNNRKKPLKHISKWKSVADLKRLRPDVVVTHEPGHQKLDSSPHAYGNNLADQLATQASFKVHAGKRTADGSEFEKRTADGSEFESPKKKAKVE

SEQ ID NO: 728 - protein, 2173 aa, synthetic construct
MPAAKRVKLDGGDKKYSIGLDIGTNSVGWAVITDEYKVPSKKFKVLGNTDRHSIKKNLIGALLFDSGETAEATRLKRTARRRYTRRKNRICYLQEIFSNEMAKVDDSFFHRLEESFLVEEDKKHERHPIFGNIVDEVAYHEKYPTIYHLRKKLVDSTDKADLRLIYLALAHMIKFRGHFLIEGDLNPDNSDVDKLFIQLVQTYNQLFEENPINASGVDAKAILSARLSKSRRLENLIAQLPGEKKNGLFGNLIALSLGLTPNFKSNFDLAEDAKLQLSKDTYDDDLDNLLAQIGDQYADLFLAAKNLSDAILLSDILRVNTEITKAPLSASMIKRYDEHHQDLTLLKALVRQQLPEKYKEIFFDQSKNGYAGYIDGGASQEEFYKFIKPILEKMDGTEELLVKLNREDLLRKQRTFDNGSIPHQIHLGELHAILRRQEDFYPFLKDNREKIEKILTFRIPYYVGPLARGNSRFAWMTRKSEETITPWNFEEVVDKGASAQSFIERMTNFDKNLPNEKVLPKHSLLYEYFTVYNELTKVKYVTEGMRKPAFLSGEQKKAIVDLLFKTNRKVTVKQLKEDYFKKIECFDSVEISGVEDRFNASLGTYHDLLKIIKDKDFLDNEENEDILEDIVLTLTLFEDREMIEERLKTYAHLFDDKVMKQLKRRRYTGWGRLSRKLINGIRDKQSGKTILDFLKSDGFANRNFMQLIHDDSLTFKEDIQKAQVSGQGDSLHEHIANLAGSPAIKKGILQTVKVVDELVKVMGRHKPENIVIEMARENQTTQKGQKNSRERMKRIEEGIKELGSQILKEHPVENTQLQNEKLYLYYLQNGRDMYVDQELDINRLSDYDVDHIVPQSFLKDDSIDNKVLTRSDKARGKSDNVPSEEVVKKMKNYWRQLLNAKLITQRKFDNLTKAERGGLSELDKAGFIKRQLVETRQITKHVAQILDSRMNTKYDENDKLIREVKVITLKSKLVSDFRKDFQFYKVREINNYHHAHDAYLNAVVGTALIKKYPKLESEFVYGDYKVYDVRKMIAKSEQEIGKATAKYFFYSNIMNFFKTEITLANGEIRKRPLIETNGETGEIVWDKGRDFATVRKVLSMPQVNIVKKTEVQTGGFSKESILPKRNSDKLIARKKDWDPKKYGGFDSPTVAYSVLVVAKVEKGKSKKLKSVKELLGITIMERSSFEKNPIDFLEAKGYKEVKKDLIIKLPKYSLFELENGRKRMLASAGELQKGNELALPSKYVNFLYLASHYEKLKGSPEDNEQKQLFVEQHKHYLDEIIEQISEFSKRVILADANLDKVLSAYNKHRDKPIREQAENIIHLFTLTNLGAPAAFKYFDTTIDRKRYTSTKEVLDATLIHQSITGLYETRIDLSQLGGDGGGSSGGGEAAAKGGMDLLKPLTVERKGVKIKGYWNSQADITCVPKDLLQGEEPVRQQNVTTIHGTQEGDVYYVNLKIDGRRINTEVIGTTLDYAIITPGDVPWILKKPLELTIKLDLEEQQGTLLNNSILSKKGKEELKQLFEKYSALWQSWENQVGHRRIRPHKIATGTVKPTPQKQYHINPKAKPDIQIVINDLLKQGVLIQKESTMNTPVYPVPKPNGRWRMVLDYRAVNKVTPLIAVQNQHSYGILGSLFKGRYKTTIDLSNGFWAHPIVPEDYWITAFTWQGKQYCWTVLPQGFLNSPGLFTGDVVDLLQGIPNVEVYVDDVYISHDSEKEHLEYLDILFNRLKEAGYIISLKKSNIANSIVDFLGFQITNEGRGLTDTFKEKLENITAPTTLKQLQSILGLLNFARNFIPDFTELIAPLYALIPKSTKNYVPWQIEHSTTLETLITKLNGAEYLQGRKGDKTLIMKVNASYTTGYIRYYNEGEKKPISYVSIVFSKTELKFTELEKLLTTVHKGLLKALDLSMGQNIHVYSPIVSMQNIQKTPQTAKKALASRWLSWLSYLEDPRIRFFYDPQMPALKDLPAVDTGKDNKKHPSNFQHIFYTDGSAITSPTKEGHLNAGMGIVYFINKDGNLQKQQEWSISLGNHTAQFAEIAAFEFALKKCLPLGGNILVVTDSNYVAKAYNEELDVWASNGFVNNRKKPLKHISKWKSVADLKRLRPDVVVTHEPGHQKLDSSPHAYGNNLADQLATQASFKVHAGKRTADGSEFEKRTADGSEFESPKKKAKVE

SEQ ID NO: 729 - protein, 2171 aa, synthetic construct
MPAAKRVKLDGGDKKYSIGLDIGTNSVGWAVITDEYKVPSKKFKVLGNTDRHSIKKNLIGALLFDSGETAEATRLKRTARRRYTRRKNRICYLQEIFSNEMAKVDDSFFHRLEESFLVEEDKKHERHPIFGNIVDEVAYHEKYPTIYHLRKKLVDSTDKADLRLIYLALAHMIKFRGHFLIEGDLNPDNSDVDKLFIQLVQTYNQLFEENPINASGVDAKAILSARLSKSRRLENLIAQLPGEKKNGLFGNLIALSLGLTPNFKSNFDLAEDAKLQLSKDTYDDDLDNLLAQIGDQYADLFLAAKNLSDAILLSDILRVNTEITKAPLSASMIKRYDEHHQDLTLLKALVRQQLPEKYKEIFFDQSKNGYAGYIDGGASQEEFYKFIKPILEKMDGTEELLVKLNREDLLRKQRTFDNGSIPHQIHLGELHAILRRQEDFYPFLKDNREKIEKILTFRIPYYVGPLARGNSRFAWMTRKSEETITPWNFEEVVDKGASAQSFIERMTNFDKNLPNEKVLPKHSLLYEYFTVYNELTKVKYVTEGMRKPAFLSGEQKKAIVDLLFKTNRKVTVKQLKEDYFKKIECFDSVEISGVEDRFNASLGTYHDLLKIIKDKDFLDNEENEDILEDIVLTLTLFEDREMIEERLKTYAHLFDDKVMKQLKRRRYTGWGRLSRKLINGIRDKQSGKTILDFLKSDGFANRNFMQLIHDDSLTFKEDIQKAQVSGQGDSLHEHIANLAGSPAIKKGILQTVKVVDELVKVMGRHKPENIVIEMARENQTTQKGQKNSRERMKRIEEGIKELGSQILKEHPVENTQLQNEKLYLYYLQNGRDMYVDQELDINRLSDYDVDHIVPQSFLKDDSIDNKVLTRSDKARGKSDNVPSEEVVKKMKNYWRQLLNAKLITQRKFDNLTKAERGGLSELDKAGFIKRQLVETRQITKHVAQILDSRMNTKYDENDKLIREVKVITLKSKLVSDFRKDFQFYKVREINNYHHAHDAYLNAVVGTALIKKYPKLESEFVYGDYKVYDVRKMIAKSEQEIGKATAKYFFYSNIMNFFKTEITLANGEIRKRPLIETNGETGEIVWDKGRDFATVRKVLSMPQVNIVKKTEVQTGGFSKESILPKRNSDKLIARKKDWDPKKYGGFDSPTVAYSVLVVAKVEKGKSKKLKSVKELLGITIMERSSFEKNPIDFLEAKGYKEVKKDLIIKLPKYSLFELENGRKRMLASAGELQKGNELALPSKYVNFLYLASHYEKLKGSPEDNEQKQLFVEQHKHYLDEIIEQISEFSKRVILADANLDKVLSAYNKHRDKPIREQAENIIHLFTLTNLGAPAAFKYFDTTIDRKRYTSTKEVLDATLIHQSITGLYETRIDLSQLGGDGGGGSGSSGGGGGMDLLKPLTVERKGVKIKGYWNSQADITCVPKDLLQGEEPVRQQNVTTIHGTQEGDVYYVNLKIDGRRINTEVIGTTLDYAIITPGDVPWILKKPLELTIKLDLEEQQGTLLNNSILSKKGKEELKQLFEKYSALWQSWENQVGHRRIRPHKIATGTVKPTPQKQYHINPKAKPDIQIVINDLLKQGVLIQKESTMNTPVYPVPKPNGRWRMVLDYRAVNKVTPLIAVQNQHSYGILGSLFKGRYKTTIDLSNGFWAHPIVPEDYWITAFTWQGKQYCWTVLPQGFLNSPGLFTGDVVDLLQGIPNVEVYVDDVYISHDSEKEHLEYLDILFNRLKEAGYIISLKKSNIANSIVDFLGFQITNEGRGLTDTFKEKLENITAPTTLKQLQSILGLLNFARNFIPDFTELIAPLYALIPKSTKNYVPWQIEHSTTLETLITKLNGAEYLQGRKGDKTLIMKVNASYTTGYIRYYNEGEKKPISYVSIVFSKTELKFTELEKLLTTVHKGLLKALDLSMGQNIHVYSPIVSMQNIQKTPQTAKKALASRWLSWLSYLEDPRIRFFYDPQMPALKDLPAVDTGKDNKKHPSNFQHIFYTDGSAITSPTKEGHLNAGMGIVYFINKDGNLQKQQEWSISLGNHTAQFAEIAAFEFALKKCLPLGGNILVVTDSNYVAKAYNEELDVWASNGFVNNRKKPLKHISKWKSVADLKRLRPDVVVTHEPGHQKLDSSPHAYGNNLADQLATQASFKVHAGKRTADGSEFEKRTADGSEFESPKKKAKVE

SEQ ID NO: 730 - protein, 2173 aa, synthetic construct
MPAAKRVKLDGGDKKYSIGLDIGTNSVGWAVITDEYKVPSKKFKVLGNTDRHSIKKNLIGALLFDSGETAEATRLKRTARRRYTRRKNRICYLQEIFSNEMAKVDDSFFHRLEESFLVEEDKKHERHPIFGNIVDEVAYHEKYPTIYHLRKKLVDSTDKADLRLIYLALAHMIKFRGHFLIEGDLNPDNSDVDKLFIQLVQTYNQLFEENPINASGVDAKAILSARLSKSRRLENLIAQLPGEKKNGLFGNLIALSLGLTPNFKSNFDLAEDAKLQLSKDTYDDDLDNLLAQIGDQYADLFLAAKNLSDAILLSDILRVNTEITKAPLSASMIKRYDEHHQDLTLLKALVRQQLPEKYKEIFFDQSKNGYAGYIDGGASQEEFYKFIKPILEKMDGTEELLVKLNREDLLRKQRTFDNGSIPHQIHLGELHAILRRQEDFYPFLKDNREKIEKILTFRIPYYVGPLARGNSRFAWMTRKSEETITPWNFEEVVDKGASAQSFIERMTNFDKNLPNEKVLPKHSLLYEYFTVYNELTKVKYVTEGMRKPAFLSGEQKKAIVDLLFKTNRKVTVKQLKEDYFKKIECFDSVEISGVEDRFNASLGTYHDLLKIIKDKDFLDNEENEDILEDIVLTLTLFEDREMIEERLKTYAHLFDDKVMKQLKRRRYTGWGRLSRKLINGIRDKQSGKTILDFLKSDGFANRNFMQLIHDDSLTFKEDIQKAQVSGQGDSLHEHIANLAGSPAIKKGILQTVKVVDELVKVMGRHKPENIVIEMARENQTTQKGQKNSRERMKRIEEGIKELGSQILKEHPVENTQLQNEKLYLYYLQNGRDMYVDQELDINRLSDYDVDHIVPQSFLKDDSIDNKVLTRSDKARGKSDNVPSEEVVKKMKNYWRQLLNAKLITQRKFDNLTKAERGGLSELDKAGFIKRQLVETRQITKHVAQILDSRMNTKYDENDKLIREVKVITLKSKLVSDFRKDFQFYKVREINNYHHAHDAYLNAVVGTALIKKYPKLESEFVYGDYKVYDVRKMIAKSEQEIGKATAKYFFYSNIMNFFKTEITLANGEIRKRPLIETNGETGEIVWDKGRDFATVRKVLSMPQVNIVKKTEVQTGGFSKESILPKRNSDKLIARKKDWDPKKYGGFDSPTVAYSVLVVAKVEKGKSKKLKSVKELLGITIMERSSFEKNPIDFLEAKGYKEVKKDLIIKLPKYSLFELENGRKRMLASAGELQKGNELALPSKYVNFLYLASHYEKLKGSPEDNEQKQLFVEQHKHYLDEIIEQISEFSKRVILADANLDKVLSAYNKHRDKPIREQAENIIHLFTLTNLGAPAAFKYFDTTIDRKRYTSTKEVLDATLIHQSITGLYETRIDLSQLGGDGGGSSGGSEAAAKGGMDLLKPLTVERKGVKIKGYWNSQADITCVPKDLLQGEEPVRQQNVTTIHGTQEGDVYYVNLKIDGRRINTEVIGTTLDYAIITPGDVPWILKKPLELTIKLDLEEQQGTLLNNSILSKKGKEELKQLFEKYSALWQSWENQVGHRRIRPHKIATGTVKPTPQKQYHINPKAKPDIQIVINDLLKQGVLIQKESTMNTPVYPVPKPNGRWRMVLDYRAVNKVTPLIAVQNQHSYGILGSLFKGRYKTTIDLSNGFWAHPIVPEDYWITAFTWQGKQYCWTVLPQGFLNSPGLFTGDVVDLLQGIPNVEVYVDDVYISHDSEKEHLEYLDILFNRLKEAGYIISLKKSNIANSIVDFLGFQITNEGRGLTDTFKEKLENITAPTTLKQLQSILGLLNFARNFIPDFTELIAPLYALIPKSTKNYVPWQIEHSTTLETLITKLNGAEYLQGRKGDKTLIMKVNASYTTGYIRYYNEGEKKPISYVSIVFSKTELKFTELEKLLTTVHKGLLKALDLSMGQNIHVYSPIVSMQNIQKTPQTAKKALASRWLSWLSYLEDPRIRFFYDPQMPALKDLPAVDTGKDNKKHPSNFQHIFYTDGSAITSPTKEGHLNAGMGIVYFINKDGNLQKQQEWSISLGNHTAQFAEIAAFEFALKKCLPLGGNILVVTDSNYVAKAYNEELDVWASNGFVNNRKKPLKHISKWKSVADLKRLRPDVVVTHEPGHQKLDSSPHAYGNNLADQLATQASFKVHAGKRTADGSEFEKRTADGSEFESPKKKAKVE

SEQ ID NO: 731 - protein, 2171 aa, synthetic construct
MPAAKRVKLDGGDKKYSIGLDIGTNSVGWAVITDEYKVPSKKFKVLGNTDRHSIKKNLIGALLFDSGETAEATRLKRTARRRYTRRKNRICYLQEIFSNEMAKVDDSFFHRLEESFLVEEDKKHERHPIFGNIVDEVAYHEKYPTIYHLRKKLVDSTDKADLRLIYLALAHMIKFRGHFLIEGDLNPDNSDVDKLFIQLVQTYNQLFEENPINASGVDAKAILSARLSKSRRLENLIAQLPGEKKNGLFGNLIALSLGLTPNFKSNFDLAEDAKLQLSKDTYDDDLDNLLAQIGDQYADLFLAAKNLSDAILLSDILRVNTEITKAPLSASMIKRYDEHHQDLTLLKALVRQQLPEKYKEIFFDQSKNGYAGYIDGGASQEEFYKFIKPILEKMDGTEELLVKLNREDLLRKQRTFDNGSIPHQIHLGELHAILRRQEDFYPFLKDNREKIEKILTFRIPYYVGPLARGNSRFAWMTRKSEETITPWNFEEVVDKGASAQSFIERMTNFDKNLPNEKVLPKHSLLYEYFTVYNELTKVKYVTEGMRKPAFLSGEQKKAIVDLLFKTNRKVTVKQLKEDYFKKIECFDSVEISGVEDRFNASLGTYHDLLKIIKDKDFLDNEENEDILEDIVLTLTLFEDREMIEERLKTYAHLFDDKVMKQLKRRRYTGWGRLSRKLINGIRDKQSGKTILDFLKSDGFANRNFMQLIHDDSLTFKEDIQKAQVSGQGDSLHEHIANLAGSPAIKKGILQTVKVVDELVKVMGRHKPENIVIEMARENQTTQKGQKNSRERMKRIEEGIKELGSQILKEHPVENTQLQNEKLYLYYLQNGRDMYVDQELDINRLSDYDVDHIVPQSFLKDDSIDNKVLTRSDKARGKSDNVPSEEVVKKMKNYWRQLLNAKLITQRKFDNLTKAERGGLSELDKAGFIKRQLVETRQITKHVAQILDSRMNTKYDENDKLIREVKVITLKSKLVSDFRKDFQFYKVREINNYHHAHDAYLNAVVGTALIKKYPKLESEFVYGDYKVYDVRKMIAKSEQEIGKATAKYFFYSNIMNFFKTEITLANGEIRKRPLIETNGETGEIVWDKGRDFATVRKVLSMPQVNIVKKTEVQTGGFSKESILPKRNSDKLIARKKDWDPKKYGGFDSPTVAYSVLVVAKVEKGKSKKLKSVKELLGITIMERSSFEKNPIDFLEAKGYKEVKKDLIIKLPKYSLFELENGRKRMLASAGELQKGNELALPSKYVNFLYLASHYEKLKGSPEDNEQKQLFVEQHKHYLDEIIEQISEFSKRVILADANLDKVLSAYNKHRDKPIREQAENIIHLFTLTNLGAPAAFKYFDTTIDRKRYTSTKEVLDATLIHQSITGLYETRIDLSQLGGDGGGGSGGGPAPGGMDLLKPLTVERKGVKIKGYWNSQADITCVPKDLLQGEEPVRQQNVTTIHGTQEGDVYYVNLKIDGRRINTEVIGTTLDYAIITPGDVPWILKKPLELTIKLDLEEQQGTLLNNSILSKKGKEELKQLFEKYSALWQSWENQVGHRRIRPHKIATGTVKPTPQKQYHINPKAKPDIQIVINDLLKQGVLIQKESTMNTPVYPVPKPNGRWRMVLDYRAVNKVTPLIAVQNQHSYGILGSLFKGRYKTTIDLSNGFWAHPIVPEDYWITAFTWQGKQYCWTVLPQGFLNSPGLFTGDVVDLLQGIPNVEVYVDDVYISHDSEKEHLEYLDILFNRLKEAGYIISLKKSNIANSIVDFLGFQITNEGRGLTDTFKEKLENITAPTTLKQLQSILGLLNFARNFIPDFTELIAPLYALIPKSTKNYVPWQIEHSTTLETLITKLNGAEYLQGRKGDKTLIMKVNASYTTGYIRYYNEGEKKPISYVSIVFSKTELKFTELEKLLTTVHKGLLKALDLSMGQNIHVYSPIVSMQNIQKTPQTAKKALASRWLSWLSYLEDPRIRFFYDPQMPALKDLPAVDTGKDNKKHPSNFQHIFYTDGSAITSPTKEGHLNAGMGIVYFINKDGNLQKQQEWSISLGNHTAQFAEIAAFEFALKKCLPLGGNILVVTDSNYVAKAYNEELDVWASNGFVNNRKKPLKHISKWKSVADLKRLRPDVVVTHEPGHQKLDSSPHAYGNNLADQLATQASFKVHAGKRTADGSEFEKRTADGSEFESPKKKAKVE

SEQ ID NO: 732 - protein, 2173 aa, synthetic construct
MPAAKRVKLDGGDKKYSIGLDIGTNSVGWAVITDEYKVPSKKFKVLGNTDRHSIKKNLIGALLFDSGETAEATRLKRTARRRYTRRKNRICYLQEIFSNEMAKVDDSFFHRLEESFLVEEDKKHERHPIFGNIVDEVAYHEKYPTIYHLRKKLVDSTDKADLRLIYLALAHMIKFRGHFLIEGDLNPDNSDVDKLFIQLVQTYNQLFEENPINASGVDAKAILSARLSKSRRLENLIAQLPGEKKNGLFGNLIALSLGLTPNFKSNFDLAEDAKLQLSKDTYDDDLDNLLAQIGDQYADLFLAAKNLSDAILLSDILRVNTEITKAPLSASMIKRYDEHHQDLTLLKALVRQQLPEKYKEIFFDQSKNGYAGYIDGGASQEEFYKFIKPILEKMDGTEELLVKLNREDLLRKQRTFDNGSIPHQIHLGELHAILRRQEDFYPFLKDNREKIEKILTFRIPYYVGPLARGNSRFAWMTRKSEETITPWNFEEVVDKGASAQSFIERMTNFDKNLPNEKVLPKHSLLYEYFTVYNELTKVKYVTEGMRKPAFLSGEQKKAIVDLLFKTNRKVTVKQLKEDYFKKIECFDSVEISGVEDRFNASLGTYHDLLKIIKDKDFLDNEENEDILEDIVLTLTLFEDREMIEERLKTYAHLFDDKVMKQLKRRRYTGWGRLSRKLINGIRDKQSGKTILDFLKSDGFANRNFMQLIHDDSLTFKEDIQKAQVSGQGDSLHEHIANLAGSPAIKKGILQTVKVVDELVKVMGRHKPENIVIEMARENQTTQKGQKNSRERMKRIEEGIKELGSQILKEHPVENTQLQNEKLYLYYLQNGRDMYVDQELDINRLSDYDVDHIVPQSFLKDDSIDNKVLTRSDKARGKSDNVPSEEVVKKMKNYWRQLLNAKLITQRKFDNLTKAERGGLSELDKAGFIKRQLVETRQITKHVAQILDSRMNTKYDENDKLIREVKVITLKSKLVSDFRKDFQFYKVREINNYHHAHDAYLNAVVGTALIKKYPKLESEFVYGDYKVYDVRKMIAKSEQEIGKATAKYFFYSNIMNFFKTEITLANGEIRKRPLIETNGETGEIVWDKGRDFATVRKVLSMPQVNIVKKTEVQTGGFSKESILPKRNSDKLIARKKDWDPKKYGGFDSPTVAYSVLVVAKVEKGKSKKLKSVKELLGITIMERSSFEKNPIDFLEAKGYKEVKKDLIIKLPKYSLFELENGRKRMLASAGELQKGNELALPSKYVNFLYLASHYEKLKGSPEDNEQKQLFVEQHKHYLDEIIEQISEFSKRVILADANLDKVLSAYNKHRDKPIREQAENIIHLFTLTNLGAPAAFKYFDTTIDRKRYTSTKEVLDATLIHQSITGLYETRIDLSQLGGDGGGGGEAAAKPAPGGMDLLKPLTVERKGVKIKGYWNSQADITCVPKDLLQGEEPVRQQNVTTIHGTQEGDVYYVNLKIDGRRINTEVIGTTLDYAIITPGDVPWILKKPLELTIKLDLEEQQGTLLNNSILSKKGKEELKQLFEKYSALWQSWENQVGHRRIRPHKIATGTVKPTPQKQYHINPKAKPDIQIVINDLLKQGVLIQKESTMNTPVYPVPKPNGRWRMVLDYRAVNKVTPLIAVQNQHSYGILGSLFKGRYKTTIDLSNGFWAHPIVPEDYWITAFTWQGKQYCWTVLPQGFLNSPGLFTGDVVDLLQGIPNVEVYVDDVYISHDSEKEHLEYLDILFNRLKEAGYIISLKKSNIANSIVDFLGFQITNEGRGLTDTFKEKLENITAPTTLKQLQSILGLLNFARNFIPDFTELIAPLYALIPKSTKNYVPWQIEHSTTLETLITKLNGAEYLQGRKGDKTLIMKVNASYTTGYIRYYNEGEKKPISYVSIVFSKTELKFTELEKLLTTVHKGLLKALDLSMGQNIHVYSPIVSMQNIQKTPQTAKKALASRWLSWLSYLEDPRIRFFYDPQMPALKDLPAVDTGKDNKKHPSNFQHIFYTDGSAITSPTKEGHLNAGMGIVYFINKDGNLQKQQEWSISLGNHTAQFAEIAAFEFALKKCLPLGGNILVVTDSNYVAKAYNEELDVWASNGFVNNRKKPLKHISKWKSVADLKRLRPDVVVTHEPGHQKLDSSPHAYGNNLADQLATQASFKVHAGKRTADGSEFEKRTADGSEFESPKKKAKVE

SEQ ID NO: 733 - protein, 2167 aa, synthetic construct
MPAAKRVKLDGGDKKYSIGLDIGTNSVGWAVITDEYKVPSKKFKVLGNTDRHSIKKNLIGALLFDSGETAEATRLKRTARRRYTRRKNRICYLQEIFSNEMAKVDDSFFHRLEESFLVEEDKKHERHPIFGNIVDEVAYHEKYPTIYHLRKKLVDSTDKADLRLIYLALAHMIKFRGHFLIEGDLNPDNSDVDKLFIQLVQTYNQLFEENPINASGVDAKAILSARLSKSRRLENLIAQLPGEKKNGLFGNLIALSLGLTPNFKSNFDLAEDAKLQLSKDTYDDDLDNLLAQIGDQYADLFLAAKNLSDAILLSDILRVNTEITKAPLSASMIKRYDEHHQDLTLLKALVRQQLPEKYKEIFFDQSKNGYAGYIDGGASQEEFYKFIKPILEKMDGTEELLVKLNREDLLRKQRTFDNGSIPHQIHLGELHAILRRQEDFYPFLKDNREKIEKILTFRIPYYVGPLARGNSRFAWMTRKSEETITPWNFEEVVDKGASAQSFIERMTNFDKNLPNEKVLPKHSLLYEYFTVYNELTKVKYVTEGMRKPAFLSGEQKKAIVDLLFKTNRKVTVKQLKEDYFKKIECFDSVEISGVEDRFNASLGTYHDLLKIIKDKDFLDNEENEDILEDIVLTLTLFEDREMIEERLKTYAHLFDDKVMKQLKRRRYTGWGRLSRKLINGIRDKQSGKTILDFLKSDGFANRNFMQLIHDDSLTFKEDIQKAQVSGQGDSLHEHIANLAGSPAIKKGILQTVKVVDELVKVMGRHKPENIVIEMARENQTTQKGQKNSRERMKRIEEGIKELGSQILKEHPVENTQLQNEKLYLYYLQNGRDMYVDQELDINRLSDYDVDHIVPQSFLKDDSIDNKVLTRSDKARGKSDNVPSEEVVKKMKNYWRQLLNAKLITQRKFDNLTKAERGGLSELDKAGFIKRQLVETRQITKHVAQILDSRMNTKYDENDKLIREVKVITLKSKLVSDFRKDFQFYKVREINNYHHAHDAYLNAVVGTALIKKYPKLESEFVYGDYKVYDVRKMIAKSEQEIGKATAKYFFYSNIMNFFKTEITLANGEIRKRPLIETNGETGEIVWDKGRDFATVRKVLSMPQVNIVKKTEVQTGGFSKESILPKRNSDKLIARKKDWDPKKYGGFDSPTVAYSVLVVAKVEKGKSKKLKSVKELLGITIMERSSFEKNPIDFLEAKGYKEVKKDLIIKLPKYSLFELENGRKRMLASAGELQKGNELALPSKYVNFLYLASHYEKLKGSPEDNEQKQLFVEQHKHYLDEIIEQISEFSKRVILADANLDKVLSAYNKHRDKPIREQAENIIHLFTLTNLGAPAAFKYFDTTIDRKRYTSTKEVLDATLIHQSITGLYETRIDLSQLGGDGGGGGGGGGMDLLKPLTVERKGVKIKGYWNSQADITCVPKDLLQGEEPVRQQNVTTIHGTQEGDVYYVNLKIDGRRINTEVIGTTLDYAIITPGDVPWILKKPLELTIKLDLEEQQGTLLNNSILSKKGKEELKQLFEKYSALWQSWENQVGHRRIRPHKIATGTVKPTPQKQYHINPKAKPDIQIVINDLLKQGVLIQKESTMNTPVYPVPKPNGRWRMVLDYRAVNKVTPLIAVQNQHSYGILGSLFKGRYKTTIDLSNGFWAHPIVPEDYWITAFTWQGKQYCWTVLPQGFLNSPGLFTGDVVDLLQGIPNVEVYVDDVYISHDSEKEHLEYLDILFNRLKEAGYIISLKKSNIANSIVDFLGFQITNEGRGLTDTFKEKLENITAPTTLKQLQSILGLLNFARNFIPDFTELIAPLYALIPKSTKNYVPWQIEHSTTLETLITKLNGAEYLQGRKGDKTLIMKVNASYTTGYIRYYNEGEKKPISYVSIVFSKTELKFTELEKLLTTVHKGLLKALDLSMGQNIHVYSPIVSMQNIQKTPQTAKKALASRWLSWLSYLEDPRIRFFYDPQMPALKDLPAVDTGKDNKKHPSNFQHIFYTDGSAITSPTKEGHLNAGMGIVYFINKDGNLQKQQEWSISLGNHTAQFAEIAAFEFALKKCLPLGGNILVVTDSNYVAKAYNEELDVWASNGFVNNRKKPLKHISKWKSVADLKRLRPDVVVTHEPGHQKLDSSPHAYGNNLADQLATQASFKVHAGKRTADGSEFEKRTADGSEFESPKKKAKVE

SEQ ID NO: 734 - protein, 2165 aa, synthetic construct
MPAAKRVKLDGGDKKYSIGLDIGTNSVGWAVITDEYKVPSKKFKVLGNTDRHSIKKNLIGALLFDSGETAEATRLKRTARRRYTRRKNRICYLQEIFSNEMAKVDDSFFHRLEESFLVEEDKKHERHPIFGNIVDEVAYHEKYPTIYHLRKKLVDSTDKADLRLIYLALAHMIKFRGHFLIEGDLNPDNSDVDKLFIQLVQTYNQLFEENPINASGVDAKAILSARLSKSRRLENLIAQLPGEKKNGLFGNLIALSLGLTPNFKSNFDLAEDAKLQLSKDTYDDDLDNLLAQIGDQYADLFLAAKNLSDAILLSDILRVNTEITKAPLSASMIKRYDEHHQDLTLLKALVRQQLPEKYKEIFFDQSKNGYAGYIDGGASQEEFYKFIKPILEKMDGTEELLVKLNREDLLRKQRTFDNGSIPHQIHLGELHAILRRQEDFYPFLKDNREKIEKILTFRIPYYVGPLARGNSRFAWMTRKSEETITPWNFEEVVDKGASAQSFIERMTNFDKNLPNEKVLPKHSLLYEYFTVYNELTKVKYVTEGMRKPAFLSGEQKKAIVDLLFKTNRKVTVKQLKEDYFKKIECFDSVEISGVEDRFNASLGTYHDLLKIIKDKDFLDNEENEDILEDIVLTLTLFEDREMIEERLKTYAHLFDDKVMKQLKRRRYTGWGRLSRKLINGIRDKQSGKTILDFLKSDGFANRNFMQLIHDDSLTFKEDIQKAQVSGQGDSLHEHIANLAGSPAIKKGILQTVKVVDELVKVMGRHKPENIVIEMARENQTTQKGQKNSRERMKRIEEGIKELGSQILKEHPVENTQLQNEKLYLYYLQNGRDMYVDQELDINRLSDYDVDHIVPQSFLKDDSIDNKVLTRSDKARGKSDNVPSEEVVKKMKNYWRQLLNAKLITQRKFDNLTKAERGGLSELDKAGFIKRQLVETRQITKHVAQILDSRMNTKYDENDKLIREVKVITLKSKLVSDFRKDFQFYKVREINNYHHAHDAYLNAVVGTALIKKYPKLESEFVYGDYKVYDVRKMIAKSEQEIGKATAKYFFYSNIMNFFKTEITLANGEIRKRPLIETNGETGEIVWDKGRDFATVRKVLSMPQVNIVKKTEVQTGGFSKESILPKRNSDKLIARKKDWDPKKYGGFDSPTVAYSVLVVAKVEKGKSKKLKSVKELLGITIMERSSFEKNPIDFLEAKGYKEVKKDLIIKLPKYSLFELENGRKRMLASAGELQKGNELALPSKYVNFLYLASHYEKLKGSPEDNEQKQLFVEQHKHYLDEIIEQISEFSKRVILADANLDKVLSAYNKHRDKPIREQAENIIHLFTLTNLGAPAAFKYFDTTIDRKRYTSTKEVLDATLIHQSITGLYETRIDLSQLGGDGGGGGGGMDLLKPLTVERKGVKIKGYWNSQADITCVPKDLLQGEEPVRQQNVTTIHGTQEGDVYYVNLKIDGRRINTEVIGTTLDYAIITPGDVPWILKKPLELTIKLDLEEQQGTLLNNSILSKKGKEELKQLFEKYSALWQSWENQVGHRRIRPHKIATGTVKPTPQKQYHINPKAKPDIQIVINDLLKQGVLIQKESTMNTPVYPVPKPNGRWRMVLDYRAVNKVTPLIAVQNQHSYGILGSLFKGRYKTTIDLSNGFWAHPIVPEDYWITAFTWQGKQYCWTVLPQGFLNSPGLFTGDVVDLLQGIPNVEVYVDDVYISHDSEKEHLEYLDILFNRLKEAGYIISLKKSNIANSIVDFLGFQITNEGRGLTDTFKEKLENITAPTTLKQLQSILGLLNFARNFIPDFTELIAPLYALIPKSTKNYVPWQIEHSTTLETLITKLNGAEYLQGRKGDKTLIMKVNASYTTGYIRYYNEGEKKPISYVSIVFSKTELKFTELEKLLTTVHKGLLKALDLSMGQNIHVYSPIVSMQNIQKTPQTAKKALASRWLSWLSYLEDPRIRFFYDPQMPALKDLPAVDTGKDNKKHPSNFQHIFYTDGSAITSPTKEGHLNAGMGIVYFINKDGNLQKQQEWSISLGNHTAQFAEIAAFEFALKKCLPLGGNILVVTDSNYVAKAYNEELDVWASNGFVNNRKKPLKHISKWKSVADLKRLRPDVVVTHEPGHQKLDSSPHAYGNNLADQLATQASFKVHAGKRTADGSEFEKRTADGSEFESPKKKAKVE

SEQ ID NO: 735 - protein, 2167 aa, synthetic construct
MPAAKRVKLDGGDKKYSIGLDIGTNSVGWAVITDEYKVPSKKFKVLGNTDRHSIKKNLIGALLFDSGETAEATRLKRTARRRYTRRKNRICYLQEIFSNEMAKVDDSFFHRLEESFLVEEDKKHERHPIFGNIVDEVAYHEKYPTIYHLRKKLVDSTDKADLRLIYLALAHMIKFRGHFLIEGDLNPDNSDVDKLFIQLVQTYNQLFEENPINASGVDAKAILSARLSKSRRLENLIAQLPGEKKNGLFGNLIALSLGLTPNFKSNFDLAEDAKLQLSKDTYDDDLDNLLAQIGDQYADLFLAAKNLSDAILLSDILRVNTEITKAPLSASMIKRYDEHHQDLTLLKALVRQQLPEKYKEIFFDQSKNGYAGYIDGGASQEEFYKFIKPILEKMDGTEELLVKLNREDLLRKQRTFDNGSIPHQIHLGELHAILRRQEDFYPFLKDNREKIEKILTFRIPYYVGPLARGNSRFAWMTRKSEETITPWNFEEVVDKGASAQSFIERMTNFDKNLPNEKVLPKHSLLYEYFTVYNELTKVKYVTEGMRKPAFLSGEQKKAIVDLLFKTNRKVTVKQLKEDYFKKIECFDSVEISGVEDRFNASLGTYHDLLKIIKDKDFLDNEENEDILEDIVLTLTLFEDREMIEERLKTYAHLFDDKVMKQLKRRRYTGWGRLSRKLINGIRDKQSGKTILDFLKSDGFANRNFMQLIHDDSLTFKEDIQKAQVSGQGDSLHEHIANLAGSPAIKKGILQTVKVVDELVKVMGRHKPENIVIEMARENQTTQKGQKNSRERMKRIEEGIKELGSQILKEHPVENTQLQNEKLYLYYLQNGRDMYVDQELDINRLSDYDVDHIVPQSFLKDDSIDNKVLTRSDKARGKSDNVPSEEVVKKMKNYWRQLLNAKLITQRKFDNLTKAERGGLSELDKAGFIKRQLVETRQITKHVAQILDSRMNTKYDENDKLIREVKVITLKSKLVSDFRKDFQFYKVREINNYHHAHDAYLNAVVGTALIKKYPKLESEFVYGDYKVYDVRKMIAKSEQEIGKATAKYFFYSNIMNFFKTEITLANGEIRKRPLIETNGETGEIVWDKGRDFATVRKVLSMPQVNIVKKTEVQTGGFSKESILPKRNSDKLIARKKDWDPKKYGGFDSPTVAYSVLVVAKVEKGKSKKLKSVKELLGITIMERSSFEKNPIDFLEAKGYKEVKKDLIIKLPKYSLFELENGRKRMLASAGELQKGNELALPSKYVNFLYLASHYEKLKGSPEDNEQKQLFVEQHKHYLDEIIEQISEFSKRVILADANLDKVLSAYNKHRDKPIREQAENIIHLFTLTNLGAPAAFKYFDTTIDRKRYTSTKEVLDATLIHQSITGLYETRIDLSQLGGDGGPAPAPGGMDLLKPLTVERKGVKIKGYWNSQADITCVPKDLLQGEEPVRQQNVTTIHGTQEGDVYYVNLKIDGRRINTEVIGTTLDYAIITPGDVPWILKKPLELTIKLDLEEQQGTLLNNSILSKKGKEELKQLFEKYSALWQSWENQVGHRRIRPHKIATGTVKPTPQKQYHINPKAKPDIQIVINDLLKQGVLIQKESTMNTPVYPVPKPNGRWRMVLDYRAVNKVTPLIAVQNQHSYGILGSLFKGRYKTTIDLSNGFWAHPIVPEDYWITAFTWQGKQYCWTVLPQGFLNSPGLFTGDVVDLLQGIPNVEVYVDDVYISHDSEKEHLEYLDILFNRLKEAGYIISLKKSNIANSIVDFLGFQITNEGRGLTDTFKEKLENITAPTTLKQLQSILGLLNFARNFIPDFTELIAPLYALIPKSTKNYVPWQIEHSTTLETLITKLNGAEYLQGRKGDKTLIMKVNASYTTGYIRYYNEGEKKPISYVSIVFSKTELKFTELEKLLTTVHKGLLKALDLSMGQNIHVYSPIVSMQNIQKTPQTAKKALASRWLSWLSYLEDPRIRFFYDPQMPALKDLPAVDTGKDNKKHPSNFQHIFYTDGSAITSPTKEGHLNAGMGIVYFINKDGNLQKQQEWSISLGNHTAQFAEIAAFEFALKKCLPLGGNILVVTDSNYVAKAYNEELDVWASNGFVNNRKKPLKHISKWKSVADLKRLRPDVVVTHEPGHQKLDSSPHAYGNNLADQLATQASFKVHAGKRTADGSEFEKRTADGSEFESPKKKAKVE

SEQ ID NO: 736 - protein, 2171 aa, synthetic construct
MPAAKRVKLDGGDKKYSIGLDIGTNSVGWAVITDEYKVPSKKFKVLGNTDRHSIKKNLIGALLFDSGETAEATRLKRTARRRYTRRKNRICYLQEIFSNEMAKVDDSFFHRLEESFLVEEDKKHERHPIFGNIVDEVAYHEKYPTIYHLRKKLVDSTDKADLRLIYLALAHMIKFRGHFLIEGDLNPDNSDVDKLFIQLVQTYNQLFEENPINASGVDAKAILSARLSKSRRLENLIAQLPGEKKNGLFGNLIALSLGLTPNFKSNFDLAEDAKLQLSKDTYDDDLDNLLAQIGDQYADLFLAAKNLSDAILLSDILRVNTEITKAPLSASMIKRYDEHHQDLTLLKALVRQQLPEKYKEIFFDQSKNGYAGYIDGGASQEEFYKFIKPILEKMDGTEELLVKLNREDLLRKQRTFDNGSIPHQIHLGELHAILRRQEDFYPFLKDNREKIEKILTFRIPYYVGPLARGNSRFAWMTRKSEETITPWNFEEVVDKGASAQSFIERMTNFDKNLPNEKVLPKHSLLYEYFTVYNELTKVKYVTEGMRKPAFLSGEQKKAIVDLLFKTNRKVTVKQLKEDYFKKIECFDSVEISGVEDRFNASLGTYHDLLKIIKDKDFLDNEENEDILEDIVLTLTLFEDREMIEERLKTYAHLFDDKVMKQLKRRRYTGWGRLSRKLINGIRDKQSGKTILDFLKSDGFANRNFMQLIHDDSLTFKEDIQKAQVSGQGDSLHEHIANLAGSPAIKKGILQTVKVVDELVKVMGRHKPENIVIEMARENQTTQKGQKNSRERMKRIEEGIKELGSQILKEHPVENTQLQNEKLYLYYLQNGRDMYVDQELDINRLSDYDVDHIVPQSFLKDDSIDNKVLTRSDKARGKSDNVPSEEVVKKMKNYWRQLLNAKLITQRKFDNLTKAERGGLSELDKAGFIKRQLVETRQITKHVAQILDSRMNTKYDENDKLIREVKVITLKSKLVSDFRKDFQFYKVREINNYHHAHDAYLNAVVGTALIKKYPKLESEFVYGDYKVYDVRKMIAKSEQEIGKATAKYFFYSNIMNFFKTEITLANGEIRKRPLIETNGETGEIVWDKGRDFATVRKVLSMPQVNIVKKTEVQTGGFSKESILPKRNSDKLIARKKDWDPKKYGGFDSPTVAYSVLVVAKVEKGKSKKLKSVKELLGITIMERSSFEKNPIDFLEAKGYKEVKKDLIIKLPKYSLFELENGRKRMLASAGELQKGNELALPSKYVNFLYLASHYEKLKGSPEDNEQKQLFVEQHKHYLDEIIEQISEFSKRVILADANLDKVLSAYNKHRDKPIREQAENIIHLFTLTNLGAPAAFKYFDTTIDRKRYTSTKEVLDATLIHQSITGLYETRIDLSQLGGDGGGSSGGGGGSGGMDLLKPLTVERKGVKIKGYWNSQADITCVPKDLLQGEEPVRQQNVTTIHGTQEGDVYYVNLKIDGRRINTEVIGTTLDYAIITPGDVPWILKKPLELTIKLDLEEQQGTLLNNSILSKKGKEELKQLFEKYSALWQSWENQVGHRRIRPHKIATGTVKPTPQKQYHINPKAKPDIQIVINDLLKQGVLIQKESTMNTPVYPVPKPNGRWRMVLDYRAVNKVTPLIAVQNQHSYGILGSLFKGRYKTTIDLSNGFWAHPIVPEDYWITAFTWQGKQYCWTVLPQGFLNSPGLFTGDVVDLLQGIPNVEVYVDDVYISHDSEKEHLEYLDILFNRLKEAGYIISLKKSNIANSIVDFLGFQITNEGRGLTDTFKEKLENITAPTTLKQLQSILGLLNFARNFIPDFTELIAPLYALIPKSTKNYVPWQIEHSTTLETLITKLNGAEYLQGRKGDKTLIMKVNASYTTGYIRYYNEGEKKPISYVSIVFSKTELKFTELEKLLTTVHKGLLKALDLSMGQNIHVYSPIVSMQNIQKTPQTAKKALASRWLSWLSYLEDPRIRFFYDPQMPALKDLPAVDTGKDNKKHPSNFQHIFYTDGSAITSPTKEGHLNAGMGIVYFINKDGNLQKQQEWSISLGNHTAQFAEIAAFEFALKKCLPLGGNILVVTDSNYVAKAYNEELDVWASNGFVNNRKKPLKHISKWKSVADLKRLRPDVVVTHEPGHQKLDSSPHAYGNNLADQLATQASFKVHAGKRTADGSEFEKRTADGSEFESPKKKAKVE

SEQ ID NO: 737 - protein, 2171 aa, synthetic construct
MPAAKRVKLDGGDKKYSIGLDIGTNSVGWAVITDEYKVPSKKFKVLGNTDRHSIKKNLIGALLFDSGETAEATRLKRTARRRYTRRKNRICYLQEIFSNEMAKVDDSFFHRLEESFLVEEDKKHERHPIFGNIVDEVAYHEKYPTIYHLRKKLVDSTDKADLRLIYLALAHMIKFRGHFLIEGDLNPDNSDVDKLFIQLVQTYNQLFEENPINASGVDAKAILSARLSKSRRLENLIAQLPGEKKNGLFGNLIALSLGLTPNFKSNFDLAEDAKLQLSKDTYDDDLDNLLAQIGDQYADLFLAAKNLSDAILLSDILRVNTEITKAPLSASMIKRYDEHHQDLTLLKALVRQQLPEKYKEIFFDQSKNGYAGYIDGGASQEEFYKFIKPILEKMDGTEELLVKLNREDLLRKQRTFDNGSIPHQIHLGELHAILRRQEDFYPFLKDNREKIEKILTFRIPYYVGPLARGNSRFAWMTRKSEETITPWNFEEVVDKGASAQSFIERMTNFDKNLPNEKVLPKHSLLYEYFTVYNELTKVKYVTEGMRKPAFLSGEQKKAIVDLLFKTNRKVTVKQLKEDYFKKIECFDSVEISGVEDRFNASLGTYHDLLKIIKDKDFLDNEENEDILEDIVLTLTLFEDREMIEERLKTYAHLFDDKVMKQLKRRRYTGWGRLSRKLINGIRDKQSGKTILDFLKSDGFANRNFMQLIHDDSLTFKEDIQKAQVSGQGDSLHEHIANLAGSPAIKKGILQTVKVVDELVKVMGRHKPENIVIEMARENQTTQKGQKNSRERMKRIEEGIKELGSQILKEHPVENTQLQNEKLYLYYLQNGRDMYVDQELDINRLSDYDVDHIVPQSFLKDDSIDNKVLTRSDKARGKSDNVPSEEVVKKMKNYWRQLLNAKLITQRKFDNLTKAERGGLSELDKAGFIKRQLVETRQITKHVAQILDSRMNTKYDENDKLIREVKVITLKSKLVSDFRKDFQFYKVREINNYHHAHDAYLNAVVGTALIKKYPKLESEFVYGDYKVYDVRKMIAKSEQEIGKATAKYFFYSNIMNFFKTEITLANGEIRKRPLIETNGETGEIVWDKGRDFATVRKVLSMPQVNIVKKTEVQTGGFSKESILPKRNSDKLIARKKDWDPKKYGGFDSPTVAYSVLVVAKVEKGKSKKLKSVKELLGITIMERSSFEKNPIDFLEAKGYKEVKKDLIIKLPKYSLFELENGRKRMLASAGELQKGNELALPSKYVNFLYLASHYEKLKGSPEDNEQKQLFVEQHKHYLDEIIEQISEFSKRVILADANLDKVLSAYNKHRDKPIREQAENIIHLFTLTNLGAPAAFKYFDTTIDRKRYTSTKEVLDATLIHQSITGLYETRIDLSQLGGDGGPAPGGSGSSGGMDLLKPLTVERKGVKIKGYWNSQADITCVPKDLLQGEEPVRQQNVTTIHGTQEGDVYYVNLKIDGRRINTEVIGTTLDYAIITPGDVPWILKKPLELTIKLDLEEQQGTLLNNSILSKKGKEELKQLFEKYSALWQSWENQVGHRRIRPHKIATGTVKPTPQKQYHINPKAKPDIQIVINDLLKQGVLIQKESTMNTPVYPVPKPNGRWRMVLDYRAVNKVTPLIAVQNQHSYGILGSLFKGRYKTTIDLSNGFWAHPIVPEDYWITAFTWQGKQYCWTVLPQGFLNSPGLFTGDVVDLLQGIPNVEVYVDDVYISHDSEKEHLEYLDILFNRLKEAGYIISLKKSNIANSIVDFLGFQITNEGRGLTDTFKEKLENITAPTTLKQLQSILGLLNFARNFIPDFTELIAPLYALIPKSTKNYVPWQIEHSTTLETLITKLNGAEYLQGRKGDKTLIMKVNASYTTGYIRYYNEGEKKPISYVSIVFSKTELKFTELEKLLTTVHKGLLKALDLSMGQNIHVYSPIVSMQNIQKTPQTAKKALASRWLSWLSYLEDPRIRFFYDPQMPALKDLPAVDTGKDNKKHPSNFQHIFYTDGSAITSPTKEGHLNAGMGIVYFINKDGNLQKQQEWSISLGNHTAQFAEIAAFEFALKKCLPLGGNILVVTDSNYVAKAYNEELDVWASNGFVNNRKKPLKHISKWKSVADLKRLRPDVVVTHEPGHQKLDSSPHAYGNNLADQLATQASFKVHAGKRTADGSEFEKRTADGSEFESPKKKAKVE

SEQ ID NO: 738 - protein, 2185 aa, synthetic construct
MPAAKRVKLDGGDKKYSIGLDIGTNSVGWAVITDEYKVPSKKFKVLGNTDRHSIKKNLIGALLFDSGETAEATRLKRTARRRYTRRKNRICYLQEIFSNEMAKVDDSFFHRLEESFLVEEDKKHERHPIFGNIVDEVAYHEKYPTIYHLRKKLVDSTDKADLRLIYLALAHMIKFRGHFLIEGDLNPDNSDVDKLFIQLVQTYNQLFEENPINASGVDAKAILSARLSKSRRLENLIAQLPGEKKNGLFGNLIALSLGLTPNFKSNFDLAEDAKLQLSKDTYDDDLDNLLAQIGDQYADLFLAAKNLSDAILLSDILRVNTEITKAPLSASMIKRYDEHHQDLTLLKALVRQQLPEKYKEIFFDQSKNGYAGYIDGGASQEEFYKFIKPILEKMDGTEELLVKLNREDLLRKQRTFDNGSIPHQIHLGELHAILRRQEDFYPFLKDNREKIEKILTFRIPYYVGPLARGNSRFAWMTRKSEETITPWNFEEVVDKGASAQSFIERMTNFDKNLPNEKVLPKHSLLYEYFTVYNELTKVKYVTEGMRKPAFLSGEQKKAIVDLLFKTNRKVTVKQLKEDYFKKIECFDSVEISGVEDRFNASLGTYHDLLKIIKDKDFLDNEENEDILEDIVLTLTLFEDREMIEERLKTYAHLFDDKVMKQLKRRRYTGWGRLSRKLINGIRDKQSGKTILDFLKSDGFANRNFMQLIHDDSLTFKEDIQKAQVSGQGDSLHEHIANLAGSPAIKKGILQTVKVVDELVKVMGRHKPENIVIEMARENQTTQKGQKNSRERMKRIEEGIKELGSQILKEHPVENTQLQNEKLYLYYLQNGRDMYVDQELDINRLSDYDVDHIVPQSFLKDDSIDNKVLTRSDKARGKSDNVPSEEVVKKMKNYWRQLLNAKLITQRKFDNLTKAERGGLSELDKAGFIKRQLVETRQITKHVAQILDSRMNTKYDENDKLIREVKVITLKSKLVSDFRKDFQFYKVREINNYHHAHDAYLNAVVGTALIKKYPKLESEFVYGDYKVYDVRKMIAKSEQEIGKATAKYFFYSNIMNFFKTEITLANGEIRKRPLIETNGETGEIVWDKGRDFATVRKVLSMPQVNIVKKTEVQTGGFSKESILPKRNSDKLIARKKDWDPKKYGGFDSPTVAYSVLVVAKVEKGKSKKLKSVKELLGITIMERSSFEKNPIDFLEAKGYKEVKKDLIIKLPKYSLFELENGRKRMLASAGELQKGNELALPSKYVNFLYLASHYEKLKGSPEDNEQKQLFVEQHKHYLDEIIEQISEFSKRVILADANLDKVLSAYNKHRDKPIREQAENIIHLFTLTNLGAPAAFKYFDTTIDRKRYTSTKEVLDATLIHQSITGLYETRIDLSQLGGDGGGGGGSGGGGSGGGGSGGGGSGGMNPLQLLQPLPAEVKGTKLLAHWNSGATITCIPESFLEDEQPIKQTLIKTIHGEKQQNVYYLTFKVKGRKVEAEVIASPYEYILLSPTDVPWLTQQPLQLTILVPLQEYQDRILNKTALPEEQKQQLKALFTKYDNLWQHWENQVGHRKIRPHNIATGDYPPRPQKQYPINPKAKPSIQIVIDDLLKQGVLTPQNSTMNTPVYPVPKPDGRWRMVLDYREVNKTIPLTAAQNQHSAGILATIVRQKYKTTLDLANGFWAHPITPDSYWLTAFTWQGKQYCWTRLPQGFLNSPALFNADAVDLLKEVPNVQVYVDDIYLSHDNPHEHIQQLEKVFQILLQAGYVVSLKKSEIGQRTVEFLGFNITKEGRGLTDTFKTKLLNVTPPKDLKQLQSILGKLNFARNFIPNFAELVQTLYNLIASSPGKYIEWTEDNTKQLNKVIEALNTASNLEERLPDQRLVIKVNTSPSAGYVRYYNESGKKPIMYLNYVFSKAELKFSMLEKLLTTMHKALIKAMDLAMGQEILVYSPIVSMTKIQKTPLPERKALPIRWITWMTYLEDPRIQFHYDKTLPELKHIPDVYTSSIPPLKHPSQYEGVFCTDGSAIKSPDPTKSNNAGMGIVHAIYNPEYKILNQWSIPLGHHTAQMAEIAAVEFACKKALKVPGPVLVITDSFYVAESANKELPYWKSNGFVNNKKEPLKHISKWKSIAECLSIKPDITIQHEKGHQPINTSIHTEGNALADKLATQGSYVVNAGKRTADGSEFEKRTADGSEFESPKKKAKVE

SEQ ID NO: 739 - protein, 2175 aa, synthetic construct
MPAAKRVKLDGGDKKYSIGLDIGTNSVGWAVITDEYKVPSKKFKVLGNTDRHSIKKNLIGALLFDSGETAEATRLKRTARRRYTRRKNRICYLQEIFSNEMAKVDDSFFHRLEESFLVEEDKKHERHPIFGNIVDEVAYHEKYPTIYHLRKKLVDSTDKADLRLIYLALAHMIKFRGHFLIEGDLNPDNSDVDKLFIQLVQTYNQLFEENPINASGVDAKAILSARLSKSRRLENLIAQLPGEKKNGLFGNLIALSLGLTPNFKSNFDLAEDAKLQLSKDTYDDDLDNLLAQIGDQYADLFLAAKNLSDAILLSDILRVNTEITKAPLSASMIKRYDEHHQDLTLLKALVRQQLPEKYKEIFFDQSKNGYAGYIDGGASQEEFYKFIKPILEKMDGTEELLVKLNREDLLRKQRTFDNGSIPHQIHLGELHAILRRQEDFYPFLKDNREKIEKILTFRIPYYVGPLARGNSRFAWMTRKSEETITPWNFEEVVDKGASAQSFIERMTNFDKNLPNEKVLPKHSLLYEYFTVYNELTKVKYVTEGMRKPAFLSGEQKKAIVDLLFKTNRKVTVKQLKEDYFKKIECFDSVEISGVEDRFNASLGTYHDLLKIIKDKDFLDNEENEDILEDIVLTLTLFEDREMIEERLKTYAHLFDDKVMKQLKRRRYTGWGRLSRKLINGIRDKQSGKTILDFLKSDGFANRNFMQLIHDDSLTFKEDIQKAQVSGQGDSLHEHIANLAGSPAIKKGILQTVKVVDELVKVMGRHKPENIVIEMARENQTTQKGQKNSRERMKRIEEGIKELGSQILKEHPVENTQLQNEKLYLYYLQNGRDMYVDQELDINRLSDYDVDHIVPQSFLKDDSIDNKVLTRSDKARGKSDNVPSEEVVKKMKNYWRQLLNAKLITQRKFDNLTKAERGGLSELDKAGFIKRQLVETRQITKHVAQILDSRMNTKYDENDKLIREVKVITLKSKLVSDFRKDFQFYKVREINNYHHAHDAYLNAVVGTALIKKYPKLESEFVYGDYKVYDVRKMIAKSEQEIGKATAKYFFYSNIMNFFKTEITLANGEIRKRPLIETNGETGEIVWDKGRDFATVRKVLSMPQVNIVKKTEVQTGGFSKESILPKRNSDKLIARKKDWDPKKYGGFDSPTVAYSVLVVAKVEKGKSKKLKSVKELLGITIMERSSFEKNPIDFLEAKGYKEVKKDLIIKLPKYSLFELENGRKRMLASAGELQKGNELALPSKYVNFLYLASHYEKLKGSPEDNEQKQLFVEQHKHYLDEIIEQISEFSKRVILADANLDKVLSAYNKHRDKPIREQAENIIHLFTLTNLGAPAAFKYFDTTIDRKRYTSTKEVLDATLIHQSITGLYETRIDLSQLGGDGGGGGGSGGGGSGGMNPLQLLQPLPAEVKGTKLLAHWNSGATITCIPESFLEDEQPIKQTLIKTIHGEKQQNVYYLTFKVKGRKVEAEVIASPYEYILLSPTDVPWLTQQPLQLTILVPLQEYQDRILNKTALPEEQKQQLKALFTKYDNLWQHWENQVGHRKIRPHNIATGDYPPRPQKQYPINPKAKPSIQIVIDDLLKQGVLTPQNSTMNTPVYPVPKPDGRWRMVLDYREVNKTIPLTAAQNQHSAGILATIVRQKYKTTLDLANGFWAHPITPDSYWLTAFTWQGKQYCWTRLPQGFLNSPALFNADAVDLLKEVPNVQVYVDDIYLSHDNPHEHIQQLEKVFQILLQAGYVVSLKKSEIGQRTVEFLGFNITKEGRGLTDTFKTKLLNVTPPKDLKQLQSILGKLNFARNFIPNFAELVQTLYNLIASSPGKYIEWTEDNTKQLNKVIEALNTASNLEERLPDQRLVIKVNTSPSAGYVRYYNESGKKPIMYLNYVFSKAELKFSMLEKLLTTMHKALIKAMDLAMGQEILVYSPIVSMTKIQKTPLPERKALPIRWITWMTYLEDPRIQFHYDKTLPELKHIPDVYTSSIPPLKHPSQYEGVFCTDGSAIKSPDPTKSNNAGMGIVHAIYNPEYKILNQWSIPLGHHTAQMAEIAAVEFACKKALKVPGPVLVITDSFYVAESANKELPYWKSNGFVNNKKEPLKHISKWKSIAECLSIKPDITIQHEKGHQPINTSIHTEGNALADKLATQGSYVVNAGKRTADGSEFEKRTADGSEFESPKKKAKVE

SEQ ID NO: 740 - protein, 2176 aa, synthetic construct
MPAAKRVKLDGGDKKYSIGLDIGTNSVGWAVITDEYKVPSKKFKVLGNTDRHSIKKNLIGALLFDSGETAEATRLKRTARRRYTRRKNRICYLQEIFSNEMAKVDDSFFHRLEESFLVEEDKKHERHPIFGNIVDEVAYHEKYPTIYHLRKKLVDSTDKADLRLIYLALAHMIKFRGHFLIEGDLNPDNSDVDKLFIQLVQTYNQLFEENPINASGVDAKAILSARLSKSRRLENLIAQLPGEKKNGLFGNLIALSLGLTPNFKSNFDLAEDAKLQLSKDTYDDDLDNLLAQIGDQYADLFLAAKNLSDAILLSDILRVNTEITKAPLSASMIKRYDEHHQDLTLLKALVRQQLPEKYKEIFFDQSKNGYAGYIDGGASQEEFYKFIKPILEKMDGTEELLVKLNREDLLRKQRTFDNGSIPHQIHLGELHAILRRQEDFYPFLKDNREKIEKILTFRIPYYVGPLARGNSRFAWMTRKSEETITPWNFEEVVDKGASAQSFIERMTNFDKNLPNEKVLPKHSLLYEYFTVYNELTKVKYVTEGMRKPAFLSGEQKKAIVDLLFKTNRKVTVKQLKEDYFKKIECFDSVEISGVEDRFNASLGTYHDLLKIIKDKDFLDNEENEDILEDIVLTLTLFEDREMIEERLKTYAHLFDDKVMKQLKRRRYTGWGRLSRKLINGIRDKQSGKTILDFLKSDGFANRNFMQLIHDDSLTFKEDIQKAQVSGQGDSLHEHIANLAGSPAIKKGILQTVKVVDELVKVMGRHKPENIVIEMARENQTTQKGQKNSRERMKRIEEGIKELGSQILKEHPVENTQLQNEKLYLYYLQNGRDMYVDQELDINRLSDYDVDHIVPQSFLKDDSIDNKVLTRSDKARGKSDNVPSEEVVKKMKNYWRQLLNAKLITQRKFDNLTKAERGGLSELDKAGFIKRQLVETRQITKHVAQILDSRMNTKYDENDKLIREVKVITLKSKLVSDFRKDFQFYKVREINNYHHAHDAYLNAVVGTALIKKYPKLESEFVYGDYKVYDVRKMIAKSEQEIGKATAKYFFYSNIMNFFKTEITLANGEIRKRPLIETNGETGEIVWDKGRDFATVRKVLSMPQVNIVKKTEVQTGGFSKESILPKRNSDKLIARKKDWDPKKYGGFDSPTVAYSVLVVAKVEKGKSKKLKSVKELLGITIMERSSFEKNPIDFLEAKGYKEVKKDLIIKLPKYSLFELENGRKRMLASAGELQKGNELALPSKYVNFLYLASHYEKLKGSPEDNEQKQLFVEQHKHYLDEIIEQISEFSKRVILADANLDKVLSAYNKHRDKPIREQAENIIHLFTLTNLGAPAAFKYFDTTIDRKRYTSTKEVLDATLIHQSITGLYETRIDLSQLGGDGGGGGEAAAKGGSGGMNPLQLLQPLPAEVKGTKLLAHWNSGATITCIPESFLEDEQPIKQTLIKTIHGEKQQNVYYLTFKVKGRKVEAEVIASPYEYILLSPTDVPWLTQQPLQLTILVPLQEYQDRILNKTALPEEQKQQLKALFTKYDNLWQHWENQVGHRKIRPHNIATGDYPPRPQKQYPINPKAKPSIQIVIDDLLKQGVLTPQNSTMNTPVYPVPKPDGRWRMVLDYREVNKTIPLTAAQNQHSAGILATIVRQKYKTTLDLANGFWAHPITPDSYWLTAFTWQGKQYCWTRLPQGFLNSPALFNADAVDLLKEVPNVQVYVDDIYLSHDNPHEHIQQLEKVFQILLQAGYVVSLKKSEIGQRTVEFLGFNITKEGRGLTDTFKTKLLNVTPPKDLKQLQSILGKLNFARNFIPNFAELVQTLYNLIASSPGKYIEWTEDNTKQLNKVIEALNTASNLEERLPDQRLVIKVNTSPSAGYVRYYNESGKKPIMYLNYVFSKAELKFSMLEKLLTTMHKALIKAMDLAMGQEILVYSPIVSMTKIQKTPLPERKALPIRWITWMTYLEDPRIQFHYDKTLPELKHIPDVYTSSIPPLKHPSQYEGVFCTDGSAIKSPDPTKSNNAGMGIVHAIYNPEYKILNQWSIPLGHHTAQMAEIAAVEFACKKALKVPGPVLVITDSFYVAESANKELPYWKSNGFVNNKKEPLKHISKWKSIAECLSIKPDITIQHEKGHQPINTSIHTEGNALADKLATQGSYVVNAGKRTADGSEFEKRTADGSEFESPKKKAKVE

SEQ ID NO: 741 - protein, 2012 aa, synthetic construct
MPAAKRVKLDGGDKKYSIGLDIGTNSVGWAVITDEYKVPSKKFKVLGNTDRHSIKKNLIGALLFDSGETAEATRLKRTARRRYTRRKNRICYLQEIFSNEMAKVDDSFFHRLEESFLVEEDKKHERHPIFGNIVDEVAYHEKYPTIYHLRKKLVDSTDKADLRLIYLALAHMIKFRGHFLIEGDLNPDNSDVDKLFIQLVQTYNQLFEENPINASGVDAKAILSARLSKSRRLENLIAQLPGEKKNGLFGNLIALSLGLTPNFKSNFDLAEDAKLQLSKDTYDDDLDNLLAQIGDQYADLFLAAKNLSDAILLSDILRVNTEITKAPLSASMIKRYDEHHQDLTLLKALVRQQLPEKYKEIFFDQSKNGYAGYIDGGASQEEFYKFIKPILEKMDGTEELLVKLNREDLLRKQRTFDNGSIPHQIHLGELHAILRRQEDFYPFLKDNREKIEKILTFRIPYYVGPLARGNSRFAWMTRKSEETITPWNFEEVVDKGASAQSFIERMTNFDKNLPNEKVLPKHSLLYEYFTVYNELTKVKYVTEGMRKPAFLSGEQKKAIVDLLFKTNRKVTVKQLKEDYFKKIECFDSVEISGVEDRFNASLGTYHDLLKIIKDKDFLDNEENEDILEDIVLTLTLFEDREMIEERLKTYAHLFDDKVMKQLKRRRYTGWGRLSRKLINGIRDKQSGKTILDFLKSDGFANRNFMQLIHDDSLTFKEDIQKAQVSGQGDSLHEHIANLAGSPAIKKGILQTVKVVDELVKVMGRHKPENIVIEMARENQTTQKGQKNSRERMKRIEEGIKELGSQILKEHPVENTQLQNEKLYLYYLQNGRDMYVDQELDINRLSDYDVDHIVPQSFLKDDSIDNKVLTRSDKARGKSDNVPSEEVVKKMKNYWRQLLNAKLITQRKFDNLTKAERGGLSELDKAGFIKRQLVETRQITKHVAQILDSRMNTKYDENDKLIREVKVITLKSKLVSDFRKDFQFYKVREINNYHHAHDAYLNAVVGTALIKKYPKLESEFVYGDYKVYDVRKMIAKSEQEIGKATAKYFFYSNIMNFFKTEITLANGEIRKRPLIETNGETGEIVWDKGRDFATVRKVLSMPQVNIVKKTEVQTGGFSKESILPKRNSDKLIARKKDWDPKKYGGFDSPTVAYSVLVVAKVEKGKSKKLKSVKELLGITIMERSSFEKNPIDFLEAKGYKEVKKDLIIKLPKYSLFELENGRKRMLASAGELQKGNELALPSKYVNFLYLASHYEKLKGSPEDNEQKQLFVEQHKHYLDEIIEQISEFSKRVILADANLDKVLSAYNKHRDKPIREQAENIIHLFTLTNLGAPAAFKYFDTTIDRKRYTSTKEVLDATLIHQSITGLYETRIDLSQLGGDGGPAPGGGGGPRSRAIDIPVPHADKISWKITDPVWVDQWPLTYEKTLAAIALVQEQLAAGHIEPTNSPWNTPIFIIKKKSGSWRLLQDLRAVNKVMVPMGALQPGLPSPVAIPLNYHKIVIDLKDCFFTIPLHPEDRPYFAFSVPQINFQSPMPRYQWKVLPQGMANSPTLCQKFVAAAIAPVRSQWPEAYILHYMDDILLACDSAEAAKACYAHIISCLTSYGLKIAPDKVQVSEPFSYLGFELHHQQVFTPRVCLKTDHLKTLNDFQKLLGDIQWLRPYLKLPTSALVPLNNILKGDPNPLSVRALTPEAKQSLALINKAIQNQSVQQISYNLPLVLLLLPTPHTPTAVFWQPNGTDPTKNGSPLLWLHLPASPSKVLLTYPSLLAMLIIKGRYTGRQLFGRDPHSIIIPYTQDQLTWLLQTSDEWAIALSSFTGDIDNHYPSDPVIQFAKLHQFIFPKITKCAPIPQATLVFTDGSSNGIAAYVIDNQPISIKSPYLSAQLVELYAILQVFTVLAHQPFNLYTDSAYIAQSVPLLETVPFIKSSTNATPLFSKLQQLILNRQHPFFIGHLRAHLNLPGPLAEGNALADAATQIFPIISDAGKRTADGSEFEKRTADGSEFESPKKKAKVE

SEQ ID NO: 742 - protein, 2012 aa, synthetic construct
MPAAKRVKLDGGDKKYSIGLDIGTNSVGWAVITDEYKVPSKKFKVLGNTDRHSIKKNLIGALLFDSGETAEATRLKRTARRRYTRRKNRICYLQEIFSNEMAKVDDSFFHRLEESFLVEEDKKHERHPIFGNIVDEVAYHEKYPTIYHLRKKLVDSTDKADLRLIYLALAHMIKFRGHFLIEGDLNPDNSDVDKLFIQLVQTYNQLFEENPINASGVDAKAILSARLSKSRRLENLIAQLPGEKKNGLFGNLIALSLGLTPNFKSNFDLAEDAKLQLSKDTYDDDLDNLLAQIGDQYADLFLAAKNLSDAILLSDILRVNTEITKAPLSASMIKRYDEHHQDLTLLKALVRQQLPEKYKEIFFDQSKNGYAGYIDGGASQEEFYKFIKPILEKMDGTEELLVKLNREDLLRKQRTFDNGSIPHQIHLGELHAILRRQEDFYPFLKDNREKIEKILTFRIPYYVGPLARGNSRFAWMTRKSEETITPWNFEEVVDKGASAQSFIERMTNFDKNLPNEKVLPKHSLLYEYFTVYNELTKVKYVTEGMRKPAFLSGEQKKAIVDLLFKTNRKVTVKQLKEDYFKKIECFDSVEISGVEDRFNASLGTYHDLLKIIKDKDFLDNEENEDILEDIVLTLTLFEDREMIEERLKTYAHLFDDKVMKQLKRRRYTGWGRLSRKLINGIRDKQSGKTILDFLKSDGFANRNFMQLIHDDSLTFKEDIQKAQVSGQGDSLHEHIANLAGSPAIKKGILQTVKVVDELVKVMGRHKPENIVIEMARENQTTQKGQKNSRERMKRIEEGIKELGSQILKEHPVENTQLQNEKLYLYYLQNGRDMYVDQELDINRLSDYDVDHIVPQSFLKDDSIDNKVLTRSDKARGKSDNVPSEEVVKKMKNYWRQLLNAKLITQRKFDNLTKAERGGLSELDKAGFIKRQLVETRQITKHVAQILDSRMNTKYDENDKLIREVKVITLKSKLVSDFRKDFQFYKVREINNYHHAHDAYLNAVVGTALIKKYPKLESEFVYGDYKVYDVRKMIAKSEQEIGKATAKYFFYSNIMNFFKTEITLANGEIRKRPLIETNGETGEIVWDKGRDFATVRKVLSMPQVNIVKKTEVQTGGFSKESILPKRNSDKLIARKKDWDPKKYGGFDSPTVAYSVLVVAKVEKGKSKKLKSVKELLGITIMERSSFEKNPIDFLEAKGYKEVKKDLIIKLPKYSLFELENGRKRMLASAGELQKGNELALPSKYVNFLYLASHYEKLKGSPEDNEQKQLFVEQHKHYLDEIIEQISEFSKRVILADANLDKVLSAYNKHRDKPIREQAENIIHLFTLTNLGAPAAFKYFDTTIDRKRYTSTKEVLDATLIHQSITGLYETRIDLSQLGGDGGGGGGGGGGPRSRAIDIPVPHADKISWKITDPVWVDQWPLTYEKTLAAIALVQEQLAAGHIEPTNSPWNTPIFIIKKKSGSWRLLQDLRAVNKVMVPMGALQPGLPSPVAIPLNYHKIVIDLKDCFFTIPLHPEDRPYFAFSVPQINFQSPMPRYQWKVLPQGMANSPTLCQKFVAAAIAPVRSQWPEAYILHYMDDILLACDSAEAAKACYAHIISCLTSYGLKIAPDKVQVSEPFSYLGFELHHQQVFTPRVCLKTDHLKTLNDFQKLLGDIQWLRPYLKLPTSALVPLNNILKPDPNPLSVRALTPEAKQSLALINKAIQNQSVQQISYNLPLVLLLLPTPHTPTAVFWQPNGTDPTKNGSPLLWLHLPASPSKVLLTYPSLLAMLIIKGRYTGRQLFGRDPHSIIIPYTQDQLTWLLQTSDEWAIALSSFTGDIDNHYPSDPVIQFAKLHQFIFPKITKCAPIPQATLVFTDGSSNGIAAYVIDNQPISIKSPYLSAQLVELYAILQVFTVLAHQPFNLYTDSAYIAQSVPLLETVPFIKSSTNATPLFSKLQQLILNRQHPFFIGHLRAHLNLPGPLAEGNALADAATQIFPIISDAGKRTADGSEFEKRTADGSEFESPKKKAKVE

SEQ ID NO: 743 - protein, 2021 aa, synthetic construct
MPAAKRVKLDGGDKKYSIGLDIGTNSVGWAVITDEYKVPSKKFKVLGNTDRHSIKKNLIGALLFDSGETAEATRLKRTARRRYTRRKNRICYLQEIFSNEMAKVDDSFFHRLEESFLVEEDKKHERHPIFGNIVDEVAYHEKYPTIYHLRKKLVDSTDKADLRLIYLALAHMIKFRGHFLIEGDLNPDNSDVDKLFIQLVQTYNQLFEENPINASGVDAKAILSARLSKSRRLENLIAQLPGEKKNGLFGNLIALSLGLTPNFKSNFDLAEDAKLQLSKDTYDDDLDNLLAQIGDQYADLFLAAKNLSDAILLSDILRVNTEITKAPLSASMIKRYDEHHQDLTLLKALVRQQLPEKYKEIFFDQSKNGYAGYIDGGASQEEFYKFIKPILEKMDGTEELLVKLNREDLLRKQRTFDNGSIPHQIHLGELHAILRRQEDFYPFLKDNREKIEKILTFRIPYYVGPLARGNSRFAWMTRKSEETITPWNFEEVVDKGASAQSFIERMTNFDKNLPNEKVLPKHSLLYEYFTVYNELTKVKYVTEGMRKPAFLSGEQKKAIVDLLFKTNRKVTVKQLKEDYFKKIECFDSVEISGVEDRFNASLGTYHDLLKIIKDKDFLDNEENEDILEDIVLTLTLFEDREMIEERLKTYAHLFDDKVMKQLKRRRYTGWGRLSRKLINGIRDKQSGKTILDFLKSDGFANRNFMQLIHDDSLTFKEDIQKAQVSGQGDSLHEHIANLAGSPAIKKGILQTVKVVDELVKVMGRHKPENIVIEMARENQTTQKGQKNSRERMKRIEEGIKELGSQILKEHPVENTQLQNEKLYLYYLQNGRDMYVDQELDINRLSDYDVDHIVPQSFLKDDSIDNKVLTRSDKARGKSDNVPSEEVVKKMKNYWRQLLNAKLITQRKFDNLTKAERGGLSELDKAGFIKRQLVETRQITKHVAQILDSRMNTKYDENDKLIREVKVITLKSKLVSDFRKDFQFYKVREINNYHHAHDAYLNAVVGTALIKKYPKLESEFVYGDYKVYDVRKMIAKSEQEIGKATAKYFFYSNIMNFFKTEITLANGEIRKRPLIETNGETGEIVWDKGRDFATVRKVLSMPQVNIVKKTEVQTGGFSKESILPKRNSDKLIARKKDWDPKKYGGFDSPTVAYSVLVVAKVEKGKSKKLKSVKELLGITIMERSSFEKNPIDFLEAKGYKEVKKDLIIKLPKYSLFELENGRKRMLASAGELQKGNELALPSKYVNFLYLASHYEKLKGSPEDNEQKQLFVEQHKHYLDEIIEQISEFSKRVILADANLDKVLSAYNKHRDKPIREQAENIIHLFTLTNLGAPAAFKYFDTTIDRKRYTSTKEVLDATLIHQSITGLYETRIDLSQLGGDGGGGSGGSGGSGGSGGSGGPRSRAIDIPVPHADKISWKITDPVWVDQWPLTYEKTLAAIALVQEQLAAGHIEPTNSPWNTPIFIIKKKSGSWRLLQDLRAVNKVMVPMGALQPGLPSPVAPPLNYHKIVIDLKDCFFTIPLHPEDRPYFAFSVPQINFQSPMPRYQWKVLPQGMANSPTLCQKFVAAAIAPVRSQWPEAYILHYMDDILLACDSAEAAKACYAHIISCLTSYGLKIAPDKVQVSEPFSYLGFELHHQQVFTPRVCLKTDHLKTLNDFQKLLGDIQWLRPYLKLPTSALVPLNNILKPDPNPLSVRALTPEAKQSLALINKAIQNQSVQQISYNLPLVLLLLPTPHTPTAVFWQPNGTDPTKNGSPLLWLHLPASPSKVLLTYPSLLAMLIIKGRYTGRQLFGRDPHSIIIPYTQDQLTWLLQTSDEWAIALSSFTGDIDNHYPSDPVIQFAKLHQFIFPKITKCAPIPQATLVFTDGSSNGIAAYVIDNQPISIKSPYLSAQLVELYAILQVFTVLAHQPFNLYTDSAYIAQSVPLLETVPFIKSSTNATPLFSKLQQLILNRQHPFFIGHLRAHLNLPGPLAEGNALADAATQIFPIISDAGKRTADGSEFEKRTADGSEFESPKKKAKVE

SEQ ID NO: 744 - protein, 2017 aa, synthetic construct
MPAAKRVKLDGGDKKYSIGLDIGTNSVGWAVITDEYKVPSKKFKVLGNTDRHSIKKNLIGALLFDSGETAEATRLKRTARRRYTRRKNRICYLQEIFSNEMAKVDDSFFHRLEESFLVEEDKKHERHPIFGNIVDEVAYHEKYPTIYHLRKKLVDSTDKADLRLIYLALAHMIKFRGHFLIEGDLNPDNSDVDKLFIQLVQTYNQLFEENPINASGVDAKAILSARLSKSRRLENLIAQLPGEKKNGLFGNLIALSLGLTPNFKSNFDLAEDAKLQLSKDTYDDDLDNLLAQIGDQYADLFLAAKNLSDAILLSDILRVNTEITKAPLSASMIKRYDEHHQDLTLLKALVRQQLPEKYKEIFFDQSKNGYAGYIDGGASQEEFYKFIKPILEKMDGTEELLVKLNREDLLRKQRTFDNGSIPHQIHLGELHAILRRQEDFYPFLKDNREKIEKILTFRIPYYVGPLARGNSRFAWMTRKSEETITPWNFEEVVDKGASAQSFIERMTNFDKNLPNEKVLPKHSLLYEYFTVYNELTKVKYVTEGMRKPAFLSGEQKKAIVDLLFKTNRKVTVKQLKEDYFKKIECFDSVEISGVEDRFNASLGTYHDLLKIIKDKDFLDNEENEDILEDIVLTLTLFEDREMIEERLKTYAHLFDDKVMKQLKRRRYTGWGRLSRKLINGIRDKQSGKTILDFLKSDGFANRNFMQLIHDDSLTFKEDIQKAQVSGQGDSLHEHIANLAGSPAIKKGILQTVKVVDELVKVMGRHKPENIVIEMARENQTTQKGQKNSRERMKRIEEGIKELGSQILKEHPVENTQLQNEKLYLYYLQNGRDMYVDQELDINRLSDYDVDHIVPQSFLKDDSIDNKVLTRSDKARGKSDNVPSEEVVKKMKNYWRQLLNAKLITQRKFDNLTKAERGGLSELDKAGFIKRQLVETRQITKHVAQILDSRMNTKYDENDKLIREVKVITLKSKLVSDFRKDFQFYKVREINNYHHAHDAYLNAVVGTALIKKYPKLESEFVYGDYKVYDVRKMIAKSEQEIGKATAKYFFYSNIMNFFKTEITLANGEIRKRPLIETNGETGEIVWDKGRDFATVRKVLSMPQVNIVKKTEVQTGGFSKESILPKRNSDKLIARKKDWDPKKYGGFDSPTVAYSVLVVAKVEKGKSKKLKSVKELLGITIMERSSFEKNPIDFLEAKGYKEVKKDLIIKLPKYSLFELENGRKRMLASAGELQKGNELALPSKYVNFLYLASHYEKLKGSPEDNEQKQLFVEQHKHYLDEIIEQISEFSKRVILADANLDKVLSAYNKHRDKPIREQAENIIHLFTLTNLGAPAAFKYFDTTIDRKRYTSTKEVLDATLIHQSITGLYETRIDLSQLGGDGGGSSPAPEAAAKGGPRSRAIDIPVPHADKISWKITDPVWVDQWPLTYEKTLAAIALVQEQLAAGHIEPTNSPWNTPIFIIKKKSGSWRLLQDLRAVNKVMVPMGALQPGLPSPVAPPLNYHKIVIDLKDCFFTIPLHPEDRPYFAFSVPQINFQSPMPRYQWKVLPQGMANSPTLCQKFVAAAIAPVRSQWPEAYILHYMDDILLACDSAEAAKACYAHIISCLTSYGLKIAPDKVQVSEPFSYLGFELHHQQVFTPRVCLKTDHLKTLNDFQKLLGDIQWLRPYLKLPTSALVPLNNILKPDPNPLSVRALTPEAKQSLALINKAIQNQSVQQISYNLPLVLLLLPTPHTPTAVFWQPNGTDPTKNGSPLLWLHLPASPSKVLLTYPSLLAMLIIKGRYTGRQLFGRDPHSIIIPYTQDQLTWLLQTSDEWAIALSSFTGDIDNHYPSDPVIQFAKLHQFIFPKITKCAPIPQATLVFTDGSSNGIAAYVIDNQPISIKSPYLSAQLVELYAILQVFTVLAHQPFNLYTDSAYIAQSVPLLETVPFIKSSTNATPLFSKLQQLILNRQHPFFIGHLRAHLNLPGPLAEGNALADAATQIFPIISDAGKRTADGSEFEKRTADGSEFESPKKKAKVE

SEQ ID NO: 745 - protein, 2032 aa, synthetic construct
MPAAKRVKLDGGDKKYSIGLDIGTNSVGWAVITDEYKVPSKKFKVLGNTDRHSIKKNLIGALLFDSGETAEATRLKRTARRRYTRRKNRICYLQEIFSNEMAKVDDSFFHRLEESFLVEEDKKHERHPIFGNIVDEVAYHEKYPTIYHLRKKLVDSTDKADLRLIYLALAHMIKFRGHFLIEGDLNPDNSDVDKLFIQLVQTYNQLFEENPINASGVDAKAILSARLSKSRRLENLIAQLPGEKKNGLFGNLIALSLGLTPNFKSNFDLAEDAKLQLSKDTYDDDLDNLLAQIGDQYADLFLAAKNLSDAILLSDILRVNTEITKAPLSASMIKRYDEHHQDLTLLKALVRQQLPEKYKEIFFDQSKNGYAGYIDGGASQEEFYKFIKPILEKMDGTEELLVKLNREDLLRKQRTFDNGSIPHQIHLGELHAILRRQEDFYPFLKDNREKIEKILTFRIPYYVGPLARGNSRFAWMTRKSEETITPWNFEEVVDKGASAQSFIERMTNFDKNLPNEKVLPKHSLLYEYFTVYNELTKVKYVTEGMRKPAFLSGEQKKAIVDLLFKTNRKVTVKQLKEDYFKKIECFDSVEISGVEDRFNASLGTYHDLLKIIKDKDFLDNEENEDILEDIVLTLTLFEDREMIEERLKTYAHLFDDKVMKQLKRRRYTGWGRLSRKLINGIRDKQSGKTILDFLKSDGFANRNFMQLIHDDSLTFKEDIQKAQVSGQGDSLHEHIANLAGSPAIKKGILQTVKVVDELVKVMGRHKPENIVIEMARENQTTQKGQKNSRERMKRIEEGIKELGSQILKEHPVENTQLQNEKLYLYYLQNGRDMYVDQELDINRLSDYDVDHIVPQSFLKDDSIDNKVLTRSDKARGKSDNVPSEEVVKKMKNYWRQLLNAKLITQRKFDNLTKAERGGLSELDKAGFIKRQLVETRQITKHVAQILDSRMNTKYDENDKLIREVKVITLKSKLVSDFRKDFQFYKVREINNYHHAHDAYLNAVVGTALIKKYPKLESEFVYGDYKVYDVRKMIAKSEQEIGKATAKYFFYSNIMNFFKTEITLANGEIRKRPLIETNGETGEIVWDKGRDFATVRKVLSMPQVNIVKKTEVQTGGFSKESILPKRNSDKLIARKKDWDPKKYGGFDSPTVAYSVLVVAKVEKGKSKKLKSVKELLGITIMERSSFEKNPIDFLEAKGYKEVKKDLIIKLPKYSLFELENGRKRMLASAGELQKGNELALPSKYVNFLYLASHYEKLKGSPEDNEQKQLFVEQHKHYLDEIIEQISEFSKRVILADANLDKVLSAYNKHRDKPIREQAENIIHLFTLTNLGAPAAFKYFDTTIDRKRYTSTKEVLDATLIHQSITGLYETRIDLSQLGGDGGSGGSSGGSSGSETPGTSESATPESSGGSSGGSSGGLATAVDILAPQRYADPITWKSDEPVWVDQWPLTQEKLAAAQQLVQEQLQAGHIIESNSPWNTPIFVIKKKSGKWRLLQDLRAVNATMVLMGALQPGLPSPVAIPQGYFKIVIDLKDCFFTIPLQPVDQKRFAFSLPSTNFKQPMKRYQWKVLPQGMANSPTLCQKYVAAAIEPVRKSWAQMYIIHYMDDILIAGKLGEQVLQCFAQLKQALTTTGLQIAPEKVQLQDPYTYLGFQINGPKITNQKAVIRRDKLQTLNDFQKLLGDINWLRPYLHLTTGDLKPLFDILKGDSNPNSPRSLSEAALASLQKVETAIAEQFVTQIDYTQPLTFLIFNTTLTPTGLFWQNNPVMWVHLPASPKKVLLPYYDAIADLIILGRDNSKKYFGLEPSTIIQPYSKSQIHWLMQNTETWPIACASYAGNIDNHYPPNKLIQFCKLHAVVFPRIISKTPLDNALLVFTDGSSTGIAAYTFEKTTVRFKTSHTSAQLVELQALIAVLSAFPHRALNVYTDSAYLAHSIPLLETVSHIKHISDTAKFFLQCQQLIYNRSIPFYLGHIRAHSGLPGPLSQGNHITDLATKVVATTLTTAGKRTADGSEFEKRTADGSEFESPKKKAKVE

SEQ ID NO: 746 - protein, 2045 aa, synthetic construct
MPAAKRVKLDGGDKKYSIGLDIGTNSVGWAVITDEYKVPSKKFKVLGNTDRHSIKKNLIGALLFDSGETAEATRLKRTARRRYTRRKNRICYLQEIFSNEMAKVDDSFFHRLEESFLVEEDKKHERHPIFGNIVDEVAYHEKYPTIYHLRKKLVDSTDKADLRLIYLALAHMIKFRGHFLIEGDLNPDNSDVDKLFIQLVQTYNQLFEENPINASGVDAKAILSARLSKSRRLENLIAQLPGEKKNGLFGNLIALSLGLTPNFKSNFDLAEDAKLQLSKDTYDDDLDNLLAQIGDQYADLFLAAKNLSDAILLSDILRVNTEITKAPLSASMIKRYDEHHQDLTLLKALVRQQLPEKYKEIFFDQSKNGYAGYIDGGASQEEFYKFIKPILEKMDGTEELLVKLNREDLLRKQRTFDNGSIPHQIHLGELHAILRRQEDFYPFLKDNREKIEKILTFRIPYYVGPLARGNSRFAWMTRKSEETITPWNFEEVVDKGASAQSFIERMTNFDKNLPNEKVLPKHSLLYEYFTVYNELTKVKYVTEGMRKPAFLSGEQKKAIVDLLFKTNRKVTVKQLKEDYFKKIECFDSVEISGVEDRFNASLGTYHDLLKIIKDKDFLDNEENEDILEDIVLTLTLFEDREMIEERLKTYAHLFDDKVMKQLKRRRYTGWGRLSRKLINGIRDKQSGKTILDFLKSDGFANRNFMQLIHDDSLTFKEDIQKAQVSGQGDSLHEHIANLAGSPAIKKGILQTVKVVDELVKVMGRHKPENIVIEMARENQTTQKGQKNSRERMKRIEEGIKELGSQILKEHPVENTQLQNEKLYLYYLQNGRDMYVDQELDINRLSDYDVDHIVPQSFLKDDSIDNKVLTRSDKARGKSDNVPSEEVVKKMKNYWRQLLNAKLITQRKFDNLTKAERGGLSELDKAGFIKRQLVETRQITKHVAQILDSRMNTKYDENDKLIREVKVITLKSKLVSDFRKDFQFYKVREINNYHHAHDAYLNAVVGTALIKKYPKLESEFVYGDYKVYDVRKMIAKSEQEIGKATAKYFFYSNIMNFFKTEITLANGEIRKRPLIETNGETGEIVWDKGRDFATVRKVLSMPQVNIVKKTEVQTGGFSKESILPKRNSDKLIARKKDWDPKKYGGFDSPTVAYSVLVVAKVEKGKSKKLKSVKELLGITIMERSSFEKNPIDFLEAKGYKEVKKDLIIKLPKYSLFELENGRKRMLASAGELQKGNELALPSKYVNFLYLASHYEKLKGSPEDNEQKQLFVEQHKHYLDEIIEQISEFSKRVILADANLDKVLSAYNKHRDKPIREQAENIIHLFTLTNLGAPAAFKYFDTTIDRKRYTSTKEVLDATLIHQSITGLYETRIDLSQLGGDGGAEAAAKEAAAKEAAAKEAAAKALEAEAAAKEAAAKEAAAKEAAAKAGGLATAVDILAPQRYADPITWKSDEPVWVDQWPLTQEKLAAAQQLVQEQLQAGHIIESNSPWNTPIFVIKKKSGKWRLLQDLRAVNATMVLMGALQPGLPSPVAIPQGYFKIVIDLKDCFFTIPLQPVDQKRFAFSLPSTNFKQPMKRYQWKVLPQGMANSPTLCQKYVAAAIEPVRKSWAQMYIIHYMDDILIAGKLGEQVLQCFAQLKQALTTTGLQIAPEKVQLQDPYTYLGFQINGPKITNQKAVIRRDKLQTLNDFQKLLGDINWLRPYLHLTTGDLKPLFDILKGDSNPNSPRSLSEAALASLQKVETAIAEQFVTQIDYTQPLTFLIFNTTLTPTGLFWQNNPVMWVHLPASPKKVLLPYYDAIADLIILGRDNSKKYFGLEPSTIIQPYSKSQIHWLMQNTETWPIACASYAGNIDNHYPPNKLIQFCKLHAVVFPRIISKTPLDNALLVFTDGSSTGIAAYTFEKTTVRFKTSHTSAQLVELQALIAVLSAFPHRALNVYTDSAYLAHSIPLLETVSHIKHISDTAKFFLQCQQLIYNRSIPFYLGHIRAHSGLPGPLSQGNHITDLATKVVATTLTTAGKRTADGSEFEKRTADGSEFESPKKKAKVE

SEQ ID NO: 747 - protein, 2029 aa, synthetic construct
MPAAKRVKLDGGDKKYSIGLDIGTNSVGWAVITDEYKVPSKKFKVLGNTDRHSIKKNLIGALLFDSGETAEATRLKRTARRRYTRRKNRICYLQEIFSNEMAKVDDSFFHRLEESFLVEEDKKHERHPIFGNIVDEVAYHEKYPTIYHLRKKLVDSTDKADLRLIYLALAHMIKFRGHFLIEGDLNPDNSDVDKLFIQLVQTYNQLFEENPINASGVDAKAILSARLSKSRRLENLIAQLPGEKKNGLFGNLIALSLGLTPNFKSNFDLAEDAKLQLSKDTYDDDLDNLLAQIGDQYADLFLAAKNLSDAILLSDILRVNTEITKAPLSASMIKRYDEHHQDLTLLKALVRQQLPEKYKEIFFDQSKNGYAGYIDGGASQEEFYKFIKPILEKMDGTEELLVKLNREDLLRKQRTFDNGSIPHQIHLGELHAILRRQEDFYPFLKDNREKIEKILTFRIPYYVGPLARGNSRFAWMTRKSEETITPWNFEEVVDKGASAQSFIERMTNFDKNLPNEKVLPKHSLLYEYFTVYNELTKVKYVTEGMRKPAFLSGEQKKAIVDLLFKTNRKVTVKQLKEDYFKKIECFDSVEISGVEDRFNASLGTYHDLLKIIKDKDFLDNEENEDILEDIVLTLTLFEDREMIEERLKTYAHLFDDKVMKQLKRRRYTGWGRLSRKLINGIRDKQSGKTILDFLKSDGFANRNFMQLIHDDSLTFKEDIQKAQVSGQGDSLHEHIANLAGSPAIKKGILQTVKVVDELVKVMGRHKPENIVIEMARENQTTQKGQKNSRERMKRIEEGIKELGSQILKEHPVENTQLQNEKLYLYYLQNGRDMYVDQELDINRLSDYDVDHIVPQSFLKDDSIDNKVLTRSDKARGKSDNVPSEEVVKKMKNYWRQLLNAKLITQRKFDNLTKAERGGLSELDKAGFIKRQLVETRQITKHVAQILDSRMNTKYDENDKLIREVKVITLKSKLVSDFRKDFQFYKVREINNYHHAHDAYLNAVVGTALIKKYPKLESEFVYGDYKVYDVRKMIAKSEQEIGKATAKYFFYSNIMNFFKTEITLANGEIRKRPLIETNGETGEIVWDKGRDFATVRKVLSMPQVNIVKKTEVQTGGFSKESILPKRNSDKLIARKKDWDPKKYGGFDSPTVAYSVLVVAKVEKGKSKKLKSVKELLGITIMERSSFEKNPIDFLEAKGYKEVKKDLIIKLPKYSLFELENGRKRMLASAGELQKGNELALPSKYVNFLYLASHYEKLKGSPEDNEQKQLFVEQHKHYLDEIIEQISEFSKRVILADANLDKVLSAYNKHRDKPIREQAENIIHLFTLTNLGAPAAFKYFDTTIDRKRYTSTKEVLDATLIHQSITGLYETRIDLSQLGGDGGEAAAKEAAAKEAAAKEAAAKEAAAKEAAAKGGLATAVDILAPQRYADPITWKSDEPVWVDQWPLTQEKLAAAQQLVQEQLQAGHIIESNSPWNTPIFVIKKKSGKWRLLQDLRAVNATMVLMGALQPGLPSPVAIPQGYFKIVIDLKDCFFTIPLQPVDQKRFAFSLPSTNFKQPMKRYQWKVLPQGMANSPTLCQKYVAAAIEPVRKSWAQMYIIHYMDDILIAGKLGEQVLQCFAQLKQALTTTGLQIAPEKVQLQDPYTYLGFQINGPKITNQKAVIRRDKLQTLNDFQKLLGDINWLRPYLHLTTGDLKPLFDILKGDSNPNSPRSLSEAALASLQKVETAIAEQFVTQIDYTQPLTFLIFNTTLTPTGLFWQNNPVMWVHLPASPKKVLLPYYDAIADLIILGRDNSKKYFGLEPSTIIQPYSKSQIHWLMQNTETWPIACASYAGNIDNHYPPNKLIQFCKLHAVVFPRIISKTPLDNALLVFTDGSSTGIAAYTFEKTTVRFKTSHTSAQLVELQALIAVLSAFPHRALNVYTDSAYLAHSIPLLETVSHIKHISDTAKFFLQCQQLIYNRSIPFYLGHIRAHSGLPGPLSQGNHITDLATKVVATTLTTAGKRTADGSEFEKRTADGSEFESPKKKAKVE

SEQ ID NO: 748 - protein, 2024 aa, synthetic construct
MPAAKRVKLDGGDKKYSIGLDIGTNSVGWAVITDEYKVPSKKFKVLGNTDRHSIKKNLIGALLFDSGETAEATRLKRTARRRYTRRKNRICYLQEIFSNEMAKVDDSFFHRLEESFLVEEDKKHERHPIFGNIVDEVAYHEKYPTIYHLRKKLVDSTDKADLRLIYLALAHMIKFRGHFLIEGDLNPDNSDVDKLFIQLVQTYNQLFEENPINASGVDAKAILSARLSKSRRLENLIAQLPGEKKNGLFGNLIALSLGLTPNFKSNFDLAEDAKLQLSKDTYDDDLDNLLAQIGDQYADLFLAAKNLSDAILLSDILRVNTEITKAPLSASMIKRYDEHHQDLTLLKALVRQQLPEKYKEIFFDQSKNGYAGYIDGGASQEEFYKFIKPILEKMDGTEELLVKLNREDLLRKQRTFDNGSIPHQIHLGELHAILRRQEDFYPFLKDNREKIEKILTFRIPYYVGPLARGNSRFAWMTRKSEETITPWNFEEVVDKGASAQSFIERMTNFDKNLPNEKVLPKHSLLYEYFTVYNELTKVKYVTEGMRKPAFLSGEQKKAIVDLLFKTNRKVTVKQLKEDYFKKIECFDSVEISGVEDRFNASLGTYHDLLKIIKDKDFLDNEENEDILEDIVLTLTLFEDREMIEERLKTYAHLFDDKVMKQLKRRRYTGWGRLSRKLINGIRDKQSGKTILDFLKSDGFANRNFMQLIHDDSLTFKEDIQKAQVSGQGDSLHEHIANLAGSPAIKKGILQTVKVVDELVKVMGRHKPENIVIEMARENQTTQKGQKNSRERMKRIEEGIKELGSQILKEHPVENTQLQNEKLYLYYLQNGRDMYVDQELDINRLSDYDVDHIVPQSFLKDDSIDNKVLTRSDKARGKSDNVPSEEVVKKMKNYWRQLLNAKLITQRKFDNLTKAERGGLSELDKAGFIKRQLVETRQITKHVAQILDSRMNTKYDENDKLIREVKVITLKSKLVSDFRKDFQFYKVREINNYHHAHDAYLNAVVGTALIKKYPKLESEFVYGDYKVYDVRKMIAKSEQEIGKATAKYFFYSNIMNFFKTEITLANGEIRKRPLIETNGETGEIVWDKGRDFATVRKVLSMPQVNIVKKTEVQTGGFSKESILPKRNSDKLIARKKDWDPKKYGGFDSPTVAYSVLVVAKVEKGKSKKLKSVKELLGITIMERSSFEKNPIDFLEAKGYKEVKKDLIIKLPKYSLFELENGRKRMLASAGELQKGNELALPSKYVNFLYLASHYEKLKGSPEDNEQKQLFVEQHKHYLDEIIEQISEFSKRVILADANLDKVLSAYNKHRDKPIREQAENIIHLFTLTNLGAPAAFKYFDTTIDRKRYTSTKEVLDATLIHQSITGLYETRIDLSQLGGDGGEAAAKEAAAKEAAAKEAAAKEAAAKGGLATAVDILAPQRYADPITWKSDEPVWVDQWPLTQEKLAAAQQLVQEQLQAGHIIESNSPWNTPIFVIKKKSGKWRLLQDLRAVNATMVLMGALQPGLPSPVAIPQGYFKIVIDLKDCFFTIPLQPVDQKRFAFSLPSTNFKQPMKRYQWKVLPQGMANSPTLCQKYVAAAIEPVRKSWAQMYIIHYMDDILIAGKLGEQVLQCFAQLKQALTTTGLQIAPEKVQLQDPYTYLGFQINGPKITNQKAVIRRDKLQTLNDFQKLLGDINWLRPYLHLTTGDLKPLFDILKGDSNPNSPRSLSEAALASLQKVETAIAEQFVTQIDYTQPLTFLIFNTTLTPTGLFWQNNPVMWVHLPASPKKVLLPYYDAIADLIILGRDNSKKYFGLEPSTIIQPYSKSQIHWLMQNTETWPIACASYAGNIDNHYPPNKLIQFCKLHAVVFPRIISKTPLDNALLVFTDGSSTGIAAYTFEKTTVRFKTSHTSAQLVELQALIAVLSAFPHRALNVYTDSAYLAHSIPLLETVSHIKHISDTAKFFLQCQQLIYNRSIPFYLGHIRAHSGLPGPLSQGNHITDLATKVVATTLTTAGKRTADGSEFEKRTADGSEFESPKKKAKVE

SEQ ID NO: 749 - protein, 2012 aa, synthetic construct
MPAAKRVKLDGGDKKYSIGLDIGTNSVGWAVITDEYKVPSKKFKVLGNTDRHSIKKNLIGALLFDSGETAEATRLKRTARRRYTRRKNRICYLQEIFSNEMAKVDDSFFHRLEESFLVEEDKKHERHPIFGNIVDEVAYHEKYPTIYHLRKKLVDSTDKADLRLIYLALAHMIKFRGHFLIEGDLNPDNSDVDKLFIQLVQTYNQLFEENPINASGVDAKAILSARLSKSRRLENLIAQLPGEKKNGLFGNLIALSLGLTPNFKSNFDLAEDAKLQLSKDTYDDDLDNLLAQIGDQYADLFLAAKNLSDAILLSDILRVNTEITKAPLSASMIKRYDEHHQDLTLLKALVRQQLPEKYKEIFFDQSKNGYAGYIDGGASQEEFYKFIKPILEKMDGTEELLVKLNREDLLRKQRTFDNGSIPHQIHLGELHAILRRQEDFYPFLKDNREKIEKILTFRIPYYVGPLARGNSRFAWMTRKSEETITPWNFEEVVDKGASAQSFIERMTNFDKNLPNEKVLPKHSLLYEYFTVYNELTKVKYVTEGMRKPAFLSGEQKKAIVDLLFKTNRKVTVKQLKEDYFKKIECFDSVEISGVEDRFNASLGTYHDLLKIIKDKDFLDNEENEDILEDIVLTLTLFEDREMIEERLKTYAHLFDDKVMKQLKRRRYTGWGRLSRKLINGIRDKQSGKTILDFLKSDGFANRNFMQLIHDDSLTFKEDIQKAQVSGQGDSLHEHIANLAGSPAIKKGILQTVKVVDELVKVMGRHKPENIVIEMARENQTTQKGQKNSRERMKRIEEGIKELGSQILKEHPVENTQLQNEKLYLYYLQNGRDMYVDQELDINRLSDYDVDHIVPQSFLKDDSIDNKVLTRSDKARGKSDNVPSEEVVKKMKNYWRQLLNAKLITQRKFDNLTKAERGGLSELDKAGFIKRQLVETRQITKHVAQILDSRMNTKYDENDKLIREVKVITLKSKLVSDFRKDFQFYKVREINNYHHAHDAYLNAVVGTALIKKYPKLESEFVYGDYKVYDVRKMIAKSEQEIGKATAKYFFYSNIMNFFKTEITLANGEIRKRPLIETNGETGEIVWDKGRDFATVRKVLSMPQVNIVKKTEVQTGGFSKESILPKRNSDKLIARKKDWDPKKYGGFDSPTVAYSVLVVAKVEKGKSKKLKSVKELLGITIMERSSFEKNPIDFLEAKGYKEVKKDLIIKLPKYSLFELENGRKRMLASAGELQKGNELALPSKYVNFLYLASHYEKLKGSPEDNEQKQLFVEQHKHYLDEIIEQISEFSKRVILADANLDKVLSAYNKHRDKPIREQAENIIHLFTLTNLGAPAAFKYFDTTIDRKRYTSTKEVLDATLIHQSITGLYETRIDLSQLGGDGGPAPAPAPAPAPAPGGLATAVDILAPQRYADPITWKSDEPVWVDQWPLTQEKLAAAQQLVQEQLQAGHIIESNSPWNTPIFVIKKKSGKWRLLQDLRAVNATMVLMGALQPGLPSPVAIPQGYFKIVIDLKDCFFTIPLQPVDQKRFAFSLPSTNFKQPMKRYQWKVLPQGMANSPTLCQKYVAAAIEPVRKSWAQMYIIHYMDDILIAGKLGEQVLQCFAQLKQALTTTGLQIAPEKVQLQDPYTYLGFQINGPKITNQKAVIRRDKLQTLNDFQKLLGDINWLRPYLHLTTGDLKPLFDILKGDSNPNSPRSLSEAALASLQKVETAIAEQFVTQIDYTQPLTFLIFNTTLTPTGLFWQNNPVMWVHLPASPKKVLLPYYDAIADLIILGRDNSKKYFGLEPSTIIQPYSKSQIHWLMQNTETWPIACASYAGNIDNHYPPNKLIQFCKLHAVVFPRIISKTPLDNALLVFTDGSSTGIAAYTFEKTTVRFKTSHTSAQLVELQALIAVLSAFPHRALNVYTDSAYLAHSIPLLETVSHIKHISDTAKFFLQCQQLIYNRSIPFYLGHIRAHSGLPGPLSQGNHITDLATKVVATTLTTAGKRTADGSEFEKRTADGSEFESPKKKAKVE

SEQ ID NO: 750 - protein, 2010 aa, synthetic construct
MPAAKRVKLDGGDKKYSIGLDIGTNSVGWAVITDEYKVPSKKFKVLGNTDRHSIKKNLIGALLFDSGETAEATRLKRTARRRYTRRKNRICYLQEIFSNEMAKVDDSFFHRLEESFLVEEDKKHERHPIFGNIVDEVAYHEKYPTIYHLRKKLVDSTDKADLRLIYLALAHMIKFRGHFLIEGDLNPDNSDVDKLFIQLVQTYNQLFEENPINASGVDAKAILSARLSKSRRLENLIAQLPGEKKNGLFGNLIALSLGLTPNFKSNFDLAEDAKLQLSKDTYDDDLDNLLAQIGDQYADLFLAAKNLSDAILLSDILRVNTEITKAPLSASMIKRYDEHHQDLTLLKALVRQQLPEKYKEIFFDQSKNGYAGYIDGGASQEEFYKFIKPILEKMDGTEELLVKLNREDLLRKQRTFDNGSIPHQIHLGELHAILRRQEDFYPFLKDNREKIEKILTFRIPYYVGPLARGNSRFAWMTRKSEETITPWNFEEVVDKGASAQSFIERMTNFDKNLPNEKVLPKHSLLYEYFTVYNELTKVKYVTEGMRKPAFLSGEQKKAIVDLLFKTNRKVTVKQLKEDYFKKIECFDSVEISGVEDRFNASLGTYHDLLKIIKDKDFLDNEENEDILEDIVLTLTLFEDREMIEERLKTYAHLFDDKVMKQLKRRRYTGWGRLSRKLINGIRDKQSGKTILDFLKSDGFANRNFMQLIHDDSLTFKEDIQKAQVSGQGDSLHEHIANLAGSPAIKKGILQTVKVVDELVKVMGRHKPENIVIEMARENQTTQKGQKNSRERMKRIEEGIKELGSQILKEHPVENTQLQNEKLYLYYLQNGRDMYVDQELDINRLSDYDVDHIVPQSFLKDDSIDNKVLTRSDKARGKSDNVPSEEVVKKMKNYWRQLLNAKLITQRKFDNLTKAERGGLSELDKAGFIKRQLVETRQITKHVAQILDSRMNTKYDENDKLIREVKVITLKSKLVSDFRKDFQFYKVREINNYHHAHDAYLNAVVGTALIKKYPKLESEFVYGDYKVYDVRKMIAKSEQEIGKATAKYFFYSNIMNFFKTEITLANGEIRKRPLIETNGETGEIVWDKGRDFATVRKVLSMPQVNIVKKTEVQTGGFSKESILPKRNSDKLIARKKDWDPKKYGGFDSPTVAYSVLVVAKVEKGKSKKLKSVKELLGITIMERSSFEKNPIDFLEAKGYKEVKKDLIIKLPKYSLFELENGRKRMLASAGELQKGNELALPSKYVNFLYLASHYEKLKGSPEDNEQKQLFVEQHKHYLDEIIEQISEFSKRVILADANLDKVLSAYNKHRDKPIREQAENIIHLFTLTNLGAPAAFKYFDTTIDRKRYTSTKEVLDATLIHQSITGLYETRIDLSQLGGDGGPAPAPAPAPAPGGLATAVDILAPQRYADPITWKSDEPVWVDQWPLTQEKLAAAQQLVQEQLQAGHIIESNSPWNTPIFVIKKKSGKWRLLQDLRAVNATMVLMGALQPGLPSPVAIPQGYFKIVIDLKDCFFTIPLQPVDQKRFAFSLPSTNFKQPMKRYQWKVLPQGMANSPTLCQKYVAAAIEPVRKSWAQMYIIHYMDDILIAGKLGEQVLQCFAQLKQALTTTGLQIAPEKVQLQDPYTYLGFQINGPKITNQKAVIRRDKLQTLNDFQKLLGDINWLRPYLHLTTGDLKPLFDILKGDSNPNSPRSLSEAALASLQKVETAIAEQFVTQIDYTQPLTFLIFNTTLTPTGLFWQNNPVMWVHLPASPKKVLLPYYDAIADLIILGRDNSKKYFGLEPSTIIQPYSKSQIHWLMQNTETWPIACASYAGNIDNHYPPNKLIQFCKLHAVVFPRIISKTPLDNALLVFTDGSSTGIAAYTFEKTTVRFKTSHTSAQLVELQALIAVLSAFPHRALNVYTDSAYLAHSIPLLETVSHIKHISDTAKFFLQCQQLIYNRSIPFYLGHIRAHSGLPGPLSQGNHITDLATKVVATTLTTAGKRTADGSEFEKRTADGSEFESPKKKAKVE

SEQ ID NO: 751 - protein, 2014 aa, synthetic construct
MPAAKRVKLDGGDKKYSIGLDIGTNSVGWAVITDEYKVPSKKFKVLGNTDRHSIKKNLIGALLFDSGETAEATRLKRTARRRYTRRKNRICYLQEIFSNEMAKVDDSFFHRLEESFLVEEDKKHERHPIFGNIVDEVAYHEKYPTIYHLRKKLVDSTDKADLRLIYLALAHMIKFRGHFLIEGDLNPDNSDVDKLFIQLVQTYNQLFEENPINASGVDAKAILSARLSKSRRLENLIAQLPGEKKNGLFGNLIALSLGLTPNFKSNFDLAEDAKLQLSKDTYDDDLDNLLAQIGDQYADLFLAAKNLSDAILLSDILRVNTEITKAPLSASMIKRYDEHHQDLTLLKALVRQQLPEKYKEIFFDQSKNGYAGYIDGGASQEEFYKFIKPILEKMDGTEELLVKLNREDLLRKQRTFDNGSIPHQIHLGELHAILRRQEDFYPFLKDNREKIEKILTFRIPYYVGPLARGNSRFAWMTRKSEETITPWNFEEVVDKGASAQSFIERMTNFDKNLPNEKVLPKHSLLYEYFTVYNELTKVKYVTEGMRKPAFLSGEQKKAIVDLLFKTNRKVTVKQLKEDYFKKIECFDSVEISGVEDRFNASLGTYHDLLKIIKDKDFLDNEENEDILEDIVLTLTLFEDREMIEERLKTYAHLFDDKVMKQLKRRRYTGWGRLSRKLINGIRDKQSGKTILDFLKSDGFANRNFMQLIHDDSLTFKEDIQKAQVSGQGDSLHEHIANLAGSPAIKKGILQTVKVVDELVKVMGRHKPENIVIEMARENQTTQKGQKNSRERMKRIEEGIKELGSQILKEHPVENTQLQNEKLYLYYLQNGRDMYVDQELDINRLSDYDVDHIVPQSFLKDDSIDNKVLTRSDKARGKSDNVPSEEVVKKMKNYWRQLLNAKLITQRKFDNLTKAERGGLSELDKAGFIKRQLVETRQITKHVAQILDSRMNTKYDENDKLIREVKVITLKSKLVSDFRKDFQFYKVREINNYHHAHDAYLNAVVGTALIKKYPKLESEFVYGDYKVYDVRKMIAKSEQEIGKATAKYFFYSNIMNFFKTEITLANGEIRKRPLIETNGETGEIVWDKGRDFATVRKVLSMPQVNIVKKTEVQTGGFSKESILPKRNSDKLIARKKDWDPKKYGGFDSPTVAYSVLVVAKVEKGKSKKLKSVKELLGITIMERSSFEKNPIDFLEAKGYKEVKKDLIIKLPKYSLFELENGRKRMLASAGELQKGNELALPSKYVNFLYLASHYEKLKGSPEDNEQKQLFVEQHKHYLDEIIEQISEFSKRVILADANLDKVLSAYNKHRDKPIREQAENIIHLFTLTNLGAPAAFKYFDTTIDRKRYTSTKEVLDATLIHQSITGLYETRIDLSQLGGDGGGSSGSSGSSGSSGSSGGLATAVDILAPQRYADPITWKSDEPVWVDQWPLTQEKLAAAQQLVQEQLQAGHIIESNSPWNTPIFVIKKKSGKWRLLQDLRAVNATMVLMGALQPGLPSPVAIPQGYFKIVIDLKDCFFTIPLQPVDQKRFAFSLPSTNFKQPMKRYQWKVLPQGMANSPTLCQKYVAAAIEPVRKSWAQMYIIHYMDDILIAGKLGEQVLQCFAQLKQALTTTGLQIAPEKVQLQDPYTYLGFQINGPKITNQKAVIRRDKLQTLNDFQKLLGDINWLRPYLHLTTGDLKPLFDILKGDSNPNSPRSLSEAALASLQKVETAIAEQFVTQIDYTQPLTFLIFNTTLTPTGLFWQNNPVMWVHLPASPKKVLLPYYDAIADLIILGRDNSKKYFGLEPSTIIQPYSKSQIHWLMQNTETWPIACASYAGNIDNHYPPNKLIQFCKLHAVVFPRIISKTPLDNALLVFTDGSSTGIAAYTFEKTTVRFKTSHTSAQLVELQALIAVLSAFPHRALNVYTDSAYLAHSIPLLETVSHIKHISDTAKFFLQCQQLIYNRSIPFYLGHIRAHSGLPGPLSQGNHITDLATKVVATTLTTAGKRTADGSEFEKRTADGSEFESPKKKAKVE

SEQ ID NO: 752 - protein, 2015 aa, synthetic construct
MPAAKRVKLDGGDKKYSIGLDIGTNSVGWAVITDEYKVPSKKFKVLGNTDRHSIKKNLIGALLFDSGETAEATRLKRTARRRYTRRKNRICYLQEIFSNEMAKVDDSFFHRLEESFLVEEDKKHERHPIFGNIVDEVAYHEKYPTIYHLRKKLVDSTDKADLRLIYLALAHMIKFRGHFLIEGDLNPDNSDVDKLFIQLVQTYNQLFEENPINASGVDAKAILSARLSKSRRLENLIAQLPGEKKNGLFGNLIALSLGLTPNFKSNFDLAEDAKLQLSKDTYDDDLDNLLAQIGDQYADLFLAAKNLSDAILLSDILRVNTEITKAPLSASMIKRYDEHHQDLTLLKALVRQQLPEKYKEIFFDQSKNGYAGYIDGGASQEEFYKFIKPILEKMDGTEELLVKLNREDLLRKQRTFDNGSIPHQIHLGELHAILRRQEDFYPFLKDNREKIEKILTFRIPYYVGPLARGNSRFAWMTRKSEETITPWNFEEVVDKGASAQSFIERMTNFDKNLPNEKVLPKHSLLYEYFTVYNELTKVKYVTEGMRKPAFLSGEQKKAIVDLLFKTNRKVTVKQLKEDYFKKIECFDSVEISGVEDRFNASLGTYHDLLKIIKDKDFLDNEENEDILEDIVLTLTLFEDREMIEERLKTYAHLFDDKVMKQLKRRRYTGWGRLSRKLINGIRDKQSGKTILDFLKSDGFANRNFMQLIHDDSLTFKEDIQKAQVSGQGDSLHEHIANLAGSPAIKKGILQTVKVVDELVKVMGRHKPENIVIEMARENQTTQKGQKNSRERMKRIEEGIKELGSQILKEHPVENTQLQNEKLYLYYLQNGRDMYVDQELDINRLSDYDVDHIVPQSFLKDDSIDNKVLTRSDKARGKSDNVPSEEVVKKMKNYWRQLLNAKLITQRKFDNLTKAERGGLSELDKAGFIKRQLVETRQITKHVAQILDSRMNTKYDENDKLIREVKVITLKSKLVSDFRKDFQFYKVREINNYHHAHDAYLNAVVGTALIKKYPKLESEFVYGDYKVYDVRKMIAKSEQEIGKATAKYFFYSNIMNFFKTEITLANGEIRKRPLIETNGETGEIVWDKGRDFATVRKVLSMPQVNIVKKTEVQTGGFSKESILPKRNSDKLIARKKDWDPKKYGGFDSPTVAYSVLVVAKVEKGKSKKLKSVKELLGITIMERSSFEKNPIDFLEAKGYKEVKKDLIIKLPKYSLFELENGRKRMLASAGELQKGNELALPSKYVNFLYLASHYEKLKGSPEDNEQKQLFVEQHKHYLDEIIEQISEFSKRVILADANLDKVLSAYNKHRDKPIREQAENIIHLFTLTNLGAPAAFKYFDTTIDRKRYTSTKEVLDATLIHQSITGLYETRIDLSQLGGDGGSGSETPGTSESATPESGGLATAVDILAPQRYADPITWKSDEPVWVDQWPLTQEKLAAAQQLVQEQLQAGHIIESNSPWNTPIFVIKKKSGKWRLLQDLRAVNATMVLMGALQPGLPSPVAIPQGYFKIVIDLKDCFFTIPLQPVDQKRFAFSLPSTNFKQPMKRYQWKVLPQGMANSPTLCQKYVAAAIEPVRKSWAQMYIIHYMDDILIAGKLGEQVLQCFAQLKQALTTTGLQIAPEKVQLQDPYTYLGFQINGPKITNQKAVIRRDKLQTLNDFQKLLGDINWLRPYLHLTTGDLKPLFDILKGDSNPNSPRSLSEAALASLQKVETAIAEQFVTQIDYTQPLTFLIFNTTLTPTGLFWQNNPVMWVHLPASPKKVLLPYYDAIADLIILGRDNSKKYFGLEPSTIIQPYSKSQIHWLMQNTETWPIACASYAGNIDNHYPPNKLIQFCKLHAVVFPRIISKTPLDNALLVFTDGSSTGIAAYTFEKTTVRFKTSHTSAQLVELQALIAVLSAFPHRALNVYTDSAYLAHSIPLLETVSHIKHISDTAKFFLQCQQLIYNRSIPFYLGHIRAHSGLPGPLSQGNHITDLATKVVATTLTTAGKRTADGSEFEKRTADGSEFESPKKKAKVE

SEQ ID NO: 753 - protein, 2010 aa, synthetic construct
MPAAKRVKLDGGDKKYSIGLDIGTNSVGWAVITDEYKVPSKKFKVLGNTDRHSIKKNLIGALLFDSGETAEATRLKRTARRRYTRRKNRICYLQEIFSNEMAKVDDSFFHRLEESFLVEEDKKHERHPIFGNIVDEVAYHEKYPTIYHLRKKLVDSTDKADLRLIYLALAHMIKFRGHFLIEGDLNPDNSDVDKLFIQLVQTYNQLFEENPINASGVDAKAILSARLSKSRRLENLIAQLPGEKKNGLFGNLIALSLGLTPNFKSNFDLAEDAKLQLSKDTYDDDLDNLLAQIGDQYADLFLAAKNLSDAILLSDILRVNTEITKAPLSASMIKRYDEHHQDLTLLKALVRQQLPEKYKEIFFDQSKNGYAGYIDGGASQEEFYKFIKPILEKMDGTEELLVKLNREDLLRKQRTFDNGSIPHQIHLGELHAILRRQEDFYPFLKDNREKIEKILTFRIPYYVGPLARGNSRFAWMTRKSEETITPWNFEEVVDKGASAQSFIERMTNFDKNLPNEKVLPKHSLLYEYFTVYNELTKVKYVTEGMRKPAFLSGEQKKAIVDLLFKTNRKVTVKQLKEDYFKKIECFDSVEISGVEDRFNASLGTYHDLLKIIKDKDFLDNEENEDILEDIVLTLTLFEDREMIEERLKTYAHLFDDKVMKQLKRRRYTGWGRLSRKLINGIRDKQSGKTILDFLKSDGFANRNFMQLIHDDSLTFKEDIQKAQVSGQGDSLHEHIANLAGSPAIKKGILQTVKVVDELVKVMGRHKPENIVIEMARENQTTQKGQKNSRERMKRIEEGIKELGSQILKEHPVENTQLQNEKLYLYYLQNGRDMYVDQELDINRLSDYDVDHIVPQSFLKDDSIDNKVLTRSDKARGKSDNVPSEEVVKKMKNYWRQLLNAKLITQRKFDNLTKAERGGLSELDKAGFIKRQLVETRQITKHVAQILDSRMNTKYDENDKLIREVKVITLKSKLVSDFRKDFQFYKVREINNYHHAHDAYLNAVVGTALIKKYPKLESEFVYGDYKVYDVRKMIAKSEQEIGKATAKYFFYSNIMNFFKTEITLANGEIRKRPLIETNGETGEIVWDKGRDFATVRKVLSMPQVNIVKKTEVQTGGFSKESILPKRNSDKLIARKKDWDPKKYGGFDSPTVAYSVLVVAKVEKGKSKKLKSVKELLGITIMERSSFEKNPIDFLEAKGYKEVKKDLIIKLPKYSLFELENGRKRMLASAGELQKGNELALPSKYVNFLYLASHYEKLKGSPEDNEQKQLFVEQHKHYLDEIIEQISEFSKRVILADANLDKVLSAYNKHRDKPIREQAENIIHLFTLTNLGAPAAFKYFDTTIDRKRYTSTKEVLDATLIHQSITGLYETRIDLSQLGGDGGGSSPAPEAAAKGGLATAVDILAPQRYADPITWKSDEPVWVDQWPLTQEKLAAAQQLVQEQLQAGHIIESNSPWNTPIFVIKKKSGKWRLLQDLRAVNATMVLMGALQPGLPSPVAIPQGYFKIVIDLKDCFFTIPLQPVDQKRFAFSLPSTNFKQPMKRYQWKVLPQGMANSPTLCQKYVAAAIEPVRKSWAQMYIIHYMDDILIAGKLGEQVLQCFAQLKQALTTTGLQIAPEKVQLQDPYTYLGFQINGPKITNQKAVIRRDKLQTLNDFQKLLGDINWLRPYLHLTTGDLKPLFDILKGDSNPNSPRSLSEAALASLQKVETAIAEQFVTQIDYTQPLTFLIFNTTLTPTGLFWQNNPVMWVHLPASPKKVLLPYYDAIADLIILGRDNSKKYFGLEPSTIIQPYSKSQIHWLMQNTETWPIACASYAGNIDNHYPPNKLIQFCKLHAVVFPRIISKTPLDNALLVFTDGSSTGIAAYTFEKTTVRFKTSHTSAQLVELQALIAVLSAFPHRALNVYTDSAYLAHSIPLLETVSHIKHISDTAKFFLQCQQLIYNRSIPFYLGHIRAHSGLPGPLSQGNHITDLATKVVATTLTTAGKRTADGSEFEKRTADGSEFESPKKKAKVE

SEQ ID NO: 754 - protein, 2010 aa, synthetic construct
MPAAKRVKLDGGDKKYSIGLDIGTNSVGWAVITDEYKVPSKKFKVLGNTDRHSIKKNLIGALLFDSGETAEATRLKRTARRRYTRRKNRICYLQEIFSNEMAKVDDSFFHRLEESFLVEEDKKHERHPIFGNIVDEVAYHEKYPTIYHLRKKLVDSTDKADLRLIYLALAHMIKFRGHFLIEGDLNPDNSDVDKLFIQLVQTYNQLFEENPINASGVDAKAILSARLSKSRRLENLIAQLPGEKKNGLFGNLIALSLGLTPNFKSNFDLAEDAKLQLSKDTYDDDLDNLLAQIGDQYADLFLAAKNLSDAILLSDILRVNTEITKAPLSASMIKRYDEHHQDLTLLKALVRQQLPEKYKEIFFDQSKNGYAGYIDGGASQEEFYKFIKPILEKMDGTEELLVKLNREDLLRKQRTFDNGSIPHQIHLGELHAILRRQEDFYPFLKDNREKIEKILTFRIPYYVGPLARGNSRFAWMTRKSEETITPWNFEEVVDKGASAQSFIERMTNFDKNLPNEKVLPKHSLLYEYFTVYNELTKVKYVTEGMRKPAFLSGEQKKAIVDLLFKTNRKVTVKQLKEDYFKKIECFDSVEISGVEDRFNASLGTYHDLLKIIKDKDFLDNEENEDILEDIVLTLTLFEDREMIEERLKTYAHLFDDKVMKQLKRRRYTGWGRLSRKLINGIRDKQSGKTILDFLKSDGFANRNFMQLIHDDSLTFKEDIQKAQVSGQGDSLHEHIANLAGSPAIKKGILQTVKVVDELVKVMGRHKPENIVIEMARENQTTQKGQKNSRERMKRIEEGIKELGSQILKEHPVENTQLQNEKLYLYYLQNGRDMYVDQELDINRLSDYDVDHIVPQSFLKDDSIDNKVLTRSDKARGKSDNVPSEEVVKKMKNYWRQLLNAKLITQRKFDNLTKAERGGLSELDKAGFIKRQLVETRQITKHVAQILDSRMNTKYDENDKLIREVKVITLKSKLVSDFRKDFQFYKVREINNYHHAHDAYLNAVVGTALIKKYPKLESEFVYGDYKVYDVRKMIAKSEQEIGKATAKYFFYSNIMNFFKTEITLANGEIRKRPLIETNGETGEIVWDKGRDFATVRKVLSMPQVNIVKKTEVQTGGFSKESILPKRNSDKLIARKKDWDPKKYGGFDSPTVAYSVLVVAKVEKGKSKKLKSVKELLGITIMERSSFEKNPIDFLEAKGYKEVKKDLIIKLPKYSLFELENGRKRMLASAGELQKGNELALPSKYVNFLYLASHYEKLKGSPEDNEQKQLFVEQHKHYLDEIIEQISEFSKRVILADANLDKVLSAYNKHRDKPIREQAENIIHLFTLTNLGAPAAFKYFDTTIDRKRYTSTKEVLDATLIHQSITGLYETRIDLSQLGGDGGGSSGGSEAAAKGGLATAVDILAPQRYADPITWKSDEPVWVDQWPLTQEKLAAAQQLVQEQLQAGHIIESNSPWNTPIFVIKKKSGKWRLLQDLRAVNATMVLMGALQPGLPSPVAIPQGYFKIVIDLKDCFFTIPLQPVDQKRFAFSLPSTNFKQPMKRYQWKVLPQGMANSPTLCQKYVAAAIEPVRKSWAQMYIIHYMDDILIAGKLGEQVLQCFAQLKQALTTTGLQIAPEKVQLQDPYTYLGFQINGPKITNQKAVIRRDKLQTLNDFQKLLGDINWLRPYLHLTTGDLKPLFDILKGDSNPNSPRSLSEAALASLQKVETAIAEQFVTQIDYTQPLTFLIFNTTLTPTGLFWQNNPVMWVHLPASPKKVLLPYYDAIADLIILGRDNSKKYFGLEPSTIIQPYSKSQIHWLMQNTETWPIACASYAGNIDNHYPPNKLIQFCKLHAVVFPRIISKTPLDNALLVFTDGSSTGIAAYTFEKTTVRFKTSHTSAQLVELQALIAVLSAFPHRALNVYTDSAYLAHSIPLLETVSHIKHISDTAKFFLQCQQLIYNRSIPFYLGHIRAHSGLPGPLSQGNHITDLATKVVATTLTTAGKRTADGSEFEKRTADGSEFESPKKKAKVE

SEQ ID NO: 755 - protein, 2008 aa, synthetic construct
MPAAKRVKLDGGDKKYSIGLDIGTNSVGWAVITDEYKVPSKKFKVLGNTDRHSIKKNLIGALLFDSGETAEATRLKRTARRRYTRRKNRICYLQEIFSNEMAKVDDSFFHRLEESFLVEEDKKHERHPIFGNIVDEVAYHEKYPTIYHLRKKLVDSTDKADLRLIYLALAHMIKFRGHFLIEGDLNPDNSDVDKLFIQLVQTYNQLFEENPINASGVDAKAILSARLSKSRRLENLIAQLPGEKKNGLFGNLIALSLGLTPNFKSNFDLAEDAKLQLSKDTYDDDLDNLLAQIGDQYADLFLAAKNLSDAILLSDILRVNTEITKAPLSASMIKRYDEHHQDLTLLKALVRQQLPEKYKEIFFDQSKNGYAGYIDGGASQEEFYKFIKPILEKMDGTEELLVKLNREDLLRKQRTFDNGSIPHQIHLGELHAILRRQEDFYPFLKDNREKIEKILTFRIPYYVGPLARGNSRFAWMTRKSEETITPWNFEEVVDKGASAQSFIERMTNFDKNLPNEKVLPKHSLLYEYFTVYNELTKVKYVTEGMRKPAFLSGEQKKAIVDLLFKTNRKVTVKQLKEDYFKKIECFDSVEISGVEDRFNASLGTYHDLLKIIKDKDFLDNEENEDILEDIVLTLTLFEDREMIEERLKTYAHLFDDKVMKQLKRRRYTGWGRLSRKLINGIRDKQSGKTILDFLKSDGFANRNFMQLIHDDSLTFKEDIQKAQVSGQGDSLHEHIANLAGSPAIKKGILQTVKVVDELVKVMGRHKPENIVIEMARENQTTQKGQKNSRERMKRIEEGIKELGSQILKEHPVENTQLQNEKLYLYYLQNGRDMYVDQELDINRLSDYDVDHIVPQSFLKDDSIDNKVLTRSDKARGKSDNVPSEEVVKKMKNYWRQLLNAKLITQRKFDNLTKAERGGLSELDKAGFIKRQLVETRQITKHVAQILDSRMNTKYDENDKLIREVKVITLKSKLVSDFRKDFQFYKVREINNYHHAHDAYLNAVVGTALIKKYPKLESEFVYGDYKVYDVRKMIAKSEQEIGKATAKYFFYSNIMNFFKTEITLANGEIRKRPLIETNGETGEIVWDKGRDFATVRKVLSMPQVNIVKKTEVQTGGFSKESILPKRNSDKLIARKKDWDPKKYGGFDSPTVAYSVLVVAKVEKGKSKKLKSVKELLGITIMERSSFEKNPIDFLEAKGYKEVKKDLIIKLPKYSLFELENGRKRMLASAGELQKGNELALPSKYVNFLYLASHYEKLKGSPEDNEQKQLFVEQHKHYLDEIIEQISEFSKRVILADANLDKVLSAYNKHRDKPIREQAENIIHLFTLTNLGAPAAFKYFDTTIDRKRYTSTKEVLDATLIHQSITGLYETRIDLSQLGGDGGPAPGGGGGSGGLATAVDILAPQRYADPITWKSDEPVWVDQWPLTQEKLAAAQQLVQEQLQAGHIIESNSPWNTPIFVIKKKSGKWRLLQDLRAVNATMVLMGALQPGLPSPVAIPQGYFKIVIDLKDCFFTIPLQPVDQKRFAFSLPSTNFKQPMKRYQWKVLPQGMANSPTLCQKYVAAAIEPVRKSWAQMYIIHYMDDILIAGKLGEQVLQCFAQLKQALTTTGLQIAPEKVQLQDPYTYLGFQINGPKITNQKAVIRRDKLQTLNDFQKLLGDINWLRPYLHLTTGDLKPLFDILKGDSNPNSPRSLSEAALASLQKVETAIAEQFVTQIDYTQPLTFLIFNTTLTPTGLFWQNNPVMWVHLPASPKKVLLPYYDAIADLIILGRDNSKKYFGLEPSTIIQPYSKSQIHWLMQNTETWPIACASYAGNIDNHYPPNKLIQFCKLHAVVFPRIISKTPLDNALLVFTDGSSTGIAAYTFEKTTVRFKTSHTSAQLVELQALIAVLSAFPHRALNVYTDSAYLAHSIPLLETVSHIKHISDTAKFFLQCQQLIYNRSIPFYLGHIRAHSGLPGPLSQGNHITDLATKVVATTLTTAGKRTADGSEFEKRTADGSEFESPKKKAKVE

SEQ ID NO: 756 - protein, 2005 aa, synthetic construct
MPAAKRVKLDGGDKKYSIGLDIGTNSVGWAVITDEYKVPSKKFKVLGNTDRHSIKKNLIGALLFDSGETAEATRLKRTARRRYTRRKNRICYLQEIFSNEMAKVDDSFFHRLEESFLVEEDKKHERHPIFGNIVDEVAYHEKYPTIYHLRKKLVDSTDKADLRLIYLALAHMIKFRGHFLIEGDLNPDNSDVDKLFIQLVQTYNQLFEENPINASGVDAKAILSARLSKSRRLENLIAQLPGEKKNGLFGNLIALSLGLTPNFKSNFDLAEDAKLQLSKDTYDDDLDNLLAQIGDQYADLFLAAKNLSDAILLSDILRVNTEITKAPLSASMIKRYDEHHQDLTLLKALVRQQLPEKYKEIFFDQSKNGYAGYIDGGASQEEFYKFIKPILEKMDGTEELLVKLNREDLLRKQRTFDNGSIPHQIHLGELHAILRRQEDFYPFLKDNREKIEKILTFRIPYYVGPLARGNSRFAWMTRKSEETITPWNFEEVVDKGASAQSFIERMTNFDKNLPNEKVLPKHSLLYEYFTVYNELTKVKYVTEGMRKPAFLSGEQKKAIVDLLFKTNRKVTVKQLKEDYFKKIECFDSVEISGVEDRFNASLGTYHDLLKIIKDKDFLDNEENEDILEDIVLTLTLFEDREMIEERLKTYAHLFDDKVMKQLKRRRYTGWGRLSRKLINGIRDKQSGKTILDFLKSDGFANRNFMQLIHDDSLTFKEDIQKAQVSGQGDSLHEHIANLAGSPAIKKGILQTVKVVDELVKVMGRHKPENIVIEMARENQTTQKGQKNSRERMKRIEEGIKELGSQILKEHPVENTQLQNEKLYLYYLQNGRDMYVDQELDINRLSDYDVDHIVPQSFLKDDSIDNKVLTRSDKARGKSDNVPSEEVVKKMKNYWRQLLNAKLITQRKFDNLTKAERGGLSELDKAGFIKRQLVETRQITKHVAQILDSRMNTKYDENDKLIREVKVITLKSKLVSDFRKDFQFYKVREINNYHHAHDAYLNAVVGTALIKKYPKLESEFVYGDYKVYDVRKMIAKSEQEIGKATAKYFFYSNIMNFFKTEITLANGEIRKRPLIETNGETGEIVWDKGRDFATVRKVLSMPQVNIVKKTEVQTGGFSKESILPKRNSDKLIARKKDWDPKKYGGFDSPTVAYSVLVVAKVEKGKSKKLKSVKELLGITIMERSSFEKNPIDFLEAKGYKEVKKDLIIKLPKYSLFELENGRKRMLASAGELQKGNELALPSKYVNFLYLASHYEKLKGSPEDNEQKQLFVEQHKHYLDEIIEQISEFSKRVILADANLDKVLSAYNKHRDKPIREQAENIIHLFTLTNLGAPAAFKYFDTTIDRKRYTSTKEVLDATLIHQSITGLYETRIDLSQLGGDGGGGGGGSGGLATAVDILAPQRYADPITWKSDEPVWVDQWPLTQEKLAAAQQLVQEQLQAGHIIESNSPWNTPIFVIKKKSGKWRLLQDLRAVNATMVLMGALQPGLPSPVAIPQGYFKIVIDLKDCFFTIPLQPVDQKRFAFSLPSTNFKQPMKRYQWKVLPQGMANSPTLCQKYVAAAIEPVRKSWAQMYIIHYMDDILIAGKLGEQVLQCFAQLKQALTTTGLQIAPEKVQLQDPYTYLGFQINGPKITNQKAVIRRDKLQTLNDFQKLLGDINWLRPYLHLTTGDLKPLFDILKGDSNPNSPRSLSEAALASLQKVETAIAEQFVTQIDYTQPLTFLIFNTTLTPTGLFWQNNPVMWVHLPASPKKVLLPYYDAIADLIILGRDNSKKYFGLEPSTIIQPYSKSQIHWLMQNTETWPIACASYAGNIDNHYPPNKLIQFCKLHAVVFPRIISKTPLDNALLVFTDGSSTGIAAYTFEKTTVRFKTSHTSAQLVELQALIAVLSAFPHRALNVYTDSAYLAHSIPLLETVSHIKHISDTAKFFLQCQQLIYNRSIPFYLGHIRAHSGLPGPLSQGNHITDLATKVVATTLTTAGKRTADGSEFEKRTADGSEFESPKKKAKVE

SEQ ID NO: 757 - protein, 2014 aa, synthetic construct
MPAAKRVKLDGGDKKYSIGLDIGTNSVGWAVITDEYKVPSKKFKVLGNTDRHSIKKNLIGALLFDSGETAEATRLKRTARRRYTRRKNRICYLQEIFSNEMAKVDDSFFHRLEESFLVEEDKKHERHPIFGNIVDEVAYHEKYPTIYHLRKKLVDSTDKADLRLIYLALAHMIKFRGHFLIEGDLNPDNSDVDKLFIQLVQTYNQLFEENPINASGVDAKAILSARLSKSRRLENLIAQLPGEKKNGLFGNLIALSLGLTPNFKSNFDLAEDAKLQLSKDTYDDDLDNLLAQIGDQYADLFLAAKNLSDAILLSDILRVNTEITKAPLSASMIKRYDEHHQDLTLLKALVRQQLPEKYKEIFFDQSKNGYAGYIDGGASQEEFYKFIKPILEKMDGTEELLVKLNREDLLRKQRTFDNGSIPHQIHLGELHAILRRQEDFYPFLKDNREKIEKILTFRIPYYVGPLARGNSRFAWMTRKSEETITPWNFEEVVDKGASAQSFIERMTNFDKNLPNEKVLPKHSLLYEYFTVYNELTKVKYVTEGMRKPAFLSGEQKKAIVDLLFKTNRKVTVKQLKEDYFKKIECFDSVEISGVEDRFNASLGTYHDLLKIIKDKDFLDNEENEDILEDIVLTLTLFEDREMIEERLKTYAHLFDDKVMKQLKRRRYTGWGRLSRKLINGIRDKQSGKTILDFLKSDGFANRNFMQLIHDDSLTFKEDIQKAQVSGQGDSLHEHIANLAGSPAIKKGILQTVKVVDELVKVMGRHKPENIVIEMARENQTTQKGQKNSRERMKRIEEGIKELGSQILKEHPVENTQLQNEKLYLYYLQNGRDMYVDQELDINRLSDYDVDHIVPQSFLKDDSIDNKVLTRSDKARGKSDNVPSEEVVKKMKNYWRQLLNAKLITQRKFDNLTKAERGGLSELDKAGFIKRQLVETRQITKHVAQILDSRMNTKYDENDKLIREVKVITLKSKLVSDFRKDFQFYKVREINNYHHAHDAYLNAVVGTALIKKYPKLESEFVYGDYKVYDVRKMIAKSEQEIGKATAKYFFYSNIMNFFKTEITLANGEIRKRPLIETNGETGEIVWDKGRDFATVRKVLSMPQVNIVKKTEVQTGGFSKESILPKRNSDKLIARKKDWDPKKYGGFDSPTVAYSVLVVAKVEKGKSKKLKSVKELLGITIMERSSFEKNPIDFLEAKGYKEVKKDLIIKLPKYSLFELENGRKRMLASAGELQKGNELALPSKYVNFLYLASHYEKLKGSPEDNEQKQLFVEQHKHYLDEIIEQISEFSKRVILADANLDKVLSAYNKHRDKPIREQAENIIHLFTLTNLGAPAAFKYFDTTIDRKRYTSTKEVLDATLIHQSITGLYETRIDLSQLGGDGGGSSGSSGSSGSSGSSGGLATAVDILAPQRYADPITWKSDEPVWVDQWPLTQEKLAAAQQLVQEQLQAGHIIESNSPWNTPIFVIKKKSGKWRLLQDLRAVNATMVLMGALQPGLPSPVAPPQGYFKIVIDLKDCFFTIPLQPVDQKRFAFSLPSTNFKQPMKRYQWKVLPQGMANSPTLCQKYVAAAIEPVRKSWAQMYIIHYMDDILIAGKLGEQVLQCFAQLKQALTTTGLQIAPEKVQLQDPYTYLGFQINGPKITNQKAVIRRDKLQTLNDFQKLLGDINWLRPYLHLTTGDLKPLFDILKGDSNPNSPRSLSEAALASLQKVETAIAEQFVTQIDYTQPLTFLIFNTTLTPTGLFWQNNPVMWVHLPASPKKVLLPYYDAIADLIILGRDNSKKYFGLEPSTIIQPYSKSQIHWLMQNTETWPIACASYAGNIDNHYPPNKLIQFCKLHAVVFPRIISKTPLDNALLVFTDGSSTGIAAYTFEKTTVRFKTSHTSAQLVELQALIAVLSAFPHRALNVYTDSAYLAHSIPLLETVSHIKHISDTAKFFLQCQQLIYNRSIPFYLGHIRAHSGLPGPLSQGNHITDLATKVVATTLTTAGKRTADGSEFEKRTADGSEFESPKKKAKVE

SEQ ID NO: 758 - protein, 2010 aa, synthetic construct
MPAAKRVKLDGGDKKYSIGLDIGTNSVGWAVITDEYKVPSKKFKVLGNTDRHSIKKNLIGALLFDSGETAEATRLKRTARRRYTRRKNRICYLQEIFSNEMAKVDDSFFHRLEESFLVEEDKKHERHPIFGNIVDEVAYHEKYPTIYHLRKKLVDSTDKADLRLIYLALAHMIKFRGHFLIEGDLNPDNSDVDKLFIQLVQTYNQLFEENPINASGVDAKAILSARLSKSRRLENLIAQLPGEKKNGLFGNLIALSLGLTPNFKSNFDLAEDAKLQLSKDTYDDDLDNLLAQIGDQYADLFLAAKNLSDAILLSDILRVNTEITKAPLSASMIKRYDEHHQDLTLLKALVRQQLPEKYKEIFFDQSKNGYAGYIDGGASQEEFYKFIKPILEKMDGTEELLVKLNREDLLRKQRTFDNGSIPHQIHLGELHAILRRQEDFYPFLKDNREKIEKILTFRIPYYVGPLARGNSRFAWMTRKSEETITPWNFEEVVDKGASAQSFIERMTNFDKNLPNEKVLPKHSLLYEYFTVYNELTKVKYVTEGMRKPAFLSGEQKKAIVDLLFKTNRKVTVKQLKEDYFKKIECFDSVEISGVEDRFNASLGTYHDLLKIIKDKDFLDNEENEDILEDIVLTLTLFEDREMIEERLKTYAHLFDDKVMKQLKRRRYTGWGRLSRKLINGIRDKQSGKTILDFLKSDGFANRNFMQLIHDDSLTFKEDIQKAQVSGQGDSLHEHIANLAGSPAIKKGILQTVKVVDELVKVMGRHKPENIVIEMARENQTTQKGQKNSRERMKRIEEGIKELGSQILKEHPVENTQLQNEKLYLYYLQNGRDMYVDQELDINRLSDYDVDHIVPQSFLKDDSIDNKVLTRSDKARGKSDNVPSEEVVKKMKNYWRQLLNAKLITQRKFDNLTKAERGGLSELDKAGFIKRQLVETRQITKHVAQILDSRMNTKYDENDKLIREVKVITLKSKLVSDFRKDFQFYKVREINNYHHAHDAYLNAVVGTALIKKYPKLESEFVYGDYKVYDVRKMIAKSEQEIGKATAKYFFYSNIMNFFKTEITLANGEIRKRPLIETNGETGEIVWDKGRDFATVRKVLSMPQVNIVKKTEVQTGGFSKESILPKRNSDKLIARKKDWDPKKYGGFDSPTVAYSVLVVAKVEKGKSKKLKSVKELLGITIMERSSFEKNPIDFLEAKGYKEVKKDLIIKLPKYSLFELENGRKRMLASAGELQKGNELALPSKYVNFLYLASHYEKLKGSPEDNEQKQLFVEQHKHYLDEIIEQISEFSKRVILADANLDKVLSAYNKHRDKPIREQAENIIHLFTLTNLGAPAAFKYFDTTIDRKRYTSTKEVLDATLIHQSITGLYETRIDLSQLGGDGGGSSPAPEAAAKGGLATAVDILAPQRYADPITWKSDEPVWVDQWPLTQEKLAAAQQLVQEQLQAGHIIESNSPWNTPIFVIKKKSGKWRLLQDLRAVNATMVLMGALQPGLPSPVAPPQGYFKIVIDLKDCFFTIPLQPVDQKRFAFSLPSTNFKQPMKRYQWKVLPQGMANSPTLCQKYVAAAIEPVRKSWAQMYIIHYMDDILIAGKLGEQVLQCFAQLKQALTTTGLQIAPEKVQLQDPYTYLGFQINGPKITNQKAVIRRDKLQTLNDFQKLLGDINWLRPYLHLTTGDLKPLFDILKGDSNPNSPRSLSEAALASLQKVETAIAEQFVTQIDYTQPLTFLIFNTTLTPTGLFWQNNPVMWVHLPASPKKVLLPYYDAIADLIILGRDNSKKYFGLEPSTIIQPYSKSQIHWLMQNTETWPIACASYAGNIDNHYPPNKLIQFCKLHAVVFPRIISKTPLDNALLVFTDGSSTGIAAYTFEKTTVRFKTSHTSAQLVELQALIAVLSAFPHRALNVYTDSAYLAHSIPLLETVSHIKHISDTAKFFLQCQQLIYNRSIPFYLGHIRAHSGLPGPLSQGNHITDLATKVVATTLTTAGKRTADGSEFEKRTADGSEFESPKKKAKVE

SEQ ID NO: 759 - protein, 2072 aa, synthetic construct
MPAAKRVKLDGGDKKYSIGLDIGTNSVGWAVITDEYKVPSKKFKVLGNTDRHSIKKNLIGALLFDSGETAEATRLKRTARRRYTRRKNRICYLQEIFSNEMAKVDDSFFHRLEESFLVEEDKKHERHPIFGNIVDEVAYHEKYPTIYHLRKKLVDSTDKADLRLIYLALAHMIKFRGHFLIEGDLNPDNSDVDKLFIQLVQTYNQLFEENPINASGVDAKAILSARLSKSRRLENLIAQLPGEKKNGLFGNLIALSLGLTPNFKSNFDLAEDAKLQLSKDTYDDDLDNLLAQIGDQYADLFLAAKNLSDAILLSDILRVNTEITKAPLSASMIKRYDEHHQDLTLLKALVRQQLPEKYKEIFFDQSKNGYAGYIDGGASQEEFYKFIKPILEKMDGTEELLVKLNREDLLRKQRTFDNGSIPHQIHLGELHAILRRQEDFYPFLKDNREKIEKILTFRIPYYVGPLARGNSRFAWMTRKSEETITPWNFEEVVDKGASAQSFIERMTNFDKNLPNEKVLPKHSLLYEYFTVYNELTKVKYVTEGMRKPAFLSGEQKKAIVDLLFKTNRKVTVKQLKEDYFKKIECFDSVEISGVEDRFNASLGTYHDLLKIIKDKDFLDNEENEDILEDIVLTLTLFEDREMIEERLKTYAHLFDDKVMKQLKRRRYTGWGRLSRKLINGIRDKQSGKTILDFLKSDGFANRNFMQLIHDDSLTFKEDIQKAQVSGQGDSLHEHIANLAGSPAIKKGILQTVKVVDELVKVMGRHKPENIVIEMARENQTTQKGQKNSRERMKRIEEGIKELGSQILKEHPVENTQLQNEKLYLYYLQNGRDMYVDQELDINRLSDYDVDHIVPQSFLKDDSIDNKVLTRSDKARGKSDNVPSEEVVKKMKNYWRQLLNAKLITQRKFDNLTKAERGGLSELDKAGFIKRQLVETRQITKHVAQILDSRMNTKYDENDKLIREVKVITLKSKLVSDFRKDFQFYKVREINNYHHAHDAYLNAVVGTALIKKYPKLESEFVYGDYKVYDVRKMIAKSEQEIGKATAKYFFYSNIMNFFKTEITLANGEIRKRPLIETNGETGEIVWDKGRDFATVRKVLSMPQVNIVKKTEVQTGGFSKESILPKRNSDKLIARKKDWDPKKYGGFDSPTVAYSVLVVAKVEKGKSKKLKSVKELLGITIMERSSFEKNPIDFLEAKGYKEVKKDLIIKLPKYSLFELENGRKRMLASAGELQKGNELALPSKYVNFLYLASHYEKLKGSPEDNEQKQLFVEQHKHYLDEIIEQISEFSKRVILADANLDKVLSAYNKHRDKPIREQAENIIHLFTLTNLGAPAAFKYFDTTIDRKRYTSTKEVLDATLIHQSITGLYETRIDLSQLGGDGGPAPEAAAKGGSCQTKNTLNIDEYLLQFPDQLWASLPTDIGRMLVPPITIKIKDNASLPSIRQYPLPKDKTEGLRPLISSLENQGILIKCHSPCNTPIFPIKKAGRDEYRMIHDLRAINNIVAPLTAVVASPTTVLSNLAPSLHWFTVIDLSNAFFSVPIHKDSQYLFAFTFEGHQYTWTVLPQGFIHSPTLFSQALYQSLHKIKFKISSEICIYMDDVLIASKDRDTNLKDTAVMLQHLASEGHKVSKKKLQLCQQEVVYLGQLLTPEGRKILPDRKVTVSQFQQPTTIRQIRAFLGLVGYCRHWIPEFSIHSKFLEKQLKKDTAEPFQLDDQQVEAFNKLKHAITTAPVLVVPDPAKPFQLYTSHSEHASIAVLTQKHAGRTRPIAFLSSKFDAIESGLPPCLKACASIHRSLTQADSFILGAPLIIYTTHAICTLLQRDRSQLVTASRFSKWEADLLRPELTFVACSAVSPAHLYMQSCENNIPPHDCVLLTHTISRPRPDLSDLPIPDPDMTLFSDGSYTTGRGGAAVVMHRPVTDDFIIIHQQPGGASAQTAELLALAAACHLATDKTVNIYTDSRYAYGVVHDFGHLWMHRGFVTSAGTPIKNHKEIEYLLKQIMKPKQVSVIKIEAHTKGVSMEVRGNAAADEAAKNAVFLVQRAGKRTADGSEFEKRTADGSEFESPKKKAKVE

SEQ ID NO: 760 - protein, 2070 aa, synthetic construct
MPAAKRVKLDGGDKKYSIGLDIGTNSVGWAVITDEYKVPSKKFKVLGNTDRHSIKKNLIGALLFDSGETAEATRLKRTARRRYTRRKNRICYLQEIFSNEMAKVDDSFFHRLEESFLVEEDKKHERHPIFGNIVDEVAYHEKYPTIYHLRKKLVDSTDKADLRLIYLALAHMIKFRGHFLIEGDLNPDNSDVDKLFIQLVQTYNQLFEENPINASGVDAKAILSARLSKSRRLENLIAQLPGEKKNGLFGNLIALSLGLTPNFKSNFDLAEDAKLQLSKDTYDDDLDNLLAQIGDQYADLFLAAKNLSDAILLSDILRVNTEITKAPLSASMIKRYDEHHQDLTLLKALVRQQLPEKYKEIFFDQSKNGYAGYIDGGASQEEFYKFIKPILEKMDGTEELLVKLNREDLLRKQRTFDNGSIPHQIHLGELHAILRRQEDFYPFLKDNREKIEKILTFRIPYYVGPLARGNSRFAWMTRKSEETITPWNFEEVVDKGASAQSFIERMTNFDKNLPNEKVLPKHSLLYEYFTVYNELTKVKYVTEGMRKPAFLSGEQKKAIVDLLFKTNRKVTVKQLKEDYFKKIECFDSVEISGVEDRFNASLGTYHDLLKIIKDKDFLDNEENEDILEDIVLTLTLFEDREMIEERLKTYAHLFDDKVMKQLKRRRYTGWGRLSRKLINGIRDKQSGKTILDFLKSDGFANRNFMQLIHDDSLTFKEDIQKAQVSGQGDSLHEHIANLAGSPAIKKGILQTVKVVDELVKVMGRHKPENIVIEMARENQTTQKGQKNSRERMKRIEEGIKELGSQILKEHPVENTQLQNEKLYLYYLQNGRDMYVDQELDINRLSDYDVDHIVPQSFLKDDSIDNKVLTRSDKARGKSDNVPSEEVVKKMKNYWRQLLNAKLITQRKFDNLTKAERGGLSELDKAGFIKRQLVETRQITKHVAQILDSRMNTKYDENDKLIREVKVITLKSKLVSDFRKDFQFYKVREINNYHHAHDAYLNAVVGTALIKKYPKLESEFVYGDYKVYDVRKMIAKSEQEIGKATAKYFFYSNIMNFFKTEITLANGEIRKRPLIETNGETGEIVWDKGRDFATVRKVLSMPQVNIVKKTEVQTGGFSKESILPKRNSDKLIARKKDWDPKKYGGFDSPTVAYSVLVVAKVEKGKSKKLKSVKELLGITIMERSSFEKNPIDFLEAKGYKEVKKDLIIKLPKYSLFELENGRKRMLASAGELQKGNELALPSKYVNFLYLASHYEKLKGSPEDNEQKQLFVEQHKHYLDEIIEQISEFSKRVILADANLDKVLSAYNKHRDKPIREQAENIIHLFTLTNLGAPAAFKYFDTTIDRKRYTSTKEVLDATLIHQSITGLYETRIDLSQLGGDGGGGGGGGGGSCQTKNTLNIDEYLLQFPDQLWASLPTDIGRMLVPPITIKIKDNASLPSIRQYPLPKDKTEGLRPLISSLENQGILIKCHSPCNTPIFPIKKAGRDEYRMIHDLRAINNIVAPLTAVVASPTTVLSNLAPSLHWFTVIDLSNAFFSVPIHKDSQYLFAFTFEGHQYTWTVLPQGFIHSPTLFSQALYQSLHKIKFKISSEICIYMDDVLIASKDRDTNLKDTAVMLQHLASEGHKVSKKKLQLCQQEVVYLGQLLTPEGRKILPDRKVTVSQFQQPTTIRQIRAFLGLVGYCRHWIPEFSIHSKFLEKQLKKDTAEPFQLDDQQVEAFNKLKHAITTAPVLVVPDPAKPFQLYTSHSEHASIAVLTQKHAGRTRPIAFLSSKFDAIESGLPPCLKACASIHRSLTQADSFILGAPLIIYTTHAICTLLQRDRSQLVTASRFSKWEADLLRPELTFVACSAVSPAHLYMQSCENNIPPHDCVLLTHTISRPRPDLSDLPIPDPDMTLFSDGSYTTGRGGAAVVMHRPVTDDFIIIHQQPGGASAQTAELLALAAACHLATDKTVNIYTDSRYAYGVVHDFGHLWMHRGFVTSAGTPIKNHKEIEYLLKQIMKPKQVSVIKIEAHTKGVSMEVRGNAAADEAAKNAVFLVQRAGKRTADGSEFEKRTADGSEFESPKKKAKVE

SEQ ID NO: 761 - protein, 2077 aa, synthetic construct
MPAAKRVKLDGGDKKYSIGLDIGTNSVGWAVITDEYKVPSKKFKVLGNTDRHSIKKNLIGALLFDSGETAEATRLKRTARRRYTRRKNRICYLQEIFSNEMAKVDDSFFHRLEESFLVEEDKKHERHPIFGNIVDEVAYHEKYPTIYHLRKKLVDSTDKADLRLIYLALAHMIKFRGHFLIEGDLNPDNSDVDKLFIQLVQTYNQLFEENPINASGVDAKAILSARLSKSRRLENLIAQLPGEKKNGLFGNLIALSLGLTPNFKSNFDLAEDAKLQLSKDTYDDDLDNLLAQIGDQYADLFLAAKNLSDAILLSDILRVNTEITKAPLSASMIKRYDEHHQDLTLLKALVRQQLPEKYKEIFFDQSKNGYAGYIDGGASQEEFYKFIKPILEKMDGTEELLVKLNREDLLRKQRTFDNGSIPHQIHLGELHAILRRQEDFYPFLKDNREKIEKILTFRIPYYVGPLARGNSRFAWMTRKSEETITPWNFEEVVDKGASAQSFIERMTNFDKNLPNEKVLPKHSLLYEYFTVYNELTKVKYVTEGMRKPAFLSGEQKKAIVDLLFKTNRKVTVKQLKEDYFKKIECFDSVEISGVEDRFNASLGTYHDLLKIIKDKDFLDNEENEDILEDIVLTLTLFEDREMIEERLKTYAHLFDDKVMKQLKRRRYTGWGRLSRKLINGIRDKQSGKTILDFLKSDGFANRNFMQLIHDDSLTFKEDIQKAQVSGQGDSLHEHIANLAGSPAIKKGILQTVKVVDELVKVMGRHKPENIVIEMARENQTTQKGQKNSRERMKRIEEGIKELGSQILKEHPVENTQLQNEKLYLYYLQNGRDMYVDQELDINRLSDYDVDHIVPQSFLKDDSIDNKVLTRSDKARGKSDNVPSEEVVKKMKNYWRQLLNAKLITQRKFDNLTKAERGGLSELDKAGFIKRQLVETRQITKHVAQILDSRMNTKYDENDKLIREVKVITLKSKLVSDFRKDFQFYKVREINNYHHAHDAYLNAVVGTALIKKYPKLESEFVYGDYKVYDVRKMIAKSEQEIGKATAKYFFYSNIMNFFKTEITLANGEIRKRPLIETNGETGEIVWDKGRDFATVRKVLSMPQVNIVKKTEVQTGGFSKESILPKRNSDKLIARKKDWDPKKYGGFDSPTVAYSVLVVAKVEKGKSKKLKSVKELLGITIMERSSFEKNPIDFLEAKGYKEVKKDLIIKLPKYSLFELENGRKRMLASAGELQKGNELALPSKYVNFLYLASHYEKLKGSPEDNEQKQLFVEQHKHYLDEIIEQISEFSKRVILADANLDKVLSAYNKHRDKPIREQAENIIHLFTLTNLGAPAAFKYFDTTIDRKRYTSTKEVLDATLIHQSITGLYETRIDLSQLGGDGGPAPAPAPAPAPAPGGSCQTKNTLNIDEYLLQFPDQLWASLPTDIGRMLVPPITIKIKDNASLPSIRQYPLPKDKTEGLRPLISSLENQGILIKCHSPCNTPIFPIKKAGRDEYRMIHDLRAINNIVAPLTAVVASPTTVLSNLAPSLHWFTVIDLSNAFFSVPIHKDSQYLFAFTFEGHQYTWTVLPQGFIHSPTLFSQALYQSLHKIKFKISSEICIYMDDVLIASKDRDTNLKDTAVMLQHLASEGHKVSKKKLQLCQQEVVYLGQLLTPEGRKILPDRKVTVSQFQQPTTIRQIRAFLGLVGYCRHWIPEFSIHSKFLEKQLKKDTAEPFQLDDQQVEAFNKLKHAITTAPVLVVPDPAKPFQLYTSHSEHASIAVLTQKHAGRTRPIAFLSSKFDAIESGLPPCLKACASIHRSLTQADSFILGAPLIIYTTHAICTLLQRDRSQLVTASRFSKWEADLLRPELTFVACSAVSPAHLYMQSCENNIPPHDCVLLTHTISRPRPDLSDLPIPDPDMTLFSDGSYTTGRGGAAVVMHRPVTDDFIIIHQQPGGASAQTAELLALAAACHLATDKTVNIYTDSRYAYGVVHDFGHLWMHRGFVTSAGTPIKNHKEIEYLLKQIMKPKQVSVIKIEAHTKGVSMEVRGNAAADEAAKNAVFLVQRAGKRTADGSEFEKRTADGSEFESPKKKAKVE

SEQ ID NO: 762 - protein, 2079 aa, synthetic construct
MPAAKRVKLDGGDKKYSIGLDIGTNSVGWAVITDEYKVPSKKFKVLGNTDRHSIKKNLIGALLFDSGETAEATRLKRTARRRYTRRKNRICYLQEIFSNEMAKVDDSFFHRLEESFLVEEDKKHERHPIFGNIVDEVAYHEKYPTIYHLRKKLVDSTDKADLRLIYLALAHMIKFRGHFLIEGDLNPDNSDVDKLFIQLVQTYNQLFEENPINASGVDAKAILSARLSKSRRLENLIAQLPGEKKNGLFGNLIALSLGLTPNFKSNFDLAEDAKLQLSKDTYDDDLDNLLAQIGDQYADLFLAAKNLSDAILLSDILRVNTEITKAPLSASMIKRYDEHHQDLTLLKALVRQQLPEKYKEIFFDQSKNGYAGYIDGGASQEEFYKFIKPILEKMDGTEELLVKLNREDLLRKQRTFDNGSIPHQIHLGELHAILRRQEDFYPFLKDNREKIEKILTFRIPYYVGPLARGNSRFAWMTRKSEETITPWNFEEVVDKGASAQSFIERMTNFDKNLPNEKVLPKHSLLYEYFTVYNELTKVKYVTEGMRKPAFLSGEQKKAIVDLLFKTNRKVTVKQLKEDYFKKIECFDSVEISGVEDRFNASLGTYHDLLKIIKDKDFLDNEENEDILEDIVLTLTLFEDREMIEERLKTYAHLFDDKVMKQLKRRRYTGWGRLSRKLINGIRDKQSGKTILDFLKSDGFANRNFMQLIHDDSLTFKEDIQKAQVSGQGDSLHEHIANLAGSPAIKKGILQTVKVVDELVKVMGRHKPENIVIEMARENQTTQKGQKNSRERMKRIEEGIKELGSQILKEHPVENTQLQNEKLYLYYLQNGRDMYVDQELDINRLSDYDVDHIVPQSFLKDDSIDNKVLTRSDKARGKSDNVPSEEVVKKMKNYWRQLLNAKLITQRKFDNLTKAERGGLSELDKAGFIKRQLVETRQITKHVAQILDSRMNTKYDENDKLIREVKVITLKSKLVSDFRKDFQFYKVREINNYHHAHDAYLNAVVGTALIKKYPKLESEFVYGDYKVYDVRKMIAKSEQEIGKATAKYFFYSNIMNFFKTEITLANGEIRKRPLIETNGETGEIVWDKGRDFATVRKVLSMPQVNIVKKTEVQTGGFSKESILPKRNSDKLIARKKDWDPKKYGGFDSPTVAYSVLVVAKVEKGKSKKLKSVKELLGITIMERSSFEKNPIDFLEAKGYKEVKKDLIIKLPKYSLFELENGRKRMLASAGELQKGNELALPSKYVNFLYLASHYEKLKGSPEDNEQKQLFVEQHKHYLDEIIEQISEFSKRVILADANLDKVLSAYNKHRDKPIREQAENIIHLFTLTNLGAPAAFKYFDTTIDRKRYTSTKEVLDATLIHQSITGLYETRIDLSQLGGDGGGGGGSEAAAKGGGGSGGSCQTKNTLNIDEYLLQFPDQLWASLPTDIGRMLVPPITIKIKDNASLPSIRQYPLPKDKTEGLRPLISSLENQGILIKCHSPCNTPIFPIKKAGRDEYRMIHDLRAINNIVAPLTAVVASPTTVLSNLAPSLHWFTVIDLSNAFFSVPIHKDSQYLFAFTFEGHQYTWTVLPQGFIHSPTLFNQALYQSLHKIKFKISSEICIYMDDVLIASKDRDTNLKDTAVMLQHLASEGHKVSKKKLQLCQQEVVYLGQLLTPEGRKILPDRKVTVSQFQQPTTIRQIRAFLGLVGYCRHWIPEFSIHSKFLEKQLKPDTAEPFQLDDQQVEAFNKLKHAITTAPVLVVPDPAKPFQLYTSHSEHASIAVLTQKHAGRTRPIAFLSSKFDAIESGLPPCLKACASIHRSLTQADSFILGAPLIIYTTHAICTLLQRDRSQLVTASRFSKWEADLLRPELTFVACSAVSPAHLYMQSCENNIPPHDCVLLTHTISRPRPDLSDLPIPDPDMTLFSDGSYTTGRGGAAVVMHRPVTDDFIIIHQQPGGASAQTAELLALAAACHLATDKTVNIYTDSRYAYGVVHDFGHLWMHRGFVTSAGTPIKNHKEIEYLLKQIMKPKQVSVIKIEAHTKGVSMEVRGNAAADEAAKNAVFLVQRAGKRTADGSEFEKRTADGSEFESPKKKAKVE

SEQ ID NO: 763 - protein, 2110 aa, synthetic construct
MPAAKRVKLDGGDKKYSIGLDIGTNSVGWAVITDEYKVPSKKFKVLGNTDRHSIKKNLIGALLFDSGETAEATRLKRTARRRYTRRKNRICYLQEIFSNEMAKVDDSFFHRLEESFLVEEDKKHERHPIFGNIVDEVAYHEKYPTIYHLRKKLVDSTDKADLRLIYLALAHMIKFRGHFLIEGDLNPDNSDVDKLFIQLVQTYNQLFEENPINASGVDAKAILSARLSKSRRLENLIAQLPGEKKNGLFGNLIALSLGLTPNFKSNFDLAEDAKLQLSKDTYDDDLDNLLAQIGDQYADLFLAAKNLSDAILLSDILRVNTEITKAPLSASMIKRYDEHHQDLTLLKALVRQQLPEKYKEIFFDQSKNGYAGYIDGGASQEEFYKFIKPILEKMDGTEELLVKLNREDLLRKQRTFDNGSIPHQIHLGELHAILRRQEDFYPFLKDNREKIEKILTFRIPYYVGPLARGNSRFAWMTRKSEETITPWNFEEVVDKGASAQSFIERMTNFDKNLPNEKVLPKHSLLYEYFTVYNELTKVKYVTEGMRKPAFLSGEQKKAIVDLLFKTNRKVTVKQLKEDYFKKIECFDSVEISGVEDRFNASLGTYHDLLKIIKDKDFLDNEENEDILEDIVLTLTLFEDREMIEERLKTYAHLFDDKVMKQLKRRRYTGWGRLSRKLINGIRDKQSGKTILDFLKSDGFANRNFMQLIHDDSLTFKEDIQKAQVSGQGDSLHEHIANLAGSPAIKKGILQTVKVVDELVKVMGRHKPENIVIEMARENQTTQKGQKNSRERMKRIEEGIKELGSQILKEHPVENTQLQNEKLYLYYLQNGRDMYVDQELDINRLSDYDVDHIVPQSFLKDDSIDNKVLTRSDKARGKSDNVPSEEVVKKMKNYWRQLLNAKLITQRKFDNLTKAERGGLSELDKAGFIKRQLVETRQITKHVAQILDSRMNTKYDENDKLIREVKVITLKSKLVSDFRKDFQFYKVREINNYHHAHDAYLNAVVGTALIKKYPKLESEFVYGDYKVYDVRKMIAKSEQEIGKATAKYFFYSNIMNFFKTEITLANGEIRKRPLIETNGETGEIVWDKGRDFATVRKVLSMPQVNIVKKTEVQTGGFSKESILPKRNSDKLIARKKDWDPKKYGGFDSPTVAYSVLVVAKVEKGKSKKLKSVKELLGITIMERSSFEKNPIDFLEAKGYKEVKKDLIIKLPKYSLFELENGRKRMLASAGELQKGNELALPSKYVNFLYLASHYEKLKGSPEDNEQKQLFVEQHKHYLDEIIEQISEFSKRVILADANLDKVLSAYNKHRDKPIREQAENIIHLFTLTNLGAPAAFKYFDTTIDRKRYTSTKEVLDATLIHQSITGLYETRIDLSQLGGDGGAEAAAKEAAAKEAAAKEAAAKALEAEAAAKEAAAKEAAAKEAAAKAGGSCQTKNTLNIDEYLLQFPDQLWASLPTDIGRMLVPPITIKIKDNASLPSIRQYPLPKDKTEGLRPLISSLENQGILIKCHSPCNTPIFPIKKAGRDEYRMIHDLRAINNIVAPLTAVVASPTTVLSNLAPSLHWFTVIDLSNAFFSVPIHKDSQYLFAFTFEGHQYTWTVLPQGFIHSPTLFNQALYQSLHKIKFKISSEICIYMDDVLIASKDRDTNLKDTAVMLQHLASEGHKVSKKKLQLCQQEVVYLGQLLTPEGRKILPDRKVTVSQFQQPTTIRQIRAFLGLVGYCRHWIPEFSIHSKFLEKQLKPDTAEPFQLDDQQVEAFNKLKHAITTAPVLVVPDPAKPFQLYTSHSEHASIAVLTQKHAGRTRPIAFLSSKFDAIESGLPPCLKACASIHRSLTQADSFILGAPLIIYTTHAICTLLQRDRSQLVTASRFSKWEADLLRPELTFVACSAVSPAHLYMQSCENNIPPHDCVLLTHTISRPRPDLSDLPIPDPDMTLFSDGSYTTGRGGAAVVMHRPVTDDFIIIHQQPGGASAQTAELLALAAACHLATDKTVNIYTDSRYAYGVVHDFGHLWMHRGFVTSAGTPIKNHKEIEYLLKQIMKPKQVSVIKIEAHTKGVSMEVRGNAAADEAAKNAVFLVQRAGKRTADGSEFEKRTADGSEFESPKKKAKVE

SEQ ID NO: 764 - protein, 2073 aa, synthetic construct
MPAAKRVKLDGGDKKYSIGLDIGTNSVGWAVITDEYKVPSKKFKVLGNTDRHSIKKNLIGALLFDSGETAEATRLKRTARRRYTRRKNRICYLQEIFSNEMAKVDDSFFHRLEESFLVEEDKKHERHPIFGNIVDEVAYHEKYPTIYHLRKKLVDSTDKADLRLIYLALAHMIKFRGHFLIEGDLNPDNSDVDKLFIQLVQTYNQLFEENPINASGVDAKAILSARLSKSRRLENLIAQLPGEKKNGLFGNLIALSLGLTPNFKSNFDLAEDAKLQLSKDTYDDDLDNLLAQIGDQYADLFLAAKNLSDAILLSDILRVNTEITKAPLSASMIKRYDEHHQDLTLLKALVRQQLPEKYKEIFFDQSKNGYAGYIDGGASQEEFYKFIKPILEKMDGTEELLVKLNREDLLRKQRTFDNGSIPHQIHLGELHAILRRQEDFYPFLKDNREKIEKILTFRIPYYVGPLARGNSRFAWMTRKSEETITPWNFEEVVDKGASAQSFIERMTNFDKNLPNEKVLPKHSLLYEYFTVYNELTKVKYVTEGMRKPAFLSGEQKKAIVDLLFKTNRKVTVKQLKEDYFKKIECFDSVEISGVEDRFNASLGTYHDLLKIIKDKDFLDNEENEDILEDIVLTLTLFEDREMIEERLKTYAHLFDDKVMKQLKRRRYTGWGRLSRKLINGIRDKQSGKTILDFLKSDGFANRNFMQLIHDDSLTFKEDIQKAQVSGQGDSLHEHIANLAGSPAIKKGILQTVKVVDELVKVMGRHKPENIVIEMARENQTTQKGQKNSRERMKRIEEGIKELGSQILKEHPVENTQLQNEKLYLYYLQNGRDMYVDQELDINRLSDYDVDHIVPQSFLKDDSIDNKVLTRSDKARGKSDNVPSEEVVKKMKNYWRQLLNAKLITQRKFDNLTKAERGGLSELDKAGFIKRQLVETRQITKHVAQILDSRMNTKYDENDKLIREVKVITLKSKLVSDFRKDFQFYKVREINNYHHAHDAYLNAVVGTALIKKYPKLESEFVYGDYKVYDVRKMIAKSEQEIGKATAKYFFYSNIMNFFKTEITLANGEIRKRPLIETNGETGEIVWDKGRDFATVRKVLSMPQVNIVKKTEVQTGGFSKESILPKRNSDKLIARKKDWDPKKYGGFDSPTVAYSVLVVAKVEKGKSKKLKSVKELLGITIMERSSFEKNPIDFLEAKGYKEVKKDLIIKLPKYSLFELENGRKRMLASAGELQKGNELALPSKYVNFLYLASHYEKLKGSPEDNEQKQLFVEQHKHYLDEIIEQISEFSKRVILADANLDKVLSAYNKHRDKPIREQAENIIHLFTLTNLGAPAAFKYFDTTIDRKRYTSTKEVLDATLIHQSITGLYETRIDLSQLGGDGGGSSGGSGGGGGSCQTKNTLNIDEYLLQFPDQLWASLPTDIGRMLVPPITIKIKDNASLPSIRQYPLPKDKTEGLRPLISSLENQGILIKCHSPCNTPIFPIKKAGRDEYRMIHDLRAINNIVAPLTAVVASPTTVLSNLAPSLHWFTVIDLSNAFFSVPIHKDSQYLFAFTFEGHQYTWTVLPQGFIHSPTLFNQALYQSLHKIKFKISSEICIYMDDVLIASKDRDTNLKDTAVMLQHLASEGHKVSKKKLQLCQQEVVYLGQLLTPEGRKILPDRKVTVSQFQQPTTIRQIRAFLGLVGYCRHWIPEFSIHSKFLEKQLKPDTAEPFQLDDQQVEAFNKLKHAITTAPVLVVPDPAKPFQLYTSHSEHASIAVLTQKHAGRTRPIAFLSSKFDAIESGLPPCLKACASIHRSLTQADSFILGAPLIIYTTHAICTLLQRDRSQLVTASRFSKWEADLLRPELTFVACSAVSPAHLYMQSCENNIPPHDCVLLTHTISRPRPDLSDLPIPDPDMTLFSDGSYTTGRGGAAVVMHRPVTDDFIIIHQQPGGASAQTAELLALAAACHLATDKTVNIYTDSRYAYGVVHDFGHLWMHRGFVTSAGTPIKNHKEIEYLLKQIMKPKQVSVIKIEAHTKGVSMEVRGNAAADEAAKNAVFLVQRAGKRTADGSEFEKRTADGSEFESPKKKAKVE

SEQ ID NO: 765 - protein, 2087 aa, synthetic construct
MPAAKRVKLDGGDKKYSIGLDIGTNSVGWAVITDEYKVPSKKFKVLGNTDRHSIKKNLIGALLFDSGETAEATRLKRTARRRYTRRKNRICYLQEIFSNEMAKVDDSFFHRLEESFLVEEDKKHERHPIFGNIVDEVAYHEKYPTIYHLRKKLVDSTDKADLRLIYLALAHMIKFRGHFLIEGDLNPDNSDVDKLFIQLVQTYNQLFEENPINASGVDAKAILSARLSKSRRLENLIAQLPGEKKNGLFGNLIALSLGLTPNFKSNFDLAEDAKLQLSKDTYDDDLDNLLAQIGDQYADLFLAAKNLSDAILLSDILRVNTEITKAPLSASMIKRYDEHHQDLTLLKALVRQQLPEKYKEIFFDQSKNGYAGYIDGGASQEEFYKFIKPILEKMDGTEELLVKLNREDLLRKQRTFDNGSIPHQIHLGELHAILRRQEDFYPFLKDNREKIEKILTFRIPYYVGPLARGNSRFAWMTRKSEETITPWNFEEVVDKGASAQSFIERMTNFDKNLPNEKVLPKHSLLYEYFTVYNELTKVKYVTEGMRKPAFLSGEQKKAIVDLLFKTNRKVTVKQLKEDYFKKIECFDSVEISGVEDRFNASLGTYHDLLKIIKDKDFLDNEENEDILEDIVLTLTLFEDREMIEERLKTYAHLFDDKVMKQLKRRRYTGWGRLSRKLINGIRDKQSGKTILDFLKSDGFANRNFMQLIHDDSLTFKEDIQKAQVSGQGDSLHEHIANLAGSPAIKKGILQTVKVVDELVKVMGRHKPENIVIEMARENQTTQKGQKNSRERMKRIEEGIKELGSQILKEHPVENTQLQNEKLYLYYLQNGRDMYVDQELDINRLSDYDVDHIVPQSFLKDDSIDNKVLTRSDKARGKSDNVPSEEVVKKMKNYWRQLLNAKLITQRKFDNLTKAERGGLSELDKAGFIKRQLVETRQITKHVAQILDSRMNTKYDENDKLIREVKVITLKSKLVSDFRKDFQFYKVREINNYHHAHDAYLNAVVGTALIKKYPKLESEFVYGDYKVYDVRKMIAKSEQEIGKATAKYFFYSNIMNFFKTEITLANGEIRKRPLIETNGETGEIVWDKGRDFATVRKVLSMPQVNIVKKTEVQTGGFSKESILPKRNSDKLIARKKDWDPKKYGGFDSPTVAYSVLVVAKVEKGKSKKLKSVKELLGITIMERSSFEKNPIDFLEAKGYKEVKKDLIIKLPKYSLFELENGRKRMLASAGELQKGNELALPSKYVNFLYLASHYEKLKGSPEDNEQKQLFVEQHKHYLDEIIEQISEFSKRVILADANLDKVLSAYNKHRDKPIREQAENIIHLFTLTNLGAPAAFKYFDTTIDRKRYTSTKEVLDATLIHQSITGLYETRIDLSQLGGDGGEAAAKGGSPAPGGVPWILKKPLELTIKLDLEEQQGTLLNNSILSKKGKEELKQLFEKYSALWQSWENQVGHRRIRPHKIATGTVKPTPQKQYHINPKAKPDIQIVINDLLKQGVLIQKESTMNTPVYPVPKPNGRWRMVLDYRAVNKVTPLIAVQNQHSYGILGSLFKGRYKTTIDLSNGFWAHPIVPEDYWITAFTWQGKQYCWTVLPQGFLNSPGLFTGDVVDLLQGIPNVEVYVDDVYISHDSEKEHLEYLDILFNRLKEAGYIISLKKSNIANSIVDFLGFQITNEGRGLTDTFKEKLENITAPTTLKQLQSILGLLNFARNFIPDFTELIAPLYALIPKSTKNYVPWQIEHSTTLETLITKLNGAEYLQGRKGDKTLIMKVNASYTTGYIRYYNEGEKKPISYVSIVFSKTELKFTELEKLLTTVHKGLLKALDLSMGQNIHVYSPIVSMQNIQKTPQTAKKALASRWLSWLSYLEDPRIRFFYDPQMPALKDLPAVDTGKDNKKHPSNFQHIFYTDGSAITSPTKEGHLNAGMGIVYFINKDGNLQKQQEWSISLGNHTAQFAEIAAFEFALKKCLPLGGNILVVTDSNYVAKAYNEELDVWASNGFVNNRKKPLKHISKWKSVADLKRLRPDVVVTHEPGHQKLDSSPHAYGNNLADQLATQASFKVHAGKRTADGSEFEKRTADGSEFESPKKKAKVE

SEQ ID NO: 766 - protein, 2085 aa, synthetic construct
MPAAKRVKLDGGDKKYSIGLDIGTNSVGWAVITDEYKVPSKKFKVLGNTDRHSIKKNLIGALLFDSGETAEATRLKRTARRRYTRRKNRICYLQEIFSNEMAKVDDSFFHRLEESFLVEEDKKHERHPIFGNIVDEVAYHEKYPTIYHLRKKLVDSTDKADLRLIYLALAHMIKFRGHFLIEGDLNPDNSDVDKLFIQLVQTYNQLFEENPINASGVDAKAILSARLSKSRRLENLIAQLPGEKKNGLFGNLIALSLGLTPNFKSNFDLAEDAKLQLSKDTYDDDLDNLLAQIGDQYADLFLAAKNLSDAILLSDILRVNTEITKAPLSASMIKRYDEHHQDLTLLKALVRQQLPEKYKEIFFDQSKNGYAGYIDGGASQEEFYKFIKPILEKMDGTEELLVKLNREDLLRKQRTFDNGSIPHQIHLGELHAILRRQEDFYPFLKDNREKIEKILTFRIPYYVGPLARGNSRFAWMTRKSEETITPWNFEEVVDKGASAQSFIERMTNFDKNLPNEKVLPKHSLLYEYFTVYNELTKVKYVTEGMRKPAFLSGEQKKAIVDLLFKTNRKVTVKQLKEDYFKKIECFDSVEISGVEDRFNASLGTYHDLLKIIKDKDFLDNEENEDILEDIVLTLTLFEDREMIEERLKTYAHLFDDKVMKQLKRRRYTGWGRLSRKLINGIRDKQSGKTILDFLKSDGFANRNFMQLIHDDSLTFKEDIQKAQVSGQGDSLHEHIANLAGSPAIKKGILQTVKVVDELVKVMGRHKPENIVIEMARENQTTQKGQKNSRERMKRIEEGIKELGSQILKEHPVENTQLQNEKLYLYYLQNGRDMYVDQELDINRLSDYDVDHIVPQSFLKDDSIDNKVLTRSDKARGKSDNVPSEEVVKKMKNYWRQLLNAKLITQRKFDNLTKAERGGLSELDKAGFIKRQLVETRQITKHVAQILDSRMNTKYDENDKLIREVKVITLKSKLVSDFRKDFQFYKVREINNYHHAHDAYLNAVVGTALIKKYPKLESEFVYGDYKVYDVRKMIAKSEQEIGKATAKYFFYSNIMNFFKTEITLANGEIRKRPLIETNGETGEIVWDKGRDFATVRKVLSMPQVNIVKKTEVQTGGFSKESILPKRNSDKLIARKKDWDPKKYGGFDSPTVAYSVLVVAKVEKGKSKKLKSVKELLGITIMERSSFEKNPIDFLEAKGYKEVKKDLIIKLPKYSLFELENGRKRMLASAGELQKGNELALPSKYVNFLYLASHYEKLKGSPEDNEQKQLFVEQHKHYLDEIIEQISEFSKRVILADANLDKVLSAYNKHRDKPIREQAENIIHLFTLTNLGAPAAFKYFDTTIDRKRYTSTKEVLDATLIHQSITGLYETRIDLSQLGGDGGGSSGGGGGSGGVPWILKKPLELTIKLDLEEQQGTLLNNSILSKKGKEELKQLFEKYSALWQSWENQVGHRRIRPHKIATGTVKPTPQKQYHINPKAKPDIQIVINDLLKQGVLIQKESTMNTPVYPVPKPNGRWRMVLDYRAVNKVTPLIAVQNQHSYGILGSLFKGRYKTTIDLSNGFWAHPIVPEDYWITAFTWQGKQYCWTVLPQGFLNSPGLFTGDVVDLLQGIPNVEVYVDDVYISHDSEKEHLEYLDILFNRLKEAGYIISLKKSNIANSIVDFLGFQITNEGRGLTDTFKEKLENITAPTTLKQLQSILGLLNFARNFIPDFTELIAPLYALIPKSTKNYVPWQIEHSTTLETLITKLNGAEYLQGRKGDKTLIMKVNASYTTGYIRYYNEGEKKPISYVSIVFSKTELKFTELEKLLTTVHKGLLKALDLSMGQNIHVYSPIVSMQNIQKTPQTAKKALASRWLSWLSYLEDPRIRFFYDPQMPALKDLPAVDTGKDNKKHPSNFQHIFYTDGSAITSPTKEGHLNAGMGIVYFINKDGNLQKQQEWSISLGNHTAQFAEIAAFEFALKKCLPLGGNILVVTDSNYVAKAYNEELDVWASNGFVNNRKKPLKHISKWKSVADLKRLRPDVVVTHEPGHQKLDSSPHAYGNNLADQLATQASFKVHAGKRTADGSEFEKRTADGSEFESPKKKAKVE

SEQ ID NO: 767 - protein, 2087 aa, synthetic construct
MPAAKRVKLDGGDKKYSIGLDIGTNSVGWAVITDEYKVPSKKFKVLGNTDRHSIKKNLIGALLFDSGETAEATRLKRTARRRYTRRKNRICYLQEIFSNEMAKVDDSFFHRLEESFLVEEDKKHERHPIFGNIVDEVAYHEKYPTIYHLRKKLVDSTDKADLRLIYLALAHMIKFRGHFLIEGDLNPDNSDVDKLFIQLVQTYNQLFEENPINASGVDAKAILSARLSKSRRLENLIAQLPGEKKNGLFGNLIALSLGLTPNFKSNFDLAEDAKLQLSKDTYDDDLDNLLAQIGDQYADLFLAAKNLSDAILLSDILRVNTEITKAPLSASMIKRYDEHHQDLTLLKALVRQQLPEKYKEIFFDQSKNGYAGYIDGGASQEEFYKFIKPILEKMDGTEELLVKLNREDLLRKQRTFDNGSIPHQIHLGELHAILRRQEDFYPFLKDNREKIEKILTFRIPYYVGPLARGNSRFAWMTRKSEETITPWNFEEVVDKGASAQSFIERMTNFDKNLPNEKVLPKHSLLYEYFTVYNELTKVKYVTEGMRKPAFLSGEQKKAIVDLLFKTNRKVTVKQLKEDYFKKIECFDSVEISGVEDRFNASLGTYHDLLKIIKDKDFLDNEENEDILEDIVLTLTLFEDREMIEERLKTYAHLFDDKVMKQLKRRRYTGWGRLSRKLINGIRDKQSGKTILDFLKSDGFANRNFMQLIHDDSLTFKEDIQKAQVSGQGDSLHEHIANLAGSPAIKKGILQTVKVVDELVKVMGRHKPENIVIEMARENQTTQKGQKNSRERMKRIEEGIKELGSQILKEHPVENTQLQNEKLYLYYLQNGRDMYVDQELDINRLSDYDVDHIVPQSFLKDDSIDNKVLTRSDKARGKSDNVPSEEVVKKMKNYWRQLLNAKLITQRKFDNLTKAERGGLSELDKAGFIKRQLVETRQITKHVAQILDSRMNTKYDENDKLIREVKVITLKSKLVSDFRKDFQFYKVREINNYHHAHDAYLNAVVGTALIKKYPKLESEFVYGDYKVYDVRKMIAKSEQEIGKATAKYFFYSNIMNFFKTEITLANGEIRKRPLIETNGETGEIVWDKGRDFATVRKVLSMPQVNIVKKTEVQTGGFSKESILPKRNSDKLIARKKDWDPKKYGGFDSPTVAYSVLVVAKVEKGKSKKLKSVKELLGITIMERSSFEKNPIDFLEAKGYKEVKKDLIIKLPKYSLFELENGRKRMLASAGELQKGNELALPSKYVNFLYLASHYEKLKGSPEDNEQKQLFVEQHKHYLDEIIEQISEFSKRVILADANLDKVLSAYNKHRDKPIREQAENIIHLFTLTNLGAPAAFKYFDTTIDRKRYTSTKEVLDATLIHQSITGLYETRIDLSQLGGDGGPAPEAAAKGSSGGVPWILKKPLELTIKLDLEEQQGTLLNNSILSKKGKEELKQLFEKYSALWQSWENQVGHRRIRPHKIATGTVKPTPQKQYHINPKAKPDIQIVINDLLKQGVLIQKESTMNTPVYPVPKPNGRWRMVLDYRAVNKVTPLIAVQNQHSYGILGSLFKGRYKTTIDLSNGFWAHPIVPEDYWITAFTWQGKQYCWTVLPQGFLNSPGLFTGDVVDLLQGIPNVEVYVDDVYISHDSEKEHLEYLDILFNRLKEAGYIISLKKSNIANSIVDFLGFQITNEGRGLTDTFKEKLENITAPTTLKQLQSILGLLNFARNFIPDFTELIAPLYALIPKSTKNYVPWQIEHSTTLETLITKLNGAEYLQGRKGDKTLIMKVNASYTTGYIRYYNEGEKKPISYVSIVFSKTELKFTELEKLLTTVHKGLLKALDLSMGQNIHVYSPIVSMQNIQKTPQTAKKALASRWLSWLSYLEDPRIRFFYDPQMPALKDLPAVDTGKDNKKHPSNFQHIFYTDGSAITSPTKEGHLNAGMGIVYFINKDGNLQKQQEWSISLGNHTAQFAEIAAFEFALKKCLPLGGNILVVTDSNYVAKAYNEELDVWASNGFVNNRKKPLKHISKWKSVADLKRLRPDVVVTHEPGHQKLDSSPHAYGNNLADQLATQASFKVHAGKRTADGSEFEKRTADGSEFESPKKKAKVE

SEQ ID NO: 768 - protein, 2091 aa, synthetic construct
MPAAKRVKLDGGDKKYSIGLDIGTNSVGWAVITDEYKVPSKKFKVLGNTDRHSIKKNLIGALLFDSGETAEATRLKRTARRRYTRRKNRICYLQEIFSNEMAKVDDSFFHRLEESFLVEEDKKHERHPIFGNIVDEVAYHEKYPTIYHLRKKLVDSTDKADLRLIYLALAHMIKFRGHFLIEGDLNPDNSDVDKLFIQLVQTYNQLFEENPINASGVDAKAILSARLSKSRRLENLIAQLPGEKKNGLFGNLIALSLGLTPNFKSNFDLAEDAKLQLSKDTYDDDLDNLLAQIGDQYADLFLAAKNLSDAILLSDILRVNTEITKAPLSASMIKRYDEHHQDLTLLKALVRQQLPEKYKEIFFDQSKNGYAGYIDGGASQEEFYKFIKPILEKMDGTEELLVKLNREDLLRKQRTFDNGSIPHQIHLGELHAILRRQEDFYPFLKDNREKIEKILTFRIPYYVGPLARGNSRFAWMTRKSEETITPWNFEEVVDKGASAQSFIERMTNFDKNLPNEKVLPKHSLLYEYFTVYNELTKVKYVTEGMRKPAFLSGEQKKAIVDLLFKTNRKVTVKQLKEDYFKKIECFDSVEISGVEDRFNASLGTYHDLLKIIKDKDFLDNEENEDILEDIVLTLTLFEDREMIEERLKTYAHLFDDKVMKQLKRRRYTGWGRLSRKLINGIRDKQSGKTILDFLKSDGFANRNFMQLIHDDSLTFKEDIQKAQVSGQGDSLHEHIANLAGSPAIKKGILQTVKVVDELVKVMGRHKPENIVIEMARENQTTQKGQKNSRERMKRIEEGIKELGSQILKEHPVENTQLQNEKLYLYYLQNGRDMYVDQELDINRLSDYDVDHIVPQSFLKDDSIDNKVLTRSDKARGKSDNVPSEEVVKKMKNYWRQLLNAKLITQRKFDNLTKAERGGLSELDKAGFIKRQLVETRQITKHVAQILDSRMNTKYDENDKLIREVKVITLKSKLVSDFRKDFQFYKVREINNYHHAHDAYLNAVVGTALIKKYPKLESEFVYGDYKVYDVRKMIAKSEQEIGKATAKYFFYSNIMNFFKTEITLANGEIRKRPLIETNGETGEIVWDKGRDFATVRKVLSMPQVNIVKKTEVQTGGFSKESILPKRNSDKLIARKKDWDPKKYGGFDSPTVAYSVLVVAKVEKGKSKKLKSVKELLGITIMERSSFEKNPIDFLEAKGYKEVKKDLIIKLPKYSLFELENGRKRMLASAGELQKGNELALPSKYVNFLYLASHYEKLKGSPEDNEQKQLFVEQHKHYLDEIIEQISEFSKRVILADANLDKVLSAYNKHRDKPIREQAENIIHLFTLTNLGAPAAFKYFDTTIDRKRYTSTKEVLDATLIHQSITGLYETRIDLSQLGGDGGGGGGSEAAAKGGGGSGGVPWILKKPLELTIKLDLEEQQGTLLNNSILSKKGKEELKQLFEKYSALWQSWENQVGHRRIRPHKIATGTVKPTPQKQYHINPKAKPDIQIVINDLLKQGVLIQKESTMNTPVYPVPKPNGRWRMVLDYRAVNKVTPLIAVQNQHSYGILGSLFKGRYKTTIDLSNGFWAHPIVPEDYWITAFTWQGKQYCWTVLPQGFLNSPGLFTGDVVDLLQGIPNVEVYVDDVYISHDSEKEHLEYLDILFNRLKEAGYIISLKKSNIANSIVDFLGFQITNEGRGLTDTFKEKLENITAPTTLKQLQSILGLLNFARNFIPDFTELIAPLYALIPKSTKNYVPWQIEHSTTLETLITKLNGAEYLQGRKGDKTLIMKVNASYTTGYIRYYNEGEKKPISYVSIVFSKTELKFTELEKLLTTVHKGLLKALDLSMGQNIHVYSPIVSMQNIQKTPQTAKKALASRWLSWLSYLEDPRIRFFYDPQMPALKDLPAVDTGKDNKKHPSNFQHIFYTDGSAITSPTKEGHLNAGMGIVYFINKDGNLQKQQEWSISLGNHTAQFAEIAAFEFALKKCLPLGGNILVVTDSNYVAKAYNEELDVWASNGFVNNRKKPLKHISKWKSVADLKRLRPDVVVTHEPGHQKLDSSPHAYGNNLADQLATQASFKVHAGKRTADGSEFEKRTADGSEFESPKKKAKVE

SEQ ID NO: 769 - protein, 2087 aa, synthetic construct
MPAAKRVKLDGGDKKYSIGLDIGTNSVGWAVITDEYKVPSKKFKVLGNTDRHSIKKNLIGALLFDSGETAEATRLKRTARRRYTRRKNRICYLQEIFSNEMAKVDDSFFHRLEESFLVEEDKKHERHPIFGNIVDEVAYHEKYPTIYHLRKKLVDSTDKADLRLIYLALAHMIKFRGHFLIEGDLNPDNSDVDKLFIQLVQTYNQLFEENPINASGVDAKAILSARLSKSRRLENLIAQLPGEKKNGLFGNLIALSLGLTPNFKSNFDLAEDAKLQLSKDTYDDDLDNLLAQIGDQYADLFLAAKNLSDAILLSDILRVNTEITKAPLSASMIKRYDEHHQDLTLLKALVRQQLPEKYKEIFFDQSKNGYAGYIDGGASQEEFYKFIKPILEKMDGTEELLVKLNREDLLRKQRTFDNGSIPHQIHLGELHAILRRQEDFYPFLKDNREKIEKILTFRIPYYVGPLARGNSRFAWMTRKSEETITPWNFEEVVDKGASAQSFIERMTNFDKNLPNEKVLPKHSLLYEYFTVYNELTKVKYVTEGMRKPAFLSGEQKKAIVDLLFKTNRKVTVKQLKEDYFKKIECFDSVEISGVEDRFNASLGTYHDLLKIIKDKDFLDNEENEDILEDIVLTLTLFEDREMIEERLKTYAHLFDDKVMKQLKRRRYTGWGRLSRKLINGIRDKQSGKTILDFLKSDGFANRNFMQLIHDDSLTFKEDIQKAQVSGQGDSLHEHIANLAGSPAIKKGILQTVKVVDELVKVMGRHKPENIVIEMARENQTTQKGQKNSRERMKRIEEGIKELGSQILKEHPVENTQLQNEKLYLYYLQNGRDMYVDQELDINRLSDYDVDHIVPQSFLKDDSIDNKVLTRSDKARGKSDNVPSEEVVKKMKNYWRQLLNAKLITQRKFDNLTKAERGGLSELDKAGFIKRQLVETRQITKHVAQILDSRMNTKYDENDKLIREVKVITLKSKLVSDFRKDFQFYKVREINNYHHAHDAYLNAVVGTALIKKYPKLESEFVYGDYKVYDVRKMIAKSEQEIGKATAKYFFYSNIMNFFKTEITLANGEIRKRPLIETNGETGEIVWDKGRDFATVRKVLSMPQVNIVKKTEVQTGGFSKESILPKRNSDKLIARKKDWDPKKYGGFDSPTVAYSVLVVAKVEKGKSKKLKSVKELLGITIMERSSFEKNPIDFLEAKGYKEVKKDLIIKLPKYSLFELENGRKRMLASAGELQKGNELALPSKYVNFLYLASHYEKLKGSPEDNEQKQLFVEQHKHYLDEIIEQISEFSKRVILADANLDKVLSAYNKHRDKPIREQAENIIHLFTLTNLGAPAAFKYFDTTIDRKRYTSTKEVLDATLIHQSITGLYETRIDLSQLGGDGGGGGGSSEAAAKGGVPWILKKPLELTIKLDLEEQQGTLLNNSILSKKGKEELKQLFEKYSALWQSWENQVGHRRIRPHKIATGTVKPTPQKQYHINPKAKPDIQIVINDLLKQGVLIQKESTMNTPVYPVPKPNGRWRMVLDYRAVNKVTPLIAVQNQHSYGILGSLFKGRYKTTIDLSNGFWAHPIVPEDYWITAFTWQGKQYCWTVLPQGFLNSPGLFTGDVVDLLQGIPNVEVYVDDVYISHDSEKEHLEYLDILFNRLKEAGYIISLKKSNIANSIVDFLGFQITNEGRGLTDTFKEKLENITAPTTLKQLQSILGLLNFARNFIPDFTELIAPLYALIPKSTKNYVPWQIEHSTTLETLITKLNGAEYLQGRKGDKTLIMKVNASYTTGYIRYYNEGEKKPISYVSIVFSKTELKFTELEKLLTTVHKGLLKALDLSMGQNIHVYSPIVSMQNIQKTPQTAKKALASRWLSWLSYLEDPRIRFFYDPQMPALKDLPAVDTGKDNKKHPSNFQHIFYTDGSAITSPTKEGHLNAGMGIVYFINKDGNLQKQQEWSISLGNHTAQFAEIAAFEFALKKCLPLGGNILVVTDSNYVAKAYNEELDVWASNGFVNNRKKPLKHISKWKSVADLKRLRPDVVVTHEPGHQKLDSSPHAYGNNLADQLATQASFKVHAGKRTADGSEFEKRTADGSEFESPKKKAKVE

SEQ ID NO: 770 - protein, 2087 aa, synthetic construct
MPAAKRVKLDGGDKKYSIGLDIGTNSVGWAVITDEYKVPSKKFKVLGNTDRHSIKKNLIGALLFDSGETAEATRLKRTARRRYTRRKNRICYLQEIFSNEMAKVDDSFFHRLEESFLVEEDKKHERHPIFGNIVDEVAYHEKYPTIYHLRKKLVDSTDKADLRLIYLALAHMIKFRGHFLIEGDLNPDNSDVDKLFIQLVQTYNQLFEENPINASGVDAKAILSARLSKSRRLENLIAQLPGEKKNGLFGNLIALSLGLTPNFKSNFDLAEDAKLQLSKDTYDDDLDNLLAQIGDQYADLFLAAKNLSDAILLSDILRVNTEITKAPLSASMIKRYDEHHQDLTLLKALVRQQLPEKYKEIFFDQSKNGYAGYIDGGASQEEFYKFIKPILEKMDGTEELLVKLNREDLLRKQRTFDNGSIPHQIHLGELHAILRRQEDFYPFLKDNREKIEKILTFRIPYYVGPLARGNSRFAWMTRKSEETITPWNFEEVVDKGASAQSFIERMTNFDKNLPNEKVLPKHSLLYEYFTVYNELTKVKYVTEGMRKPAFLSGEQKKAIVDLLFKTNRKVTVKQLKEDYFKKIECFDSVEISGVEDRFNASLGTYHDLLKIIKDKDFLDNEENEDILEDIVLTLTLFEDREMIEERLKTYAHLFDDKVMKQLKRRRYTGWGRLSRKLINGIRDKQSGKTILDFLKSDGFANRNFMQLIHDDSLTFKEDIQKAQVSGQGDSLHEHIANLAGSPAIKKGILQTVKVVDELVKVMGRHKPENIVIEMARENQTTQKGQKNSRERMKRIEEGIKELGSQILKEHPVENTQLQNEKLYLYYLQNGRDMYVDQELDINRLSDYDVDHIVPQSFLKDDSIDNKVLTRSDKARGKSDNVPSEEVVKKMKNYWRQLLNAKLITQRKFDNLTKAERGGLSELDKAGFIKRQLVETRQITKHVAQILDSRMNTKYDENDKLIREVKVITLKSKLVSDFRKDFQFYKVREINNYHHAHDAYLNAVVGTALIKKYPKLESEFVYGDYKVYDVRKMIAKSEQEIGKATAKYFFYSNIMNFFKTEITLANGEIRKRPLIETNGETGEIVWDKGRDFATVRKVLSMPQVNIVKKTEVQTGGFSKESILPKRNSDKLIARKKDWDPKKYGGFDSPTVAYSVLVVAKVEKGKSKKLKSVKELLGITIMERSSFEKNPIDFLEAKGYKEVKKDLIIKLPKYSLFELENGRKRMLASAGELQKGNELALPSKYVNFLYLASHYEKLKGSPEDNEQKQLFVEQHKHYLDEIIEQISEFSKRVILADANLDKVLSAYNKHRDKPIREQAENIIHLFTLTNLGAPAAFKYFDTTIDRKRYTSTKEVLDATLIHQSITGLYETRIDLSQLGGDGGGGGEAAAKGSSGGVPWILKKPLELTIKLDLEEQQGTLLNNSILSKKGKEELKQLFEKYSALWQSWENQVGHRRIRPHKIATGTVKPTPQKQYHINPKAKPDIQIVINDLLKQGVLIQKESTMNTPVYPVPKPNGRWRMVLDYRAVNKVTPLIAVQNQHSYGILGSLFKGRYKTTIDLSNGFWAHPIVPEDYWITAFTWQGKQYCWTVLPQGFLNSPGLFTGDVVDLLQGIPNVEVYVDDVYISHDSEKEHLEYLDILFNRLKEAGYIISLKKSNIANSIVDFLGFQITNEGRGLTDTFKEKLENITAPTTLKQLQSILGLLNFARNFIPDFTELIAPLYALIPKSTKNYVPWQIEHSTTLETLITKLNGAEYLQGRKGDKTLIMKVNASYTTGYIRYYNEGEKKPISYVSIVFSKTELKFTELEKLLTTVHKGLLKALDLSMGQNIHVYSPIVSMQNIQKTPQTAKKALASRWLSWLSYLEDPRIRFFYDPQMPALKDLPAVDTGKDNKKHPSNFQHIFYTDGSAITSPTKEGHLNAGMGIVYFINKDGNLQKQQEWSISLGNHTAQFAEIAAFEFALKKCLPLGGNILVVTDSNYVAKAYNEELDVWASNGFVNNRKKPLKHISKWKSVADLKRLRPDVVVTHEPGHQKLDSSPHAYGNNLADQLATQASFKVHAGKRTADGSEFEKRTADGSEFESPKKKAKVE

SEQ ID NO: 771 - protein, 2082 aa, synthetic construct
MPAAKRVKLDGGDKKYSIGLDIGTNSVGWAVITDEYKVPSKKFKVLGNTDRHSIKKNLIGALLFDSGETAEATRLKRTARRRYTRRKNRICYLQEIFSNEMAKVDDSFFHRLEESFLVEEDKKHERHPIFGNIVDEVAYHEKYPTIYHLRKKLVDSTDKADLRLIYLALAHMIKFRGHFLIEGDLNPDNSDVDKLFIQLVQTYNQLFEENPINASGVDAKAILSARLSKSRRLENLIAQLPGEKKNGLFGNLIALSLGLTPNFKSNFDLAEDAKLQLSKDTYDDDLDNLLAQIGDQYADLFLAAKNLSDAILLSDILRVNTEITKAPLSASMIKRYDEHHQDLTLLKALVRQQLPEKYKEIFFDQSKNGYAGYIDGGASQEEFYKFIKPILEKMDGTEELLVKLNREDLLRKQRTFDNGSIPHQIHLGELHAILRRQEDFYPFLKDNREKIEKILTFRIPYYVGPLARGNSRFAWMTRKSEETITPWNFEEVVDKGASAQSFIERMTNFDKNLPNEKVLPKHSLLYEYFTVYNELTKVKYVTEGMRKPAFLSGEQKKAIVDLLFKTNRKVTVKQLKEDYFKKIECFDSVEISGVEDRFNASLGTYHDLLKIIKDKDFLDNEENEDILEDIVLTLTLFEDREMIEERLKTYAHLFDDKVMKQLKRRRYTGWGRLSRKLINGIRDKQSGKTILDFLKSDGFANRNFMQLIHDDSLTFKEDIQKAQVSGQGDSLHEHIANLAGSPAIKKGILQTVKVVDELVKVMGRHKPENIVIEMARENQTTQKGQKNSRERMKRIEEGIKELGSQILKEHPVENTQLQNEKLYLYYLQNGRDMYVDQELDINRLSDYDVDHIVPQSFLKDDSIDNKVLTRSDKARGKSDNVPSEEVVKKMKNYWRQLLNAKLITQRKFDNLTKAERGGLSELDKAGFIKRQLVETRQITKHVAQILDSRMNTKYDENDKLIREVKVITLKSKLVSDFRKDFQFYKVREINNYHHAHDAYLNAVVGTALIKKYPKLESEFVYGDYKVYDVRKMIAKSEQEIGKATAKYFFYSNIMNFFKTEITLANGEIRKRPLIETNGETGEIVWDKGRDFATVRKVLSMPQVNIVKKTEVQTGGFSKESILPKRNSDKLIARKKDWDPKKYGGFDSPTVAYSVLVVAKVEKGKSKKLKSVKELLGITIMERSSFEKNPIDFLEAKGYKEVKKDLIIKLPKYSLFELENGRKRMLASAGELQKGNELALPSKYVNFLYLASHYEKLKGSPEDNEQKQLFVEQHKHYLDEIIEQISEFSKRVILADANLDKVLSAYNKHRDKPIREQAENIIHLFTLTNLGAPAAFKYFDTTIDRKRYTSTKEVLDATLIHQSITGLYETRIDLSQLGGDGGGSSGGGGGVPWILKKPLELTIKLDLEEQQGTLLNNSILSKKGKEELKQLFEKYSALWQSWENQVGHRRIRPHKIATGTVKPTPQKQYHINPKAKPDIQIVINDLLKQGVLIQKESTMNTPVYPVPKPNGRWRMVLDYRAVNKVTPLIAVQNQHSYGILGSLFKGRYKTTIDLSNGFWAHPIVPEDYWITAFTWQGKQYCWTVLPQGFLNSPGLFTGDVVDLLQGIPNVEVYVDDVYISHDSEKEHLEYLDILFNRLKEAGYIISLKKSNIANSIVDFLGFQITNEGRGLTDTFKEKLENITAPTTLKQLQSILGLLNFARNFIPDFTELIAPLYALIPKSTKNYVPWQIEHSTTLETLITKLNGAEYLQGRKGDKTLIMKVNASYTTGYIRYYNEGEKKPISYVSIVFSKTELKFTELEKLLTTVHKGLLKALDLSMGQNIHVYSPIVSMQNIQKTPQTAKKALASRWLSWLSYLEDPRIRFFYDPQMPALKDLPAVDTGKDNKKHPSNFQHIFYTDGSAITSPTKEGHLNAGMGIVYFINKDGNLQKQQEWSISLGNHTAQFAEIAAFEFALKKCLPLGGNILVVTDSNYVAKAYNEELDVWASNGFVNNRKKPLKHISKWKSVADLKRLRPDVVVTHEPGHQKLDSSPHAYGNNLADQLATQASFKVHAGKRTADGSEFEKRTADGSEFESPKKKAKVE

SEQ ID NO: 772 - protein, 2087 aa, synthetic construct
MPAAKRVKLDGGDKKYSIGLDIGTNSVGWAVITDEYKVPSKKFKVLGNTDRHSIKKNLIGALLFDSGETAEATRLKRTARRRYTRRKNRICYLQEIFSNEMAKVDDSFFHRLEESFLVEEDKKHERHPIFGNIVDEVAYHEKYPTIYHLRKKLVDSTDKADLRLIYLALAHMIKFRGHFLIEGDLNPDNSDVDKLFIQLVQTYNQLFEENPINASGVDAKAILSARLSKSRRLENLIAQLPGEKKNGLFGNLIALSLGLTPNFKSNFDLAEDAKLQLSKDTYDDDLDNLLAQIGDQYADLFLAAKNLSDAILLSDILRVNTEITKAPLSASMIKRYDEHHQDLTLLKALVRQQLPEKYKEIFFDQSKNGYAGYIDGGASQEEFYKFIKPILEKMDGTEELLVKLNREDLLRKQRTFDNGSIPHQIHLGELHAILRRQEDFYPFLKDNREKIEKILTFRIPYYVGPLARGNSRFAWMTRKSEETITPWNFEEVVDKGASAQSFIERMTNFDKNLPNEKVLPKHSLLYEYFTVYNELTKVKYVTEGMRKPAFLSGEQKKAIVDLLFKTNRKVTVKQLKEDYFKKIECFDSVEISGVEDRFNASLGTYHDLLKIIKDKDFLDNEENEDILEDIVLTLTLFEDREMIEERLKTYAHLFDDKVMKQLKRRRYTGWGRLSRKLINGIRDKQSGKTILDFLKSDGFANRNFMQLIHDDSLTFKEDIQKAQVSGQGDSLHEHIANLAGSPAIKKGILQTVKVVDELVKVMGRHKPENIVIEMARENQTTQKGQKNSRERMKRIEEGIKELGSQILKEHPVENTQLQNEKLYLYYLQNGRDMYVDQELDINRLSDYDVDHIVPQSFLKDDSIDNKVLTRSDKARGKSDNVPSEEVVKKMKNYWRQLLNAKLITQRKFDNLTKAERGGLSELDKAGFIKRQLVETRQITKHVAQILDSRMNTKYDENDKLIREVKVITLKSKLVSDFRKDFQFYKVREINNYHHAHDAYLNAVVGTALIKKYPKLESEFVYGDYKVYDVRKMIAKSEQEIGKATAKYFFYSNIMNFFKTEITLANGEIRKRPLIETNGETGEIVWDKGRDFATVRKVLSMPQVNIVKKTEVQTGGFSKESILPKRNSDKLIARKKDWDPKKYGGFDSPTVAYSVLVVAKVEKGKSKKLKSVKELLGITIMERSSFEKNPIDFLEAKGYKEVKKDLIIKLPKYSLFELENGRKRMLASAGELQKGNELALPSKYVNFLYLASHYEKLKGSPEDNEQKQLFVEQHKHYLDEIIEQISEFSKRVILADANLDKVLSAYNKHRDKPIREQAENIIHLFTLTNLGAPAAFKYFDTTIDRKRYTSTKEVLDATLIHQSITGLYETRIDLSQLGGDGGEAAAKPAPGGSGGVPWILKKPLELTIKLDLEEQQGTLLNNSILSKKGKEELKQLFEKYSALWQSWENQVGHRRIRPHKIATGTVKPTPQKQYHINPKAKPDIQIVINDLLKQGVLIQKESTMNTPVYPVPKPNGRWRMVLDYRAVNKVTPLIAVQNQHSYGILGSLFKGRYKTTIDLSNGFWAHPIVPEDYWITAFTWQGKQYCWTVLPQGFLNSPGLFTGDVVDLLQGIPNVEVYVDDVYISHDSEKEHLEYLDILFNRLKEAGYIISLKKSNIANSIVDFLGFQITNEGRGLTDTFKEKLENITAPTTLKQLQSILGLLNFARNFIPDFTELIAPLYALIPKSTKNYVPWQIEHSTTLETLITKLNGAEYLQGRKGDKTLIMKVNASYTTGYIRYYNEGEKKPISYVSIVFSKTELKFTELEKLLTTVHKGLLKALDLSMGQNIHVYSPIVSMQNIQKTPQTAKKALASRWLSWLSYLEDPRIRFFYDPQMPALKDLPAVDTGKDNKKHPSNFQHIFYTDGSAITSPTKEGHLNAGMGIVYFINKDGNLQKQQEWSISLGNHTAQFAEIAAFEFALKKCLPLGGNILVVTDSNYVAKAYNEELDVWASNGFVNNRKKPLKHISKWKSVADLKRLRPDVVVTHEPGHQKLDSSPHAYGNNLADQLATQASFKVHAGKRTADGSEFEKRTADGSEFESPKKKAKVE

SEQ ID NO: 773 - protein, 2088 aa, synthetic construct
MPAAKRVKLDGGDKKYSIGLDIGTNSVGWAVITDEYKVPSKKFKVLGNTDRHSIKKNLIGALLFDSGETAEATRLKRTARRRYTRRKNRICYLQEIFSNEMAKVDDSFFHRLEESFLVEEDKKHERHPIFGNIVDEVAYHEKYPTIYHLRKKLVDSTDKADLRLIYLALAHMIKFRGHFLIEGDLNPDNSDVDKLFIQLVQTYNQLFEENPINASGVDAKAILSARLSKSRRLENLIAQLPGEKKNGLFGNLIALSLGLTPNFKSNFDLAEDAKLQLSKDTYDDDLDNLLAQIGDQYADLFLAAKNLSDAILLSDILRVNTEITKAPLSASMIKRYDEHHQDLTLLKALVRQQLPEKYKEIFFDQSKNGYAGYIDGGASQEEFYKFIKPILEKMDGTEELLVKLNREDLLRKQRTFDNGSIPHQIHLGELHAILRRQEDFYPFLKDNREKIEKILTFRIPYYVGPLARGNSRFAWMTRKSEETITPWNFEEVVDKGASAQSFIERMTNFDKNLPNEKVLPKHSLLYEYFTVYNELTKVKYVTEGMRKPAFLSGEQKKAIVDLLFKTNRKVTVKQLKEDYFKKIECFDSVEISGVEDRFNASLGTYHDLLKIIKDKDFLDNEENEDILEDIVLTLTLFEDREMIEERLKTYAHLFDDKVMKQLKRRRYTGWGRLSRKLINGIRDKQSGKTILDFLKSDGFANRNFMQLIHDDSLTFKEDIQKAQVSGQGDSLHEHIANLAGSPAIKKGILQTVKVVDELVKVMGRHKPENIVIEMARENQTTQKGQKNSRERMKRIEEGIKELGSQILKEHPVENTQLQNEKLYLYYLQNGRDMYVDQELDINRLSDYDVDHIVPQSFLKDDSIDNKVLTRSDKARGKSDNVPSEEVVKKMKNYWRQLLNAKLITQRKFDNLTKAERGGLSELDKAGFIKRQLVETRQITKHVAQILDSRMNTKYDENDKLIREVKVITLKSKLVSDFRKDFQFYKVREINNYHHAHDAYLNAVVGTALIKKYPKLESEFVYGDYKVYDVRKMIAKSEQEIGKATAKYFFYSNIMNFFKTEITLANGEIRKRPLIETNGETGEIVWDKGRDFATVRKVLSMPQVNIVKKTEVQTGGFSKESILPKRNSDKLIARKKDWDPKKYGGFDSPTVAYSVLVVAKVEKGKSKKLKSVKELLGITIMERSSFEKNPIDFLEAKGYKEVKKDLIIKLPKYSLFELENGRKRMLASAGELQKGNELALPSKYVNFLYLASHYEKLKGSPEDNEQKQLFVEQHKHYLDEIIEQISEFSKRVILADANLDKVLSAYNKHRDKPIREQAENIIHLFTLTNLGAPAAFKYFDTTIDRKRYTSTKEVLDATLIHQSITGLYETRIDLSQLGGDGGGSSGSSGSSGSSGGVPWILKKPLELTIKLDLEEQQGTLLNNSILSKKGKEELKQLFEKYSALWQSWENQVGHRRIRPHKIATGTVKPTPQKQYHINPKAKPDIQIVINDLLKQGVLIQKESTMNTPVYPVPKPNGRWRMVLDYRAVNKVTPLIAVQNQHSYGILGSLFKGRYKTTIDLSNGFWAHPIVPEDYWITAFTWQGKQYCWTVLPQGFLNSPGLFTGDVVDLLQGIPNVEVYVDDVYISHDSEKEHLEYLDILFNRLKEAGYIISLKKSNIANSIVDFLGFQITNEGRGLTDTFKEKLENITAPTTLKQLQSILGLLNFARNFIPDFTELIAPLYALIPKSTKNYVPWQIEHSTTLETLITKLNGAEYLQGRKGDKTLIMKVNASYTTGYIRYYNEGEKKPISYVSIVFSKTELKFTELEKLLTTVHKGLLKALDLSMGQNIHVYSPIVSMQNIQKTPQTAKKALASRWLSWLSYLEDPRIRFFYDPQMPALKDLPAVDTGKDNKKHPSNFQHIFYTDGSAITSPTKEGHLNAGMGIVYFINKDGNLQKQQEWSISLGNHTAQFAEIAAFEFALKKCLPLGGNILVVTDSNYVAKAYNEELDVWASNGFVNNRKKPLKHISKWKSVADLKRLRPDVVVTHEPGHQKLDSSPHAYGNNLADQLATQASFKVHAGKRTADGSEFEKRTADGSEFESPKKKAKVE

SEQ ID NO: 774 - protein, 2085 aa, synthetic construct
MPAAKRVKLDGGDKKYSIGLDIGTNSVGWAVITDEYKVPSKKFKVLGNTDRHSIKKNLIGALLFDSGETAEATRLKRTARRRYTRRKNRICYLQEIFSNEMAKVDDSFFHRLEESFLVEEDKKHERHPIFGNIVDEVAYHEKYPTIYHLRKKLVDSTDKADLRLIYLALAHMIKFRGHFLIEGDLNPDNSDVDKLFIQLVQTYNQLFEENPINASGVDAKAILSARLSKSRRLENLIAQLPGEKKNGLFGNLIALSLGLTPNFKSNFDLAEDAKLQLSKDTYDDDLDNLLAQIGDQYADLFLAAKNLSDAILLSDILRVNTEITKAPLSASMIKRYDEHHQDLTLLKALVRQQLPEKYKEIFFDQSKNGYAGYIDGGASQEEFYKFIKPILEKMDGTEELLVKLNREDLLRKQRTFDNGSIPHQIHLGELHAILRRQEDFYPFLKDNREKIEKILTFRIPYYVGPLARGNSRFAWMTRKSEETITPWNFEEVVDKGASAQSFIERMTNFDKNLPNEKVLPKHSLLYEYFTVYNELTKVKYVTEGMRKPAFLSGEQKKAIVDLLFKTNRKVTVKQLKEDYFKKIECFDSVEISGVEDRFNASLGTYHDLLKIIKDKDFLDNEENEDILEDIVLTLTLFEDREMIEERLKTYAHLFDDKVMKQLKRRRYTGWGRLSRKLINGIRDKQSGKTILDFLKSDGFANRNFMQLIHDDSLTFKEDIQKAQVSGQGDSLHEHIANLAGSPAIKKGILQTVKVVDELVKVMGRHKPENIVIEMARENQTTQKGQKNSRERMKRIEEGIKELGSQILKEHPVENTQLQNEKLYLYYLQNGRDMYVDQELDINRLSDYDVDHIVPQSFLKDDSIDNKVLTRSDKARGKSDNVPSEEVVKKMKNYWRQLLNAKLITQRKFDNLTKAERGGLSELDKAGFIKRQLVETRQITKHVAQILDSRMNTKYDENDKLIREVKVITLKSKLVSDFRKDFQFYKVREINNYHHAHDAYLNAVVGTALIKKYPKLESEFVYGDYKVYDVRKMIAKSEQEIGKATAKYFFYSNIMNFFKTEITLANGEIRKRPLIETNGETGEIVWDKGRDFATVRKVLSMPQVNIVKKTEVQTGGFSKESILPKRNSDKLIARKKDWDPKKYGGFDSPTVAYSVLVVAKVEKGKSKKLKSVKELLGITIMERSSFEKNPIDFLEAKGYKEVKKDLIIKLPKYSLFELENGRKRMLASAGELQKGNELALPSKYVNFLYLASHYEKLKGSPEDNEQKQLFVEQHKHYLDEIIEQISEFSKRVILADANLDKVLSAYNKHRDKPIREQAENIIHLFTLTNLGAPAAFKYFDTTIDRKRYTSTKEVLDATLIHQSITGLYETRIDLSQLGGDGGGGGGGSGSSGGVPWILKKPLELTIKLDLEEQQGTLLNNSILSKKGKEELKQLFEKYSALWQSWENQVGHRRIRPHKIATGTVKPTPQKQYHINPKAKPDIQIVINDLLKQGVLIQKESTMNTPVYPVPKPNGRWRMVLDYRAVNKVTPLIAVQNQHSYGILGSLFKGRYKTTIDLSNGFWAHPIVPEDYWITAFTWQGKQYCWTVLPQGFLNSPGLFTGDVVDLLQGIPNVEVYVDDVYISHDSEKEHLEYLDILFNRLKEAGYIISLKKSNIANSIVDFLGFQITNEGRGLTDTFKEKLENITAPTTLKQLQSILGLLNFARNFIPDFTELIAPLYALIPKSTKNYVPWQIEHSTTLETLITKLNGAEYLQGRKGDKTLIMKVNASYTTGYIRYYNEGEKKPISYVSIVFSKTELKFTELEKLLTTVHKGLLKALDLSMGQNIHVYSPIVSMQNIQKTPQTAKKALASRWLSWLSYLEDPRIRFFYDPQMPALKDLPAVDTGKDNKKHPSNFQHIFYTDGSAITSPTKEGHLNAGMGIVYFINKDGNLQKQQEWSISLGNHTAQFAEIAAFEFALKKCLPLGGNILVVTDSNYVAKAYNEELDVWASNGFVNNRKKPLKHISKWKSVADLKRLRPDVVVTHEPGHQKLDSSPHAYGNNLADQLATQASFKVHAGKRTADGSEFEKRTADGSEFESPKKKAKVE

SEQ ID NO: 775 - protein, 2085 aa, synthetic construct
MPAAKRVKLDGGDKKYSIGLDIGTNSVGWAVITDEYKVPSKKFKVLGNTDRHSIKKNLIGALLFDSGETAEATRLKRTARRRYTRRKNRICYLQEIFSNEMAKVDDSFFHRLEESFLVEEDKKHERHPIFGNIVDEVAYHEKYPTIYHLRKKLVDSTDKADLRLIYLALAHMIKFRGHFLIEGDLNPDNSDVDKLFIQLVQTYNQLFEENPINASGVDAKAILSARLSKSRRLENLIAQLPGEKKNGLFGNLIALSLGLTPNFKSNFDLAEDAKLQLSKDTYDDDLDNLLAQIGDQYADLFLAAKNLSDAILLSDILRVNTEITKAPLSASMIKRYDEHHQDLTLLKALVRQQLPEKYKEIFFDQSKNGYAGYIDGGASQEEFYKFIKPILEKMDGTEELLVKLNREDLLRKQRTFDNGSIPHQIHLGELHAILRRQEDFYPFLKDNREKIEKILTFRIPYYVGPLARGNSRFAWMTRKSEETITPWNFEEVVDKGASAQSFIERMTNFDKNLPNEKVLPKHSLLYEYFTVYNELTKVKYVTEGMRKPAFLSGEQKKAIVDLLFKTNRKVTVKQLKEDYFKKIECFDSVEISGVEDRFNASLGTYHDLLKIIKDKDFLDNEENEDILEDIVLTLTLFEDREMIEERLKTYAHLFDDKVMKQLKRRRYTGWGRLSRKLINGIRDKQSGKTILDFLKSDGFANRNFMQLIHDDSLTFKEDIQKAQVSGQGDSLHEHIANLAGSPAIKKGILQTVKVVDELVKVMGRHKPENIVIEMARENQTTQKGQKNSRERMKRIEEGIKELGSQILKEHPVENTQLQNEKLYLYYLQNGRDMYVDQELDINRLSDYDVDHIVPQSFLKDDSIDNKVLTRSDKARGKSDNVPSEEVVKKMKNYWRQLLNAKLITQRKFDNLTKAERGGLSELDKAGFIKRQLVETRQITKHVAQILDSRMNTKYDENDKLIREVKVITLKSKLVSDFRKDFQFYKVREINNYHHAHDAYLNAVVGTALIKKYPKLESEFVYGDYKVYDVRKMIAKSEQEIGKATAKYFFYSNIMNFFKTEITLANGEIRKRPLIETNGETGEIVWDKGRDFATVRKVLSMPQVNIVKKTEVQTGGFSKESILPKRNSDKLIARKKDWDPKKYGGFDSPTVAYSVLVVAKVEKGKSKKLKSVKELLGITIMERSSFEKNPIDFLEAKGYKEVKKDLIIKLPKYSLFELENGRKRMLASAGELQKGNELALPSKYVNFLYLASHYEKLKGSPEDNEQKQLFVEQHKHYLDEIIEQISEFSKRVILADANLDKVLSAYNKHRDKPIREQAENIIHLFTLTNLGAPAAFKYFDTTIDRKRYTSTKEVLDATLIHQSITGLYETRIDLSQLGGDGGGSSGGSPAPGGVPWILKKPLELTIKLDLEEQQGTLLNNSILSKKGKEELKQLFEKYSALWQSWENQVGHRRIRPHKIATGTVKPTPQKQYHINPKAKPDIQIVINDLLKQGVLIQKESTMNTPVYPVPKPNGRWRMVLDYRAVNKVTPLIAVQNQHSYGILGSLFKGRYKTTIDLSNGFWAHPIVPEDYWITAFTWQGKQYCWTVLPQGFLNSPGLFTGDVVDLLQGIPNVEVYVDDVYISHDSEKEHLEYLDILFNRLKEAGYIISLKKSNIANSIVDFLGFQITNEGRGLTDTFKEKLENITAPTTLKQLQSILGLLNFARNFIPDFTELIAPLYALIPKSTKNYVPWQIEHSTTLETLITKLNGAEYLQGRKGDKTLIMKVNASYTTGYIRYYNEGEKKPISYVSIVFSKTELKFTELEKLLTTVHKGLLKALDLSMGQNIHVYSPIVSMQNIQKTPQTAKKALASRWLSWLSYLEDPRIRFFYDPQMPALKDLPAVDTGKDNKKHPSNFQHIFYTDGSAITSPTKEGHLNAGMGIVYFINKDGNLQKQQEWSISLGNHTAQFAEIAAFEFALKKCLPLGGNILVVTDSNYVAKAYNEELDVWASNGFVNNRKKPLKHISKWKSVADLKRLRPDVVVTHEPGHQKLDSSPHAYGNNLADQLATQASFKVHAGKRTADGSEFEKRTADGSEFESPKKKAKVE

SEQ ID NO: 776 - protein, 2084 aa, synthetic construct
MPAAKRVKLDGGDKKYSIGLDIGTNSVGWAVITDEYKVPSKKFKVLGNTDRHSIKKNLIGALLFDSGETAEATRLKRTARRRYTRRKNRICYLQEIFSNEMAKVDDSFFHRLEESFLVEEDKKHERHPIFGNIVDEVAYHEKYPTIYHLRKKLVDSTDKADLRLIYLALAHMIKFRGHFLIEGDLNPDNSDVDKLFIQLVQTYNQLFEENPINASGVDAKAILSARLSKSRRLENLIAQLPGEKKNGLFGNLIALSLGLTPNFKSNFDLAEDAKLQLSKDTYDDDLDNLLAQIGDQYADLFLAAKNLSDAILLSDILRVNTEITKAPLSASMIKRYDEHHQDLTLLKALVRQQLPEKYKEIFFDQSKNGYAGYIDGGASQEEFYKFIKPILEKMDGTEELLVKLNREDLLRKQRTFDNGSIPHQIHLGELHAILRRQEDFYPFLKDNREKIEKILTFRIPYYVGPLARGNSRFAWMTRKSEETITPWNFEEVVDKGASAQSFIERMTNFDKNLPNEKVLPKHSLLYEYFTVYNELTKVKYVTEGMRKPAFLSGEQKKAIVDLLFKTNRKVTVKQLKEDYFKKIECFDSVEISGVEDRFNASLGTYHDLLKIIKDKDFLDNEENEDILEDIVLTLTLFEDREMIEERLKTYAHLFDDKVMKQLKRRRYTGWGRLSRKLINGIRDKQSGKTILDFLKSDGFANRNFMQLIHDDSLTFKEDIQKAQVSGQGDSLHEHIANLAGSPAIKKGILQTVKVVDELVKVMGRHKPENIVIEMARENQTTQKGQKNSRERMKRIEEGIKELGSQILKEHPVENTQLQNEKLYLYYLQNGRDMYVDQELDINRLSDYDVDHIVPQSFLKDDSIDNKVLTRSDKARGKSDNVPSEEVVKKMKNYWRQLLNAKLITQRKFDNLTKAERGGLSELDKAGFIKRQLVETRQITKHVAQILDSRMNTKYDENDKLIREVKVITLKSKLVSDFRKDFQFYKVREINNYHHAHDAYLNAVVGTALIKKYPKLESEFVYGDYKVYDVRKMIAKSEQEIGKATAKYFFYSNIMNFFKTEITLANGEIRKRPLIETNGETGEIVWDKGRDFATVRKVLSMPQVNIVKKTEVQTGGFSKESILPKRNSDKLIARKKDWDPKKYGGFDSPTVAYSVLVVAKVEKGKSKKLKSVKELLGITIMERSSFEKNPIDFLEAKGYKEVKKDLIIKLPKYSLFELENGRKRMLASAGELQKGNELALPSKYVNFLYLASHYEKLKGSPEDNEQKQLFVEQHKHYLDEIIEQISEFSKRVILADANLDKVLSAYNKHRDKPIREQAENIIHLFTLTNLGAPAAFKYFDTTIDRKRYTSTKEVLDATLIHQSITGLYETRIDLSQLGGDGGGGSEAAAKGGVPWILKKPLELTIKLDLEEQQGTLLNNSILSKKGKEELKQLFEKYSALWQSWENQVGHRRIRPHKIATGTVKPTPQKQYHINPKAKPDIQIVINDLLKQGVLIQKESTMNTPVYPVPKPNGRWRMVLDYRAVNKVTPLIAVQNQHSYGILGSLFKGRYKTTIDLSNGFWAHPIVPEDYWITAFTWQGKQYCWTVLPQGFLNSPGLFTGDVVDLLQGIPNVEVYVDDVYISHDSEKEHLEYLDILFNRLKEAGYIISLKKSNIANSIVDFLGFQITNEGRGLTDTFKEKLENITAPTTLKQLQSILGLLNFARNFIPDFTELIAPLYALIPKSTKNYVPWQIEHSTTLETLITKLNGAEYLQGRKGDKTLIMKVNASYTTGYIRYYNEGEKKPISYVSIVFSKTELKFTELEKLLTTVHKGLLKALDLSMGQNIHVYSPIVSMQNIQKTPQTAKKALASRWLSWLSYLEDPRIRFFYDPQMPALKDLPAVDTGKDNKKHPSNFQHIFYTDGSAITSPTKEGHLNAGMGIVYFINKDGNLQKQQEWSISLGNHTAQFAEIAAFEFALKKCLPLGGNILVVTDSNYVAKAYNEELDVWASNGFVNNRKKPLKHISKWKSVADLKRLRPDVVVTHEPGHQKLDSSPHAYGNNLADQLATQASFKVHAGKRTADGSEFEKRTADGSEFESPKKKAKVE

SEQ ID NO: 777 - protein, 2085 aa, synthetic construct
MPAAKRVKLDGGDKKYSIGLDIGTNSVGWAVITDEYKVPSKKFKVLGNTDRHSIKKNLIGALLFDSGETAEATRLKRTARRRYTRRKNRICYLQEIFSNEMAKVDDSFFHRLEESFLVEEDKKHERHPIFGNIVDEVAYHEKYPTIYHLRKKLVDSTDKADLRLIYLALAHMIKFRGHFLIEGDLNPDNSDVDKLFIQLVQTYNQLFEENPINASGVDAKAILSARLSKSRRLENLIAQLPGEKKNGLFGNLIALSLGLTPNFKSNFDLAEDAKLQLSKDTYDDDLDNLLAQIGDQYADLFLAAKNLSDAILLSDILRVNTEITKAPLSASMIKRYDEHHQDLTLLKALVRQQLPEKYKEIFFDQSKNGYAGYIDGGASQEEFYKFIKPILEKMDGTEELLVKLNREDLLRKQRTFDNGSIPHQIHLGELHAILRRQEDFYPFLKDNREKIEKILTFRIPYYVGPLARGNSRFAWMTRKSEETITPWNFEEVVDKGASAQSFIERMTNFDKNLPNEKVLPKHSLLYEYFTVYNELTKVKYVTEGMRKPAFLSGEQKKAIVDLLFKTNRKVTVKQLKEDYFKKIECFDSVEISGVEDRFNASLGTYHDLLKIIKDKDFLDNEENEDILEDIVLTLTLFEDREMIEERLKTYAHLFDDKVMKQLKRRRYTGWGRLSRKLINGIRDKQSGKTILDFLKSDGFANRNFMQLIHDDSLTFKEDIQKAQVSGQGDSLHEHIANLAGSPAIKKGILQTVKVVDELVKVMGRHKPENIVIEMARENQTTQKGQKNSRERMKRIEEGIKELGSQILKEHPVENTQLQNEKLYLYYLQNGRDMYVDQELDINRLSDYDVDHIVPQSFLKDDSIDNKVLTRSDKARGKSDNVPSEEVVKKMKNYWRQLLNAKLITQRKFDNLTKAERGGLSELDKAGFIKRQLVETRQITKHVAQILDSRMNTKYDENDKLIREVKVITLKSKLVSDFRKDFQFYKVREINNYHHAHDAYLNAVVGTALIKKYPKLESEFVYGDYKVYDVRKMIAKSEQEIGKATAKYFFYSNIMNFFKTEITLANGEIRKRPLIETNGETGEIVWDKGRDFATVRKVLSMPQVNIVKKTEVQTGGFSKESILPKRNSDKLIARKKDWDPKKYGGFDSPTVAYSVLVVAKVEKGKSKKLKSVKELLGITIMERSSFEKNPIDFLEAKGYKEVKKDLIIKLPKYSLFELENGRKRMLASAGELQKGNELALPSKYVNFLYLASHYEKLKGSPEDNEQKQLFVEQHKHYLDEIIEQISEFSKRVILADANLDKVLSAYNKHRDKPIREQAENIIHLFTLTNLGAPAAFKYFDTTIDRKRYTSTKEVLDATLIHQSITGLYETRIDLSQLGGDGGGGGGSSPAPGGVPWILKKPLELTIKLDLEEQQGTLLNNSILSKKGKEELKQLFEKYSALWQSWENQVGHRRIRPHKIATGTVKPTPQKQYHINPKAKPDIQIVINDLLKQGVLIQKESTMNTPVYPVPKPNGRWRMVLDYRAVNKVTPLIAVQNQHSYGILGSLFKGRYKTTIDLSNGFWAHPIVPEDYWITAFTWQGKQYCWTVLPQGFLNSPGLFTGDVVDLLQGIPNVEVYVDDVYISHDSEKEHLEYLDILFNRLKEAGYIISLKKSNIANSIVDFLGFQITNEGRGLTDTFKEKLENITAPTTLKQLQSILGLLNFARNFIPDFTELIAPLYALIPKSTKNYVPWQIEHSTTLETLITKLNGAEYLQGRKGDKTLIMKVNASYTTGYIRYYNEGEKKPISYVSIVFSKTELKFTELEKLLTTVHKGLLKALDLSMGQNIHVYSPIVSMQNIQKTPQTAKKALASRWLSWLSYLEDPRIRFFYDPQMPALKDLPAVDTGKDNKKHPSNFQHIFYTDGSAITSPTKEGHLNAGMGIVYFINKDGNLQKQQEWSISLGNHTAQFAEIAAFEFALKKCLPLGGNILVVTDSNYVAKAYNEELDVWASNGFVNNRKKPLKHISKWKSVADLKRLRPDVVVTHEPGHQKLDSSPHAYGNNLADQLATQASFKVHAGKRTADGSEFEKRTADGSEFESPKKKAKVE

SEQ ID NO: 778 - protein, 2091 aa, synthetic construct
MPAAKRVKLDGGDKKYSIGLDIGTNSVGWAVITDEYKVPSKKFKVLGNTDRHSIKKNLIGALLFDSGETAEATRLKRTARRRYTRRKNRICYLQEIFSNEMAKVDDSFFHRLEESFLVEEDKKHERHPIFGNIVDEVAYHEKYPTIYHLRKKLVDSTDKADLRLIYLALAHMIKFRGHFLIEGDLNPDNSDVDKLFIQLVQTYNQLFEENPINASGVDAKAILSARLSKSRRLENLIAQLPGEKKNGLFGNLIALSLGLTPNFKSNFDLAEDAKLQLSKDTYDDDLDNLLAQIGDQYADLFLAAKNLSDAILLSDILRVNTEITKAPLSASMIKRYDEHHQDLTLLKALVRQQLPEKYKEIFFDQSKNGYAGYIDGGASQEEFYKFIKPILEKMDGTEELLVKLNREDLLRKQRTFDNGSIPHQIHLGELHAILRRQEDFYPFLKDNREKIEKILTFRIPYYVGPLARGNSRFAWMTRKSEETITPWNFEEVVDKGASAQSFIERMTNFDKNLPNEKVLPKHSLLYEYFTVYNELTKVKYVTEGMRKPAFLSGEQKKAIVDLLFKTNRKVTVKQLKEDYFKKIECFDSVEISGVEDRFNASLGTYHDLLKIIKDKDFLDNEENEDILEDIVLTLTLFEDREMIEERLKTYAHLFDDKVMKQLKRRRYTGWGRLSRKLINGIRDKQSGKTILDFLKSDGFANRNFMQLIHDDSLTFKEDIQKAQVSGQGDSLHEHIANLAGSPAIKKGILQTVKVVDELVKVMGRHKPENIVIEMARENQTTQKGQKNSRERMKRIEEGIKELGSQILKEHPVENTQLQNEKLYLYYLQNGRDMYVDQELDINRLSDYDVDHIVPQSFLKDDSIDNKVLTRSDKARGKSDNVPSEEVVKKMKNYWRQLLNAKLITQRKFDNLTKAERGGLSELDKAGFIKRQLVETRQITKHVAQILDSRMNTKYDENDKLIREVKVITLKSKLVSDFRKDFQFYKVREINNYHHAHDAYLNAVVGTALIKKYPKLESEFVYGDYKVYDVRKMIAKSEQEIGKATAKYFFYSNIMNFFKTEITLANGEIRKRPLIETNGETGEIVWDKGRDFATVRKVLSMPQVNIVKKTEVQTGGFSKESILPKRNSDKLIARKKDWDPKKYGGFDSPTVAYSVLVVAKVEKGKSKKLKSVKELLGITIMERSSFEKNPIDFLEAKGYKEVKKDLIIKLPKYSLFELENGRKRMLASAGELQKGNELALPSKYVNFLYLASHYEKLKGSPEDNEQKQLFVEQHKHYLDEIIEQISEFSKRVILADANLDKVLSAYNKHRDKPIREQAENIIHLFTLTNLGAPAAFKYFDTTIDRKRYTSTKEVLDATLIHQSITGLYETRIDLSQLGGDGGEAAAKGGGGSEAAAKGGVPWILKKPLELTIKLDLEEQQGTLLNNSILSKKGKEELKQLFEKYSALWQSWENQVGHRRIRPHKIATGTVKPTPQKQYHINPKAKPDIQIVINDLLKQGVLIQKESTMNTPVYPVPKPNGRWRMVLDYRAVNKVTPLIAVQNQHSYGILGSLFKGRYKTTIDLSNGFWAHPIVPEDYWITAFTWQGKQYCWTVLPQGFLNSPGLFTGDVVDLLQGIPNVEVYVDDVYISHDSEKEHLEYLDILFNRLKEAGYIISLKKSNIANSIVDFLGFQITNEGRGLTDTFKEKLENITAPTTLKQLQSILGLLNFARNFIPDFTELIAPLYALIPKSTKNYVPWQIEHSTTLETLITKLNGAEYLQGRKGDKTLIMKVNASYTTGYIRYYNEGEKKPISYVSIVFSKTELKFTELEKLLTTVHKGLLKALDLSMGQNIHVYSPIVSMQNIQKTPQTAKKALASRWLSWLSYLEDPRIRFFYDPQMPALKDLPAVDTGKDNKKHPSNFQHIFYTDGSAITSPTKEGHLNAGMGIVYFINKDGNLQKQQEWSISLGNHTAQFAEIAAFEFALKKCLPLGGNILVVTDSNYVAKAYNEELDVWASNGFVNNRKKPLKHISKWKSVADLKRLRPDVVVTHEPGHQKLDSSPHAYGNNLADQLATQASFKVHAGKRTADGSEFEKRTADGSEFESPKKKAKVE

SEQ ID NO: 779 - protein, 2087 aa, synthetic construct
MPAAKRVKLDGGDKKYSIGLDIGTNSVGWAVITDEYKVPSKKFKVLGNTDRHSIKKNLIGALLFDSGETAEATRLKRTARRRYTRRKNRICYLQEIFSNEMAKVDDSFFHRLEESFLVEEDKKHERHPIFGNIVDEVAYHEKYPTIYHLRKKLVDSTDKADLRLIYLALAHMIKFRGHFLIEGDLNPDNSDVDKLFIQLVQTYNQLFEENPINASGVDAKAILSARLSKSRRLENLIAQLPGEKKNGLFGNLIALSLGLTPNFKSNFDLAEDAKLQLSKDTYDDDLDNLLAQIGDQYADLFLAAKNLSDAILLSDILRVNTEITKAPLSASMIKRYDEHHQDLTLLKALVRQQLPEKYKEIFFDQSKNGYAGYIDGGASQEEFYKFIKPILEKMDGTEELLVKLNREDLLRKQRTFDNGSIPHQIHLGELHAILRRQEDFYPFLKDNREKIEKILTFRIPYYVGPLARGNSRFAWMTRKSEETITPWNFEEVVDKGASAQSFIERMTNFDKNLPNEKVLPKHSLLYEYFTVYNELTKVKYVTEGMRKPAFLSGEQKKAIVDLLFKTNRKVTVKQLKEDYFKKIECFDSVEISGVEDRFNASLGTYHDLLKIIKDKDFLDNEENEDILEDIVLTLTLFEDREMIEERLKTYAHLFDDKVMKQLKRRRYTGWGRLSRKLINGIRDKQSGKTILDFLKSDGFANRNFMQLIHDDSLTFKEDIQKAQVSGQGDSLHEHIANLAGSPAIKKGILQTVKVVDELVKVMGRHKPENIVIEMARENQTTQKGQKNSRERMKRIEEGIKELGSQILKEHPVENTQLQNEKLYLYYLQNGRDMYVDQELDINRLSDYDVDHIVPQSFLKDDSIDNKVLTRSDKARGKSDNVPSEEVVKKMKNYWRQLLNAKLITQRKFDNLTKAERGGLSELDKAGFIKRQLVETRQITKHVAQILDSRMNTKYDENDKLIREVKVITLKSKLVSDFRKDFQFYKVREINNYHHAHDAYLNAVVGTALIKKYPKLESEFVYGDYKVYDVRKMIAKSEQEIGKATAKYFFYSNIMNFFKTEITLANGEIRKRPLIETNGETGEIVWDKGRDFATVRKVLSMPQVNIVKKTEVQTGGFSKESILPKRNSDKLIARKKDWDPKKYGGFDSPTVAYSVLVVAKVEKGKSKKLKSVKELLGITIMERSSFEKNPIDFLEAKGYKEVKKDLIIKLPKYSLFELENGRKRMLASAGELQKGNELALPSKYVNFLYLASHYEKLKGSPEDNEQKQLFVEQHKHYLDEIIEQISEFSKRVILADANLDKVLSAYNKHRDKPIREQAENIIHLFTLTNLGAPAAFKYFDTTIDRKRYTSTKEVLDATLIHQSITGLYETRIDLSQLGGDGGEAAAKGGSGSSGGVPWILKKPLELTIKLDLEEQQGTLLNNSILSKKGKEELKQLFEKYSALWQSWENQVGHRRIRPHKIATGTVKPTPQKQYHINPKAKPDIQIVINDLLKQGVLIQKESTMNTPVYPVPKPNGRWRMVLDYRAVNKVTPLIAVQNQHSYGILGSLFKGRYKTTIDLSNGFWAHPIVPEDYWITAFTWQGKQYCWTVLPQGFLNSPGLFTGDVVDLLQGIPNVEVYVDDVYISHDSEKEHLEYLDILFNRLKEAGYIISLKKSNIANSIVDFLGFQITNEGRGLTDTFKEKLENITAPTTLKQLQSILGLLNFARNFIPDFTELIAPLYALIPKSTKNYVPWQIEHSTTLETLITKLNGAEYLQGRKGDKTLIMKVNASYTTGYIRYYNEGEKKPISYVSIVFSKTELKFTELEKLLTTVHKGLLKALDLSMGQNIHVYSPIVSMQNIQKTPQTAKKALASRWLSWLSYLEDPRIRFFYDPQMPALKDLPAVDTGKDNKKHPSNFQHIFYTDGSAITSPTKEGHLNAGMGIVYFINKDGNLQKQQEWSISLGNHTAQFAEIAAFEFALKKCLPLGGNILVVTDSNYVAKAYNEELDVWASNGFVNNRKKPLKHISKWKSVADLKRLRPDVVVTHEPGHQKLDSSPHAYGNNLADQLATQASFKVHAGKRTADGSEFEKRTADGSEFESPKKKAKVE

SEQ ID NO: 780 - protein, 2085 aa, synthetic construct
MPAAKRVKLDGGDKKYSIGLDIGTNSVGWAVITDEYKVPSKKFKVLGNTDRHSIKKNLIGALLFDSGETAEATRLKRTARRRYTRRKNRICYLQEIFSNEMAKVDDSFFHRLEESFLVEEDKKHERHPIFGNIVDEVAYHEKYPTIYHLRKKLVDSTDKADLRLIYLALAHMIKFRGHFLIEGDLNPDNSDVDKLFIQLVQTYNQLFEENPINASGVDAKAILSARLSKSRRLENLIAQLPGEKKNGLFGNLIALSLGLTPNFKSNFDLAEDAKLQLSKDTYDDDLDNLLAQIGDQYADLFLAAKNLSDAILLSDILRVNTEITKAPLSASMIKRYDEHHQDLTLLKALVRQQLPEKYKEIFFDQSKNGYAGYIDGGASQEEFYKFIKPILEKMDGTEELLVKLNREDLLRKQRTFDNGSIPHQIHLGELHAILRRQEDFYPFLKDNREKIEKILTFRIPYYVGPLARGNSRFAWMTRKSEETITPWNFEEVVDKGASAQSFIERMTNFDKNLPNEKVLPKHSLLYEYFTVYNELTKVKYVTEGMRKPAFLSGEQKKAIVDLLFKTNRKVTVKQLKEDYFKKIECFDSVEISGVEDRFNASLGTYHDLLKIIKDKDFLDNEENEDILEDIVLTLTLFEDREMIEERLKTYAHLFDDKVMKQLKRRRYTGWGRLSRKLINGIRDKQSGKTILDFLKSDGFANRNFMQLIHDDSLTFKEDIQKAQVSGQGDSLHEHIANLAGSPAIKKGILQTVKVVDELVKVMGRHKPENIVIEMARENQTTQKGQKNSRERMKRIEEGIKELGSQILKEHPVENTQLQNEKLYLYYLQNGRDMYVDQELDINRLSDYDVDHIVPQSFLKDDSIDNKVLTRSDKARGKSDNVPSEEVVKKMKNYWRQLLNAKLITQRKFDNLTKAERGGLSELDKAGFIKRQLVETRQITKHVAQILDSRMNTKYDENDKLIREVKVITLKSKLVSDFRKDFQFYKVREINNYHHAHDAYLNAVVGTALIKKYPKLESEFVYGDYKVYDVRKMIAKSEQEIGKATAKYFFYSNIMNFFKTEITLANGEIRKRPLIETNGETGEIVWDKGRDFATVRKVLSMPQVNIVKKTEVQTGGFSKESILPKRNSDKLIARKKDWDPKKYGGFDSPTVAYSVLVVAKVEKGKSKKLKSVKELLGITIMERSSFEKNPIDFLEAKGYKEVKKDLIIKLPKYSLFELENGRKRMLASAGELQKGNELALPSKYVNFLYLASHYEKLKGSPEDNEQKQLFVEQHKHYLDEIIEQISEFSKRVILADANLDKVLSAYNKHRDKPIREQAENIIHLFTLTNLGAPAAFKYFDTTIDRKRYTSTKEVLDATLIHQSITGLYETRIDLSQLGGDGGGGSGGGPAPGGVPWILKKPLELTIKLDLEEQQGTLLNNSILSKKGKEELKQLFEKYSALWQSWENQVGHRRIRPHKIATGTVKPTPQKQYHINPKAKPDIQIVINDLLKQGVLIQKESTMNTPVYPVPKPNGRWRMVLDYRAVNKVTPLIAVQNQHSYGILGSLFKGRYKTTIDLSNGFWAHPIVPEDYWITAFTWQGKQYCWTVLPQGFLNSPGLFTGDVVDLLQGIPNVEVYVDDVYISHDSEKEHLEYLDILFNRLKEAGYIISLKKSNIANSIVDFLGFQITNEGRGLTDTFKEKLENITAPTTLKQLQSILGLLNFARNFIPDFTELIAPLYALIPKSTKNYVPWQIEHSTTLETLITKLNGAEYLQGRKGDKTLIMKVNASYTTGYIRYYNEGEKKPISYVSIVFSKTELKFTELEKLLTTVHKGLLKALDLSMGQNIHVYSPIVSMQNIQKTPQTAKKALASRWLSWLSYLEDPRIRFFYDPQMPALKDLPAVDTGKDNKKHPSNFQHIFYTDGSAITSPTKEGHLNAGMGIVYFINKDGNLQKQQEWSISLGNHTAQFAEIAAFEFALKKCLPLGGNILVVTDSNYVAKAYNEELDVWASNGFVNNRKKPLKHISKWKSVADLKRLRPDVVVTHEPGHQKLDSSPHAYGNNLADQLATQASFKVHAGKRTADGSEFEKRTADGSEFESPKKKAKVE

SEQ ID NO: 781 - protein, 2086 aa, synthetic construct
MPAAKRVKLDGGDKKYSIGLDIGTNSVGWAVITDEYKVPSKKFKVLGNTDRHSIKKNLIGALLFDSGETAEATRLKRTARRRYTRRKNRICYLQEIFSNEMAKVDDSFFHRLEESFLVEEDKKHERHPIFGNIVDEVAYHEKYPTIYHLRKKLVDSTDKADLRLIYLALAHMIKFRGHFLIEGDLNPDNSDVDKLFIQLVQTYNQLFEENPINASGVDAKAILSARLSKSRRLENLIAQLPGEKKNGLFGNLIALSLGLTPNFKSNFDLAEDAKLQLSKDTYDDDLDNLLAQIGDQYADLFLAAKNLSDAILLSDILRVNTEITKAPLSASMIKRYDEHHQDLTLLKALVRQQLPEKYKEIFFDQSKNGYAGYIDGGASQEEFYKFIKPILEKMDGTEELLVKLNREDLLRKQRTFDNGSIPHQIHLGELHAILRRQEDFYPFLKDNREKIEKILTFRIPYYVGPLARGNSRFAWMTRKSEETITPWNFEEVVDKGASAQSFIERMTNFDKNLPNEKVLPKHSLLYEYFTVYNELTKVKYVTEGMRKPAFLSGEQKKAIVDLLFKTNRKVTVKQLKEDYFKKIECFDSVEISGVEDRFNASLGTYHDLLKIIKDKDFLDNEENEDILEDIVLTLTLFEDREMIEERLKTYAHLFDDKVMKQLKRRRYTGWGRLSRKLINGIRDKQSGKTILDFLKSDGFANRNFMQLIHDDSLTFKEDIQKAQVSGQGDSLHEHIANLAGSPAIKKGILQTVKVVDELVKVMGRHKPENIVIEMARENQTTQKGQKNSRERMKRIEEGIKELGSQILKEHPVENTQLQNEKLYLYYLQNGRDMYVDQELDINRLSDYDVDHIVPQSFLKDDSIDNKVLTRSDKARGKSDNVPSEEVVKKMKNYWRQLLNAKLITQRKFDNLTKAERGGLSELDKAGFIKRQLVETRQITKHVAQILDSRMNTKYDENDKLIREVKVITLKSKLVSDFRKDFQFYKVREINNYHHAHDAYLNAVVGTALIKKYPKLESEFVYGDYKVYDVRKMIAKSEQEIGKATAKYFFYSNIMNFFKTEITLANGEIRKRPLIETNGETGEIVWDKGRDFATVRKVLSMPQVNIVKKTEVQTGGFSKESILPKRNSDKLIARKKDWDPKKYGGFDSPTVAYSVLVVAKVEKGKSKKLKSVKELLGITIMERSSFEKNPIDFLEAKGYKEVKKDLIIKLPKYSLFELENGRKRMLASAGELQKGNELALPSKYVNFLYLASHYEKLKGSPEDNEQKQLFVEQHKHYLDEIIEQISEFSKRVILADANLDKVLSAYNKHRDKPIREQAENIIHLFTLTNLGAPAAFKYFDTTIDRKRYTSTKEVLDATLIHQSITGLYETRIDLSQLGGDGGGGGGSGGGGSGGVPWILKKPLELTIKLDLEEQQGTLLNNSILSKKGKEELKQLFEKYSALWQSWENQVGHRRIRPHKIATGTVKPTPQKQYHINPKAKPDIQIVINDLLKQGVLIQKESTMNTPVYPVPKPNGRWRMVLDYRAVNKVTPLIAVQNQHSYGILGSLFKGRYKTTIDLSNGFWAHPIVPEDYWITAFTWQGKQYCWTVLPQGFLNSPGLFTGDVVDLLQGIPNVEVYVDDVYISHDSEKEHLEYLDILFNRLKEAGYIISLKKSNIANSIVDFLGFQITNEGRGLTDTFKEKLENITAPTTLKQLQSILGLLNFARNFIPDFTELIAPLYALIPKSTKNYVPWQIEHSTTLETLITKLNGAEYLQGRKGDKTLIMKVNASYTTGYIRYYNEGEKKPISYVSIVFSKTELKFTELEKLLTTVHKGLLKALDLSMGQNIHVYSPIVSMQNIQKTPQTAKKALASRWLSWLSYLEDPRIRFFYDPQMPALKDLPAVDTGKDNKKHPSNFQHIFYTDGSAITSPTKEGHLNAGMGIVYFINKDGNLQKQQEWSISLGNHTAQFAEIAAFEFALKKCLPLGGNILVVTDSNYVAKAYNEELDVWASNGFVNNRKKPLKHISKWKSVADLKRLRPDVVVTHEPGHQKLDSSPHAYGNNLADQLATQASFKVHAGKRTADGSEFEKRTADGSEFESPKKKAKVE

SEQ ID NO: 782 - protein, 2085 aa, synthetic construct
MPAAKRVKLDGGDKKYSIGLDIGTNSVGWAVITDEYKVPSKKFKVLGNTDRHSIKKNLIGALLFDSGETAEATRLKRTARRRYTRRKNRICYLQEIFSNEMAKVDDSFFHRLEESFLVEEDKKHERHPIFGNIVDEVAYHEKYPTIYHLRKKLVDSTDKADLRLIYLALAHMIKFRGHFLIEGDLNPDNSDVDKLFIQLVQTYNQLFEENPINASGVDAKAILSARLSKSRRLENLIAQLPGEKKNGLFGNLIALSLGLTPNFKSNFDLAEDAKLQLSKDTYDDDLDNLLAQIGDQYADLFLAAKNLSDAILLSDILRVNTEITKAPLSASMIKRYDEHHQDLTLLKALVRQQLPEKYKEIFFDQSKNGYAGYIDGGASQEEFYKFIKPILEKMDGTEELLVKLNREDLLRKQRTFDNGSIPHQIHLGELHAILRRQEDFYPFLKDNREKIEKILTFRIPYYVGPLARGNSRFAWMTRKSEETITPWNFEEVVDKGASAQSFIERMTNFDKNLPNEKVLPKHSLLYEYFTVYNELTKVKYVTEGMRKPAFLSGEQKKAIVDLLFKTNRKVTVKQLKEDYFKKIECFDSVEISGVEDRFNASLGTYHDLLKIIKDKDFLDNEENEDILEDIVLTLTLFEDREMIEERLKTYAHLFDDKVMKQLKRRRYTGWGRLSRKLINGIRDKQSGKTILDFLKSDGFANRNFMQLIHDDSLTFKEDIQKAQVSGQGDSLHEHIANLAGSPAIKKGILQTVKVVDELVKVMGRHKPENIVIEMARENQTTQKGQKNSRERMKRIEEGIKELGSQILKEHPVENTQLQNEKLYLYYLQNGRDMYVDQELDINRLSDYDVDHIVPQSFLKDDSIDNKVLTRSDKARGKSDNVPSEEVVKKMKNYWRQLLNAKLITQRKFDNLTKAERGGLSELDKAGFIKRQLVETRQITKHVAQILDSRMNTKYDENDKLIREVKVITLKSKLVSDFRKDFQFYKVREINNYHHAHDAYLNAVVGTALIKKYPKLESEFVYGDYKVYDVRKMIAKSEQEIGKATAKYFFYSNIMNFFKTEITLANGEIRKRPLIETNGETGEIVWDKGRDFATVRKVLSMPQVNIVKKTEVQTGGFSKESILPKRNSDKLIARKKDWDPKKYGGFDSPTVAYSVLVVAKVEKGKSKKLKSVKELLGITIMERSSFEKNPIDFLEAKGYKEVKKDLIIKLPKYSLFELENGRKRMLASAGELQKGNELALPSKYVNFLYLASHYEKLKGSPEDNEQKQLFVEQHKHYLDEIIEQISEFSKRVILADANLDKVLSAYNKHRDKPIREQAENIIHLFTLTNLGAPAAFKYFDTTIDRKRYTSTKEVLDATLIHQSITGLYETRIDLSQLGGDGGPAPAPAPAPGGVPWILKKPLELTIKLDLEEQQGTLLNNSILSKKGKEELKQLFEKYSALWQSWENQVGHRRIRPHKIATGTVKPTPQKQYHINPKAKPDIQIVINDLLKQGVLIQKESTMNTPVYPVPKPNGRWRMVLDYRAVNKVTPLIAVQNQHSYGILGSLFKGRYKTTIDLSNGFWAHPIVPEDYWITAFTWQGKQYCWTVLPQGFLNSPGLFTGDVVDLLQGIPNVEVYVDDVYISHDSEKEHLEYLDILFNRLKEAGYIISLKKSNIANSIVDFLGFQITNEGRGLTDTFKEKLENITAPTTLKQLQSILGLLNFARNFIPDFTELIAPLYALIPKSTKNYVPWQIEHSTTLETLITKLNGAEYLQGRKGDKTLIMKVNASYTTGYIRYYNEGEKKPISYVSIVFSKTELKFTELEKLLTTVHKGLLKALDLSMGQNIHVYSPIVSMQNIQKTPQTAKKALASRWLSWLSYLEDPRIRFFYDPQMPALKDLPAVDTGKDNKKHPSNFQHIFYTDGSAITSPTKEGHLNAGMGIVYFINKDGNLQKQQEWSISLGNHTAQFAEIAAFEFALKKCLPLGGNILVVTDSNYVAKAYNEELDVWASNGFVNNRKKPLKHISKWKSVADLKRLRPDVVVTHEPGHQKLDSSPHAYGNNLADQLATQASFKVHAGKRTADGSEFEKRTADGSEFESPKKKAKVE

SEQ ID NO: 783 - protein, 2091 aa, synthetic construct
MPAAKRVKLDGGDKKYSIGLDIGTNSVGWAVITDEYKVPSKKFKVLGNTDRHSIKKNLIGALLFDSGETAEATRLKRTARRRYTRRKNRICYLQEIFSNEMAKVDDSFFHRLEESFLVEEDKKHERHPIFGNIVDEVAYHEKYPTIYHLRKKLVDSTDKADLRLIYLALAHMIKFRGHFLIEGDLNPDNSDVDKLFIQLVQTYNQLFEENPINASGVDAKAILSARLSKSRRLENLIAQLPGEKKNGLFGNLIALSLGLTPNFKSNFDLAEDAKLQLSKDTYDDDLDNLLAQIGDQYADLFLAAKNLSDAILLSDILRVNTEITKAPLSASMIKRYDEHHQDLTLLKALVRQQLPEKYKEIFFDQSKNGYAGYIDGGASQEEFYKFIKPILEKMDGTEELLVKLNREDLLRKQRTFDNGSIPHQIHLGELHAILRRQEDFYPFLKDNREKIEKILTFRIPYYVGPLARGNSRFAWMTRKSEETITPWNFEEVVDKGASAQSFIERMTNFDKNLPNEKVLPKHSLLYEYFTVYNELTKVKYVTEGMRKPAFLSGEQKKAIVDLLFKTNRKVTVKQLKEDYFKKIECFDSVEISGVEDRFNASLGTYHDLLKIIKDKDFLDNEENEDILEDIVLTLTLFEDREMIEERLKTYAHLFDDKVMKQLKRRRYTGWGRLSRKLINGIRDKQSGKTILDFLKSDGFANRNFMQLIHDDSLTFKEDIQKAQVSGQGDSLHEHIANLAGSPAIKKGILQTVKVVDELVKVMGRHKPENIVIEMARENQTTQKGQKNSRERMKRIEEGIKELGSQILKEHPVENTQLQNEKLYLYYLQNGRDMYVDQELDINRLSDYDVDHIVPQSFLKDDSIDNKVLTRSDKARGKSDNVPSEEVVKKMKNYWRQLLNAKLITQRKFDNLTKAERGGLSELDKAGFIKRQLVETRQITKHVAQILDSRMNTKYDENDKLIREVKVITLKSKLVSDFRKDFQFYKVREINNYHHAHDAYLNAVVGTALIKKYPKLESEFVYGDYKVYDVRKMIAKSEQEIGKATAKYFFYSNIMNFFKTEITLANGEIRKRPLIETNGETGEIVWDKGRDFATVRKVLSMPQVNIVKKTEVQTGGFSKESILPKRNSDKLIARKKDWDPKKYGGFDSPTVAYSVLVVAKVEKGKSKKLKSVKELLGITIMERSSFEKNPIDFLEAKGYKEVKKDLIIKLPKYSLFELENGRKRMLASAGELQKGNELALPSKYVNFLYLASHYEKLKGSPEDNEQKQLFVEQHKHYLDEIIEQISEFSKRVILADANLDKVLSAYNKHRDKPIREQAENIIHLFTLTNLGAPAAFKYFDTTIDRKRYTSTKEVLDATLIHQSITGLYETRIDLSQLGGDGGGGSGGSGGSGGSGGSGGVPWILKKPLELTIKLDLEEQQGTLLNNSILSKKGKEELKQLFEKYSALWQSWENQVGHRRIRPHKIATGTVKPTPQKQYHINPKAKPDIQIVINDLLKQGVLIQKESTMNTPVYPVPKPNGRWRMVLDYRAVNKVTPLIAVQNQHSYGILGSLFKGRYKTTIDLSNGFWAHPIVPEDYWITAFTWQGKQYCWTVLPQGFLNSPGLFTGDVVDLLQGIPNVEVYVDDVYISHDSEKEHLEYLDILFNRLKEAGYIISLKKSNIANSIVDFLGFQITNEGRGLTDTFKEKLENITAPTTLKQLQSILGLLNFARNFIPDFTELIAPLYALIPKSTKNYVPWQIEHSTTLETLITKLNGAEYLQGRKGDKTLIMKVNASYTTGYIRYYNEGEKKPISYVSIVFSKTELKFTELEKLLTTVHKGLLKALDLSMGQNIHVYSPIVSMQNIQKTPQTAKKALASRWLSWLSYLEDPRIRFFYDPQMPALKDLPAVDTGKDNKKHPSNFQHIFYTDGSAITSPTKEGHLNAGMGIVYFINKDGNLQKQQEWSISLGNHTAQFAEIAAFEFALKKCLPLGGNILVVTDSNYVAKAYNEELDVWASNGFVNNRKKPLKHISKWKSVADLKRLRPDVVVTHEPGHQKLDSSPHAYGNNLADQLATQASFKVHAGKRTADGSEFEKRTADGSEFESPKKKAKVE

SEQ ID NO: 784 - protein, 2084 aa, synthetic construct
MPAAKRVKLDGGDKKYSIGLDIGTNSVGWAVITDEYKVPSKKFKVLGNTDRHSIKKNLIGALLFDSGETAEATRLKRTARRRYTRRKNRICYLQEIFSNEMAKVDDSFFHRLEESFLVEEDKKHERHPIFGNIVDEVAYHEKYPTIYHLRKKLVDSTDKADLRLIYLALAHMIKFRGHFLIEGDLNPDNSDVDKLFIQLVQTYNQLFEENPINASGVDAKAILSARLSKSRRLENLIAQLPGEKKNGLFGNLIALSLGLTPNFKSNFDLAEDAKLQLSKDTYDDDLDNLLAQIGDQYADLFLAAKNLSDAILLSDILRVNTEITKAPLSASMIKRYDEHHQDLTLLKALVRQQLPEKYKEIFFDQSKNGYAGYIDGGASQEEFYKFIKPILEKMDGTEELLVKLNREDLLRKQRTFDNGSIPHQIHLGELHAILRRQEDFYPFLKDNREKIEKILTFRIPYYVGPLARGNSRFAWMTRKSEETITPWNFEEVVDKGASAQSFIERMTNFDKNLPNEKVLPKHSLLYEYFTVYNELTKVKYVTEGMRKPAFLSGEQKKAIVDLLFKTNRKVTVKQLKEDYFKKIECFDSVEISGVEDRFNASLGTYHDLLKIIKDKDFLDNEENEDILEDIVLTLTLFEDREMIEERLKTYAHLFDDKVMKQLKRRRYTGWGRLSRKLINGIRDKQSGKTILDFLKSDGFANRNFMQLIHDDSLTFKEDIQKAQVSGQGDSLHEHIANLAGSPAIKKGILQTVKVVDELVKVMGRHKPENIVIEMARENQTTQKGQKNSRERMKRIEEGIKELGSQILKEHPVENTQLQNEKLYLYYLQNGRDMYVDQELDINRLSDYDVDHIVPQSFLKDDSIDNKVLTRSDKARGKSDNVPSEEVVKKMKNYWRQLLNAKLITQRKFDNLTKAERGGLSELDKAGFIKRQLVETRQITKHVAQILDSRMNTKYDENDKLIREVKVITLKSKLVSDFRKDFQFYKVREINNYHHAHDAYLNAVVGTALIKKYPKLESEFVYGDYKVYDVRKMIAKSEQEIGKATAKYFFYSNIMNFFKTEITLANGEIRKRPLIETNGETGEIVWDKGRDFATVRKVLSMPQVNIVKKTEVQTGGFSKESILPKRNSDKLIARKKDWDPKKYGGFDSPTVAYSVLVVAKVEKGKSKKLKSVKELLGITIMERSSFEKNPIDFLEAKGYKEVKKDLIIKLPKYSLFELENGRKRMLASAGELQKGNELALPSKYVNFLYLASHYEKLKGSPEDNEQKQLFVEQHKHYLDEIIEQISEFSKRVILADANLDKVLSAYNKHRDKPIREQAENIIHLFTLTNLGAPAAFKYFDTTIDRKRYTSTKEVLDATLIHQSITGLYETRIDLSQLGGDGGEAAAKGGGGGVPWILKKPLELTIKLDLEEQQGTLLNNSILSKKGKEELKQLFEKYSALWQSWENQVGHRRIRPHKIATGTVKPTPQKQYHINPKAKPDIQIVINDLLKQGVLIQKESTMNTPVYPVPKPNGRWRMVLDYRAVNKVTPLIAVQNQHSYGILGSLFKGRYKTTIDLSNGFWAHPIVPEDYWITAFTWQGKQYCWTVLPQGFLNSPGLFTGDVVDLLQGIPNVEVYVDDVYISHDSEKEHLEYLDILFNRLKEAGYIISLKKSNIANSIVDFLGFQITNEGRGLTDTFKEKLENITAPTTLKQLQSILGLLNFARNFIPDFTELIAPLYALIPKSTKNYVPWQIEHSTTLETLITKLNGAEYLQGRKGDKTLIMKVNASYTTGYIRYYNEGEKKPISYVSIVFSKTELKFTELEKLLTTVHKGLLKALDLSMGQNIHVYSPIVSMQNIQKTPQTAKKALASRWLSWLSYLEDPRIRFFYDPQMPALKDLPAVDTGKDNKKHPSNFQHIFYTDGSAITSPTKEGHLNAGMGIVYFINKDGNLQKQQEWSISLGNHTAQFAEIAAFEFALKKCLPLGGNILVVTDSNYVAKAYNEELDVWASNGFVNNRKKPLKHISKWKSVADLKRLRPDVVVTHEPGHQKLDSSPHAYGNNLADQLATQASFKVHAGKRTADGSEFEKRTADGSEFESPKKKAKVE

SEQ ID NO: 785 - protein, 2087 aa, synthetic construct
MPAAKRVKLDGGDKKYSIGLDIGTNSVGWAVITDEYKVPSKKFKVLGNTDRHSIKKNLIGALLFDSGETAEATRLKRTARRRYTRRKNRICYLQEIFSNEMAKVDDSFFHRLEESFLVEEDKKHERHPIFGNIVDEVAYHEKYPTIYHLRKKLVDSTDKADLRLIYLALAHMIKFRGHFLIEGDLNPDNSDVDKLFIQLVQTYNQLFEENPINASGVDAKAILSARLSKSRRLENLIAQLPGEKKNGLFGNLIALSLGLTPNFKSNFDLAEDAKLQLSKDTYDDDLDNLLAQIGDQYADLFLAAKNLSDAILLSDILRVNTEITKAPLSASMIKRYDEHHQDLTLLKALVRQQLPEKYKEIFFDQSKNGYAGYIDGGASQEEFYKFIKPILEKMDGTEELLVKLNREDLLRKQRTFDNGSIPHQIHLGELHAILRRQEDFYPFLKDNREKIEKILTFRIPYYVGPLARGNSRFAWMTRKSEETITPWNFEEVVDKGASAQSFIERMTNFDKNLPNEKVLPKHSLLYEYFTVYNELTKVKYVTEGMRKPAFLSGEQKKAIVDLLFKTNRKVTVKQLKEDYFKKIECFDSVEISGVEDRFNASLGTYHDLLKIIKDKDFLDNEENEDILEDIVLTLTLFEDREMIEERLKTYAHLFDDKVMKQLKRRRYTGWGRLSRKLINGIRDKQSGKTILDFLKSDGFANRNFMQLIHDDSLTFKEDIQKAQVSGQGDSLHEHIANLAGSPAIKKGILQTVKVVDELVKVMGRHKPENIVIEMARENQTTQKGQKNSRERMKRIEEGIKELGSQILKEHPVENTQLQNEKLYLYYLQNGRDMYVDQELDINRLSDYDVDHIVPQSFLKDDSIDNKVLTRSDKARGKSDNVPSEEVVKKMKNYWRQLLNAKLITQRKFDNLTKAERGGLSELDKAGFIKRQLVETRQITKHVAQILDSRMNTKYDENDKLIREVKVITLKSKLVSDFRKDFQFYKVREINNYHHAHDAYLNAVVGTALIKKYPKLESEFVYGDYKVYDVRKMIAKSEQEIGKATAKYFFYSNIMNFFKTEITLANGEIRKRPLIETNGETGEIVWDKGRDFATVRKVLSMPQVNIVKKTEVQTGGFSKESILPKRNSDKLIARKKDWDPKKYGGFDSPTVAYSVLVVAKVEKGKSKKLKSVKELLGITIMERSSFEKNPIDFLEAKGYKEVKKDLIIKLPKYSLFELENGRKRMLASAGELQKGNELALPSKYVNFLYLASHYEKLKGSPEDNEQKQLFVEQHKHYLDEIIEQISEFSKRVILADANLDKVLSAYNKHRDKPIREQAENIIHLFTLTNLGAPAAFKYFDTTIDRKRYTSTKEVLDATLIHQSITGLYETRIDLSQLGGDGGPAPAPAPAPAPGGVPWILKKPLELTIKLDLEEQQGTLLNNSILSKKGKEELKQLFEKYSALWQSWENQVGHRRIRPHKIATGTVKPTPQKQYHINPKAKPDIQIVINDLLKQGVLIQKESTMNTPVYPVPKPNGRWRMVLDYRAVNKVTPLIAVQNQHSYGILGSLFKGRYKTTIDLSNGFWAHPIVPEDYWITAFTWQGKQYCWTVLPQGFLNSPGLFTGDVVDLLQGIPNVEVYVDDVYISHDSEKEHLEYLDILFNRLKEAGYIISLKKSNIANSIVDFLGFQITNEGRGLTDTFKEKLENITAPTTLKQLQSILGLLNFARNFIPDFTELIAPLYALIPKSTKNYVPWQIEHSTTLETLITKLNGAEYLQGRKGDKTLIMKVNASYTTGYIRYYNEGEKKPISYVSIVFSKTELKFTELEKLLTTVHKGLLKALDLSMGQNIHVYSPIVSMQNIQKTPQTAKKALASRWLSWLSYLEDPRIRFFYDPQMPALKDLPAVDTGKDNKKHPSNFQHIFYTDGSAITSPTKEGHLNAGMGIVYFINKDGNLQKQQEWSISLGNHTAQFAEIAAFEFALKKCLPLGGNILVVTDSNYVAKAYNEELDVWASNGFVNNRKKPLKHISKWKSVADLKRLRPDVVVTHEPGHQKLDSSPHAYGNNLADQLATQASFKVHAGKRTADGSEFEKRTADGSEFESPKKKAKVE

SEQ ID NO: 786 - protein, 2085 aa, synthetic construct
MPAAKRVKLDGGDKKYSIGLDIGTNSVGWAVITDEYKVPSKKFKVLGNTDRHSIKKNLIGALLFDSGETAEATRLKRTARRRYTRRKNRICYLQEIFSNEMAKVDDSFFHRLEESFLVEEDKKHERHPIFGNIVDEVAYHEKYPTIYHLRKKLVDSTDKADLRLIYLALAHMIKFRGHFLIEGDLNPDNSDVDKLFIQLVQTYNQLFEENPINASGVDAKAILSARLSKSRRLENLIAQLPGEKKNGLFGNLIALSLGLTPNFKSNFDLAEDAKLQLSKDTYDDDLDNLLAQIGDQYADLFLAAKNLSDAILLSDILRVNTEITKAPLSASMIKRYDEHHQDLTLLKALVRQQLPEKYKEIFFDQSKNGYAGYIDGGASQEEFYKFIKPILEKMDGTEELLVKLNREDLLRKQRTFDNGSIPHQIHLGELHAILRRQEDFYPFLKDNREKIEKILTFRIPYYVGPLARGNSRFAWMTRKSEETITPWNFEEVVDKGASAQSFIERMTNFDKNLPNEKVLPKHSLLYEYFTVYNELTKVKYVTEGMRKPAFLSGEQKKAIVDLLFKTNRKVTVKQLKEDYFKKIECFDSVEISGVEDRFNASLGTYHDLLKIIKDKDFLDNEENEDILEDIVLTLTLFEDREMIEERLKTYAHLFDDKVMKQLKRRRYTGWGRLSRKLINGIRDKQSGKTILDFLKSDGFANRNFMQLIHDDSLTFKEDIQKAQVSGQGDSLHEHIANLAGSPAIKKGILQTVKVVDELVKVMGRHKPENIVIEMARENQTTQKGQKNSRERMKRIEEGIKELGSQILKEHPVENTQLQNEKLYLYYLQNGRDMYVDQELDINRLSDYDVDHIVPQSFLKDDSIDNKVLTRSDKARGKSDNVPSEEVVKKMKNYWRQLLNAKLITQRKFDNLTKAERGGLSELDKAGFIKRQLVETRQITKHVAQILDSRMNTKYDENDKLIREVKVITLKSKLVSDFRKDFQFYKVREINNYHHAHDAYLNAVVGTALIKKYPKLESEFVYGDYKVYDVRKMIAKSEQEIGKATAKYFFYSNIMNFFKTEITLANGEIRKRPLIETNGETGEIVWDKGRDFATVRKVLSMPQVNIVKKTEVQTGGFSKESILPKRNSDKLIARKKDWDPKKYGGFDSPTVAYSVLVVAKVEKGKSKKLKSVKELLGITIMERSSFEKNPIDFLEAKGYKEVKKDLIIKLPKYSLFELENGRKRMLASAGELQKGNELALPSKYVNFLYLASHYEKLKGSPEDNEQKQLFVEQHKHYLDEIIEQISEFSKRVILADANLDKVLSAYNKHRDKPIREQAENIIHLFTLTNLGAPAAFKYFDTTIDRKRYTSTKEVLDATLIHQSITGLYETRIDLSQLGGDGGGGSGGSGGSGGVPWILKKPLELTIKLDLEEQQGTLLNNSILSKKGKEELKQLFEKYSALWQSWENQVGHRRIRPHKIATGTVKPTPQKQYHINPKAKPDIQIVINDLLKQGVLIQKESTMNTPVYPVPKPNGRWRMVLDYRAVNKVTPLIAVQNQHSYGILGSLFKGRYKTTIDLSNGFWAHPIVPEDYWITAFTWQGKQYCWTVLPQGFLNSPGLFTGDVVDLLQGIPNVEVYVDDVYISHDSEKEHLEYLDILFNRLKEAGYIISLKKSNIANSIVDFLGFQITNEGRGLTDTFKEKLENITAPTTLKQLQSILGLLNFARNFIPDFTELIAPLYALIPKSTKNYVPWQIEHSTTLETLITKLNGAEYLQGRKGDKTLIMKVNASYTTGYIRYYNEGEKKPISYVSIVFSKTELKFTELEKLLTTVHKGLLKALDLSMGQNIHVYSPIVSMQNIQKTPQTAKKALASRWLSWLSYLEDPRIRFFYDPQMPALKDLPAVDTGKDNKKHPSNFQHIFYTDGSAITSPTKEGHLNAGMGIVYFINKDGNLQKQQEWSISLGNHTAQFAEIAAFEFALKKCLPLGGNILVVTDSNYVAKAYNEELDVWASNGFVNNRKKPLKHISKWKSVADLKRLRPDVVVTHEPGHQKLDSSPHAYGNNLADQLATQASFKVHAGKRTADGSEFEKRTADGSEFESPKKKAKVE

SEQ ID NO: 787 - protein, 2085 aa, synthetic construct
MPAAKRVKLDGGDKKYSIGLDIGTNSVGWAVITDEYKVPSKKFKVLGNTDRHSIKKNLIGALLFDSGETAEATRLKRTARRRYTRRKNRICYLQEIFSNEMAKVDDSFFHRLEESFLVEEDKKHERHPIFGNIVDEVAYHEKYPTIYHLRKKLVDSTDKADLRLIYLALAHMIKFRGHFLIEGDLNPDNSDVDKLFIQLVQTYNQLFEENPINASGVDAKAILSARLSKSRRLENLIAQLPGEKKNGLFGNLIALSLGLTPNFKSNFDLAEDAKLQLSKDTYDDDLDNLLAQIGDQYADLFLAAKNLSDAILLSDILRVNTEITKAPLSASMIKRYDEHHQDLTLLKALVRQQLPEKYKEIFFDQSKNGYAGYIDGGASQEEFYKFIKPILEKMDGTEELLVKLNREDLLRKQRTFDNGSIPHQIHLGELHAILRRQEDFYPFLKDNREKIEKILTFRIPYYVGPLARGNSRFAWMTRKSEETITPWNFEEVVDKGASAQSFIERMTNFDKNLPNEKVLPKHSLLYEYFTVYNELTKVKYVTEGMRKPAFLSGEQKKAIVDLLFKTNRKVTVKQLKEDYFKKIECFDSVEISGVEDRFNASLGTYHDLLKIIKDKDFLDNEENEDILEDIVLTLTLFEDREMIEERLKTYAHLFDDKVMKQLKRRRYTGWGRLSRKLINGIRDKQSGKTILDFLKSDGFANRNFMQLIHDDSLTFKEDIQKAQVSGQGDSLHEHIANLAGSPAIKKGILQTVKVVDELVKVMGRHKPENIVIEMARENQTTQKGQKNSRERMKRIEEGIKELGSQILKEHPVENTQLQNEKLYLYYLQNGRDMYVDQELDINRLSDYDVDHIVPQSFLKDDSIDNKVLTRSDKARGKSDNVPSEEVVKKMKNYWRQLLNAKLITQRKFDNLTKAERGGLSELDKAGFIKRQLVETRQITKHVAQILDSRMNTKYDENDKLIREVKVITLKSKLVSDFRKDFQFYKVREINNYHHAHDAYLNAVVGTALIKKYPKLESEFVYGDYKVYDVRKMIAKSEQEIGKATAKYFFYSNIMNFFKTEITLANGEIRKRPLIETNGETGEIVWDKGRDFATVRKVLSMPQVNIVKKTEVQTGGFSKESILPKRNSDKLIARKKDWDPKKYGGFDSPTVAYSVLVVAKVEKGKSKKLKSVKELLGITIMERSSFEKNPIDFLEAKGYKEVKKDLIIKLPKYSLFELENGRKRMLASAGELQKGNELALPSKYVNFLYLASHYEKLKGSPEDNEQKQLFVEQHKHYLDEIIEQISEFSKRVILADANLDKVLSAYNKHRDKPIREQAENIIHLFTLTNLGAPAAFKYFDTTIDRKRYTSTKEVLDATLIHQSITGLYETRIDLSQLGGDGGGSSGGSGGGGGVPWILKKPLELTIKLDLEEQQGTLLNNSILSKKGKEELKQLFEKYSALWQSWENQVGHRRIRPHKIATGTVKPTPQKQYHINPKAKPDIQIVINDLLKQGVLIQKESTMNTPVYPVPKPNGRWRMVLDYRAVNKVTPLIAVQNQHSYGILGSLFKGRYKTTIDLSNGFWAHPIVPEDYWITAFTWQGKQYCWTVLPQGFLNSPGLFTGDVVDLLQGIPNVEVYVDDVYISHDSEKEHLEYLDILFNRLKEAGYIISLKKSNIANSIVDFLGFQITNEGRGLTDTFKEKLENITAPTTLKQLQSILGLLNFARNFIPDFTELIAPLYALIPKSTKNYVPWQIEHSTTLETLITKLNGAEYLQGRKGDKTLIMKVNASYTTGYIRYYNEGEKKPISYVSIVFSKTELKFTELEKLLTTVHKGLLKALDLSMGQNIHVYSPIVSMQNIQKTPQTAKKALASRWLSWLSYLEDPRIRFFYDPQMPALKDLPAVDTGKDNKKHPSNFQHIFYTDGSAITSPTKEGHLNAGMGIVYFINKDGNLQKQQEWSISLGNHTAQFAEIAAFEFALKKCLPLGGNILVVTDSNYVAKAYNEELDVWASNGFVNNRKKPLKHISKWKSVADLKRLRPDVVVTHEPGHQKLDSSPHAYGNNLADQLATQASFKVHAGKRTADGSEFEKRTADGSEFESPKKKAKVE

SEQ ID NO: 788 - protein, 2082 aa, synthetic construct
MPAAKRVKLDGGDKKYSIGLDIGTNSVGWAVITDEYKVPSKKFKVLGNTDRHSIKKNLIGALLFDSGETAEATRLKRTARRRYTRRKNRICYLQEIFSNEMAKVDDSFFHRLEESFLVEEDKKHERHPIFGNIVDEVAYHEKYPTIYHLRKKLVDSTDKADLRLIYLALAHMIKFRGHFLIEGDLNPDNSDVDKLFIQLVQTYNQLFEENPINASGVDAKAILSARLSKSRRLENLIAQLPGEKKNGLFGNLIALSLGLTPNFKSNFDLAEDAKLQLSKDTYDDDLDNLLAQIGDQYADLFLAAKNLSDAILLSDILRVNTEITKAPLSASMIKRYDEHHQDLTLLKALVRQQLPEKYKEIFFDQSKNGYAGYIDGGASQEEFYKFIKPILEKMDGTEELLVKLNREDLLRKQRTFDNGSIPHQIHLGELHAILRRQEDFYPFLKDNREKIEKILTFRIPYYVGPLARGNSRFAWMTRKSEETITPWNFEEVVDKGASAQSFIERMTNFDKNLPNEKVLPKHSLLYEYFTVYNELTKVKYVTEGMRKPAFLSGEQKKAIVDLLFKTNRKVTVKQLKEDYFKKIECFDSVEISGVEDRFNASLGTYHDLLKIIKDKDFLDNEENEDILEDIVLTLTLFEDREMIEERLKTYAHLFDDKVMKQLKRRRYTGWGRLSRKLINGIRDKQSGKTILDFLKSDGFANRNFMQLIHDDSLTFKEDIQKAQVSGQGDSLHEHIANLAGSPAIKKGILQTVKVVDELVKVMGRHKPENIVIEMARENQTTQKGQKNSRERMKRIEEGIKELGSQILKEHPVENTQLQNEKLYLYYLQNGRDMYVDQELDINRLSDYDVDHIVPQSFLKDDSIDNKVLTRSDKARGKSDNVPSEEVVKKMKNYWRQLLNAKLITQRKFDNLTKAERGGLSELDKAGFIKRQLVETRQITKHVAQILDSRMNTKYDENDKLIREVKVITLKSKLVSDFRKDFQFYKVREINNYHHAHDAYLNAVVGTALIKKYPKLESEFVYGDYKVYDVRKMIAKSEQEIGKATAKYFFYSNIMNFFKTEITLANGEIRKRPLIETNGETGEIVWDKGRDFATVRKVLSMPQVNIVKKTEVQTGGFSKESILPKRNSDKLIARKKDWDPKKYGGFDSPTVAYSVLVVAKVEKGKSKKLKSVKELLGITIMERSSFEKNPIDFLEAKGYKEVKKDLIIKLPKYSLFELENGRKRMLASAGELQKGNELALPSKYVNFLYLASHYEKLKGSPEDNEQKQLFVEQHKHYLDEIIEQISEFSKRVILADANLDKVLSAYNKHRDKPIREQAENIIHLFTLTNLGAPAAFKYFDTTIDRKRYTSTKEVLDATLIHQSITGLYETRIDLSQLGGDGGGGSGGSGGVPWILKKPLELTIKLDLEEQQGTLLNNSILSKKGKEELKQLFEKYSALWQSWENQVGHRRIRPHKIATGTVKPTPQKQYHINPKAKPDIQIVINDLLKQGVLIQKESTMNTPVYPVPKPNGRWRMVLDYRAVNKVTPLIAVQNQHSYGILGSLFKGRYKTTIDLSNGFWAHPIVPEDYWITAFTWQGKQYCWTVLPQGFLNSPGLFTGDVVDLLQGIPNVEVYVDDVYISHDSEKEHLEYLDILFNRLKEAGYIISLKKSNIANSIVDFLGFQITNEGRGLTDTFKEKLENITAPTTLKQLQSILGLLNFARNFIPDFTELIAPLYALIPKSTKNYVPWQIEHSTTLETLITKLNGAEYLQGRKGDKTLIMKVNASYTTGYIRYYNEGEKKPISYVSIVFSKTELKFTELEKLLTTVHKGLLKALDLSMGQNIHVYSPIVSMQNIQKTPQTAKKALASRWLSWLSYLEDPRIRFFYDPQMPALKDLPAVDTGKDNKKHPSNFQHIFYTDGSAITSPTKEGHLNAGMGIVYFINKDGNLQKQQEWSISLGNHTAQFAEIAAFEFALKKCLPLGGNILVVTDSNYVAKAYNEELDVWASNGFVNNRKKPLKHISKWKSVADLKRLRPDVVVTHEPGHQKLDSSPHAYGNNLADQLATQASFKVHAGKRTADGSEFEKRTADGSEFESPKKKAKVE

SEQ ID NO: 789 - protein, 2073 aa, synthetic construct
MPAAKRVKLDGGDKKYSIGLDIGTNSVGWAVITDEYKVPSKKFKVLGNTDRHSIKKNLIGALLFDSGETAEATRLKRTARRRYTRRKNRICYLQEIFSNEMAKVDDSFFHRLEESFLVEEDKKHERHPIFGNIVDEVAYHEKYPTIYHLRKKLVDSTDKADLRLIYLALAHMIKFRGHFLIEGDLNPDNSDVDKLFIQLVQTYNQLFEENPINASGVDAKAILSARLSKSRRLENLIAQLPGEKKNGLFGNLIALSLGLTPNFKSNFDLAEDAKLQLSKDTYDDDLDNLLAQIGDQYADLFLAAKNLSDAILLSDILRVNTEITKAPLSASMIKRYDEHHQDLTLLKALVRQQLPEKYKEIFFDQSKNGYAGYIDGGASQEEFYKFIKPILEKMDGTEELLVKLNREDLLRKQRTFDNGSIPHQIHLGELHAILRRQEDFYPFLKDNREKIEKILTFRIPYYVGPLARGNSRFAWMTRKSEETITPWNFEEVVDKGASAQSFIERMTNFDKNLPNEKVLPKHSLLYEYFTVYNELTKVKYVTEGMRKPAFLSGEQKKAIVDLLFKTNRKVTVKQLKEDYFKKIECFDSVEISGVEDRFNASLGTYHDLLKIIKDKDFLDNEENEDILEDIVLTLTLFEDREMIEERLKTYAHLFDDKVMKQLKRRRYTGWGRLSRKLINGIRDKQSGKTILDFLKSDGFANRNFMQLIHDDSLTFKEDIQKAQVSGQGDSLHEHIANLAGSPAIKKGILQTVKVVDELVKVMGRHKPENIVIEMARENQTTQKGQKNSRERMKRIEEGIKELGSQILKEHPVENTQLQNEKLYLYYLQNGRDMYVDQELDINRLSDYDVDHIVPQSFLKDDSIDNKVLTRSDKARGKSDNVPSEEVVKKMKNYWRQLLNAKLITQRKFDNLTKAERGGLSELDKAGFIKRQLVETRQITKHVAQILDSRMNTKYDENDKLIREVKVITLKSKLVSDFRKDFQFYKVREINNYHHAHDAYLNAVVGTALIKKYPKLESEFVYGDYKVYDVRKMIAKSEQEIGKATAKYFFYSNIMNFFKTEITLANGEIRKRPLIETNGETGEIVWDKGRDFATVRKVLSMPQVNIVKKTEVQTGGFSKESILPKRNSDKLIARKKDWDPKKYGGFDSPTVAYSVLVVAKVEKGKSKKLKSVKELLGITIMERSSFEKNPIDFLEAKGYKEVKKDLIIKLPKYSLFELENGRKRMLASAGELQKGNELALPSKYVNFLYLASHYEKLKGSPEDNEQKQLFVEQHKHYLDEIIEQISEFSKRVILADANLDKVLSAYNKHRDKPIREQAENIIHLFTLTNLGAPAAFKYFDTTIDRKRYTSTKEVLDATLIHQSITGLYETRIDLSQLGGDGGPAPGGGGSSGGSCQTKNTLNIDEYLLQFPDQLWASLPTDIGRMLVPPITIKIKDNASLPSIRQYPLPKDKTEGLRPLISSLENQGILIKCHSPCNTPIFPIKKAGRDEYRMIHDLRAINNIVAPLTAVVASPTTVLSNLAPSLHWFTVIDLSNAFFSVPIHKDSQYLFAFTFEGHQYTWTVLPQGFIHSPTLFNQALYQSLHKIKFKISSEICIYMDDVLIASKDRDTNLKDTAVMLQHLASEGHKVSKKKLQLCQQEVVYLGQLLTPEGRKILPDRKVTVSQFQQPTTIRQIRAFLGKVGYCRHFIPEFSIHSKFLEKQLKPDTAEPFQLDDQQVEAFNKLKHAITTAPVLVVPDPAKPFQLYTSHSEHASIAVLTQKHAGRTRPIAFLSSKFDAIESGLPPCLKACASIHRSLTQADSFILGAPLIIYTTHAICTLLQRDRSQLVTASRFSKWEADLLRPELTFVACSAVSPAHLYMQSCENNIPPHDCVLLTHTISRPRPDLSDLPIPDPDMTLFSDGSYTTGRGGAAVVMHRPVTDDFIIIHQQPGGASAQTAELLALAAACHLATDKTVNIYTDSRYAYGVVHDFGHLWMHRGFVTSAGTPIKNHKEIEYLLKQIMKPKQVSVIKIEAHTKGVSMEVRGNAAADEAAKNAVFLVQRAGKRTADGSEFEKRTADGSEFESPKKKAKVE

SEQ ID NO: 790 - protein, 2094 aa, synthetic construct
MPAAKRVKLDGGDKKYSIGLDIGTNSVGWAVITDEYKVPSKKFKVLGNTDRHSIKKNLIGALLFDSGETAEATRLKRTARRRYTRRKNRICYLQEIFSNEMAKVDDSFFHRLEESFLVEEDKKHERHPIFGNIVDEVAYHEKYPTIYHLRKKLVDSTDKADLRLIYLALAHMIKFRGHFLIEGDLNPDNSDVDKLFIQLVQTYNQLFEENPINASGVDAKAILSARLSKSRRLENLIAQLPGEKKNGLFGNLIALSLGLTPNFKSNFDLAEDAKLQLSKDTYDDDLDNLLAQIGDQYADLFLAAKNLSDAILLSDILRVNTEITKAPLSASMIKRYDEHHQDLTLLKALVRQQLPEKYKEIFFDQSKNGYAGYIDGGASQEEFYKFIKPILEKMDGTEELLVKLNREDLLRKQRTFDNGSIPHQIHLGELHAILRRQEDFYPFLKDNREKIEKILTFRIPYYVGPLARGNSRFAWMTRKSEETITPWNFEEVVDKGASAQSFIERMTNFDKNLPNEKVLPKHSLLYEYFTVYNELTKVKYVTEGMRKPAFLSGEQKKAIVDLLFKTNRKVTVKQLKEDYFKKIECFDSVEISGVEDRFNASLGTYHDLLKIIKDKDFLDNEENEDILEDIVLTLTLFEDREMIEERLKTYAHLFDDKVMKQLKRRRYTGWGRLSRKLINGIRDKQSGKTILDFLKSDGFANRNFMQLIHDDSLTFKEDIQKAQVSGQGDSLHEHIANLAGSPAIKKGILQTVKVVDELVKVMGRHKPENIVIEMARENQTTQKGQKNSRERMKRIEEGIKELGSQILKEHPVENTQLQNEKLYLYYLQNGRDMYVDQELDINRLSDYDVDHIVPQSFLKDDSIDNKVLTRSDKARGKSDNVPSEEVVKKMKNYWRQLLNAKLITQRKFDNLTKAERGGLSELDKAGFIKRQLVETRQITKHVAQILDSRMNTKYDENDKLIREVKVITLKSKLVSDFRKDFQFYKVREINNYHHAHDAYLNAVVGTALIKKYPKLESEFVYGDYKVYDVRKMIAKSEQEIGKATAKYFFYSNIMNFFKTEITLANGEIRKRPLIETNGETGEIVWDKGRDFATVRKVLSMPQVNIVKKTEVQTGGFSKESILPKRNSDKLIARKKDWDPKKYGGFDSPTVAYSVLVVAKVEKGKSKKLKSVKELLGITIMERSSFEKNPIDFLEAKGYKEVKKDLIIKLPKYSLFELENGRKRMLASAGELQKGNELALPSKYVNFLYLASHYEKLKGSPEDNEQKQLFVEQHKHYLDEIIEQISEFSKRVILADANLDKVLSAYNKHRDKPIREQAENIIHLFTLTNLGAPAAFKYFDTTIDRKRYTSTKEVLDATLIHQSITGLYETRIDLSQLGGDGGGGGEAAAKPAPGGVLNLEEEYRLHEKPVPSSIDPSWLQLFPTVWAERAGMGLANQVPPVVVELRSGASPVAVRQYPMSKEAREGIRPHIQRFLDLGVLVPCQSPWNTPLLPVKKPGTNDYRPVQDLREINKRVQDIHPTVPNPYNLLSSLPPSHTWYSVLDLKDAFFCLKLHPNSQPLFAFEWRDPEKGNTGQLTWTRLPQGFKNSPTLFDEALHRDLAPFRALNPQVVLLQYVDDLLVAAPTYRDCKEGTQKLLQELSKLGYRVSAKKAQLCQKEVTYLGYLLKEGKRWLTPARKATVMKIPPPTTPRQVREFLGTAGFCRLWIPGFASLAAPLYPLTKESIPFIWTEEHQKAFDRIKEALLSAPALALPDLTKPFTLYVDERAGVARGVLTQTLGPWRRPVAYLSKKLDPVASGWPTCLKAVAAVALLLKDADKLTLGQNVTVIASHSLESIVRQPPDRWMTNARMTHYQSLLLNERVSFAPPAVLNPATLLPVESEATPVHRCSEILAEETGTRRDLKDQPLPGVPAWYTDGSSFIAEGKRRAGAAIVDGKRTVWASSLPEGTSAQKAELVALTQALRLAEGKDINIYTDSRYAFATAHIHGAIYKQRGLLTSAGKDIKNKEEILALLEAIHLPKRVAIIHCPGHQKGNDPVATGNRRADEAAKQAALSTRVLAETTKPAGKRTADGSEFEKRTADGSEFESPKKKAKVE

SEQ ID NO: 791 - protein, 2094 aa, synthetic construct
MPAAKRVKLDGGDKKYSIGLDIGTNSVGWAVITDEYKVPSKKFKVLGNTDRHSIKKNLIGALLFDSGETAEATRLKRTARRRYTRRKNRICYLQEIFSNEMAKVDDSFFHRLEESFLVEEDKKHERHPIFGNIVDEVAYHEKYPTIYHLRKKLVDSTDKADLRLIYLALAHMIKFRGHFLIEGDLNPDNSDVDKLFIQLVQTYNQLFEENPINASGVDAKAILSARLSKSRRLENLIAQLPGEKKNGLFGNLIALSLGLTPNFKSNFDLAEDAKLQLSKDTYDDDLDNLLAQIGDQYADLFLAAKNLSDAILLSDILRVNTEITKAPLSASMIKRYDEHHQDLTLLKALVRQQLPEKYKEIFFDQSKNGYAGYIDGGASQEEFYKFIKPILEKMDGTEELLVKLNREDLLRKQRTFDNGSIPHQIHLGELHAILRRQEDFYPFLKDNREKIEKILTFRIPYYVGPLARGNSRFAWMTRKSEETITPWNFEEVVDKGASAQSFIERMTNFDKNLPNEKVLPKHSLLYEYFTVYNELTKVKYVTEGMRKPAFLSGEQKKAIVDLLFKTNRKVTVKQLKEDYFKKIECFDSVEISGVEDRFNASLGTYHDLLKIIKDKDFLDNEENEDILEDIVLTLTLFEDREMIEERLKTYAHLFDDKVMKQLKRRRYTGWGRLSRKLINGIRDKQSGKTILDFLKSDGFANRNFMQLIHDDSLTFKEDIQKAQVSGQGDSLHEHIANLAGSPAIKKGILQTVKVVDELVKVMGRHKPENIVIEMARENQTTQKGQKNSRERMKRIEEGIKELGSQILKEHPVENTQLQNEKLYLYYLQNGRDMYVDQELDINRLSDYDVDHIVPQSFLKDDSIDNKVLTRSDKARGKSDNVPSEEVVKKMKNYWRQLLNAKLITQRKFDNLTKAERGGLSELDKAGFIKRQLVETRQITKHVAQILDSRMNTKYDENDKLIREVKVITLKSKLVSDFRKDFQFYKVREINNYHHAHDAYLNAVVGTALIKKYPKLESEFVYGDYKVYDVRKMIAKSEQEIGKATAKYFFYSNIMNFFKTEITLANGEIRKRPLIETNGETGEIVWDKGRDFATVRKVLSMPQVNIVKKTEVQTGGFSKESILPKRNSDKLIARKKDWDPKKYGGFDSPTVAYSVLVVAKVEKGKSKKLKSVKELLGITIMERSSFEKNPIDFLEAKGYKEVKKDLIIKLPKYSLFELENGRKRMLASAGELQKGNELALPSKYVNFLYLASHYEKLKGSPEDNEQKQLFVEQHKHYLDEIIEQISEFSKRVILADANLDKVLSAYNKHRDKPIREQAENIIHLFTLTNLGAPAAFKYFDTTIDRKRYTSTKEVLDATLIHQSITGLYETRIDLSQLGGDGGGSSGGGEAAAKGGVLNLEEEYRLHEKPVPSSIDPSWLQLFPTVWAERAGMGLANQVPPVVVELRSGASPVAVRQYPMSKEAREGIRPHIQRFLDLGVLVPCQSPWNTPLLPVKKPGTNDYRPVQDLREINKRVQDIHPTVPNPYNLLSSLPPSHTWYSVLDLKDAFFCLKLHPNSQPLFAFEWRDPEKGNTGQLTWTRLPQGFKNSPTLFDEALHRDLAPFRALNPQVVLLQYVDDLLVAAPTYRDCKEGTQKLLQELSKLGYRVSAKKAQLCQKEVTYLGYLLKEGKRWLTPARKATVMKIPPPTTPRQVREFLGTAGFCRLWIPGFASLAAPLYPLTKESIPFIWTEEHQKAFDRIKEALLSAPALALPDLTKPFTLYVDERAGVARGVLTQTLGPWRRPVAYLSKKLDPVASGWPTCLKAVAAVALLLKDADKLTLGQNVTVIASHSLESIVRQPPDRWMTNARMTHYQSLLLNERVSFAPPAVLNPATLLPVESEATPVHRCSEILAEETGTRRDLKDQPLPGVPAWYTDGSSFIAEGKRRAGAAIVDGKRTVWASSLPEGTSAQKAELVALTQALRLAEGKDINIYTDSRYAFATAHIHGAIYKQRGLLTSAGKDIKNKEEILALLEAIHLPKRVAIIHCPGHQKGNDPVATGNRRADEAAKQAALSTRVLAETTKPAGKRTADGSEFEKRTADGSEFESPKKKAKVE

SEQ ID NO: 792 - protein, 2092 aa, synthetic construct
MPAAKRVKLDGGDKKYSIGLDIGTNSVGWAVITDEYKVPSKKFKVLGNTDRHSIKKNLIGALLFDSGETAEATRLKRTARRRYTRRKNRICYLQEIFSNEMAKVDDSFFHRLEESFLVEEDKKHERHPIFGNIVDEVAYHEKYPTIYHLRKKLVDSTDKADLRLIYLALAHMIKFRGHFLIEGDLNPDNSDVDKLFIQLVQTYNQLFEENPINASGVDAKAILSARLSKSRRLENLIAQLPGEKKNGLFGNLIALSLGLTPNFKSNFDLAEDAKLQLSKDTYDDDLDNLLAQIGDQYADLFLAAKNLSDAILLSDILRVNTEITKAPLSASMIKRYDEHHQDLTLLKALVRQQLPEKYKEIFFDQSKNGYAGYIDGGASQEEFYKFIKPILEKMDGTEELLVKLNREDLLRKQRTFDNGSIPHQIHLGELHAILRRQEDFYPFLKDNREKIEKILTFRIPYYVGPLARGNSRFAWMTRKSEETITPWNFEEVVDKGASAQSFIERMTNFDKNLPNEKVLPKHSLLYEYFTVYNELTKVKYVTEGMRKPAFLSGEQKKAIVDLLFKTNRKVTVKQLKEDYFKKIECFDSVEISGVEDRFNASLGTYHDLLKIIKDKDFLDNEENEDILEDIVLTLTLFEDREMIEERLKTYAHLFDDKVMKQLKRRRYTGWGRLSRKLINGIRDKQSGKTILDFLKSDGFANRNFMQLIHDDSLTFKEDIQKAQVSGQGDSLHEHIANLAGSPAIKKGILQTVKVVDELVKVMGRHKPENIVIEMARENQTTQKGQKNSRERMKRIEEGIKELGSQILKEHPVENTQLQNEKLYLYYLQNGRDMYVDQELDINRLSDYDVDHIVPQSFLKDDSIDNKVLTRSDKARGKSDNVPSEEVVKKMKNYWRQLLNAKLITQRKFDNLTKAERGGLSELDKAGFIKRQLVETRQITKHVAQILDSRMNTKYDENDKLIREVKVITLKSKLVSDFRKDFQFYKVREINNYHHAHDAYLNAVVGTALIKKYPKLESEFVYGDYKVYDVRKMIAKSEQEIGKATAKYFFYSNIMNFFKTEITLANGEIRKRPLIETNGETGEIVWDKGRDFATVRKVLSMPQVNIVKKTEVQTGGFSKESILPKRNSDKLIARKKDWDPKKYGGFDSPTVAYSVLVVAKVEKGKSKKLKSVKELLGITIMERSSFEKNPIDFLEAKGYKEVKKDLIIKLPKYSLFELENGRKRMLASAGELQKGNELALPSKYVNFLYLASHYEKLKGSPEDNEQKQLFVEQHKHYLDEIIEQISEFSKRVILADANLDKVLSAYNKHRDKPIREQAENIIHLFTLTNLGAPAAFKYFDTTIDRKRYTSTKEVLDATLIHQSITGLYETRIDLSQLGGDGGGGSGGGGSSGGVLNLEEEYRLHEKPVPSSIDPSWLQLFPTVWAERAGMGLANQVPPVVVELRSGASPVAVRQYPMSKEAREGIRPHIQRFLDLGVLVPCQSPWNTPLLPVKKPGTNDYRPVQDLREINKRVQDIHPTVPNPYNLLSSLPPSHTWYSVLDLKDAFFCLKLHPNSQPLFAFEWRDPEKGNTGQLTWTRLPQGFKNSPTLFDEALHRDLAPFRALNPQVVLLQYVDDLLVAAPTYRDCKEGTQKLLQELSKLGYRVSAKKAQLCQKEVTYLGYLLKEGKRWLTPARKATVMKIPPPTTPRQVREFLGTAGFCRLWIPGFASLAAPLYPLTKESIPFIWTEEHQKAFDRIKEALLSAPALALPDLTKPFTLYVDERAGVARGVLTQTLGPWRRPVAYLSKKLDPVASGWPTCLKAVAAVALLLKDADKLTLGQNVTVIASHSLESIVRQPPDRWMTNARMTHYQSLLLNERVSFAPPAVLNPATLLPVESEATPVHRCSEILAEETGTRRDLKDQPLPGVPAWYTDGSSFIAEGKRRAGAAIVDGKRTVWASSLPEGTSAQKAELVALTQALRLAEGKDINIYTDSRYAFATAHIHGAIYKQRGLLTSAGKDIKNKEEILALLEAIHLPKRVAIIHCPGHQKGNDPVATGNRRADEAAKQAALSTRVLAETTKPAGKRTADGSEFEKRTADGSEFESPKKKAKVE

SEQ ID NO: 793 - protein, 2094 aa, synthetic construct
MPAAKRVKLDGGDKKYSIGLDIGTNSVGWAVITDEYKVPSKKFKVLGNTDRHSIKKNLIGALLFDSGETAEATRLKRTARRRYTRRKNRICYLQEIFSNEMAKVDDSFFHRLEESFLVEEDKKHERHPIFGNIVDEVAYHEKYPTIYHLRKKLVDSTDKADLRLIYLALAHMIKFRGHFLIEGDLNPDNSDVDKLFIQLVQTYNQLFEENPINASGVDAKAILSARLSKSRRLENLIAQLPGEKKNGLFGNLIALSLGLTPNFKSNFDLAEDAKLQLSKDTYDDDLDNLLAQIGDQYADLFLAAKNLSDAILLSDILRVNTEITKAPLSASMIKRYDEHHQDLTLLKALVRQQLPEKYKEIFFDQSKNGYAGYIDGGASQEEFYKFIKPILEKMDGTEELLVKLNREDLLRKQRTFDNGSIPHQIHLGELHAILRRQEDFYPFLKDNREKIEKILTFRIPYYVGPLARGNSRFAWMTRKSEETITPWNFEEVVDKGASAQSFIERMTNFDKNLPNEKVLPKHSLLYEYFTVYNELTKVKYVTEGMRKPAFLSGEQKKAIVDLLFKTNRKVTVKQLKEDYFKKIECFDSVEISGVEDRFNASLGTYHDLLKIIKDKDFLDNEENEDILEDIVLTLTLFEDREMIEERLKTYAHLFDDKVMKQLKRRRYTGWGRLSRKLINGIRDKQSGKTILDFLKSDGFANRNFMQLIHDDSLTFKEDIQKAQVSGQGDSLHEHIANLAGSPAIKKGILQTVKVVDELVKVMGRHKPENIVIEMARENQTTQKGQKNSRERMKRIEEGIKELGSQILKEHPVENTQLQNEKLYLYYLQNGRDMYVDQELDINRLSDYDVDHIVPQSFLKDDSIDNKVLTRSDKARGKSDNVPSEEVVKKMKNYWRQLLNAKLITQRKFDNLTKAERGGLSELDKAGFIKRQLVETRQITKHVAQILDSRMNTKYDENDKLIREVKVITLKSKLVSDFRKDFQFYKVREINNYHHAHDAYLNAVVGTALIKKYPKLESEFVYGDYKVYDVRKMIAKSEQEIGKATAKYFFYSNIMNFFKTEITLANGEIRKRPLIETNGETGEIVWDKGRDFATVRKVLSMPQVNIVKKTEVQTGGFSKESILPKRNSDKLIARKKDWDPKKYGGFDSPTVAYSVLVVAKVEKGKSKKLKSVKELLGITIMERSSFEKNPIDFLEAKGYKEVKKDLIIKLPKYSLFELENGRKRMLASAGELQKGNELALPSKYVNFLYLASHYEKLKGSPEDNEQKQLFVEQHKHYLDEIIEQISEFSKRVILADANLDKVLSAYNKHRDKPIREQAENIIHLFTLTNLGAPAAFKYFDTTIDRKRYTSTKEVLDATLIHQSITGLYETRIDLSQLGGDGGPAPGSSEAAAKGGVLNLEEEYRLHEKPVPSSIDPSWLQLFPTVWAERAGMGLANQVPPVVVELRSGASPVAVRQYPMSKEAREGIRPHIQRFLDLGVLVPCQSPWNTPLLPVKKPGTNDYRPVQDLREINKRVQDIHPTVPNPYNLLSSLPPSHTWYSVLDLKDAFFCLKLHPNSQPLFAFEWRDPEKGNTGQLTWTRLPQGFKNSPTLFDEALHRDLAPFRALNPQVVLLQYVDDLLVAAPTYRDCKEGTQKLLQELSKLGYRVSAKKAQLCQKEVTYLGYLLKEGKRWLTPARKATVMKIPPPTTPRQVREFLGTAGFCRLWIPGFASLAAPLYPLTKESIPFIWTEEHQKAFDRIKEALLSAPALALPDLTKPFTLYVDERAGVARGVLTQTLGPWRRPVAYLSKKLDPVASGWPTCLKAVAAVALLLKDADKLTLGQNVTVIASHSLESIVRQPPDRWMTNARMTHYQSLLLNERVSFAPPAVLNPATLLPVESEATPVHRCSEILAEETGTRRDLKDQPLPGVPAWYTDGSSFIAEGKRRAGAAIVDGKRTVWASSLPEGTSAQKAELVALTQALRLAEGKDINIYTDSRYAFATAHIHGAIYKQRGLLTSAGKDIKNKEEILALLEAIHLPKRVAIIHCPGHQKGNDPVATGNRRADEAAKQAALSTRVLAETTKPAGKRTADGSEFEKRTADGSEFESPKKKAKVE

SEQ ID NO: 794 - protein, 2092 aa, synthetic construct
MPAAKRVKLDGGDKKYSIGLDIGTNSVGWAVITDEYKVPSKKFKVLGNTDRHSIKKNLIGALLFDSGETAEATRLKRTARRRYTRRKNRICYLQEIFSNEMAKVDDSFFHRLEESFLVEEDKKHERHPIFGNIVDEVAYHEKYPTIYHLRKKLVDSTDKADLRLIYLALAHMIKFRGHFLIEGDLNPDNSDVDKLFIQLVQTYNQLFEENPINASGVDAKAILSARLSKSRRLENLIAQLPGEKKNGLFGNLIALSLGLTPNFKSNFDLAEDAKLQLSKDTYDDDLDNLLAQIGDQYADLFLAAKNLSDAILLSDILRVNTEITKAPLSASMIKRYDEHHQDLTLLKALVRQQLPEKYKEIFFDQSKNGYAGYIDGGASQEEFYKFIKPILEKMDGTEELLVKLNREDLLRKQRTFDNGSIPHQIHLGELHAILRRQEDFYPFLKDNREKIEKILTFRIPYYVGPLARGNSRFAWMTRKSEETITPWNFEEVVDKGASAQSFIERMTNFDKNLPNEKVLPKHSLLYEYFTVYNELTKVKYVTEGMRKPAFLSGEQKKAIVDLLFKTNRKVTVKQLKEDYFKKIECFDSVEISGVEDRFNASLGTYHDLLKIIKDKDFLDNEENEDILEDIVLTLTLFEDREMIEERLKTYAHLFDDKVMKQLKRRRYTGWGRLSRKLINGIRDKQSGKTILDFLKSDGFANRNFMQLIHDDSLTFKEDIQKAQVSGQGDSLHEHIANLAGSPAIKKGILQTVKVVDELVKVMGRHKPENIVIEMARENQTTQKGQKNSRERMKRIEEGIKELGSQILKEHPVENTQLQNEKLYLYYLQNGRDMYVDQELDINRLSDYDVDHIVPQSFLKDDSIDNKVLTRSDKARGKSDNVPSEEVVKKMKNYWRQLLNAKLITQRKFDNLTKAERGGLSELDKAGFIKRQLVETRQITKHVAQILDSRMNTKYDENDKLIREVKVITLKSKLVSDFRKDFQFYKVREINNYHHAHDAYLNAVVGTALIKKYPKLESEFVYGDYKVYDVRKMIAKSEQEIGKATAKYFFYSNIMNFFKTEITLANGEIRKRPLIETNGETGEIVWDKGRDFATVRKVLSMPQVNIVKKTEVQTGGFSKESILPKRNSDKLIARKKDWDPKKYGGFDSPTVAYSVLVVAKVEKGKSKKLKSVKELLGITIMERSSFEKNPIDFLEAKGYKEVKKDLIIKLPKYSLFELENGRKRMLASAGELQKGNELALPSKYVNFLYLASHYEKLKGSPEDNEQKQLFVEQHKHYLDEIIEQISEFSKRVILADANLDKVLSAYNKHRDKPIREQAENIIHLFTLTNLGAPAAFKYFDTTIDRKRYTSTKEVLDATLIHQSITGLYETRIDLSQLGGDGGGGSGSSPAPGGVLNLEEEYRLHEKPVPSSIDPSWLQLFPTVWAERAGMGLANQVPPVVVELRSGASPVAVRQYPMSKEAREGIRPHIQRFLDLGVLVPCQSPWNTPLLPVKKPGTNDYRPVQDLREINKRVQDIHPTVPNPYNLLSSLPPSHTWYSVLDLKDAFFCLKLHPNSQPLFAFEWRDPEKGNTGQLTWTRLPQGFKNSPTLFDEALHRDLAPFRALNPQVVLLQYVDDLLVAAPTYRDCKEGTQKLLQELSKLGYRVSAKKAQLCQKEVTYLGYLLKEGKRWLTPARKATVMKIPPPTTPRQVREFLGTAGFCRLWIPGFASLAAPLYPLTKESIPFIWTEEHQKAFDRIKEALLSAPALALPDLTKPFTLYVDERAGVARGVLTQTLGPWRRPVAYLSKKLDPVASGWPTCLKAVAAVALLLKDADKLTLGQNVTVIASHSLESIVRQPPDRWMTNARMTHYQSLLLNERVSFAPPAVLNPATLLPVESEATPVHRCSEILAEETGTRRDLKDQPLPGVPAWYTDGSSFIAEGKRRAGAAIVDGKRTVWASSLPEGTSAQKAELVALTQALRLAEGKDINIYTDSRYAFATAHIHGAIYKQRGLLTSAGKDIKNKEEILALLEAIHLPKRVAIIHCPGHQKGNDPVATGNRRADEAAKQAALSTRVLAETTKPAGKRTADGSEFEKRTADGSEFESPKKKAKVE

SEQ ID NO: 795 - protein, 2096 aa, synthetic construct
MPAAKRVKLDGGDKKYSIGLDIGTNSVGWAVITDEYKVPSKKFKVLGNTDRHSIKKNLIGALLFDSGETAEATRLKRTARRRYTRRKNRICYLQEIFSNEMAKVDDSFFHRLEESFLVEEDKKHERHPIFGNIVDEVAYHEKYPTIYHLRKKLVDSTDKADLRLIYLALAHMIKFRGHFLIEGDLNPDNSDVDKLFIQLVQTYNQLFEENPINASGVDAKAILSARLSKSRRLENLIAQLPGEKKNGLFGNLIALSLGLTPNFKSNFDLAEDAKLQLSKDTYDDDLDNLLAQIGDQYADLFLAAKNLSDAILLSDILRVNTEITKAPLSASMIKRYDEHHQDLTLLKALVRQQLPEKYKEIFFDQSKNGYAGYIDGGASQEEFYKFIKPILEKMDGTEELLVKLNREDLLRKQRTFDNGSIPHQIHLGELHAILRRQEDFYPFLKDNREKIEKILTFRIPYYVGPLARGNSRFAWMTRKSEETITPWNFEEVVDKGASAQSFIERMTNFDKNLPNEKVLPKHSLLYEYFTVYNELTKVKYVTEGMRKPAFLSGEQKKAIVDLLFKTNRKVTVKQLKEDYFKKIECFDSVEISGVEDRFNASLGTYHDLLKIIKDKDFLDNEENEDILEDIVLTLTLFEDREMIEERLKTYAHLFDDKVMKQLKRRRYTGWGRLSRKLINGIRDKQSGKTILDFLKSDGFANRNFMQLIHDDSLTFKEDIQKAQVSGQGDSLHEHIANLAGSPAIKKGILQTVKVVDELVKVMGRHKPENIVIEMARENQTTQKGQKNSRERMKRIEEGIKELGSQILKEHPVENTQLQNEKLYLYYLQNGRDMYVDQELDINRLSDYDVDHIVPQSFLKDDSIDNKVLTRSDKARGKSDNVPSEEVVKKMKNYWRQLLNAKLITQRKFDNLTKAERGGLSELDKAGFIKRQLVETRQITKHVAQILDSRMNTKYDENDKLIREVKVITLKSKLVSDFRKDFQFYKVREINNYHHAHDAYLNAVVGTALIKKYPKLESEFVYGDYKVYDVRKMIAKSEQEIGKATAKYFFYSNIMNFFKTEITLANGEIRKRPLIETNGETGEIVWDKGRDFATVRKVLSMPQVNIVKKTEVQTGGFSKESILPKRNSDKLIARKKDWDPKKYGGFDSPTVAYSVLVVAKVEKGKSKKLKSVKELLGITIMERSSFEKNPIDFLEAKGYKEVKKDLIIKLPKYSLFELENGRKRMLASAGELQKGNELALPSKYVNFLYLASHYEKLKGSPEDNEQKQLFVEQHKHYLDEIIEQISEFSKRVILADANLDKVLSAYNKHRDKPIREQAENIIHLFTLTNLGAPAAFKYFDTTIDRKRYTSTKEVLDATLIHQSITGLYETRIDLSQLGGDGGPAPAPAPAPAPAPGGVLNLEEEYRLHEKPVPSSIDPSWLQLFPTVWAERAGMGLANQVPPVVVELRSGASPVAVRQYPMSKEAREGIRPHIQRFLDLGVLVPCQSPWNTPLLPVKKPGTNDYRPVQDLREINKRVQDIHPTVPNPYNLLSSLPPSHTWYSVLDLKDAFFCLKLHPNSQPLFAFEWRDPEKGNTGQLTWTRLPQGFKNSPTLFDEALHRDLAPFRALNPQVVLLQYVDDLLVAAPTYRDCKEGTQKLLQELSKLGYRVSAKKAQLCQKEVTYLGYLLKEGKRWLTPARKATVMKIPPPTTPRQVREFLGTAGFCRLWIPGFASLAAPLYPLTKESIPFIWTEEHQKAFDRIKEALLSAPALALPDLTKPFTLYVDERAGVARGVLTQTLGPWRRPVAYLSKKLDPVASGWPTCLKAVAAVALLLKDADKLTLGQNVTVIASHSLESIVRQPPDRWMTNARMTHYQSLLLNERVSFAPPAVLNPATLLPVESEATPVHRCSEILAEETGTRRDLKDQPLPGVPAWYTDGSSFIAEGKRRAGAAIVDGKRTVWASSLPEGTSAQKAELVALTQALRLAEGKDINIYTDSRYAFATAHIHGAIYKQRGLLTSAGKDIKNKEEILALLEAIHLPKRVAIIHCPGHQKGNDPVATGNRRADEAAKQAALSTRVLAETTKPAGKRTADGSEFEKRTADGSEFESPKKKAKVE

SEQ ID NO: 796 - protein, 2094 aa, synthetic construct
MPAAKRVKLDGGDKKYSIGLDIGTNSVGWAVITDEYKVPSKKFKVLGNTDRHSIKKNLIGALLFDSGETAEATRLKRTARRRYTRRKNRICYLQEIFSNEMAKVDDSFFHRLEESFLVEEDKKHERHPIFGNIVDEVAYHEKYPTIYHLRKKLVDSTDKADLRLIYLALAHMIKFRGHFLIEGDLNPDNSDVDKLFIQLVQTYNQLFEENPINASGVDAKAILSARLSKSRRLENLIAQLPGEKKNGLFGNLIALSLGLTPNFKSNFDLAEDAKLQLSKDTYDDDLDNLLAQIGDQYADLFLAAKNLSDAILLSDILRVNTEITKAPLSASMIKRYDEHHQDLTLLKALVRQQLPEKYKEIFFDQSKNGYAGYIDGGASQEEFYKFIKPILEKMDGTEELLVKLNREDLLRKQRTFDNGSIPHQIHLGELHAILRRQEDFYPFLKDNREKIEKILTFRIPYYVGPLARGNSRFAWMTRKSEETITPWNFEEVVDKGASAQSFIERMTNFDKNLPNEKVLPKHSLLYEYFTVYNELTKVKYVTEGMRKPAFLSGEQKKAIVDLLFKTNRKVTVKQLKEDYFKKIECFDSVEISGVEDRFNASLGTYHDLLKIIKDKDFLDNEENEDILEDIVLTLTLFEDREMIEERLKTYAHLFDDKVMKQLKRRRYTGWGRLSRKLINGIRDKQSGKTILDFLKSDGFANRNFMQLIHDDSLTFKEDIQKAQVSGQGDSLHEHIANLAGSPAIKKGILQTVKVVDELVKVMGRHKPENIVIEMARENQTTQKGQKNSRERMKRIEEGIKELGSQILKEHPVENTQLQNEKLYLYYLQNGRDMYVDQELDINRLSDYDVDHIVPQSFLKDDSIDNKVLTRSDKARGKSDNVPSEEVVKKMKNYWRQLLNAKLITQRKFDNLTKAERGGLSELDKAGFIKRQLVETRQITKHVAQILDSRMNTKYDENDKLIREVKVITLKSKLVSDFRKDFQFYKVREINNYHHAHDAYLNAVVGTALIKKYPKLESEFVYGDYKVYDVRKMIAKSEQEIGKATAKYFFYSNIMNFFKTEITLANGEIRKRPLIETNGETGEIVWDKGRDFATVRKVLSMPQVNIVKKTEVQTGGFSKESILPKRNSDKLIARKKDWDPKKYGGFDSPTVAYSVLVVAKVEKGKSKKLKSVKELLGITIMERSSFEKNPIDFLEAKGYKEVKKDLIIKLPKYSLFELENGRKRMLASAGELQKGNELALPSKYVNFLYLASHYEKLKGSPEDNEQKQLFVEQHKHYLDEIIEQISEFSKRVILADANLDKVLSAYNKHRDKPIREQAENIIHLFTLTNLGAPAAFKYFDTTIDRKRYTSTKEVLDATLIHQSITGLYETRIDLSQLGGDGGGGSGGGEAAAKGGVLNLEEEYRLHEKPVPSSIDPSWLQLFPTVWAERAGMGLANQVPPVVVELRSGASPVAVRQYPMSKEAREGIRPHIQRFLDLGVLVPCQSPWNTPLLPVKKPGTNDYRPVQDLREINKRVQDIHPTVPNPYNLLSSLPPSHTWYSVLDLKDAFFCLKLHPNSQPLFAFEWRDPEKGNTGQLTWTRLPQGFKNSPTLFDEALHRDLAPFRALNPQVVLLQYVDDLLVAAPTYRDCKEGTQKLLQELSKLGYRVSAKKAQLCQKEVTYLGYLLKEGKRWLTPARKATVMKIPPPTTPRQVREFLGTAGFCRLWIPGFASLAAPLYPLTKESIPFIWTEEHQKAFDRIKEALLSAPALALPDLTKPFTLYVDERAGVARGVLTQTLGPWRRPVAYLSKKLDPVASGWPTCLKAVAAVALLLKDADKLTLGQNVTVIASHSLESIVRQPPDRWMTNARMTHYQSLLLNERVSFAPPAVLNPATLLPVESEATPVHRCSEILAEETGTRRDLKDQPLPGVPAWYTDGSSFIAEGKRRAGAAIVDGKRTVWASSLPEGTSAQKAELVALTQALRLAEGKDINIYTDSRYAFATAHIHGAIYKQRGLLTSAGKDIKNKEEILALLEAIHLPKRVAIIHCPGHQKGNDPVATGNRRADEAAKQAALSTRVLAETTKPAGKRTADGSEFEKRTADGSEFESPKKKAKVE

SEQ ID NO: 797 - protein, 2092 aa, synthetic construct
MPAAKRVKLDGGDKKYSIGLDIGTNSVGWAVITDEYKVPSKKFKVLGNTDRHSIKKNLIGALLFDSGETAEATRLKRTARRRYTRRKNRICYLQEIFSNEMAKVDDSFFHRLEESFLVEEDKKHERHPIFGNIVDEVAYHEKYPTIYHLRKKLVDSTDKADLRLIYLALAHMIKFRGHFLIEGDLNPDNSDVDKLFIQLVQTYNQLFEENPINASGVDAKAILSARLSKSRRLENLIAQLPGEKKNGLFGNLIALSLGLTPNFKSNFDLAEDAKLQLSKDTYDDDLDNLLAQIGDQYADLFLAAKNLSDAILLSDILRVNTEITKAPLSASMIKRYDEHHQDLTLLKALVRQQLPEKYKEIFFDQSKNGYAGYIDGGASQEEFYKFIKPILEKMDGTEELLVKLNREDLLRKQRTFDNGSIPHQIHLGELHAILRRQEDFYPFLKDNREKIEKILTFRIPYYVGPLARGNSRFAWMTRKSEETITPWNFEEVVDKGASAQSFIERMTNFDKNLPNEKVLPKHSLLYEYFTVYNELTKVKYVTEGMRKPAFLSGEQKKAIVDLLFKTNRKVTVKQLKEDYFKKIECFDSVEISGVEDRFNASLGTYHDLLKIIKDKDFLDNEENEDILEDIVLTLTLFEDREMIEERLKTYAHLFDDKVMKQLKRRRYTGWGRLSRKLINGIRDKQSGKTILDFLKSDGFANRNFMQLIHDDSLTFKEDIQKAQVSGQGDSLHEHIANLAGSPAIKKGILQTVKVVDELVKVMGRHKPENIVIEMARENQTTQKGQKNSRERMKRIEEGIKELGSQILKEHPVENTQLQNEKLYLYYLQNGRDMYVDQELDINRLSDYDVDHIVPQSFLKDDSIDNKVLTRSDKARGKSDNVPSEEVVKKMKNYWRQLLNAKLITQRKFDNLTKAERGGLSELDKAGFIKRQLVETRQITKHVAQILDSRMNTKYDENDKLIREVKVITLKSKLVSDFRKDFQFYKVREINNYHHAHDAYLNAVVGTALIKKYPKLESEFVYGDYKVYDVRKMIAKSEQEIGKATAKYFFYSNIMNFFKTEITLANGEIRKRPLIETNGETGEIVWDKGRDFATVRKVLSMPQVNIVKKTEVQTGGFSKESILPKRNSDKLIARKKDWDPKKYGGFDSPTVAYSVLVVAKVEKGKSKKLKSVKELLGITIMERSSFEKNPIDFLEAKGYKEVKKDLIIKLPKYSLFELENGRKRMLASAGELQKGNELALPSKYVNFLYLASHYEKLKGSPEDNEQKQLFVEQHKHYLDEIIEQISEFSKRVILADANLDKVLSAYNKHRDKPIREQAENIIHLFTLTNLGAPAAFKYFDTTIDRKRYTSTKEVLDATLIHQSITGLYETRIDLSQLGGDGGGGGPAPGSSGGVLNLEEEYRLHEKPVPSSIDPSWLQLFPTVWAERAGMGLANQVPPVVVELRSGASPVAVRQYPMSKEAREGIRPHIQRFLDLGVLVPCQSPWNTPLLPVKKPGTNDYRPVQDLREINKRVQDIHPTVPNPYNLLSSLPPSHTWYSVLDLKDAFFCLKLHPNSQPLFAFEWRDPEKGNTGQLTWTRLPQGFKNSPTLFDEALHRDLAPFRALNPQVVLLQYVDDLLVAAPTYRDCKEGTQKLLQELSKLGYRVSAKKAQLCQKEVTYLGYLLKEGKRWLTPARKATVMKIPPPTTPRQVREFLGTAGFCRLWIPGFASLAAPLYPLTKESIPFIWTEEHQKAFDRIKEALLSAPALALPDLTKPFTLYVDERAGVARGVLTQTLGPWRRPVAYLSKKLDPVASGWPTCLKAVAAVALLLKDADKLTLGQNVTVIASHSLESIVRQPPDRWMTNARMTHYQSLLLNERVSFAPPAVLNPATLLPVESEATPVHRCSEILAEETGTRRDLKDQPLPGVPAWYTDGSSFIAEGKRRAGAAIVDGKRTVWASSLPEGTSAQKAELVALTQALRLAEGKDINIYTDSRYAFATAHIHGAIYKQRGLLTSAGKDIKNKEEILALLEAIHLPKRVAIIHCPGHQKGNDPVATGNRRADEAAKQAALSTRVLAETTKPAGKRTADGSEFEKRTADGSEFESPKKKAKVE

SEQ ID NO: 798 - protein, 2094 aa, synthetic construct
MPAAKRVKLDGGDKKYSIGLDIGTNSVGWAVITDEYKVPSKKFKVLGNTDRHSIKKNLIGALLFDSGETAEATRLKRTARRRYTRRKNRICYLQEIFSNEMAKVDDSFFHRLEESFLVEEDKKHERHPIFGNIVDEVAYHEKYPTIYHLRKKLVDSTDKADLRLIYLALAHMIKFRGHFLIEGDLNPDNSDVDKLFIQLVQTYNQLFEENPINASGVDAKAILSARLSKSRRLENLIAQLPGEKKNGLFGNLIALSLGLTPNFKSNFDLAEDAKLQLSKDTYDDDLDNLLAQIGDQYADLFLAAKNLSDAILLSDILRVNTEITKAPLSASMIKRYDEHHQDLTLLKALVRQQLPEKYKEIFFDQSKNGYAGYIDGGASQEEFYKFIKPILEKMDGTEELLVKLNREDLLRKQRTFDNGSIPHQIHLGELHAILRRQEDFYPFLKDNREKIEKILTFRIPYYVGPLARGNSRFAWMTRKSEETITPWNFEEVVDKGASAQSFIERMTNFDKNLPNEKVLPKHSLLYEYFTVYNELTKVKYVTEGMRKPAFLSGEQKKAIVDLLFKTNRKVTVKQLKEDYFKKIECFDSVEISGVEDRFNASLGTYHDLLKIIKDKDFLDNEENEDILEDIVLTLTLFEDREMIEERLKTYAHLFDDKVMKQLKRRRYTGWGRLSRKLINGIRDKQSGKTILDFLKSDGFANRNFMQLIHDDSLTFKEDIQKAQVSGQGDSLHEHIANLAGSPAIKKGILQTVKVVDELVKVMGRHKPENIVIEMARENQTTQKGQKNSRERMKRIEEGIKELGSQILKEHPVENTQLQNEKLYLYYLQNGRDMYVDQELDINRLSDYDVDHIVPQSFLKDDSIDNKVLTRSDKARGKSDNVPSEEVVKKMKNYWRQLLNAKLITQRKFDNLTKAERGGLSELDKAGFIKRQLVETRQITKHVAQILDSRMNTKYDENDKLIREVKVITLKSKLVSDFRKDFQFYKVREINNYHHAHDAYLNAVVGTALIKKYPKLESEFVYGDYKVYDVRKMIAKSEQEIGKATAKYFFYSNIMNFFKTEITLANGEIRKRPLIETNGETGEIVWDKGRDFATVRKVLSMPQVNIVKKTEVQTGGFSKESILPKRNSDKLIARKKDWDPKKYGGFDSPTVAYSVLVVAKVEKGKSKKLKSVKELLGITIMERSSFEKNPIDFLEAKGYKEVKKDLIIKLPKYSLFELENGRKRMLASAGELQKGNELALPSKYVNFLYLASHYEKLKGSPEDNEQKQLFVEQHKHYLDEIIEQISEFSKRVILADANLDKVLSAYNKHRDKPIREQAENIIHLFTLTNLGAPAAFKYFDTTIDRKRYTSTKEVLDATLIHQSITGLYETRIDLSQLGGDGGGGGGGSEAAAKGGVLNLEEEYRLHEKPVPSSIDPSWLQLFPTVWAERAGMGLANQVPPVVVELRSGASPVAVRQYPMSKEAREGIRPHIQRFLDLGVLVPCQSPWNTPLLPVKKPGTNDYRPVQDLREINKRVQDIHPTVPNPYNLLSSLPPSHTWYSVLDLKDAFFCLKLHPNSQPLFAFEWRDPEKGNTGQLTWTRLPQGFKNSPTLFDEALHRDLAPFRALNPQVVLLQYVDDLLVAAPTYRDCKEGTQKLLQELSKLGYRVSAKKAQLCQKEVTYLGYLLKEGKRWLTPARKATVMKIPPPTTPRQVREFLGTAGFCRLWIPGFASLAAPLYPLTKESIPFIWTEEHQKAFDRIKEALLSAPALALPDLTKPFTLYVDERAGVARGVLTQTLGPWRRPVAYLSKKLDPVASGWPTCLKAVAAVALLLKDADKLTLGQNVTVIASHSLESIVRQPPDRWMTNARMTHYQSLLLNERVSFAPPAVLNPATLLPVESEATPVHRCSEILAEETGTRRDLKDQPLPGVPAWYTDGSSFIAEGKRRAGAAIVDGKRTVWASSLPEGTSAQKAELVALTQALRLAEGKDINIYTDSRYAFATAHIHGAIYKQRGLLTSAGKDIKNKEEILALLEAIHLPKRVAIIHCPGHQKGNDPVATGNRRADEAAKQAALSTRVLAETTKPAGKRTADGSEFEKRTADGSEFESPKKKAKVE

SEQ ID NO: 799 - protein, 2108 aa, synthetic construct
MPAAKRVKLDGGDKKYSIGLDIGTNSVGWAVITDEYKVPSKKFKVLGNTDRHSIKKNLIGALLFDSGETAEATRLKRTARRRYTRRKNRICYLQEIFSNEMAKVDDSFFHRLEESFLVEEDKKHERHPIFGNIVDEVAYHEKYPTIYHLRKKLVDSTDKADLRLIYLALAHMIKFRGHFLIEGDLNPDNSDVDKLFIQLVQTYNQLFEENPINASGVDAKAILSARLSKSRRLENLIAQLPGEKKNGLFGNLIALSLGLTPNFKSNFDLAEDAKLQLSKDTYDDDLDNLLAQIGDQYADLFLAAKNLSDAILLSDILRVNTEITKAPLSASMIKRYDEHHQDLTLLKALVRQQLPEKYKEIFFDQSKNGYAGYIDGGASQEEFYKFIKPILEKMDGTEELLVKLNREDLLRKQRTFDNGSIPHQIHLGELHAILRRQEDFYPFLKDNREKIEKILTFRIPYYVGPLARGNSRFAWMTRKSEETITPWNFEEVVDKGASAQSFIERMTNFDKNLPNEKVLPKHSLLYEYFTVYNELTKVKYVTEGMRKPAFLSGEQKKAIVDLLFKTNRKVTVKQLKEDYFKKIECFDSVEISGVEDRFNASLGTYHDLLKIIKDKDFLDNEENEDILEDIVLTLTLFEDREMIEERLKTYAHLFDDKVMKQLKRRRYTGWGRLSRKLINGIRDKQSGKTILDFLKSDGFANRNFMQLIHDDSLTFKEDIQKAQVSGQGDSLHEHIANLAGSPAIKKGILQTVKVVDELVKVMGRHKPENIVIEMARENQTTQKGQKNSRERMKRIEEGIKELGSQILKEHPVENTQLQNEKLYLYYLQNGRDMYVDQELDINRLSDYDVDHIVPQSFLKDDSIDNKVLTRSDKARGKSDNVPSEEVVKKMKNYWRQLLNAKLITQRKFDNLTKAERGGLSELDKAGFIKRQLVETRQITKHVAQILDSRMNTKYDENDKLIREVKVITLKSKLVSDFRKDFQFYKVREINNYHHAHDAYLNAVVGTALIKKYPKLESEFVYGDYKVYDVRKMIAKSEQEIGKATAKYFFYSNIMNFFKTEITLANGEIRKRPLIETNGETGEIVWDKGRDFATVRKVLSMPQVNIVKKTEVQTGGFSKESILPKRNSDKLIARKKDWDPKKYGGFDSPTVAYSVLVVAKVEKGKSKKLKSVKELLGITIMERSSFEKNPIDFLEAKGYKEVKKDLIIKLPKYSLFELENGRKRMLASAGELQKGNELALPSKYVNFLYLASHYEKLKGSPEDNEQKQLFVEQHKHYLDEIIEQISEFSKRVILADANLDKVLSAYNKHRDKPIREQAENIIHLFTLTNLGAPAAFKYFDTTIDRKRYTSTKEVLDATLIHQSITGLYETRIDLSQLGGDGGEAAAKEAAAKEAAAKEAAAKEAAAKGGVLNLEEEYRLHEKPVPSSIDPSWLQLFPTVWAERAGMGLANQVPPVVVELRSGASPVAVRQYPMSKEAREGIRPHIQRFLDLGVLVPCQSPWNTPLLPVKKPGTNDYRPVQDLREINKRVQDIHPTVPNPYNLLSSLPPSHTWYSVLDLKDAFFCLKLHPNSQPLFAFEWRDPEKGNTGQLTWTRLPQGFKNSPTLFNEALHRDLAPFRALNPQVVLLQYVDDLLVAAPTYRDCKEGTQKLLQELSKLGYRVSAKKAQLCQKEVTYLGYLLKEGKRWLTPARKATVMKIPPPTTPRQVREFLGTAGFCRLWIPGFASLAAPLYPLTKPSIPFIWTEEHQKAFDRIKEALLSAPALALPDLTKPFTLYVDERAGVARGVLTQTLGPWRRPVAYLSKKLDPVASGWPTCLKAVAAVALLLKDADKLTLGQNVTVIASHSLESIVRQPPDRWMTNARMTHYQSLLLNERVSFAPPAVLNPATLLPVESEATPVHRCSEILAEETGTRRDLKDQPLPGVPAWYTDGSSFIAEGKRRAGAAIVDGKRTVWASSLPEGTSAQKAELVALTQALRLAEGKDINIYTDSRYAFATAHIHGAIYKQRGWLTSAGKDIKNKEEILALLEAIHLPKRVAIIHCPGHQKGNDPVATGNRRADEAAKQAALSTRVLAETTKPAGKRTADGSEFEKRTADGSEFESPKKKAKVE

SEQ ID NO: 800 - protein, 2094 aa, synthetic construct
MPAAKRVKLDGGDKKYSIGLDIGTNSVGWAVITDEYKVPSKKFKVLGNTDRHSIKKNLIGALLFDSGETAEATRLKRTARRRYTRRKNRICYLQEIFSNEMAKVDDSFFHRLEESFLVEEDKKHERHPIFGNIVDEVAYHEKYPTIYHLRKKLVDSTDKADLRLIYLALAHMIKFRGHFLIEGDLNPDNSDVDKLFIQLVQTYNQLFEENPINASGVDAKAILSARLSKSRRLENLIAQLPGEKKNGLFGNLIALSLGLTPNFKSNFDLAEDAKLQLSKDTYDDDLDNLLAQIGDQYADLFLAAKNLSDAILLSDILRVNTEITKAPLSASMIKRYDEHHQDLTLLKALVRQQLPEKYKEIFFDQSKNGYAGYIDGGASQEEFYKFIKPILEKMDGTEELLVKLNREDLLRKQRTFDNGSIPHQIHLGELHAILRRQEDFYPFLKDNREKIEKILTFRIPYYVGPLARGNSRFAWMTRKSEETITPWNFEEVVDKGASAQSFIERMTNFDKNLPNEKVLPKHSLLYEYFTVYNELTKVKYVTEGMRKPAFLSGEQKKAIVDLLFKTNRKVTVKQLKEDYFKKIECFDSVEISGVEDRFNASLGTYHDLLKIIKDKDFLDNEENEDILEDIVLTLTLFEDREMIEERLKTYAHLFDDKVMKQLKRRRYTGWGRLSRKLINGIRDKQSGKTILDFLKSDGFANRNFMQLIHDDSLTFKEDIQKAQVSGQGDSLHEHIANLAGSPAIKKGILQTVKVVDELVKVMGRHKPENIVIEMARENQTTQKGQKNSRERMKRIEEGIKELGSQILKEHPVENTQLQNEKLYLYYLQNGRDMYVDQELDINRLSDYDVDHIVPQSFLKDDSIDNKVLTRSDKARGKSDNVPSEEVVKKMKNYWRQLLNAKLITQRKFDNLTKAERGGLSELDKAGFIKRQLVETRQITKHVAQILDSRMNTKYDENDKLIREVKVITLKSKLVSDFRKDFQFYKVREINNYHHAHDAYLNAVVGTALIKKYPKLESEFVYGDYKVYDVRKMIAKSEQEIGKATAKYFFYSNIMNFFKTEITLANGEIRKRPLIETNGETGEIVWDKGRDFATVRKVLSMPQVNIVKKTEVQTGGFSKESILPKRNSDKLIARKKDWDPKKYGGFDSPTVAYSVLVVAKVEKGKSKKLKSVKELLGITIMERSSFEKNPIDFLEAKGYKEVKKDLIIKLPKYSLFELENGRKRMLASAGELQKGNELALPSKYVNFLYLASHYEKLKGSPEDNEQKQLFVEQHKHYLDEIIEQISEFSKRVILADANLDKVLSAYNKHRDKPIREQAENIIHLFTLTNLGAPAAFKYFDTTIDRKRYTSTKEVLDATLIHQSITGLYETRIDLSQLGGDGGGGGGGSEAAAKGGVLNLEEEYRLHEKPVPSSIDPSWLQLFPTVWAERAGMGLANQVPPVVVELRSGASPVAVRQYPMSKEAREGIRPHIQRFLDLGVLVPCQSPWNTPLLPVKKPGTNDYRPVQDLREINKRVQDIHPTVPNPYNLLSSLPPSHTWYSVLDLKDAFFCLKLHPNSQPLFAFEWRDPEKGNTGQLTWTRLPQGFKNSPTLFNEALHRDLAPFRALNPQVVLLQYVDDLLVAAPTYRDCKEGTQKLLQELSKLGYRVSAKKAQLCQKEVTYLGYLLKEGKRWLTPARKATVMKIPPPTTPRQVREFLGTAGFCRLWIPGFASLAAPLYPLTKPSIPFIWTEEHQKAFDRIKEALLSAPALALPDLTKPFTLYVDERAGVARGVLTQTLGPWRRPVAYLSKKLDPVASGWPTCLKAVAAVALLLKDADKLTLGQNVTVIASHSLESIVRQPPDRWMTNARMTHYQSLLLNERVSFAPPAVLNPATLLPVESEATPVHRCSEILAEETGTRRDLKDQPLPGVPAWYTDGSSFIAEGKRRAGAAIVDGKRTVWASSLPEGTSAQKAELVALTQALRLAEGKDINIYTDSRYAFATAHIHGAIYKQRGWLTSAGKDIKNKEEILALLEAIHLPKRVAIIHCPGHQKGNDPVATGNRRADEAAKQAALSTRVLAETTKPAGKRTADGSEFEKRTADGSEFESPKKKAKVE

SEQ ID NO: 801 - protein, 2129 aa, synthetic construct
MPAAKRVKLDGGDKKYSIGLDIGTNSVGWAVITDEYKVPSKKFKVLGNTDRHSIKKNLIGALLFDSGETAEATRLKRTARRRYTRRKNRICYLQEIFSNEMAKVDDSFFHRLEESFLVEEDKKHERHPIFGNIVDEVAYHEKYPTIYHLRKKLVDSTDKADLRLIYLALAHMIKFRGHFLIEGDLNPDNSDVDKLFIQLVQTYNQLFEENPINASGVDAKAILSARLSKSRRLENLIAQLPGEKKNGLFGNLIALSLGLTPNFKSNFDLAEDAKLQLSKDTYDDDLDNLLAQIGDQYADLFLAAKNLSDAILLSDILRVNTEITKAPLSASMIKRYDEHHQDLTLLKALVRQQLPEKYKEIFFDQSKNGYAGYIDGGASQEEFYKFIKPILEKMDGTEELLVKLNREDLLRKQRTFDNGSIPHQIHLGELHAILRRQEDFYPFLKDNREKIEKILTFRIPYYVGPLARGNSRFAWMTRKSEETITPWNFEEVVDKGASAQSFIERMTNFDKNLPNEKVLPKHSLLYEYFTVYNELTKVKYVTEGMRKPAFLSGEQKKAIVDLLFKTNRKVTVKQLKEDYFKKIECFDSVEISGVEDRFNASLGTYHDLLKIIKDKDFLDNEENEDILEDIVLTLTLFEDREMIEERLKTYAHLFDDKVMKQLKRRRYTGWGRLSRKLINGIRDKQSGKTILDFLKSDGFANRNFMQLIHDDSLTFKEDIQKAQVSGQGDSLHEHIANLAGSPAIKKGILQTVKVVDELVKVMGRHKPENIVIEMARENQTTQKGQKNSRERMKRIEEGIKELGSQILKEHPVENTQLQNEKLYLYYLQNGRDMYVDQELDINRLSDYDVDHIVPQSFLKDDSIDNKVLTRSDKARGKSDNVPSEEVVKKMKNYWRQLLNAKLITQRKFDNLTKAERGGLSELDKAGFIKRQLVETRQITKHVAQILDSRMNTKYDENDKLIREVKVITLKSKLVSDFRKDFQFYKVREINNYHHAHDAYLNAVVGTALIKKYPKLESEFVYGDYKVYDVRKMIAKSEQEIGKATAKYFFYSNIMNFFKTEITLANGEIRKRPLIETNGETGEIVWDKGRDFATVRKVLSMPQVNIVKKTEVQTGGFSKESILPKRNSDKLIARKKDWDPKKYGGFDSPTVAYSVLVVAKVEKGKSKKLKSVKELLGITIMERSSFEKNPIDFLEAKGYKEVKKDLIIKLPKYSLFELENGRKRMLASAGELQKGNELALPSKYVNFLYLASHYEKLKGSPEDNEQKQLFVEQHKHYLDEIIEQISEFSKRVILADANLDKVLSAYNKHRDKPIREQAENIIHLFTLTNLGAPAAFKYFDTTIDRKRYTSTKEVLDATLIHQSITGLYETRIDLSQLGGDGGAEAAAKEAAAKEAAAKEAAAKALEAEAAAKEAAAKEAAAKEAAAKAGGVLNLEEEYRLHEKPVPSSIDPSWLQLFPTVWAERAGMGLANQVPPVVVELRSGASPVAVRQYPMSKEAREGIRPHIQRFLDLGVLVPCQSPWNTPLLPVKKPGTNDYRPVQDLREINKRVQDIHPTVPNPYNLLSSLPPSHTWYSVLDLKDAFFCLKLHPNSQPLFAFEWRDPEKGNTGQLTWTRLPQGFKNSPTLFNEALHRDLAPFRALNPQVVLLQYVDDLLVAAPTYRDCKEGTQKLLQELSKLGYRVSAKKAQLCQKEVTYLGYLLKEGKRWLTPARKATVMKIPPPTTPRQVREFLGTAGFCRLWIPGFASLAAPLYPLTKPSIPFIWTEEHQKAFDRIKEALLSAPALALPDLTKPFTLYVDERAGVARGVLTQTLGPWRRPVAYLSKKLDPVASGWPTCLKAVAAVALLLKDADKLTLGQNVTVIASHSLESIVRQPPDRWMTNARMTHYQSLLLNERVSFAPPAVLNPATLLPVESEATPVHRCSEILAEETGTRRDLKDQPLPGVPAWYTDGSSFIAEGKRRAGAAIVDGKRTVWASSLPEGTSAQKAELVALTQALRLAEGKDINIYTDSRYAFATAHIHGAIYKQRGWLTSAGKDIKNKEEILALLEAIHLPKRVAIIHCPGHQKGNDPVATGNRRADEAAKQAALSTRVLAETTKPAGKRTADGSEFEKRTADGSEFESPKKKAKVE

SEQ ID NO: 802 - protein, 2090 aa, synthetic construct
MPAAKRVKLDGGDKKYSIGLDIGTNSVGWAVITDEYKVPSKKFKVLGNTDRHSIKKNLIGALLFDSGETAEATRLKRTARRRYTRRKNRICYLQEIFSNEMAKVDDSFFHRLEESFLVEEDKKHERHPIFGNIVDEVAYHEKYPTIYHLRKKLVDSTDKADLRLIYLALAHMIKFRGHFLIEGDLNPDNSDVDKLFIQLVQTYNQLFEENPINASGVDAKAILSARLSKSRRLENLIAQLPGEKKNGLFGNLIALSLGLTPNFKSNFDLAEDAKLQLSKDTYDDDLDNLLAQIGDQYADLFLAAKNLSDAILLSDILRVNTEITKAPLSASMIKRYDEHHQDLTLLKALVRQQLPEKYKEIFFDQSKNGYAGYIDGGASQEEFYKFIKPILEKMDGTEELLVKLNREDLLRKQRTFDNGSIPHQIHLGELHAILRRQEDFYPFLKDNREKIEKILTFRIPYYVGPLARGNSRFAWMTRKSEETITPWNFEEVVDKGASAQSFIERMTNFDKNLPNEKVLPKHSLLYEYFTVYNELTKVKYVTEGMRKPAFLSGEQKKAIVDLLFKTNRKVTVKQLKEDYFKKIECFDSVEISGVEDRFNASLGTYHDLLKIIKDKDFLDNEENEDILEDIVLTLTLFEDREMIEERLKTYAHLFDDKVMKQLKRRRYTGWGRLSRKLINGIRDKQSGKTILDFLKSDGFANRNFMQLIHDDSLTFKEDIQKAQVSGQGDSLHEHIANLAGSPAIKKGILQTVKVVDELVKVMGRHKPENIVIEMARENQTTQKGQKNSRERMKRIEEGIKELGSQILKEHPVENTQLQNEKLYLYYLQNGRDMYVDQELDINRLSDYDVDHIVPQSFLKDDSIDNKVLTRSDKARGKSDNVPSEEVVKKMKNYWRQLLNAKLITQRKFDNLTKAERGGLSELDKAGFIKRQLVETRQITKHVAQILDSRMNTKYDENDKLIREVKVITLKSKLVSDFRKDFQFYKVREINNYHHAHDAYLNAVVGTALIKKYPKLESEFVYGDYKVYDVRKMIAKSEQEIGKATAKYFFYSNIMNFFKTEITLANGEIRKRPLIETNGETGEIVWDKGRDFATVRKVLSMPQVNIVKKTEVQTGGFSKESILPKRNSDKLIARKKDWDPKKYGGFDSPTVAYSVLVVAKVEKGKSKKLKSVKELLGITIMERSSFEKNPIDFLEAKGYKEVKKDLIIKLPKYSLFELENGRKRMLASAGELQKGNELALPSKYVNFLYLASHYEKLKGSPEDNEQKQLFVEQHKHYLDEIIEQISEFSKRVILADANLDKVLSAYNKHRDKPIREQAENIIHLFTLTNLGAPAAFKYFDTTIDRKRYTSTKEVLDATLIHQSITGLYETRIDLSQLGGDGGGGGGGGGGGVLNLEEEYRLHEKPVPSSIDPSWLQLFPTVWAERAGMGLANQVPPVVVELRSGASPVAVRQYPMSKEAREGIRPHIQRFLDLGVLVPCQSPWNTPLLPVKKPGTNDYRPVQDLREINKRVQDIHPTVPNPYNLLSSLPPSHTWYSVLDLKDAFFCLKLHPNSQPLFAFEWRDPEKGNTGQLTWTRLPQGFKNSPTLFNEALHRDLAPFRALNPQVVLLQYVDDLLVAAPTYRDCKEGTQKLLQELSKLGYRVSAKKAQLCQKEVTYLGYLLKEGKRWLTPARKATVMKIPPPTTPRQVREFLGTAGFCRLWIPGFASLAAPLYPLTKPSIPFIWTEEHQKAFDRIKEALLSAPALALPDLTKPFTLYVDERAGVARGVLTQTLGPWRRPVAYLSKKLDPVASGWPTCLKAVAAVALLLKDADKLTLGQNVTVIASHSLESIVRQPPDRWMTNARMTHYQSLLLNERVSFAPPAVLNPATLLPVESEATPVHRCSEILAEETGTRRDLKDQPLPGVPAWYTDGSSFIAEGKRRAGAAIVDGKRTVWASSLPEGTSAQKAELVALTQALRLAEGKDINIYTDSRYAFATAHIHGAIYKQRGWLTSAGKDIKNKEEILALLEAIHLPKRVAIIHCPGHQKGNDPVATGNRRADEAAKQAALSTRVLAETTKPAGKRTADGSEFEKRTADGSEFESPKKKAKVE

SEQ ID NO: 803 - protein, 2086 aa, synthetic construct
MPAAKRVKLDGGDKKYSIGLDIGTNSVGWAVITDEYKVPSKKFKVLGNTDRHSIKKNLIGALLFDSGETAEATRLKRTARRRYTRRKNRICYLQEIFSNEMAKVDDSFFHRLEESFLVEEDKKHERHPIFGNIVDEVAYHEKYPTIYHLRKKLVDSTDKADLRLIYLALAHMIKFRGHFLIEGDLNPDNSDVDKLFIQLVQTYNQLFEENPINASGVDAKAILSARLSKSRRLENLIAQLPGEKKNGLFGNLIALSLGLTPNFKSNFDLAEDAKLQLSKDTYDDDLDNLLAQIGDQYADLFLAAKNLSDAILLSDILRVNTEITKAPLSASMIKRYDEHHQDLTLLKALVRQQLPEKYKEIFFDQSKNGYAGYIDGGASQEEFYKFIKPILEKMDGTEELLVKLNREDLLRKQRTFDNGSIPHQIHLGELHAILRRQEDFYPFLKDNREKIEKILTFRIPYYVGPLARGNSRFAWMTRKSEETITPWNFEEVVDKGASAQSFIERMTNFDKNLPNEKVLPKHSLLYEYFTVYNELTKVKYVTEGMRKPAFLSGEQKKAIVDLLFKTNRKVTVKQLKEDYFKKIECFDSVEISGVEDRFNASLGTYHDLLKIIKDKDFLDNEENEDILEDIVLTLTLFEDREMIEERLKTYAHLFDDKVMKQLKRRRYTGWGRLSRKLINGIRDKQSGKTILDFLKSDGFANRNFMQLIHDDSLTFKEDIQKAQVSGQGDSLHEHIANLAGSPAIKKGILQTVKVVDELVKVMGRHKPENIVIEMARENQTTQKGQKNSRERMKRIEEGIKELGSQILKEHPVENTQLQNEKLYLYYLQNGRDMYVDQELDINRLSDYDVDHIVPQSFLKDDSIDNKVLTRSDKARGKSDNVPSEEVVKKMKNYWRQLLNAKLITQRKFDNLTKAERGGLSELDKAGFIKRQLVETRQITKHVAQILDSRMNTKYDENDKLIREVKVITLKSKLVSDFRKDFQFYKVREINNYHHAHDAYLNAVVGTALIKKYPKLESEFVYGDYKVYDVRKMIAKSEQEIGKATAKYFFYSNIMNFFKTEITLANGEIRKRPLIETNGETGEIVWDKGRDFATVRKVLSMPQVNIVKKTEVQTGGFSKESILPKRNSDKLIARKKDWDPKKYGGFDSPTVAYSVLVVAKVEKGKSKKLKSVKELLGITIMERSSFEKNPIDFLEAKGYKEVKKDLIIKLPKYSLFELENGRKRMLASAGELQKGNELALPSKYVNFLYLASHYEKLKGSPEDNEQKQLFVEQHKHYLDEIIEQISEFSKRVILADANLDKVLSAYNKHRDKPIREQAENIIHLFTLTNLGAPAAFKYFDTTIDRKRYTSTKEVLDATLIHQSITGLYETRIDLSQLGGDGGGSSGGVLNLEEEYRLHEKPVPSSIDPSWLQLFPTVWAERAGMGLANQVPPVVVELRSGASPVAVRQYPMSKEAREGIRPHIQRFLDLGVLVPCQSPWNTPLLPVKKPGTNDYRPVQDLREINKRVQDIHPTVPNPYNLLSSLPPSHTWYSVLDLKDAFFCLKLHPNSQPLFAFEWRDPEKGNTGQLTWTRLPQGFKNSPTLFNEALHRDLAPFRALNPQVVLLQYVDDLLVAAPTYRDCKEGTQKLLQELSKLGYRVSAKKAQLCQKEVTYLGYLLKEGKRWLTPARKATVMKIPPPTTPRQVREFLGTAGFCRLWIPGFASLAAPLYPLTKPSIPFIWTEEHQKAFDRIKEALLSAPALALPDLTKPFTLYVDERAGVARGVLTQTLGPWRRPVAYLSKKLDPVASGWPTCLKAVAAVALLLKDADKLTLGQNVTVIASHSLESIVRQPPDRWMTNARMTHYQSLLLNERVSFAPPAVLNPATLLPVESEATPVHRCSEILAEETGTRRDLKDQPLPGVPAWYTDGSSFIAEGKRRAGAAIVDGKRTVWASSLPEGTSAQKAELVALTQALRLAEGKDINIYTDSRYAFATAHIHGAIYKQRGWLTSAGKDIKNKEEILALLEAIHLPKRVAIIHCPGHQKGNDPVATGNRRADEAAKQAALSTRVLAETTKPAGKRTADGSEFEKRTADGSEFESPKKKAKVE

SEQ ID NO: 804 - protein, 2092 aa, synthetic construct
MPAAKRVKLDGGDKKYSIGLDIGTNSVGWAVITDEYKVPSKKFKVLGNTDRHSIKKNLIGALLFDSGETAEATRLKRTARRRYTRRKNRICYLQEIFSNEMAKVDDSFFHRLEESFLVEEDKKHERHPIFGNIVDEVAYHEKYPTIYHLRKKLVDSTDKADLRLIYLALAHMIKFRGHFLIEGDLNPDNSDVDKLFIQLVQTYNQLFEENPINASGVDAKAILSARLSKSRRLENLIAQLPGEKKNGLFGNLIALSLGLTPNFKSNFDLAEDAKLQLSKDTYDDDLDNLLAQIGDQYADLFLAAKNLSDAILLSDILRVNTEITKAPLSASMIKRYDEHHQDLTLLKALVRQQLPEKYKEIFFDQSKNGYAGYIDGGASQEEFYKFIKPILEKMDGTEELLVKLNREDLLRKQRTFDNGSIPHQIHLGELHAILRRQEDFYPFLKDNREKIEKILTFRIPYYVGPLARGNSRFAWMTRKSEETITPWNFEEVVDKGASAQSFIERMTNFDKNLPNEKVLPKHSLLYEYFTVYNELTKVKYVTEGMRKPAFLSGEQKKAIVDLLFKTNRKVTVKQLKEDYFKKIECFDSVEISGVEDRFNASLGTYHDLLKIIKDKDFLDNEENEDILEDIVLTLTLFEDREMIEERLKTYAHLFDDKVMKQLKRRRYTGWGRLSRKLINGIRDKQSGKTILDFLKSDGFANRNFMQLIHDDSLTFKEDIQKAQVSGQGDSLHEHIANLAGSPAIKKGILQTVKVVDELVKVMGRHKPENIVIEMARENQTTQKGQKNSRERMKRIEEGIKELGSQILKEHPVENTQLQNEKLYLYYLQNGRDMYVDQELDINRLSDYDVDHIVPQSFLKDDSIDNKVLTRSDKARGKSDNVPSEEVVKKMKNYWRQLLNAKLITQRKFDNLTKAERGGLSELDKAGFIKRQLVETRQITKHVAQILDSRMNTKYDENDKLIREVKVITLKSKLVSDFRKDFQFYKVREINNYHHAHDAYLNAVVGTALIKKYPKLESEFVYGDYKVYDVRKMIAKSEQEIGKATAKYFFYSNIMNFFKTEITLANGEIRKRPLIETNGETGEIVWDKGRDFATVRKVLSMPQVNIVKKTEVQTGGFSKESILPKRNSDKLIARKKDWDPKKYGGFDSPTVAYSVLVVAKVEKGKSKKLKSVKELLGITIMERSSFEKNPIDFLEAKGYKEVKKDLIIKLPKYSLFELENGRKRMLASAGELQKGNELALPSKYVNFLYLASHYEKLKGSPEDNEQKQLFVEQHKHYLDEIIEQISEFSKRVILADANLDKVLSAYNKHRDKPIREQAENIIHLFTLTNLGAPAAFKYFDTTIDRKRYTSTKEVLDATLIHQSITGLYETRIDLSQLGGDGGGGGGSSGGSGGVLNLEEEYRLHEKPVPSSIDPSWLQLFPTVWAERAGMGLANQVPPVVVELRSGASPVAVRQYPMSKEAREGIRPHIQRFLDLGVLVPCQSPWNTPLLPVKKPGTNDYRPVQDLREINKRVQDIHPTVPNPYNLLSSLPPSHTWYSVLDLKDAFFCLKLHPNSQPLFAFEWRDPEKGNTGQLTWTRLPQGFKNSPTLFNEALHRDLAPFRALNPQVVLLQYVDDLLVAAPTYRDCKEGTQKLLQELSKLGYRVSAKKAQLCQKEVTYLGYLLKEGKRWLTPARKATVMKIPPPTTPRQVREFLGTAGFCRLWIPGFASLAAPLYPLTKPSIPFIWTEEHQKAFDRIKEALLSAPALALPDLTKPFTLYVDERAGVARGVLTQTLGPWRRPVAYLSKKLDPVASGWPTCLKAVAAVALLLKDADKLTLGQNVTVIASHSLESIVRQPPDRWMTNARMTHYQSLLLNERVSFAPPAVLNPATLLPVESEATPVHRCSEILAEETGTRRDLKDQPLPGVPAWYTDGSSFIAEGKRRAGAAIVDGKRTVWASSLPEGTSAQKAELVALTQALRLAEGKDINIYTDSRYAFATAHIHGAIYKQRGWLTSAGKDIKNKEEILALLEAIHLPKRVAIIHCPGHQKGNDPVATGNRRADEAAKQAALSTRVLAETTKPAGKRTADGSEFEKRTADGSEFESPKKKAKVE

SEQ ID NO: 805 - protein, 2089 aa, synthetic construct
MPAAKRVKLDGGDKKYSIGLDIGTNSVGWAVITDEYKVPSKKFKVLGNTDRHSIKKNLIGALLFDSGETAEATRLKRTARRRYTRRKNRICYLQEIFSNEMAKVDDSFFHRLEESFLVEEDKKHERHPIFGNIVDEVAYHEKYPTIYHLRKKLVDSTDKADLRLIYLALAHMIKFRGHFLIEGDLNPDNSDVDKLFIQLVQTYNQLFEENPINASGVDAKAILSARLSKSRRLENLIAQLPGEKKNGLFGNLIALSLGLTPNFKSNFDLAEDAKLQLSKDTYDDDLDNLLAQIGDQYADLFLAAKNLSDAILLSDILRVNTEITKAPLSASMIKRYDEHHQDLTLLKALVRQQLPEKYKEIFFDQSKNGYAGYIDGGASQEEFYKFIKPILEKMDGTEELLVKLNREDLLRKQRTFDNGSIPHQIHLGELHAILRRQEDFYPFLKDNREKIEKILTFRIPYYVGPLARGNSRFAWMTRKSEETITPWNFEEVVDKGASAQSFIERMTNFDKNLPNEKVLPKHSLLYEYFTVYNELTKVKYVTEGMRKPAFLSGEQKKAIVDLLFKTNRKVTVKQLKEDYFKKIECFDSVEISGVEDRFNASLGTYHDLLKIIKDKDFLDNEENEDILEDIVLTLTLFEDREMIEERLKTYAHLFDDKVMKQLKRRRYTGWGRLSRKLINGIRDKQSGKTILDFLKSDGFANRNFMQLIHDDSLTFKEDIQKAQVSGQGDSLHEHIANLAGSPAIKKGILQTVKVVDELVKVMGRHKPENIVIEMARENQTTQKGQKNSRERMKRIEEGIKELGSQILKEHPVENTQLQNEKLYLYYLQNGRDMYVDQELDINRLSDYDVDHIVPQSFLKDDSIDNKVLTRSDKARGKSDNVPSEEVVKKMKNYWRQLLNAKLITQRKFDNLTKAERGGLSELDKAGFIKRQLVETRQITKHVAQILDSRMNTKYDENDKLIREVKVITLKSKLVSDFRKDFQFYKVREINNYHHAHDAYLNAVVGTALIKKYPKLESEFVYGDYKVYDVRKMIAKSEQEIGKATAKYFFYSNIMNFFKTEITLANGEIRKRPLIETNGETGEIVWDKGRDFATVRKVLSMPQVNIVKKTEVQTGGFSKESILPKRNSDKLIARKKDWDPKKYGGFDSPTVAYSVLVVAKVEKGKSKKLKSVKELLGITIMERSSFEKNPIDFLEAKGYKEVKKDLIIKLPKYSLFELENGRKRMLASAGELQKGNELALPSKYVNFLYLASHYEKLKGSPEDNEQKQLFVEQHKHYLDEIIEQISEFSKRVILADANLDKVLSAYNKHRDKPIREQAENIIHLFTLTNLGAPAAFKYFDTTIDRKRYTSTKEVLDATLIHQSITGLYETRIDLSQLGGDGGGGGGGGGGVLNLEEEYRLHEKPVPSSIDPSWLQLFPTVWAERAGMGLANQVPPVVVELRSGASPVAVRQYPMSKEAREGIRPHIQRFLDLGVLVPCQSPWNTPLLPVKKPGTNDYRPVQDLREINKRVQDIHPTVPNPYNLLSSLPPSHTWYSVLDLKDAFFCLKLHPNSQPLFAFEWRDPEKGNTGQLTWTRLPQGFKNSPTLFNEALHRDLAPFRALNPQVVLLQYVDDLLVAAPTYRDCKEGTQKLLQELSKLGYRVSAKKAQLCQKEVTYLGYLLKEGKRWLTPARKATVMKIPPPTTPRQVREFLGTAGFCRLWIPGFASLAAPLYPLTKPSIPFIWTEEHQKAFDRIKEALLSAPALALPDLTKPFTLYVDERAGVARGVLTQTLGPWRRPVAYLSKKLDPVASGWPTCLKAVAAVALLLKDADKLTLGQNVTVIASHSLESIVRQPPDRWMTNARMTHYQSLLLNERVSFAPPAVLNPATLLPVESEATPVHRCSEILAEETGTRRDLKDQPLPGVPAWYTDGSSFIAEGKRRAGAAIVDGKRTVWASSLPEGTSAQKAELVALTQALRLAEGKDINIYTDSRYAFATAHIHGAIYKQRGWLTSAGKDIKNKEEILALLEAIHLPKRVAIIHCPGHQKGNDPVATGNRRADEAAKQAALSTRVLAETTKPAGKRTADGSEFEKRTADGSEFESPKKKAKVE

SEQ ID NO: 806 - protein, 2099 aa, synthetic construct
MPAAKRVKLDGGDKKYSIGLDIGTNSVGWAVITDEYKVPSKKFKVLGNTDRHSIKKNLIGALLFDSGETAEATRLKRTARRRYTRRKNRICYLQEIFSNEMAKVDDSFFHRLEESFLVEEDKKHERHPIFGNIVDEVAYHEKYPTIYHLRKKLVDSTDKADLRLIYLALAHMIKFRGHFLIEGDLNPDNSDVDKLFIQLVQTYNQLFEENPINASGVDAKAILSARLSKSRRLENLIAQLPGEKKNGLFGNLIALSLGLTPNFKSNFDLAEDAKLQLSKDTYDDDLDNLLAQIGDQYADLFLAAKNLSDAILLSDILRVNTEITKAPLSASMIKRYDEHHQDLTLLKALVRQQLPEKYKEIFFDQSKNGYAGYIDGGASQEEFYKFIKPILEKMDGTEELLVKLNREDLLRKQRTFDNGSIPHQIHLGELHAILRRQEDFYPFLKDNREKIEKILTFRIPYYVGPLARGNSRFAWMTRKSEETITPWNFEEVVDKGASAQSFIERMTNFDKNLPNEKVLPKHSLLYEYFTVYNELTKVKYVTEGMRKPAFLSGEQKKAIVDLLFKTNRKVTVKQLKEDYFKKIECFDSVEISGVEDRFNASLGTYHDLLKIIKDKDFLDNEENEDILEDIVLTLTLFEDREMIEERLKTYAHLFDDKVMKQLKRRRYTGWGRLSRKLINGIRDKQSGKTILDFLKSDGFANRNFMQLIHDDSLTFKEDIQKAQVSGQGDSLHEHIANLAGSPAIKKGILQTVKVVDELVKVMGRHKPENIVIEMARENQTTQKGQKNSRERMKRIEEGIKELGSQILKEHPVENTQLQNEKLYLYYLQNGRDMYVDQELDINRLSDYDVDHIVPQSFLKDDSIDNKVLTRSDKARGKSDNVPSEEVVKKMKNYWRQLLNAKLITQRKFDNLTKAERGGLSELDKAGFIKRQLVETRQITKHVAQILDSRMNTKYDENDKLIREVKVITLKSKLVSDFRKDFQFYKVREINNYHHAHDAYLNAVVGTALIKKYPKLESEFVYGDYKVYDVRKMIAKSEQEIGKATAKYFFYSNIMNFFKTEITLANGEIRKRPLIETNGETGEIVWDKGRDFATVRKVLSMPQVNIVKKTEVQTGGFSKESILPKRNSDKLIARKKDWDPKKYGGFDSPTVAYSVLVVAKVEKGKSKKLKSVKELLGITIMERSSFEKNPIDFLEAKGYKEVKKDLIIKLPKYSLFELENGRKRMLASAGELQKGNELALPSKYVNFLYLASHYEKLKGSPEDNEQKQLFVEQHKHYLDEIIEQISEFSKRVILADANLDKVLSAYNKHRDKPIREQAENIIHLFTLTNLGAPAAFKYFDTTIDRKRYTSTKEVLDATLIHQSITGLYETRIDLSQLGGDGGSGSETPGTSESATPESGGVLNLEEEYRLHEKPVPSSIDPSWLQLFPTVWAERAGMGLANQVPPVVVELRSGASPVAVRQYPMSKEAREGIRPHIQRFLDLGVLVPCQSPWNTPLLPVKKPGTNDYRPVQDLREINKRVQDIHPTVPNPYNLLSSLPPSHTWYSVLDLKDAFFCLKLHPNSQPLFAFEWRDPEKGNTGQLTWTRLPQGFKNSPTLFNEALHRDLAPFRALNPQVVLLQYVDDLLVAAPTYRDCKEGTQKLLQELSKLGYRVSAKKAQLCQKEVTYLGYLLKEGKRWLTPARKATVMKIPPPTTPRQVREFLGTAGFCRLWIPGFASLAAPLYPLTKPSIPFIWTEEHQKAFDRIKEALLSAPALALPDLTKPFTLYVDERAGVARGVLTQTLGPWRRPVAYLSKKLDPVASGWPTCLKAVAAVALLLKDADKLTLGQNVTVIASHSLESIVRQPPDRWMTNARMTHYQSLLLNERVSFAPPAVLNPATLLPVESEATPVHRCSEILAEETGTRRDLKDQPLPGVPAWYTDGSSFIAEGKRRAGAAIVDGKRTVWASSLPEGTSAQKAELVALTQALRLAEGKDINIYTDSRYAFATAHIHGAIYKQRGWLTSAGKDIKNKEEILALLEAIHLPKRVAIIHCPGHQKGNDPVATGNRRADEAAKQAALSTRVLAETTKPAGKRTADGSEFEKRTADGSEFESPKKKAKVE

SEQ ID NO: 807 - protein, 2094 aa, synthetic construct
MPAAKRVKLDGGDKKYSIGLDIGTNSVGWAVITDEYKVPSKKFKVLGNTDRHSIKKNLIGALLFDSGETAEATRLKRTARRRYTRRKNRICYLQEIFSNEMAKVDDSFFHRLEESFLVEEDKKHERHPIFGNIVDEVAYHEKYPTIYHLRKKLVDSTDKADLRLIYLALAHMIKFRGHFLIEGDLNPDNSDVDKLFIQLVQTYNQLFEENPINASGVDAKAILSARLSKSRRLENLIAQLPGEKKNGLFGNLIALSLGLTPNFKSNFDLAEDAKLQLSKDTYDDDLDNLLAQIGDQYADLFLAAKNLSDAILLSDILRVNTEITKAPLSASMIKRYDEHHQDLTLLKALVRQQLPEKYKEIFFDQSKNGYAGYIDGGASQEEFYKFIKPILEKMDGTEELLVKLNREDLLRKQRTFDNGSIPHQIHLGELHAILRRQEDFYPFLKDNREKIEKILTFRIPYYVGPLARGNSRFAWMTRKSEETITPWNFEEVVDKGASAQSFIERMTNFDKNLPNEKVLPKHSLLYEYFTVYNELTKVKYVTEGMRKPAFLSGEQKKAIVDLLFKTNRKVTVKQLKEDYFKKIECFDSVEISGVEDRFNASLGTYHDLLKIIKDKDFLDNEENEDILEDIVLTLTLFEDREMIEERLKTYAHLFDDKVMKQLKRRRYTGWGRLSRKLINGIRDKQSGKTILDFLKSDGFANRNFMQLIHDDSLTFKEDIQKAQVSGQGDSLHEHIANLAGSPAIKKGILQTVKVVDELVKVMGRHKPENIVIEMARENQTTQKGQKNSRERMKRIEEGIKELGSQILKEHPVENTQLQNEKLYLYYLQNGRDMYVDQELDINRLSDYDVDHIVPQSFLKDDSIDNKVLTRSDKARGKSDNVPSEEVVKKMKNYWRQLLNAKLITQRKFDNLTKAERGGLSELDKAGFIKRQLVETRQITKHVAQILDSRMNTKYDENDKLIREVKVITLKSKLVSDFRKDFQFYKVREINNYHHAHDAYLNAVVGTALIKKYPKLESEFVYGDYKVYDVRKMIAKSEQEIGKATAKYFFYSNIMNFFKTEITLANGEIRKRPLIETNGETGEIVWDKGRDFATVRKVLSMPQVNIVKKTEVQTGGFSKESILPKRNSDKLIARKKDWDPKKYGGFDSPTVAYSVLVVAKVEKGKSKKLKSVKELLGITIMERSSFEKNPIDFLEAKGYKEVKKDLIIKLPKYSLFELENGRKRMLASAGELQKGNELALPSKYVNFLYLASHYEKLKGSPEDNEQKQLFVEQHKHYLDEIIEQISEFSKRVILADANLDKVLSAYNKHRDKPIREQAENIIHLFTLTNLGAPAAFKYFDTTIDRKRYTSTKEVLDATLIHQSITGLYETRIDLSQLGGDGGGGGGSSEAAAKGGVLNLEEEYRLHEKPVPSSIDPSWLQLFPTVWAERAGMGLANQVPPVVVELRSGASPVAVRQYPMSKEAREGIRPHIQRFLDLGVLVPCQSPWNTPLLPVKKPGTNDYRPVQDLREINKRVQDIHPTVPNPYNLLSSLPPSHTWYSVLDLKDAFFCLKLHPNSQPLFAFEWRDPEKGNTGQLTWTRLPQGFKNSPTLFNEALHRDLAPFRALNPQVVLLQYVDDLLVAAPTYRDCKEGTQKLLQELSKLGYRVSAKKAQLCQKEVTYLGYLLKEGKRWLTPARKATVMKIPPPTTPRQVREFLGTAGFCRLWIPGFASLAAPLYPLTKPSIPFIWTEEHQKAFDRIKEALLSAPALALPDLTKPFTLYVDERAGVARGVLTQTLGPWRRPVAYLSKKLDPVASGWPTCLKAVAAVALLLKDADKLTLGQNVTVIASHSLESIVRQPPDRWMTNARMTHYQSLLLNERVSFAPPAVLNPATLLPVESEATPVHRCSEILAEETGTRRDLKDQPLPGVPAWYTDGSSFIAEGKRRAGAAIVDGKRTVWASSLPEGTSAQKAELVALTQALRLAEGKDINIYTDSRYAFATAHIHGAIYKQRGWLTSAGKDIKNKEEILALLEAIHLPKRVAIIHCPGHQKGNDPVATGNRRADEAAKQAALSTRVLAETTKPAGKRTADGSEFEKRTADGSEFESPKKKAKVE

SEQ ID NO: 808 - protein, 2093 aa, synthetic construct
MPAAKRVKLDGGDKKYSIGLDIGTNSVGWAVITDEYKVPSKKFKVLGNTDRHSIKKNLIGALLFDSGETAEATRLKRTARRRYTRRKNRICYLQEIFSNEMAKVDDSFFHRLEESFLVEEDKKHERHPIFGNIVDEVAYHEKYPTIYHLRKKLVDSTDKADLRLIYLALAHMIKFRGHFLIEGDLNPDNSDVDKLFIQLVQTYNQLFEENPINASGVDAKAILSARLSKSRRLENLIAQLPGEKKNGLFGNLIALSLGLTPNFKSNFDLAEDAKLQLSKDTYDDDLDNLLAQIGDQYADLFLAAKNLSDAILLSDILRVNTEITKAPLSASMIKRYDEHHQDLTLLKALVRQQLPEKYKEIFFDQSKNGYAGYIDGGASQEEFYKFIKPILEKMDGTEELLVKLNREDLLRKQRTFDNGSIPHQIHLGELHAILRRQEDFYPFLKDNREKIEKILTFRIPYYVGPLARGNSRFAWMTRKSEETITPWNFEEVVDKGASAQSFIERMTNFDKNLPNEKVLPKHSLLYEYFTVYNELTKVKYVTEGMRKPAFLSGEQKKAIVDLLFKTNRKVTVKQLKEDYFKKIECFDSVEISGVEDRFNASLGTYHDLLKIIKDKDFLDNEENEDILEDIVLTLTLFEDREMIEERLKTYAHLFDDKVMKQLKRRRYTGWGRLSRKLINGIRDKQSGKTILDFLKSDGFANRNFMQLIHDDSLTFKEDIQKAQVSGQGDSLHEHIANLAGSPAIKKGILQTVKVVDELVKVMGRHKPENIVIEMARENQTTQKGQKNSRERMKRIEEGIKELGSQILKEHPVENTQLQNEKLYLYYLQNGRDMYVDQELDINRLSDYDVDHIVPQSFLKDDSIDNKVLTRSDKARGKSDNVPSEEVVKKMKNYWRQLLNAKLITQRKFDNLTKAERGGLSELDKAGFIKRQLVETRQITKHVAQILDSRMNTKYDENDKLIREVKVITLKSKLVSDFRKDFQFYKVREINNYHHAHDAYLNAVVGTALIKKYPKLESEFVYGDYKVYDVRKMIAKSEQEIGKATAKYFFYSNIMNFFKTEITLANGEIRKRPLIETNGETGEIVWDKGRDFATVRKVLSMPQVNIVKKTEVQTGGFSKESILPKRNSDKLIARKKDWDPKKYGGFDSPTVAYSVLVVAKVEKGKSKKLKSVKELLGITIMERSSFEKNPIDFLEAKGYKEVKKDLIIKLPKYSLFELENGRKRMLASAGELQKGNELALPSKYVNFLYLASHYEKLKGSPEDNEQKQLFVEQHKHYLDEIIEQISEFSKRVILADANLDKVLSAYNKHRDKPIREQAENIIHLFTLTNLGAPAAFKYFDTTIDRKRYTSTKEVLDATLIHQSITGLYETRIDLSQLGGDGGGGGGSGGGGSGGVLNLEEEYRLHEKPVPSSIDPSWLQLFPTVWAERAGMGLANQVPPVVVELRSGASPVAVRQYPMSKEAREGIRPHIQRFLDLGVLVPCQSPWNTPLLPVKKPGTNDYRPVQDLREINKRVQDIHPTVPNPYNLLSSLPPSHTWYSVLDLKDAFFCLKLHPNSQPLFAFEWRDPEKGNTGQLTWTRLPQGFKNSPTLFNEALHRDLAPFRALNPQVVLLQYVDDLLVAAPTYRDCKEGTQKLLQELSKLGYRVSAKKAQLCQKEVTYLGYLLKEGKRWLTPARKATVMKIPPPTTPRQVREFLGTAGFCRLWIPGFASLAAPLYPLTKPSIPFIWTEEHQKAFDRIKEALLSAPALALPDLTKPFTLYVDERAGVARGVLTQTLGPWRRPVAYLSKKLDPVASGWPTCLKAVAAVALLLKDADKLTLGQNVTVIASHSLESIVRQPPDRWMTNARMTHYQSLLLNERVSFAPPAVLNPATLLPVESEATPVHRCSEILAEETGTRRDLKDQPLPGVPAWYTDGSSFIAEGKRRAGAAIVDGKRTVWASSLPEGTSAQKAELVALTQALRLAEGKDINIYTDSRYAFATAHIHGAIYKQRGWLTSAGKDIKNKEEILALLEAIHLPKRVAIIHCPGHQKGNDPVATGNRRADEAAKQAALSTRVLAETTKPAGKRTADGSEFEKRTADGSEFESPKKKAKVE

SEQ ID NO: 809 - protein, 2094 aa, synthetic construct
MPAAKRVKLDGGDKKYSIGLDIGTNSVGWAVITDEYKVPSKKFKVLGNTDRHSIKKNLIGALLFDSGETAEATRLKRTARRRYTRRKNRICYLQEIFSNEMAKVDDSFFHRLEESFLVEEDKKHERHPIFGNIVDEVAYHEKYPTIYHLRKKLVDSTDKADLRLIYLALAHMIKFRGHFLIEGDLNPDNSDVDKLFIQLVQTYNQLFEENPINASGVDAKAILSARLSKSRRLENLIAQLPGEKKNGLFGNLIALSLGLTPNFKSNFDLAEDAKLQLSKDTYDDDLDNLLAQIGDQYADLFLAAKNLSDAILLSDILRVNTEITKAPLSASMIKRYDEHHQDLTLLKALVRQQLPEKYKEIFFDQSKNGYAGYIDGGASQEEFYKFIKPILEKMDGTEELLVKLNREDLLRKQRTFDNGSIPHQIHLGELHAILRRQEDFYPFLKDNREKIEKILTFRIPYYVGPLARGNSRFAWMTRKSEETITPWNFEEVVDKGASAQSFIERMTNFDKNLPNEKVLPKHSLLYEYFTVYNELTKVKYVTEGMRKPAFLSGEQKKAIVDLLFKTNRKVTVKQLKEDYFKKIECFDSVEISGVEDRFNASLGTYHDLLKIIKDKDFLDNEENEDILEDIVLTLTLFEDREMIEERLKTYAHLFDDKVMKQLKRRRYTGWGRLSRKLINGIRDKQSGKTILDFLKSDGFANRNFMQLIHDDSLTFKEDIQKAQVSGQGDSLHEHIANLAGSPAIKKGILQTVKVVDELVKVMGRHKPENIVIEMARENQTTQKGQKNSRERMKRIEEGIKELGSQILKEHPVENTQLQNEKLYLYYLQNGRDMYVDQELDINRLSDYDVDHIVPQSFLKDDSIDNKVLTRSDKARGKSDNVPSEEVVKKMKNYWRQLLNAKLITQRKFDNLTKAERGGLSELDKAGFIKRQLVETRQITKHVAQILDSRMNTKYDENDKLIREVKVITLKSKLVSDFRKDFQFYKVREINNYHHAHDAYLNAVVGTALIKKYPKLESEFVYGDYKVYDVRKMIAKSEQEIGKATAKYFFYSNIMNFFKTEITLANGEIRKRPLIETNGETGEIVWDKGRDFATVRKVLSMPQVNIVKKTEVQTGGFSKESILPKRNSDKLIARKKDWDPKKYGGFDSPTVAYSVLVVAKVEKGKSKKLKSVKELLGITIMERSSFEKNPIDFLEAKGYKEVKKDLIIKLPKYSLFELENGRKRMLASAGELQKGNELALPSKYVNFLYLASHYEKLKGSPEDNEQKQLFVEQHKHYLDEIIEQISEFSKRVILADANLDKVLSAYNKHRDKPIREQAENIIHLFTLTNLGAPAAFKYFDTTIDRKRYTSTKEVLDATLIHQSITGLYETRIDLSQLGGDGGGSSGGSEAAAKGGVLNLEEEYRLHEKPVPSSIDPSWLQLFPTVWAERAGMGLANQVPPVVVELRSGASPVAVRQYPMSKEAREGIRPHIQRFLDLGVLVPCQSPWNTPLLPVKKPGTNDYRPVQDLREINKRVQDIHPTVPNPYNLLSSLPPSHTWYSVLDLKDAFFCLKLHPNSQPLFAFEWRDPEKGNTGQLTWTRLPQGFKNSPTLFNEALHRDLAPFRALNPQVVLLQYVDDLLVAAPTYRDCKEGTQKLLQELSKLGYRVSAKKAQLCQKEVTYLGYLLKEGKRWLTPARKATVMKIPPPTTPRQVREFLGTAGFCRLWIPGFASLAAPLYPLTKPSIPFIWTEEHQKAFDRIKEALLSAPALALPDLTKPFTLYVDERAGVARGVLTQTLGPWRRPVAYLSKKLDPVASGWPTCLKAVAAVALLLKDADKLTLGQNVTVIASHSLESIVRQPPDRWMTNARMTHYQSLLLNERVSFAPPAVLNPATLLPVESEATPVHRCSEILAEETGTRRDLKDQPLPGVPAWYTDGSSFIAEGKRRAGAAIVDGKRTVWASSLPEGTSAQKAELVALTQALRLAEGKDINIYTDSRYAFATAHIHGAIYKQRGWLTSAGKDIKNKEEILALLEAIHLPKRVAIIHCPGHQKGNDPVATGNRRADEAAKQAALSTRVLAETTKPAGKRTADGSEFEKRTADGSEFESPKKKAKVE

SEQ ID NO: 810 - protein, 2089 aa, synthetic construct
MPAAKRVKLDGGDKKYSIGLDIGTNSVGWAVITDEYKVPSKKFKVLGNTDRHSIKKNLIGALLFDSGETAEATRLKRTARRRYTRRKNRICYLQEIFSNEMAKVDDSFFHRLEESFLVEEDKKHERHPIFGNIVDEVAYHEKYPTIYHLRKKLVDSTDKADLRLIYLALAHMIKFRGHFLIEGDLNPDNSDVDKLFIQLVQTYNQLFEENPINASGVDAKAILSARLSKSRRLENLIAQLPGEKKNGLFGNLIALSLGLTPNFKSNFDLAEDAKLQLSKDTYDDDLDNLLAQIGDQYADLFLAAKNLSDAILLSDILRVNTEITKAPLSASMIKRYDEHHQDLTLLKALVRQQLPEKYKEIFFDQSKNGYAGYIDGGASQEEFYKFIKPILEKMDGTEELLVKLNREDLLRKQRTFDNGSIPHQIHLGELHAILRRQEDFYPFLKDNREKIEKILTFRIPYYVGPLARGNSRFAWMTRKSEETITPWNFEEVVDKGASAQSFIERMTNFDKNLPNEKVLPKHSLLYEYFTVYNELTKVKYVTEGMRKPAFLSGEQKKAIVDLLFKTNRKVTVKQLKEDYFKKIECFDSVEISGVEDRFNASLGTYHDLLKIIKDKDFLDNEENEDILEDIVLTLTLFEDREMIEERLKTYAHLFDDKVMKQLKRRRYTGWGRLSRKLINGIRDKQSGKTILDFLKSDGFANRNFMQLIHDDSLTFKEDIQKAQVSGQGDSLHEHIANLAGSPAIKKGILQTVKVVDELVKVMGRHKPENIVIEMARENQTTQKGQKNSRERMKRIEEGIKELGSQILKEHPVENTQLQNEKLYLYYLQNGRDMYVDQELDINRLSDYDVDHIVPQSFLKDDSIDNKVLTRSDKARGKSDNVPSEEVVKKMKNYWRQLLNAKLITQRKFDNLTKAERGGLSELDKAGFIKRQLVETRQITKHVAQILDSRMNTKYDENDKLIREVKVITLKSKLVSDFRKDFQFYKVREINNYHHAHDAYLNAVVGTALIKKYPKLESEFVYGDYKVYDVRKMIAKSEQEIGKATAKYFFYSNIMNFFKTEITLANGEIRKRPLIETNGETGEIVWDKGRDFATVRKVLSMPQVNIVKKTEVQTGGFSKESILPKRNSDKLIARKKDWDPKKYGGFDSPTVAYSVLVVAKVEKGKSKKLKSVKELLGITIMERSSFEKNPIDFLEAKGYKEVKKDLIIKLPKYSLFELENGRKRMLASAGELQKGNELALPSKYVNFLYLASHYEKLKGSPEDNEQKQLFVEQHKHYLDEIIEQISEFSKRVILADANLDKVLSAYNKHRDKPIREQAENIIHLFTLTNLGAPAAFKYFDTTIDRKRYTSTKEVLDATLIHQSITGLYETRIDLSQLGGDGGPAPGGGGGVLNLEEEYRLHEKPVPSSIDPSWLQLFPTVWAERAGMGLANQVPPVVVELRSGASPVAVRQYPMSKEAREGIRPHIQRFLDLGVLVPCQSPWNTPLLPVKKPGTNDYRPVQDLREINKRVQDIHPTVPNPYNLLSSLPPSHTWYSVLDLKDAFFCLKLHPNSQPLFAFEWRDPEKGNTGQLTWTRLPQGFKNSPTLFNEALHRDLAPFRALNPQVVLLQYVDDLLVAAPTYRDCKEGTQKLLQELSKLGYRVSAKKAQLCQKEVTYLGYLLKEGKRWLTPARKATVMKIPPPTTPRQVREFLGTAGFCRLWIPGFASLAAPLYPLTKPSIPFIWTEEHQKAFDRIKEALLSAPALALPDLTKPFTLYVDERAGVARGVLTQTLGPWRRPVAYLSKKLDPVASGWPTCLKAVAAVALLLKDADKLTLGQNVTVIASHSLESIVRQPPDRWMTNARMTHYQSLLLNERVSFAPPAVLNPATLLPVESEATPVHRCSEILAEETGTRRDLKDQPLPGVPAWYTDGSSFIAEGKRRAGAAIVDGKRTVWASSLPEGTSAQKAELVALTQALRLAEGKDINIYTDSRYAFATAHIHGAIYKQRGWLTSAGKDIKNKEEILALLEAIHLPKRVAIIHCPGHQKGNDPVATGNRRADEAAKQAALSTRVLAETTKPAGKRTADGSEFEKRTADGSEFESPKKKAKVE

SEQ ID NO: 811 - protein, 2094 aa, synthetic construct
MPAAKRVKLDGGDKKYSIGLDIGTNSVGWAVITDEYKVPSKKFKVLGNTDRHSIKKNLIGALLFDSGETAEATRLKRTARRRYTRRKNRICYLQEIFSNEMAKVDDSFFHRLEESFLVEEDKKHERHPIFGNIVDEVAYHEKYPTIYHLRKKLVDSTDKADLRLIYLALAHMIKFRGHFLIEGDLNPDNSDVDKLFIQLVQTYNQLFEENPINASGVDAKAILSARLSKSRRLENLIAQLPGEKKNGLFGNLIALSLGLTPNFKSNFDLAEDAKLQLSKDTYDDDLDNLLAQIGDQYADLFLAAKNLSDAILLSDILRVNTEITKAPLSASMIKRYDEHHQDLTLLKALVRQQLPEKYKEIFFDQSKNGYAGYIDGGASQEEFYKFIKPILEKMDGTEELLVKLNREDLLRKQRTFDNGSIPHQIHLGELHAILRRQEDFYPFLKDNREKIEKILTFRIPYYVGPLARGNSRFAWMTRKSEETITPWNFEEVVDKGASAQSFIERMTNFDKNLPNEKVLPKHSLLYEYFTVYNELTKVKYVTEGMRKPAFLSGEQKKAIVDLLFKTNRKVTVKQLKEDYFKKIECFDSVEISGVEDRFNASLGTYHDLLKIIKDKDFLDNEENEDILEDIVLTLTLFEDREMIEERLKTYAHLFDDKVMKQLKRRRYTGWGRLSRKLINGIRDKQSGKTILDFLKSDGFANRNFMQLIHDDSLTFKEDIQKAQVSGQGDSLHEHIANLAGSPAIKKGILQTVKVVDELVKVMGRHKPENIVIEMARENQTTQKGQKNSRERMKRIEEGIKELGSQILKEHPVENTQLQNEKLYLYYLQNGRDMYVDQELDINRLSDYDVDHIVPQSFLKDDSIDNKVLTRSDKARGKSDNVPSEEVVKKMKNYWRQLLNAKLITQRKFDNLTKAERGGLSELDKAGFIKRQLVETRQITKHVAQILDSRMNTKYDENDKLIREVKVITLKSKLVSDFRKDFQFYKVREINNYHHAHDAYLNAVVGTALIKKYPKLESEFVYGDYKVYDVRKMIAKSEQEIGKATAKYFFYSNIMNFFKTEITLANGEIRKRPLIETNGETGEIVWDKGRDFATVRKVLSMPQVNIVKKTEVQTGGFSKESILPKRNSDKLIARKKDWDPKKYGGFDSPTVAYSVLVVAKVEKGKSKKLKSVKELLGITIMERSSFEKNPIDFLEAKGYKEVKKDLIIKLPKYSLFELENGRKRMLASAGELQKGNELALPSKYVNFLYLASHYEKLKGSPEDNEQKQLFVEQHKHYLDEIIEQISEFSKRVILADANLDKVLSAYNKHRDKPIREQAENIIHLFTLTNLGAPAAFKYFDTTIDRKRYTSTKEVLDATLIHQSITGLYETRIDLSQLGGDGGGGGEAAAKGSSGGVLNLEEEYRLHEKPVPSSIDPSWLQLFPTVWAERAGMGLANQVPPVVVELRSGASPVAVRQYPMSKEAREGIRPHIQRFLDLGVLVPCQSPWNTPLLPVKKPGTNDYRPVQDLREINKRVQDIHPTVPNPYNLLSSLPPSHTWYSVLDLKDAFFCLKLHPNSQPLFAFEWRDPEKGNTGQLTWTRLPQGFKNSPTLFNEALHRDLAPFRALNPQVVLLQYVDDLLVAAPTYRDCKEGTQKLLQELSKLGYRVSAKKAQLCQKEVTYLGYLLKEGKRWLTPARKATVMKIPPPTTPRQVREFLGTAGFCRLWIPGFASLAAPLYPLTKPSIPFIWTEEHQKAFDRIKEALLSAPALALPDLTKPFTLYVDERAGVARGVLTQTLGPWRRPVAYLSKKLDPVASGWPTCLKAVAAVALLLKDADKLTLGQNVTVIASHSLESIVRQPPDRWMTNARMTHYQSLLLNERVSFAPPAVLNPATLLPVESEATPVHRCSEILAEETGTRRDLKDQPLPGVPAWYTDGSSFIAEGKRRAGAAIVDGKRTVWASSLPEGTSAQKAELVALTQALRLAEGKDINIYTDSRYAFATAHIHGAIYKQRGWLTSAGKDIKNKEEILALLEAIHLPKRVAIIHCPGHQKGNDPVATGNRRADEAAKQAALSTRVLAETTKPAGKRTADGSEFEKRTADGSEFESPKKKAKVE

SEQ ID NO: 812 - protein, 2094 aa, synthetic construct
MPAAKRVKLDGGDKKYSIGLDIGTNSVGWAVITDEYKVPSKKFKVLGNTDRHSIKKNLIGALLFDSGETAEATRLKRTARRRYTRRKNRICYLQEIFSNEMAKVDDSFFHRLEESFLVEEDKKHERHPIFGNIVDEVAYHEKYPTIYHLRKKLVDSTDKADLRLIYLALAHMIKFRGHFLIEGDLNPDNSDVDKLFIQLVQTYNQLFEENPINASGVDAKAILSARLSKSRRLENLIAQLPGEKKNGLFGNLIALSLGLTPNFKSNFDLAEDAKLQLSKDTYDDDLDNLLAQIGDQYADLFLAAKNLSDAILLSDILRVNTEITKAPLSASMIKRYDEHHQDLTLLKALVRQQLPEKYKEIFFDQSKNGYAGYIDGGASQEEFYKFIKPILEKMDGTEELLVKLNREDLLRKQRTFDNGSIPHQIHLGELHAILRRQEDFYPFLKDNREKIEKILTFRIPYYVGPLARGNSRFAWMTRKSEETITPWNFEEVVDKGASAQSFIERMTNFDKNLPNEKVLPKHSLLYEYFTVYNELTKVKYVTEGMRKPAFLSGEQKKAIVDLLFKTNRKVTVKQLKEDYFKKIECFDSVEISGVEDRFNASLGTYHDLLKIIKDKDFLDNEENEDILEDIVLTLTLFEDREMIEERLKTYAHLFDDKVMKQLKRRRYTGWGRLSRKLINGIRDKQSGKTILDFLKSDGFANRNFMQLIHDDSLTFKEDIQKAQVSGQGDSLHEHIANLAGSPAIKKGILQTVKVVDELVKVMGRHKPENIVIEMARENQTTQKGQKNSRERMKRIEEGIKELGSQILKEHPVENTQLQNEKLYLYYLQNGRDMYVDQELDINRLSDYDVDHIVPQSFLKDDSIDNKVLTRSDKARGKSDNVPSEEVVKKMKNYWRQLLNAKLITQRKFDNLTKAERGGLSELDKAGFIKRQLVETRQITKHVAQILDSRMNTKYDENDKLIREVKVITLKSKLVSDFRKDFQFYKVREINNYHHAHDAYLNAVVGTALIKKYPKLESEFVYGDYKVYDVRKMIAKSEQEIGKATAKYFFYSNIMNFFKTEITLANGEIRKRPLIETNGETGEIVWDKGRDFATVRKVLSMPQVNIVKKTEVQTGGFSKESILPKRNSDKLIARKKDWDPKKYGGFDSPTVAYSVLVVAKVEKGKSKKLKSVKELLGITIMERSSFEKNPIDFLEAKGYKEVKKDLIIKLPKYSLFELENGRKRMLASAGELQKGNELALPSKYVNFLYLASHYEKLKGSPEDNEQKQLFVEQHKHYLDEIIEQISEFSKRVILADANLDKVLSAYNKHRDKPIREQAENIIHLFTLTNLGAPAAFKYFDTTIDRKRYTSTKEVLDATLIHQSITGLYETRIDLSQLGGDGGEAAAKGSSPAPGGVLNLEEEYRLHEKPVPSSIDPSWLQLFPTVWAERAGMGLANQVPPVVVELRSGASPVAVRQYPMSKEAREGIRPHIQRFLDLGVLVPCQSPWNTPLLPVKKPGTNDYRPVQDLREINKRVQDIHPTVPNPYNLLSSLPPSHTWYSVLDLKDAFFCLKLHPNSQPLFAFEWRDPEKGNTGQLTWTRLPQGFKNSPTLFNEALHRDLAPFRALNPQVVLLQYVDDLLVAAPTYRDCKEGTQKLLQELSKLGYRVSAKKAQLCQKEVTYLGYLLKEGKRWLTPARKATVMKIPPPTTPRQVREFLGTAGFCRLWIPGFASLAAPLYPLTKPSIPFIWTEEHQKAFDRIKEALLSAPALALPDLTKPFTLYVDERAGVARGVLTQTLGPWRRPVAYLSKKLDPVASGWPTCLKAVAAVALLLKDADKLTLGQNVTVIASHSLESIVRQPPDRWMTNARMTHYQSLLLNERVSFAPPAVLNPATLLPVESEATPVHRCSEILAEETGTRRDLKDQPLPGVPAWYTDGSSFIAEGKRRAGAAIVDGKRTVWASSLPEGTSAQKAELVALTQALRLAEGKDINIYTDSRYAFATAHIHGAIYKQRGWLTSAGKDIKNKEEILALLEAIHLPKRVAIIHCPGHQKGNDPVATGNRRADEAAKQAALSTRVLAETTKPAGKRTADGSEFEKRTADGSEFESPKKKAKVE

SEQ ID NO: 813 - protein, 2098 aa, synthetic construct
MPAAKRVKLDGGDKKYSIGLDIGTNSVGWAVITDEYKVPSKKFKVLGNTDRHSIKKNLIGALLFDSGETAEATRLKRTARRRYTRRKNRICYLQEIFSNEMAKVDDSFFHRLEESFLVEEDKKHERHPIFGNIVDEVAYHEKYPTIYHLRKKLVDSTDKADLRLIYLALAHMIKFRGHFLIEGDLNPDNSDVDKLFIQLVQTYNQLFEENPINASGVDAKAILSARLSKSRRLENLIAQLPGEKKNGLFGNLIALSLGLTPNFKSNFDLAEDAKLQLSKDTYDDDLDNLLAQIGDQYADLFLAAKNLSDAILLSDILRVNTEITKAPLSASMIKRYDEHHQDLTLLKALVRQQLPEKYKEIFFDQSKNGYAGYIDGGASQEEFYKFIKPILEKMDGTEELLVKLNREDLLRKQRTFDNGSIPHQIHLGELHAILRRQEDFYPFLKDNREKIEKILTFRIPYYVGPLARGNSRFAWMTRKSEETITPWNFEEVVDKGASAQSFIERMTNFDKNLPNEKVLPKHSLLYEYFTVYNELTKVKYVTEGMRKPAFLSGEQKKAIVDLLFKTNRKVTVKQLKEDYFKKIECFDSVEISGVEDRFNASLGTYHDLLKIIKDKDFLDNEENEDILEDIVLTLTLFEDREMIEERLKTYAHLFDDKVMKQLKRRRYTGWGRLSRKLINGIRDKQSGKTILDFLKSDGFANRNFMQLIHDDSLTFKEDIQKAQVSGQGDSLHEHIANLAGSPAIKKGILQTVKVVDELVKVMGRHKPENIVIEMARENQTTQKGQKNSRERMKRIEEGIKELGSQILKEHPVENTQLQNEKLYLYYLQNGRDMYVDQELDINRLSDYDVDHIVPQSFLKDDSIDNKVLTRSDKARGKSDNVPSEEVVKKMKNYWRQLLNAKLITQRKFDNLTKAERGGLSELDKAGFIKRQLVETRQITKHVAQILDSRMNTKYDENDKLIREVKVITLKSKLVSDFRKDFQFYKVREINNYHHAHDAYLNAVVGTALIKKYPKLESEFVYGDYKVYDVRKMIAKSEQEIGKATAKYFFYSNIMNFFKTEITLANGEIRKRPLIETNGETGEIVWDKGRDFATVRKVLSMPQVNIVKKTEVQTGGFSKESILPKRNSDKLIARKKDWDPKKYGGFDSPTVAYSVLVVAKVEKGKSKKLKSVKELLGITIMERSSFEKNPIDFLEAKGYKEVKKDLIIKLPKYSLFELENGRKRMLASAGELQKGNELALPSKYVNFLYLASHYEKLKGSPEDNEQKQLFVEQHKHYLDEIIEQISEFSKRVILADANLDKVLSAYNKHRDKPIREQAENIIHLFTLTNLGAPAAFKYFDTTIDRKRYTSTKEVLDATLIHQSITGLYETRIDLSQLGGDGGGSSGSSGSSGSSGSSGGVLNLEEEYRLHEKPVPSSIDPSWLQLFPTVWAERAGMGLANQVPPVVVELRSGASPVAVRQYPMSKEAREGIRPHIQRFLDLGVLVPCQSPWNTPLLPVKKPGTNDYRPVQDLREINKRVQDIHPTVPNPYNLLSSLPPSHTWYSVLDLKDAFFCLKLHPNSQPLFAFEWRDPEKGNTGQLTWTRLPQGFKNSPTLFNEALHRDLAPFRALNPQVVLLQYVDDLLVAAPTYRDCKEGTQKLLQELSKLGYRVSAKKAQLCQKEVTYLGYLLKEGKRWLTPARKATVMKIPPPTTPRQVREFLGTAGFCRLWIPGFASLAAPLYPLTKPSIPFIWTEEHQKAFDRIKEALLSAPALALPDLTKPFTLYVDERAGVARGVLTQTLGPWRRPVAYLSKKLDPVASGWPTCLKAVAAVALLLKDADKLTLGQNVTVIASHSLESIVRQPPDRWMTNARMTHYQSLLLNERVSFAPPAVLNPATLLPVESEATPVHRCSEILAEETGTRRDLKDQPLPGVPAWYTDGSSFIAEGKRRAGAAIVDGKRTVWASSLPEGTSAQKAELVALTQALRLAEGKDINIYTDSRYAFATAHIHGAIYKQRGWLTSAGKDIKNKEEILALLEAIHLPKRVAIIHCPGHQKGNDPVATGNRRADEAAKQAALSTRVLAETTKPAGKRTADGSEFEKRTADGSEFESPKKKAKVE

SEQ ID NO: 814 - protein, 2094 aa, synthetic construct
MPAAKRVKLDGGDKKYSIGLDIGTNSVGWAVITDEYKVPSKKFKVLGNTDRHSIKKNLIGALLFDSGETAEATRLKRTARRRYTRRKNRICYLQEIFSNEMAKVDDSFFHRLEESFLVEEDKKHERHPIFGNIVDEVAYHEKYPTIYHLRKKLVDSTDKADLRLIYLALAHMIKFRGHFLIEGDLNPDNSDVDKLFIQLVQTYNQLFEENPINASGVDAKAILSARLSKSRRLENLIAQLPGEKKNGLFGNLIALSLGLTPNFKSNFDLAEDAKLQLSKDTYDDDLDNLLAQIGDQYADLFLAAKNLSDAILLSDILRVNTEITKAPLSASMIKRYDEHHQDLTLLKALVRQQLPEKYKEIFFDQSKNGYAGYIDGGASQEEFYKFIKPILEKMDGTEELLVKLNREDLLRKQRTFDNGSIPHQIHLGELHAILRRQEDFYPFLKDNREKIEKILTFRIPYYVGPLARGNSRFAWMTRKSEETITPWNFEEVVDKGASAQSFIERMTNFDKNLPNEKVLPKHSLLYEYFTVYNELTKVKYVTEGMRKPAFLSGEQKKAIVDLLFKTNRKVTVKQLKEDYFKKIECFDSVEISGVEDRFNASLGTYHDLLKIIKDKDFLDNEENEDILEDIVLTLTLFEDREMIEERLKTYAHLFDDKVMKQLKRRRYTGWGRLSRKLINGIRDKQSGKTILDFLKSDGFANRNFMQLIHDDSLTFKEDIQKAQVSGQGDSLHEHIANLAGSPAIKKGILQTVKVVDELVKVMGRHKPENIVIEMARENQTTQKGQKNSRERMKRIEEGIKELGSQILKEHPVENTQLQNEKLYLYYLQNGRDMYVDQELDINRLSDYDVDHIVPQSFLKDDSIDNKVLTRSDKARGKSDNVPSEEVVKKMKNYWRQLLNAKLITQRKFDNLTKAERGGLSELDKAGFIKRQLVETRQITKHVAQILDSRMNTKYDENDKLIREVKVITLKSKLVSDFRKDFQFYKVREINNYHHAHDAYLNAVVGTALIKKYPKLESEFVYGDYKVYDVRKMIAKSEQEIGKATAKYFFYSNIMNFFKTEITLANGEIRKRPLIETNGETGEIVWDKGRDFATVRKVLSMPQVNIVKKTEVQTGGFSKESILPKRNSDKLIARKKDWDPKKYGGFDSPTVAYSVLVVAKVEKGKSKKLKSVKELLGITIMERSSFEKNPIDFLEAKGYKEVKKDLIIKLPKYSLFELENGRKRMLASAGELQKGNELALPSKYVNFLYLASHYEKLKGSPEDNEQKQLFVEQHKHYLDEIIEQISEFSKRVILADANLDKVLSAYNKHRDKPIREQAENIIHLFTLTNLGAPAAFKYFDTTIDRKRYTSTKEVLDATLIHQSITGLYETRIDLSQLGGDGGPAPAPAPAPAPGGVLNLEEEYRLHEKPVPSSIDPSWLQLFPTVWAERAGMGLANQVPPVVVELRSGASPVAVRQYPMSKEAREGIRPHIQRFLDLGVLVPCQSPWNTPLLPVKKPGTNDYRPVQDLREINKRVQDIHPTVPNPYNLLSSLPPSHTWYSVLDLKDAFFCLKLHPNSQPLFAFEWRDPEKGNTGQLTWTRLPQGFKNSPTLFNEALHRDLAPFRALNPQVVLLQYVDDLLVAAPTYRDCKEGTQKLLQELSKLGYRVSAKKAQLCQKEVTYLGYLLKEGKRWLTPARKATVMKIPPPTTPRQVREFLGTAGFCRLWIPGFASLAAPLYPLTKPSIPFIWTEEHQKAFDRIKEALLSAPALALPDLTKPFTLYVDERAGVARGVLTQTLGPWRRPVAYLSKKLDPVASGWPTCLKAVAAVALLLKDADKLTLGQNVTVIASHSLESIVRQPPDRWMTNARMTHYQSLLLNERVSFAPPAVLNPATLLPVESEATPVHRCSEILAEETGTRRDLKDQPLPGVPAWYTDGSSFIAEGKRRAGAAIVDGKRTVWASSLPEGTSAQKAELVALTQALRLAEGKDINIYTDSRYAFATAHIHGAIYKQRGWLTSAGKDIKNKEEILALLEAIHLPKRVAIIHCPGHQKGNDPVATGNRRADEAAKQAALSTRVLAETTKPAGKRTADGSEFEKRTADGSEFESPKKKAKVE

SEQ ID NO: 815 - protein, 2086 aa, synthetic construct
MPAAKRVKLDGGDKKYSIGLDIGTNSVGWAVITDEYKVPSKKFKVLGNTDRHSIKKNLIGALLFDSGETAEATRLKRTARRRYTRRKNRICYLQEIFSNEMAKVDDSFFHRLEESFLVEEDKKHERHPIFGNIVDEVAYHEKYPTIYHLRKKLVDSTDKADLRLIYLALAHMIKFRGHFLIEGDLNPDNSDVDKLFIQLVQTYNQLFEENPINASGVDAKAILSARLSKSRRLENLIAQLPGEKKNGLFGNLIALSLGLTPNFKSNFDLAEDAKLQLSKDTYDDDLDNLLAQIGDQYADLFLAAKNLSDAILLSDILRVNTEITKAPLSASMIKRYDEHHQDLTLLKALVRQQLPEKYKEIFFDQSKNGYAGYIDGGASQEEFYKFIKPILEKMDGTEELLVKLNREDLLRKQRTFDNGSIPHQIHLGELHAILRRQEDFYPFLKDNREKIEKILTFRIPYYVGPLARGNSRFAWMTRKSEETITPWNFEEVVDKGASAQSFIERMTNFDKNLPNEKVLPKHSLLYEYFTVYNELTKVKYVTEGMRKPAFLSGEQKKAIVDLLFKTNRKVTVKQLKEDYFKKIECFDSVEISGVEDRFNASLGTYHDLLKIIKDKDFLDNEENEDILEDIVLTLTLFEDREMIEERLKTYAHLFDDKVMKQLKRRRYTGWGRLSRKLINGIRDKQSGKTILDFLKSDGFANRNFMQLIHDDSLTFKEDIQKAQVSGQGDSLHEHIANLAGSPAIKKGILQTVKVVDELVKVMGRHKPENIVIEMARENQTTQKGQKNSRERMKRIEEGIKELGSQILKEHPVENTQLQNEKLYLYYLQNGRDMYVDQELDINRLSDYDVDHIVPQSFLKDDSIDNKVLTRSDKARGKSDNVPSEEVVKKMKNYWRQLLNAKLITQRKFDNLTKAERGGLSELDKAGFIKRQLVETRQITKHVAQILDSRMNTKYDENDKLIREVKVITLKSKLVSDFRKDFQFYKVREINNYHHAHDAYLNAVVGTALIKKYPKLESEFVYGDYKVYDVRKMIAKSEQEIGKATAKYFFYSNIMNFFKTEITLANGEIRKRPLIETNGETGEIVWDKGRDFATVRKVLSMPQVNIVKKTEVQTGGFSKESILPKRNSDKLIARKKDWDPKKYGGFDSPTVAYSVLVVAKVEKGKSKKLKSVKELLGITIMERSSFEKNPIDFLEAKGYKEVKKDLIIKLPKYSLFELENGRKRMLASAGELQKGNELALPSKYVNFLYLASHYEKLKGSPEDNEQKQLFVEQHKHYLDEIIEQISEFSKRVILADANLDKVLSAYNKHRDKPIREQAENIIHLFTLTNLGAPAAFKYFDTTIDRKRYTSTKEVLDATLIHQSITGLYETRIDLSQLGGDGGGGGGGVLNLEEEYRLHEKPVPSSIDPSWLQLFPTVWAERAGMGLANQVPPVVVELRSGASPVAVRQYPMSKEAREGIRPHIQRFLDLGVLVPCQSPWNTPLLPVKKPGTNDYRPVQDLREINKRVQDIHPTVPNPYNLLSSLPPSHTWYSVLDLKDAFFCLKLHPNSQPLFAFEWRDPEKGNTGQLTWTRLPQGFKNSPTLFNEALHRDLAPFRALNPQVVLLQYVDDLLVAAPTYRDCKEGTQKLLQELSKLGYRVSAKKAQLCQKEVTYLGYLLKEGKRWLTPARKATVMKIPPPTTPRQVREFLGTAGFCRLWIPGFASLAAPLYPLTKPSIPFIWTEEHQKAFDRIKEALLSAPALALPDLTKPFTLYVDERAGVARGVLTQTLGPWRRPVAYLSKKLDPVASGWPTCLKAVAAVALLLKDADKLTLGQNVTVIASHSLESIVRQPPDRWMTNARMTHYQSLLLNERVSFAPPAVLNPATLLPVESEATPVHRCSEILAEETGTRRDLKDQPLPGVPAWYTDGSSFIAEGKRRAGAAIVDGKRTVWASSLPEGTSAQKAELVALTQALRLAEGKDINIYTDSRYAFATAHIHGAIYKQRGWLTSAGKDIKNKEEILALLEAIHLPKRVAIIHCPGHQKGNDPVATGNRRADEAAKQAALSTRVLAETTKPAGKRTADGSEFEKRTADGSEFESPKKKAKVE

SEQ ID NO: 816 - protein, 2087 aa, synthetic construct
MPAAKRVKLDGGDKKYSIGLDIGTNSVGWAVITDEYKVPSKKFKVLGNTDRHSIKKNLIGALLFDSGETAEATRLKRTARRRYTRRKNRICYLQEIFSNEMAKVDDSFFHRLEESFLVEEDKKHERHPIFGNIVDEVAYHEKYPTIYHLRKKLVDSTDKADLRLIYLALAHMIKFRGHFLIEGDLNPDNSDVDKLFIQLVQTYNQLFEENPINASGVDAKAILSARLSKSRRLENLIAQLPGEKKNGLFGNLIALSLGLTPNFKSNFDLAEDAKLQLSKDTYDDDLDNLLAQIGDQYADLFLAAKNLSDAILLSDILRVNTEITKAPLSASMIKRYDEHHQDLTLLKALVRQQLPEKYKEIFFDQSKNGYAGYIDGGASQEEFYKFIKPILEKMDGTEELLVKLNREDLLRKQRTFDNGSIPHQIHLGELHAILRRQEDFYPFLKDNREKIEKILTFRIPYYVGPLARGNSRFAWMTRKSEETITPWNFEEVVDKGASAQSFIERMTNFDKNLPNEKVLPKHSLLYEYFTVYNELTKVKYVTEGMRKPAFLSGEQKKAIVDLLFKTNRKVTVKQLKEDYFKKIECFDSVEISGVEDRFNASLGTYHDLLKIIKDKDFLDNEENEDILEDIVLTLTLFEDREMIEERLKTYAHLFDDKVMKQLKRRRYTGWGRLSRKLINGIRDKQSGKTILDFLKSDGFANRNFMQLIHDDSLTFKEDIQKAQVSGQGDSLHEHIANLAGSPAIKKGILQTVKVVDELVKVMGRHKPENIVIEMARENQTTQKGQKNSRERMKRIEEGIKELGSQILKEHPVENTQLQNEKLYLYYLQNGRDMYVDQELDINRLSDYDVDHIVPQSFLKDDSIDNKVLTRSDKARGKSDNVPSEEVVKKMKNYWRQLLNAKLITQRKFDNLTKAERGGLSELDKAGFIKRQLVETRQITKHVAQILDSRMNTKYDENDKLIREVKVITLKSKLVSDFRKDFQFYKVREINNYHHAHDAYLNAVVGTALIKKYPKLESEFVYGDYKVYDVRKMIAKSEQEIGKATAKYFFYSNIMNFFKTEITLANGEIRKRPLIETNGETGEIVWDKGRDFATVRKVLSMPQVNIVKKTEVQTGGFSKESILPKRNSDKLIARKKDWDPKKYGGFDSPTVAYSVLVVAKVEKGKSKKLKSVKELLGITIMERSSFEKNPIDFLEAKGYKEVKKDLIIKLPKYSLFELENGRKRMLASAGELQKGNELALPSKYVNFLYLASHYEKLKGSPEDNEQKQLFVEQHKHYLDEIIEQISEFSKRVILADANLDKVLSAYNKHRDKPIREQAENIIHLFTLTNLGAPAAFKYFDTTIDRKRYTSTKEVLDATLIHQSITGLYETRIDLSQLGGDGGGGGGGGVLNLEEEYRLHEKPVPSSIDPSWLQLFPTVWAERAGMGLANQVPPVVVELRSGASPVAVRQYPMSKEAREGIRPHIQRFLDLGVLVPCQSPWNTPLLPVKKPGTNDYRPVQDLREINKRVQDIHPTVPNPYNLLSSLPPSHTWYSVLDLKDAFFCLKLHPNSQPLFAFEWRDPEKGNTGQLTWTRLPQGFKNSPTLFNEALHRDLAPFRALNPQVVLLQYVDDLLVAAPTYRDCKEGTQKLLQELSKLGYRVSAKKAQLCQKEVTYLGYLLKEGKRWLTPARKATVMKIPPPTTPRQVREFLGTAGFCRLWIPGFASLAAPLYPLTKPSIPFIWTEEHQKAFDRIKEALLSAPALALPDLTKPFTLYVDERAGVARGVLTQTLGPWRRPVAYLSKKLDPVASGWPTCLKAVAAVALLLKDADKLTLGQNVTVIASHSLESIVRQPPDRWMTNARMTHYQSLLLNERVSFAPPAVLNPATLLPVESEATPVHRCSEILAEETGTRRDLKDQPLPGVPAWYTDGSSFIAEGKRRAGAAIVDGKRTVWASSLPEGTSAQKAELVALTQALRLAEGKDINIYTDSRYAFATAHIHGAIYKQRGWLTSAGKDIKNKEEILALLEAIHLPKRVAIIHCPGHQKGNDPVATGNRRADEAAKQAALSTRVLAETTKPAGKRTADGSEFEKRTADGSEFESPKKKAKVE

SEQ ID NO: 817 - protein, 2091 aa, synthetic construct
MPAAKRVKLDGGDKKYSIGLDIGTNSVGWAVITDEYKVPSKKFKVLGNTDRHSIKKNLIGALLFDSGETAEATRLKRTARRRYTRRKNRICYLQEIFSNEMAKVDDSFFHRLEESFLVEEDKKHERHPIFGNIVDEVAYHEKYPTIYHLRKKLVDSTDKADLRLIYLALAHMIKFRGHFLIEGDLNPDNSDVDKLFIQLVQTYNQLFEENPINASGVDAKAILSARLSKSRRLENLIAQLPGEKKNGLFGNLIALSLGLTPNFKSNFDLAEDAKLQLSKDTYDDDLDNLLAQIGDQYADLFLAAKNLSDAILLSDILRVNTEITKAPLSASMIKRYDEHHQDLTLLKALVRQQLPEKYKEIFFDQSKNGYAGYIDGGASQEEFYKFIKPILEKMDGTEELLVKLNREDLLRKQRTFDNGSIPHQIHLGELHAILRRQEDFYPFLKDNREKIEKILTFRIPYYVGPLARGNSRFAWMTRKSEETITPWNFEEVVDKGASAQSFIERMTNFDKNLPNEKVLPKHSLLYEYFTVYNELTKVKYVTEGMRKPAFLSGEQKKAIVDLLFKTNRKVTVKQLKEDYFKKIECFDSVEISGVEDRFNASLGTYHDLLKIIKDKDFLDNEENEDILEDIVLTLTLFEDREMIEERLKTYAHLFDDKVMKQLKRRRYTGWGRLSRKLINGIRDKQSGKTILDFLKSDGFANRNFMQLIHDDSLTFKEDIQKAQVSGQGDSLHEHIANLAGSPAIKKGILQTVKVVDELVKVMGRHKPENIVIEMARENQTTQKGQKNSRERMKRIEEGIKELGSQILKEHPVENTQLQNEKLYLYYLQNGRDMYVDQELDINRLSDYDVDHIVPQSFLKDDSIDNKVLTRSDKARGKSDNVPSEEVVKKMKNYWRQLLNAKLITQRKFDNLTKAERGGLSELDKAGFIKRQLVETRQITKHVAQILDSRMNTKYDENDKLIREVKVITLKSKLVSDFRKDFQFYKVREINNYHHAHDAYLNAVVGTALIKKYPKLESEFVYGDYKVYDVRKMIAKSEQEIGKATAKYFFYSNIMNFFKTEITLANGEIRKRPLIETNGETGEIVWDKGRDFATVRKVLSMPQVNIVKKTEVQTGGFSKESILPKRNSDKLIARKKDWDPKKYGGFDSPTVAYSVLVVAKVEKGKSKKLKSVKELLGITIMERSSFEKNPIDFLEAKGYKEVKKDLIIKLPKYSLFELENGRKRMLASAGELQKGNELALPSKYVNFLYLASHYEKLKGSPEDNEQKQLFVEQHKHYLDEIIEQISEFSKRVILADANLDKVLSAYNKHRDKPIREQAENIIHLFTLTNLGAPAAFKYFDTTIDRKRYTSTKEVLDATLIHQSITGLYETRIDLSQLGGDGGEAAAKGGGGGVLNLEEEYRLHEKPVPSSIDPSWLQLFPTVWAERAGMGLANQVPPVVVELRSGASPVAVRQYPMSKEAREGIRPHIQRFLDLGVLVPCQSPWNTPLLPVKKPGTNDYRPVQDLREINKRVQDIHPTVPNPYNLLSSLPPSHTWYSVLDLKDAFFCLKLHPNSQPLFAFEWRDPEKGNTGQLTWTRLPQGFKNSPTLFNEALHRDLAPFRALNPQVVLLQYVDDLLVAAPTYRDCKEGTQKLLQELSKLGYRVSAKKAQLCQKEVTYLGYLLKEGKRWLTPARKATVMKIPPPTTPRQVREFLGTAGFCRLWIPGFASLAAPLYPLTKPSIPFIWTEEHQKAFDRIKEALLSAPALALPDLTKPFTLYVDERAGVARGVLTQTLGPWRRPVAYLSKKLDPVASGWPTCLKAVAAVALLLKDADKLTLGQNVTVIASHSLESIVRQPPDRWMTNARMTHYQSLLLNERVSFAPPAVLNPATLLPVESEATPVHRCSEILAEETGTRRDLKDQPLPGVPAWYTDGSSFIAEGKRRAGAAIVDGKRTVWASSLPEGTSAQKAELVALTQALRLAEGKDINIYTDSRYAFATAHIHGAIYKQRGWLTSAGKDIKNKEEILALLEAIHLPKRVAIIHCPGHQKGNDPVATGNRRADEAAKQAALSTRVLAETTKPAGKRTADGSEFEKRTADGSEFESPKKKAKVE

SEQ ID NO: 818 - protein, 2101 aa, synthetic construct
MPAAKRVKLDGGDKKYSIGLDIGTNSVGWAVITDEYKVPSKKFKVLGNTDRHSIKKNLIGALLFDSGETAEATRLKRTARRRYTRRKNRICYLQEIFSNEMAKVDDSFFHRLEESFLVEEDKKHERHPIFGNIVDEVAYHEKYPTIYHLRKKLVDSTDKADLRLIYLALAHMIKFRGHFLIEGDLNPDNSDVDKLFIQLVQTYNQLFEENPINASGVDAKAILSARLSKSRRLENLIAQLPGEKKNGLFGNLIALSLGLTPNFKSNFDLAEDAKLQLSKDTYDDDLDNLLAQIGDQYADLFLAAKNLSDAILLSDILRVNTEITKAPLSASMIKRYDEHHQDLTLLKALVRQQLPEKYKEIFFDQSKNGYAGYIDGGASQEEFYKFIKPILEKMDGTEELLVKLNREDLLRKQRTFDNGSIPHQIHLGELHAILRRQEDFYPFLKDNREKIEKILTFRIPYYVGPLARGNSRFAWMTRKSEETITPWNFEEVVDKGASAQSFIERMTNFDKNLPNEKVLPKHSLLYEYFTVYNELTKVKYVTEGMRKPAFLSGEQKKAIVDLLFKTNRKVTVKQLKEDYFKKIECFDSVEISGVEDRFNASLGTYHDLLKIIKDKDFLDNEENEDILEDIVLTLTLFEDREMIEERLKTYAHLFDDKVMKQLKRRRYTGWGRLSRKLINGIRDKQSGKTILDFLKSDGFANRNFMQLIHDDSLTFKEDIQKAQVSGQGDSLHEHIANLAGSPAIKKGILQTVKVVDELVKVMGRHKPENIVIEMARENQTTQKGQKNSRERMKRIEEGIKELGSQILKEHPVENTQLQNEKLYLYYLQNGRDMYVDQELDINRLSDYDVDHIVPQSFLKDDSIDNKVLTRSDKARGKSDNVPSEEVVKKMKNYWRQLLNAKLITQRKFDNLTKAERGGLSELDKAGFIKRQLVETRQITKHVAQILDSRMNTKYDENDKLIREVKVITLKSKLVSDFRKDFQFYKVREINNYHHAHDAYLNAVVGTALIKKYPKLESEFVYGDYKVYDVRKMIAKSEQEIGKATAKYFFYSNIMNFFKTEITLANGEIRKRPLIETNGETGEIVWDKGRDFATVRKVLSMPQVNIVKKTEVQTGGFSKESILPKRNSDKLIARKKDWDPKKYGGFDSPTVAYSVLVVAKVEKGKSKKLKSVKELLGITIMERSSFEKNPIDFLEAKGYKEVKKDLIIKLPKYSLFELENGRKRMLASAGELQKGNELALPSKYVNFLYLASHYEKLKGSPEDNEQKQLFVEQHKHYLDEIIEQISEFSKRVILADANLDKVLSAYNKHRDKPIREQAENIIHLFTLTNLGAPAAFKYFDTTIDRKRYTSTKEVLDATLIHQSITGLYETRIDLSQLGGDGGGSSGSSGSSGSSGSSGSSGGVLNLEEEYRLHEKPVPSSIDPSWLQLFPTVWAERAGMGLANQVPPVVVELRSGASPVAVRQYPMSKEAREGIRPHIQRFLDLGVLVPCQSPWNTPLLPVKKPGTNDYRPVQDLREINKRVQDIHPTVPNPYNLLSSLPPSHTWYSVLDLKDAFFCLKLHPNSQPLFAFEWRDPEKGNTGQLTWTRLPQGFKNSPTLFNEALHRDLAPFRALNPQVVLLQYVDDLLVAAPTYRDCKEGTQKLLQELSKLGYRVSAKKAQLCQKEVTYLGYLLKEGKRWLTPARKATVMKIPPPTTPRQVREFLGTAGFCRLWIPGFASLAAPLYPLTKPSIPFIWTEEHQKAFDRIKEALLSAPALALPDLTKPFTLYVDERAGVARGVLTQTLGPWRRPVAYLSKKLDPVASGWPTCLKAVAAVALLLKDADKLTLGQNVTVIASHSLESIVRQPPDRWMTNARMTHYQSLLLNERVSFAPPAVLNPATLLPVESEATPVHRCSEILAEETGTRRDLKDQPLPGVPAWYTDGSSFIAEGKRRAGAAIVDGKRTVWASSLPEGTSAQKAELVALTQALRLAEGKDINIYTDSRYAFATAHIHGAIYKQRGWLTSAGKDIKNKEEILALLEAIHLPKRVAIIHCPGHQKGNDPVATGNRRADEAAKQAALSTRVLAETTKPAGKRTADGSEFEKRTADGSEFESPKKKAKVE

SEQ ID NO: 819 - protein, 2091 aa, synthetic construct
MPAAKRVKLDGGDKKYSIGLDIGTNSVGWAVITDEYKVPSKKFKVLGNTDRHSIKKNLIGALLFDSGETAEATRLKRTARRRYTRRKNRICYLQEIFSNEMAKVDDSFFHRLEESFLVEEDKKHERHPIFGNIVDEVAYHEKYPTIYHLRKKLVDSTDKADLRLIYLALAHMIKFRGHFLIEGDLNPDNSDVDKLFIQLVQTYNQLFEENPINASGVDAKAILSARLSKSRRLENLIAQLPGEKKNGLFGNLIALSLGLTPNFKSNFDLAEDAKLQLSKDTYDDDLDNLLAQIGDQYADLFLAAKNLSDAILLSDILRVNTEITKAPLSASMIKRYDEHHQDLTLLKALVRQQLPEKYKEIFFDQSKNGYAGYIDGGASQEEFYKFIKPILEKMDGTEELLVKLNREDLLRKQRTFDNGSIPHQIHLGELHAILRRQEDFYPFLKDNREKIEKILTFRIPYYVGPLARGNSRFAWMTRKSEETITPWNFEEVVDKGASAQSFIERMTNFDKNLPNEKVLPKHSLLYEYFTVYNELTKVKYVTEGMRKPAFLSGEQKKAIVDLLFKTNRKVTVKQLKEDYFKKIECFDSVEISGVEDRFNASLGTYHDLLKIIKDKDFLDNEENEDILEDIVLTLTLFEDREMIEERLKTYAHLFDDKVMKQLKRRRYTGWGRLSRKLINGIRDKQSGKTILDFLKSDGFANRNFMQLIHDDSLTFKEDIQKAQVSGQGDSLHEHIANLAGSPAIKKGILQTVKVVDELVKVMGRHKPENIVIEMARENQTTQKGQKNSRERMKRIEEGIKELGSQILKEHPVENTQLQNEKLYLYYLQNGRDMYVDQELDINRLSDYDVDHIVPQSFLKDDSIDNKVLTRSDKARGKSDNVPSEEVVKKMKNYWRQLLNAKLITQRKFDNLTKAERGGLSELDKAGFIKRQLVETRQITKHVAQILDSRMNTKYDENDKLIREVKVITLKSKLVSDFRKDFQFYKVREINNYHHAHDAYLNAVVGTALIKKYPKLESEFVYGDYKVYDVRKMIAKSEQEIGKATAKYFFYSNIMNFFKTEITLANGEIRKRPLIETNGETGEIVWDKGRDFATVRKVLSMPQVNIVKKTEVQTGGFSKESILPKRNSDKLIARKKDWDPKKYGGFDSPTVAYSVLVVAKVEKGKSKKLKSVKELLGITIMERSSFEKNPIDFLEAKGYKEVKKDLIIKLPKYSLFELENGRKRMLASAGELQKGNELALPSKYVNFLYLASHYEKLKGSPEDNEQKQLFVEQHKHYLDEIIEQISEFSKRVILADANLDKVLSAYNKHRDKPIREQAENIIHLFTLTNLGAPAAFKYFDTTIDRKRYTSTKEVLDATLIHQSITGLYETRIDLSQLGGDGGPAPEAAAKGGVLNLEEEYRLHEKPVPSSIDPSWLQLFPTVWAERAGMGLANQVPPVVVELRSGASPVAVRQYPMSKEAREGIRPHIQRFLDLGVLVPCQSPWNTPLLPVKKPGTNDYRPVQDLREINKRVQDIHPTVPNPYNLLSSLPPSHTWYSVLDLKDAFFCLKLHPNSQPLFAFEWRDPEKGNTGQLTWTRLPQGFKNSPTLFNEALHRDLAPFRALNPQVVLLQYVDDLLVAAPTYRDCKEGTQKLLQELSKLGYRVSAKKAQLCQKEVTYLGYLLKEGKRWLTPARKATVMKIPPPTTPRQVREFLGTAGFCRLWIPGFASLAAPLYPLTKPSIPFIWTEEHQKAFDRIKEALLSAPALALPDLTKPFTLYVDERAGVARGVLTQTLGPWRRPVAYLSKKLDPVASGWPTCLKAVAAVALLLKDADKLTLGQNVTVIASHSLESIVRQPPDRWMTNARMTHYQSLLLNERVSFAPPAVLNPATLLPVESEATPVHRCSEILAEETGTRRDLKDQPLPGVPAWYTDGSSFIAEGKRRAGAAIVDGKRTVWASSLPEGTSAQKAELVALTQALRLAEGKDINIYTDSRYAFATAHIHGAIYKQRGWLTSAGKDIKNKEEILALLEAIHLPKRVAIIHCPGHQKGNDPVATGNRRADEAAKQAALSTRVLAETTKPAGKRTADGSEFEKRTADGSEFESPKKKAKVE

SEQ ID NO: 820 - protein, 2094 aa, synthetic construct
MPAAKRVKLDGGDKKYSIGLDIGTNSVGWAVITDEYKVPSKKFKVLGNTDRHSIKKNLIGALLFDSGETAEATRLKRTARRRYTRRKNRICYLQEIFSNEMAKVDDSFFHRLEESFLVEEDKKHERHPIFGNIVDEVAYHEKYPTIYHLRKKLVDSTDKADLRLIYLALAHMIKFRGHFLIEGDLNPDNSDVDKLFIQLVQTYNQLFEENPINASGVDAKAILSARLSKSRRLENLIAQLPGEKKNGLFGNLIALSLGLTPNFKSNFDLAEDAKLQLSKDTYDDDLDNLLAQIGDQYADLFLAAKNLSDAILLSDILRVNTEITKAPLSASMIKRYDEHHQDLTLLKALVRQQLPEKYKEIFFDQSKNGYAGYIDGGASQEEFYKFIKPILEKMDGTEELLVKLNREDLLRKQRTFDNGSIPHQIHLGELHAILRRQEDFYPFLKDNREKIEKILTFRIPYYVGPLARGNSRFAWMTRKSEETITPWNFEEVVDKGASAQSFIERMTNFDKNLPNEKVLPKHSLLYEYFTVYNELTKVKYVTEGMRKPAFLSGEQKKAIVDLLFKTNRKVTVKQLKEDYFKKIECFDSVEISGVEDRFNASLGTYHDLLKIIKDKDFLDNEENEDILEDIVLTLTLFEDREMIEERLKTYAHLFDDKVMKQLKRRRYTGWGRLSRKLINGIRDKQSGKTILDFLKSDGFANRNFMQLIHDDSLTFKEDIQKAQVSGQGDSLHEHIANLAGSPAIKKGILQTVKVVDELVKVMGRHKPENIVIEMARENQTTQKGQKNSRERMKRIEEGIKELGSQILKEHPVENTQLQNEKLYLYYLQNGRDMYVDQELDINRLSDYDVDHIVPQSFLKDDSIDNKVLTRSDKARGKSDNVPSEEVVKKMKNYWRQLLNAKLITQRKFDNLTKAERGGLSELDKAGFIKRQLVETRQITKHVAQILDSRMNTKYDENDKLIREVKVITLKSKLVSDFRKDFQFYKVREINNYHHAHDAYLNAVVGTALIKKYPKLESEFVYGDYKVYDVRKMIAKSEQEIGKATAKYFFYSNIMNFFKTEITLANGEIRKRPLIETNGETGEIVWDKGRDFATVRKVLSMPQVNIVKKTEVQTGGFSKESILPKRNSDKLIARKKDWDPKKYGGFDSPTVAYSVLVVAKVEKGKSKKLKSVKELLGITIMERSSFEKNPIDFLEAKGYKEVKKDLIIKLPKYSLFELENGRKRMLASAGELQKGNELALPSKYVNFLYLASHYEKLKGSPEDNEQKQLFVEQHKHYLDEIIEQISEFSKRVILADANLDKVLSAYNKHRDKPIREQAENIIHLFTLTNLGAPAAFKYFDTTIDRKRYTSTKEVLDATLIHQSITGLYETRIDLSQLGGDGGEAAAKGGSGSSGGVLNLEEEYRLHEKPVPSSIDPSWLQLFPTVWAERAGMGLANQVPPVVVELRSGASPVAVRQYPMSKEAREGIRPHIQRFLDLGVLVPCQSPWNTPLLPVKKPGTNDYRPVQDLREINKRVQDIHPTVPNPYNLLSSLPPSHTWYSVLDLKDAFFCLKLHPNSQPLFAFEWRDPEKGNTGQLTWTRLPQGFKNSPTLFNEALHRDLAPFRALNPQVVLLQYVDDLLVAAPTYRDCKEGTQKLLQELSKLGYRVSAKKAQLCQKEVTYLGYLLKEGKRWLTPARKATVMKIPPPTTPRQVREFLGTAGFCRLWIPGFASLAAPLYPLTKPSIPFIWTEEHQKAFDRIKEALLSAPALALPDLTKPFTLYVDERAGVARGVLTQTLGPWRRPVAYLSKKLDPVASGWPTCLKAVAAVALLLKDADKLTLGQNVTVIASHSLESIVRQPPDRWMTNARMTHYQSLLLNERVSFAPPAVLNPATLLPVESEATPVHRCSEILAEETGTRRDLKDQPLPGVPAWYTDGSSFIAEGKRRAGAAIVDGKRTVWASSLPEGTSAQKAELVALTQALRLAEGKDINIYTDSRYAFATAHIHGAIYKQRGWLTSAGKDIKNKEEILALLEAIHLPKRVAIIHCPGHQKGNDPVATGNRRADEAAKQAALSTRVLAETTKPAGKRTADGSEFEKRTADGSEFESPKKKAKVE

SEQ ID NO: 821 - protein, 2092 aa, synthetic construct
MPAAKRVKLDGGDKKYSIGLDIGTNSVGWAVITDEYKVPSKKFKVLGNTDRHSIKKNLIGALLFDSGETAEATRLKRTARRRYTRRKNRICYLQEIFSNEMAKVDDSFFHRLEESFLVEEDKKHERHPIFGNIVDEVAYHEKYPTIYHLRKKLVDSTDKADLRLIYLALAHMIKFRGHFLIEGDLNPDNSDVDKLFIQLVQTYNQLFEENPINASGVDAKAILSARLSKSRRLENLIAQLPGEKKNGLFGNLIALSLGLTPNFKSNFDLAEDAKLQLSKDTYDDDLDNLLAQIGDQYADLFLAAKNLSDAILLSDILRVNTEITKAPLSASMIKRYDEHHQDLTLLKALVRQQLPEKYKEIFFDQSKNGYAGYIDGGASQEEFYKFIKPILEKMDGTEELLVKLNREDLLRKQRTFDNGSIPHQIHLGELHAILRRQEDFYPFLKDNREKIEKILTFRIPYYVGPLARGNSRFAWMTRKSEETITPWNFEEVVDKGASAQSFIERMTNFDKNLPNEKVLPKHSLLYEYFTVYNELTKVKYVTEGMRKPAFLSGEQKKAIVDLLFKTNRKVTVKQLKEDYFKKIECFDSVEISGVEDRFNASLGTYHDLLKIIKDKDFLDNEENEDILEDIVLTLTLFEDREMIEERLKTYAHLFDDKVMKQLKRRRYTGWGRLSRKLINGIRDKQSGKTILDFLKSDGFANRNFMQLIHDDSLTFKEDIQKAQVSGQGDSLHEHIANLAGSPAIKKGILQTVKVVDELVKVMGRHKPENIVIEMARENQTTQKGQKNSRERMKRIEEGIKELGSQILKEHPVENTQLQNEKLYLYYLQNGRDMYVDQELDINRLSDYDVDHIVPQSFLKDDSIDNKVLTRSDKARGKSDNVPSEEVVKKMKNYWRQLLNAKLITQRKFDNLTKAERGGLSELDKAGFIKRQLVETRQITKHVAQILDSRMNTKYDENDKLIREVKVITLKSKLVSDFRKDFQFYKVREINNYHHAHDAYLNAVVGTALIKKYPKLESEFVYGDYKVYDVRKMIAKSEQEIGKATAKYFFYSNIMNFFKTEITLANGEIRKRPLIETNGETGEIVWDKGRDFATVRKVLSMPQVNIVKKTEVQTGGFSKESILPKRNSDKLIARKKDWDPKKYGGFDSPTVAYSVLVVAKVEKGKSKKLKSVKELLGITIMERSSFEKNPIDFLEAKGYKEVKKDLIIKLPKYSLFELENGRKRMLASAGELQKGNELALPSKYVNFLYLASHYEKLKGSPEDNEQKQLFVEQHKHYLDEIIEQISEFSKRVILADANLDKVLSAYNKHRDKPIREQAENIIHLFTLTNLGAPAAFKYFDTTIDRKRYTSTKEVLDATLIHQSITGLYETRIDLSQLGGDGGPAPAPAPAPGGVLNLEEEYRLHEKPVPSSIDPSWLQLFPTVWAERAGMGLANQVPPVVVELRSGASPVAVRQYPMSKEAREGIRPHIQRFLDLGVLVPCQSPWNTPLLPVKKPGTNDYRPVQDLREINKRVQDIHPTVPNPYNLLSSLPPSHTWYSVLDLKDAFFCLKLHPNSQPLFAFEWRDPEKGNTGQLTWTRLPQGFKNSPTLFNEALHRDLAPFRALNPQVVLLQYVDDLLVAAPTYRDCKEGTQKLLQELSKLGYRVSAKKAQLCQKEVTYLGYLLKEGKRWLTPARKATVMKIPPPTTPRQVREFLGTAGFCRLWIPGFASLAAPLYPLTKPSIPFIWTEEHQKAFDRIKEALLSAPALALPDLTKPFTLYVDERAGVARGVLTQTLGPWRRPVAYLSKKLDPVASGWPTCLKAVAAVALLLKDADKLTLGQNVTVIASHSLESIVRQPPDRWMTNARMTHYQSLLLNERVSFAPPAVLNPATLLPVESEATPVHRCSEILAEETGTRRDLKDQPLPGVPAWYTDGSSFIAEGKRRAGAAIVDGKRTVWASSLPEGTSAQKAELVALTQALRLAEGKDINIYTDSRYAFATAHIHGAIYKQRGWLTSAGKDIKNKEEILALLEAIHLPKRVAIIHCPGHQKGNDPVATGNRRADEAAKQAALSTRVLAETTKPAGKRTADGSEFEKRTADGSEFESPKKKAKVE

SEQ ID NO: 822 - protein, 2094 aa, synthetic construct
MPAAKRVKLDGGDKKYSIGLDIGTNSVGWAVITDEYKVPSKKFKVLGNTDRHSIKKNLIGALLFDSGETAEATRLKRTARRRYTRRKNRICYLQEIFSNEMAKVDDSFFHRLEESFLVEEDKKHERHPIFGNIVDEVAYHEKYPTIYHLRKKLVDSTDKADLRLIYLALAHMIKFRGHFLIEGDLNPDNSDVDKLFIQLVQTYNQLFEENPINASGVDAKAILSARLSKSRRLENLIAQLPGEKKNGLFGNLIALSLGLTPNFKSNFDLAEDAKLQLSKDTYDDDLDNLLAQIGDQYADLFLAAKNLSDAILLSDILRVNTEITKAPLSASMIKRYDEHHQDLTLLKALVRQQLPEKYKEIFFDQSKNGYAGYIDGGASQEEFYKFIKPILEKMDGTEELLVKLNREDLLRKQRTFDNGSIPHQIHLGELHAILRRQEDFYPFLKDNREKIEKILTFRIPYYVGPLARGNSRFAWMTRKSEETITPWNFEEVVDKGASAQSFIERMTNFDKNLPNEKVLPKHSLLYEYFTVYNELTKVKYVTEGMRKPAFLSGEQKKAIVDLLFKTNRKVTVKQLKEDYFKKIECFDSVEISGVEDRFNASLGTYHDLLKIIKDKDFLDNEENEDILEDIVLTLTLFEDREMIEERLKTYAHLFDDKVMKQLKRRRYTGWGRLSRKLINGIRDKQSGKTILDFLKSDGFANRNFMQLIHDDSLTFKEDIQKAQVSGQGDSLHEHIANLAGSPAIKKGILQTVKVVDELVKVMGRHKPENIVIEMARENQTTQKGQKNSRERMKRIEEGIKELGSQILKEHPVENTQLQNEKLYLYYLQNGRDMYVDQELDINRLSDYDVDHIVPQSFLKDDSIDNKVLTRSDKARGKSDNVPSEEVVKKMKNYWRQLLNAKLITQRKFDNLTKAERGGLSELDKAGFIKRQLVETRQITKHVAQILDSRMNTKYDENDKLIREVKVITLKSKLVSDFRKDFQFYKVREINNYHHAHDAYLNAVVGTALIKKYPKLESEFVYGDYKVYDVRKMIAKSEQEIGKATAKYFFYSNIMNFFKTEITLANGEIRKRPLIETNGETGEIVWDKGRDFATVRKVLSMPQVNIVKKTEVQTGGFSKESILPKRNSDKLIARKKDWDPKKYGGFDSPTVAYSVLVVAKVEKGKSKKLKSVKELLGITIMERSSFEKNPIDFLEAKGYKEVKKDLIIKLPKYSLFELENGRKRMLASAGELQKGNELALPSKYVNFLYLASHYEKLKGSPEDNEQKQLFVEQHKHYLDEIIEQISEFSKRVILADANLDKVLSAYNKHRDKPIREQAENIIHLFTLTNLGAPAAFKYFDTTIDRKRYTSTKEVLDATLIHQSITGLYETRIDLSQLGGDGGEAAAKGGGPAPGGVLNLEEEYRLHEKPVPSSIDPSWLQLFPTVWAERAGMGLANQVPPVVVELRSGASPVAVRQYPMSKEAREGIRPHIQRFLDLGVLVPCQSPWNTPLLPVKKPGTNDYRPVQDLREINKRVQDIHPTVPNPYNLLSSLPPSHTWYSVLDLKDAFFCLKLHPNSQPLFAFEWRDPEKGNTGQLTWTRLPQGFKNSPTLFNEALHRDLAPFRALNPQVVLLQYVDDLLVAAPTYRDCKEGTQKLLQELSKLGYRVSAKKAQLCQKEVTYLGYLLKEGKRWLTPARKATVMKIPPPTTPRQVREFLGTAGFCRLWIPGFASLAAPLYPLTKPSIPFIWTEEHQKAFDRIKEALLSAPALALPDLTKPFTLYVDERAGVARGVLTQTLGPWRRPVAYLSKKLDPVASGWPTCLKAVAAVALLLKDADKLTLGQNVTVIASHSLESIVRQPPDRWMTNARMTHYQSLLLNERVSFAPPAVLNPATLLPVESEATPVHRCSEILAEETGTRRDLKDQPLPGVPAWYTDGSSFIAEGKRRAGAAIVDGKRTVWASSLPEGTSAQKAELVALTQALRLAEGKDINIYTDSRYAFATAHIHGAIYKQRGWLTSAGKDIKNKEEILALLEAIHLPKRVAIIHCPGHQKGNDPVATGNRRADEAAKQAALSTRVLAETTKPAGKRTADGSEFEKRTADGSEFESPKKKAKVE

SEQ ID NO: 823 - protein, 2088 aa, synthetic construct
MPAAKRVKLDGGDKKYSIGLDIGTNSVGWAVITDEYKVPSKKFKVLGNTDRHSIKKNLIGALLFDSGETAEATRLKRTARRRYTRRKNRICYLQEIFSNEMAKVDDSFFHRLEESFLVEEDKKHERHPIFGNIVDEVAYHEKYPTIYHLRKKLVDSTDKADLRLIYLALAHMIKFRGHFLIEGDLNPDNSDVDKLFIQLVQTYNQLFEENPINASGVDAKAILSARLSKSRRLENLIAQLPGEKKNGLFGNLIALSLGLTPNFKSNFDLAEDAKLQLSKDTYDDDLDNLLAQIGDQYADLFLAAKNLSDAILLSDILRVNTEITKAPLSASMIKRYDEHHQDLTLLKALVRQQLPEKYKEIFFDQSKNGYAGYIDGGASQEEFYKFIKPILEKMDGTEELLVKLNREDLLRKQRTFDNGSIPHQIHLGELHAILRRQEDFYPFLKDNREKIEKILTFRIPYYVGPLARGNSRFAWMTRKSEETITPWNFEEVVDKGASAQSFIERMTNFDKNLPNEKVLPKHSLLYEYFTVYNELTKVKYVTEGMRKPAFLSGEQKKAIVDLLFKTNRKVTVKQLKEDYFKKIECFDSVEISGVEDRFNASLGTYHDLLKIIKDKDFLDNEENEDILEDIVLTLTLFEDREMIEERLKTYAHLFDDKVMKQLKRRRYTGWGRLSRKLINGIRDKQSGKTILDFLKSDGFANRNFMQLIHDDSLTFKEDIQKAQVSGQGDSLHEHIANLAGSPAIKKGILQTVKVVDELVKVMGRHKPENIVIEMARENQTTQKGQKNSRERMKRIEEGIKELGSQILKEHPVENTQLQNEKLYLYYLQNGRDMYVDQELDINRLSDYDVDHIVPQSFLKDDSIDNKVLTRSDKARGKSDNVPSEEVVKKMKNYWRQLLNAKLITQRKFDNLTKAERGGLSELDKAGFIKRQLVETRQITKHVAQILDSRMNTKYDENDKLIREVKVITLKSKLVSDFRKDFQFYKVREINNYHHAHDAYLNAVVGTALIKKYPKLESEFVYGDYKVYDVRKMIAKSEQEIGKATAKYFFYSNIMNFFKTEITLANGEIRKRPLIETNGETGEIVWDKGRDFATVRKVLSMPQVNIVKKTEVQTGGFSKESILPKRNSDKLIARKKDWDPKKYGGFDSPTVAYSVLVVAKVEKGKSKKLKSVKELLGITIMERSSFEKNPIDFLEAKGYKEVKKDLIIKLPKYSLFELENGRKRMLASAGELQKGNELALPSKYVNFLYLASHYEKLKGSPEDNEQKQLFVEQHKHYLDEIIEQISEFSKRVILADANLDKVLSAYNKHRDKPIREQAENIIHLFTLTNLGAPAAFKYFDTTIDRKRYTSTKEVLDATLIHQSITGLYETRIDLSQLGGDGGEAAAKGGVLNLEEEYRLHEKPVPSSIDPSWLQLFPTVWAERAGMGLANQVPPVVVELRSGASPVAVRQYPMSKEAREGIRPHIQRFLDLGVLVPCQSPWNTPLLPVKKPGTNDYRPVQDLREINKRVQDIHPTVPNPYNLLSSLPPSHTWYSVLDLKDAFFCLKLHPNSQPLFAFEWRDPEKGNTGQLTWTRLPQGFKNSPTLFNEALHRDLAPFRALNPQVVLLQYVDDLLVAAPTYRDCKEGTQKLLQELSKLGYRVSAKKAQLCQKEVTYLGYLLKEGKRWLTPARKATVMKIPPPTTPRQVREFLGTAGFCRLWIPGFASLAAPLYPLTKPSIPFIWTEEHQKAFDRIKEALLSAPALALPDLTKPFTLYVDERAGVARGVLTQTLGPWRRPVAYLSKKLDPVASGWPTCLKAVAAVALLLKDADKLTLGQNVTVIASHSLESIVRQPPDRWMTNARMTHYQSLLLNERVSFAPPAVLNPATLLPVESEATPVHRCSEILAEETGTRRDLKDQPLPGVPAWYTDGSSFIAEGKRRAGAAIVDGKRTVWASSLPEGTSAQKAELVALTQALRLAEGKDINIYTDSRYAFATAHIHGAIYKQRGWLTSAGKDIKNKEEILALLEAIHLPKRVAIIHCPGHQKGNDPVATGNRRADEAAKQAALSTRVLAETTKPAGKRTADGSEFEKRTADGSEFESPKKKAKVE

SEQ ID NO: 824 - protein, 2095 aa, synthetic construct
MPAAKRVKLDGGDKKYSIGLDIGTNSVGWAVITDEYKVPSKKFKVLGNTDRHSIKKNLIGALLFDSGETAEATRLKRTARRRYTRRKNRICYLQEIFSNEMAKVDDSFFHRLEESFLVEEDKKHERHPIFGNIVDEVAYHEKYPTIYHLRKKLVDSTDKADLRLIYLALAHMIKFRGHFLIEGDLNPDNSDVDKLFIQLVQTYNQLFEENPINASGVDAKAILSARLSKSRRLENLIAQLPGEKKNGLFGNLIALSLGLTPNFKSNFDLAEDAKLQLSKDTYDDDLDNLLAQIGDQYADLFLAAKNLSDAILLSDILRVNTEITKAPLSASMIKRYDEHHQDLTLLKALVRQQLPEKYKEIFFDQSKNGYAGYIDGGASQEEFYKFIKPILEKMDGTEELLVKLNREDLLRKQRTFDNGSIPHQIHLGELHAILRRQEDFYPFLKDNREKIEKILTFRIPYYVGPLARGNSRFAWMTRKSEETITPWNFEEVVDKGASAQSFIERMTNFDKNLPNEKVLPKHSLLYEYFTVYNELTKVKYVTEGMRKPAFLSGEQKKAIVDLLFKTNRKVTVKQLKEDYFKKIECFDSVEISGVEDRFNASLGTYHDLLKIIKDKDFLDNEENEDILEDIVLTLTLFEDREMIEERLKTYAHLFDDKVMKQLKRRRYTGWGRLSRKLINGIRDKQSGKTILDFLKSDGFANRNFMQLIHDDSLTFKEDIQKAQVSGQGDSLHEHIANLAGSPAIKKGILQTVKVVDELVKVMGRHKPENIVIEMARENQTTQKGQKNSRERMKRIEEGIKELGSQILKEHPVENTQLQNEKLYLYYLQNGRDMYVDQELDINRLSDYDVDHIVPQSFLKDDSIDNKVLTRSDKARGKSDNVPSEEVVKKMKNYWRQLLNAKLITQRKFDNLTKAERGGLSELDKAGFIKRQLVETRQITKHVAQILDSRMNTKYDENDKLIREVKVITLKSKLVSDFRKDFQFYKVREINNYHHAHDAYLNAVVGTALIKKYPKLESEFVYGDYKVYDVRKMIAKSEQEIGKATAKYFFYSNIMNFFKTEITLANGEIRKRPLIETNGETGEIVWDKGRDFATVRKVLSMPQVNIVKKTEVQTGGFSKESILPKRNSDKLIARKKDWDPKKYGGFDSPTVAYSVLVVAKVEKGKSKKLKSVKELLGITIMERSSFEKNPIDFLEAKGYKEVKKDLIIKLPKYSLFELENGRKRMLASAGELQKGNELALPSKYVNFLYLASHYEKLKGSPEDNEQKQLFVEQHKHYLDEIIEQISEFSKRVILADANLDKVLSAYNKHRDKPIREQAENIIHLFTLTNLGAPAAFKYFDTTIDRKRYTSTKEVLDATLIHQSITGLYETRIDLSQLGGDGGGGSGGSGGSGGSGGVLNLEEEYRLHEKPVPSSIDPSWLQLFPTVWAERAGMGLANQVPPVVVELRSGASPVAVRQYPMSKEAREGIRPHIQRFLDLGVLVPCQSPWNTPLLPVKKPGTNDYRPVQDLREINKRVQDIHPTVPNPYNLLSSLPPSHTWYSVLDLKDAFFCLKLHPNSQPLFAFEWRDPEKGNTGQLTWTRLPQGFKNSPTLFNEALHRDLAPFRALNPQVVLLQYVDDLLVAAPTYRDCKEGTQKLLQELSKLGYRVSAKKAQLCQKEVTYLGYLLKEGKRWLTPARKATVMKIPPPTTPRQVREFLGTAGFCRLWIPGFASLAAPLYPLTKPSIPFIWTEEHQKAFDRIKEALLSAPALALPDLTKPFTLYVDERAGVARGVLTQTLGPWRRPVAYLSKKLDPVASGWPTCLKAVAAVALLLKDADKLTLGQNVTVIASHSLESIVRQPPDRWMTNARMTHYQSLLLNERVSFAPPAVLNPATLLPVESEATPVHRCSEILAEETGTRRDLKDQPLPGVPAWYTDGSSFIAEGKRRAGAAIVDGKRTVWASSLPEGTSAQKAELVALTQALRLAEGKDINIYTDSRYAFATAHIHGAIYKQRGWLTSAGKDIKNKEEILALLEAIHLPKRVAIIHCPGHQKGNDPVATGNRRADEAAKQAALSTRVLAETTKPAGKRTADGSEFEKRTADGSEFESPKKKAKVE

SEQ ID NO: 825 - protein, 2094 aa, synthetic construct
MPAAKRVKLDGGDKKYSIGLDIGTNSVGWAVITDEYKVPSKKFKVLGNTDRHSIKKNLIGALLFDSGETAEATRLKRTARRRYTRRKNRICYLQEIFSNEMAKVDDSFFHRLEESFLVEEDKKHERHPIFGNIVDEVAYHEKYPTIYHLRKKLVDSTDKADLRLIYLALAHMIKFRGHFLIEGDLNPDNSDVDKLFIQLVQTYNQLFEENPINASGVDAKAILSARLSKSRRLENLIAQLPGEKKNGLFGNLIALSLGLTPNFKSNFDLAEDAKLQLSKDTYDDDLDNLLAQIGDQYADLFLAAKNLSDAILLSDILRVNTEITKAPLSASMIKRYDEHHQDLTLLKALVRQQLPEKYKEIFFDQSKNGYAGYIDGGASQEEFYKFIKPILEKMDGTEELLVKLNREDLLRKQRTFDNGSIPHQIHLGELHAILRRQEDFYPFLKDNREKIEKILTFRIPYYVGPLARGNSRFAWMTRKSEETITPWNFEEVVDKGASAQSFIERMTNFDKNLPNEKVLPKHSLLYEYFTVYNELTKVKYVTEGMRKPAFLSGEQKKAIVDLLFKTNRKVTVKQLKEDYFKKIECFDSVEISGVEDRFNASLGTYHDLLKIIKDKDFLDNEENEDILEDIVLTLTLFEDREMIEERLKTYAHLFDDKVMKQLKRRRYTGWGRLSRKLINGIRDKQSGKTILDFLKSDGFANRNFMQLIHDDSLTFKEDIQKAQVSGQGDSLHEHIANLAGSPAIKKGILQTVKVVDELVKVMGRHKPENIVIEMARENQTTQKGQKNSRERMKRIEEGIKELGSQILKEHPVENTQLQNEKLYLYYLQNGRDMYVDQELDINRLSDYDVDHIVPQSFLKDDSIDNKVLTRSDKARGKSDNVPSEEVVKKMKNYWRQLLNAKLITQRKFDNLTKAERGGLSELDKAGFIKRQLVETRQITKHVAQILDSRMNTKYDENDKLIREVKVITLKSKLVSDFRKDFQFYKVREINNYHHAHDAYLNAVVGTALIKKYPKLESEFVYGDYKVYDVRKMIAKSEQEIGKATAKYFFYSNIMNFFKTEITLANGEIRKRPLIETNGETGEIVWDKGRDFATVRKVLSMPQVNIVKKTEVQTGGFSKESILPKRNSDKLIARKKDWDPKKYGGFDSPTVAYSVLVVAKVEKGKSKKLKSVKELLGITIMERSSFEKNPIDFLEAKGYKEVKKDLIIKLPKYSLFELENGRKRMLASAGELQKGNELALPSKYVNFLYLASHYEKLKGSPEDNEQKQLFVEQHKHYLDEIIEQISEFSKRVILADANLDKVLSAYNKHRDKPIREQAENIIHLFTLTNLGAPAAFKYFDTTIDRKRYTSTKEVLDATLIHQSITGLYETRIDLSQLGGDGGGGSGSSEAAAKGGVLNLEEEYRLHEKPVPSSIDPSWLQLFPTVWAERAGMGLANQVPPVVVELRSGASPVAVRQYPMSKEAREGIRPHIQRFLDLGVLVPCQSPWNTPLLPVKKPGTNDYRPVQDLREINKRVQDIHPTVPNPYNLLSSLPPSHTWYSVLDLKDAFFCLKLHPNSQPLFAFEWRDPEKGNTGQLTWTRLPQGFKNSPTLFNEALHRDLAPFRALNPQVVLLQYVDDLLVAAPTYRDCKEGTQKLLQELSKLGYRVSAKKAQLCQKEVTYLGYLLKEGKRWLTPARKATVMKIPPPTTPRQVREFLGTAGFCRLWIPGFASLAAPLYPLTKPSIPFIWTEEHQKAFDRIKEALLSAPALALPDLTKPFTLYVDERAGVARGVLTQTLGPWRRPVAYLSKKLDPVASGWPTCLKAVAAVALLLKDADKLTLGQNVTVIASHSLESIVRQPPDRWMTNARMTHYQSLLLNERVSFAPPAVLNPATLLPVESEATPVHRCSEILAEETGTRRDLKDQPLPGVPAWYTDGSSFIAEGKRRAGAAIVDGKRTVWASSLPEGTSAQKAELVALTQALRLAEGKDINIYTDSRYAFATAHIHGAIYKQRGWLTSAGKDIKNKEEILALLEAIHLPKRVAIIHCPGHQKGNDPVATGNRRADEAAKQAALSTRVLAETTKPAGKRTADGSEFEKRTADGSEFESPKKKAKVE

SEQ ID NO: 826 - protein, 2094 aa, synthetic construct
MPAAKRVKLDGGDKKYSIGLDIGTNSVGWAVITDEYKVPSKKFKVLGNTDRHSIKKNLIGALLFDSGETAEATRLKRTARRRYTRRKNRICYLQEIFSNEMAKVDDSFFHRLEESFLVEEDKKHERHPIFGNIVDEVAYHEKYPTIYHLRKKLVDSTDKADLRLIYLALAHMIKFRGHFLIEGDLNPDNSDVDKLFIQLVQTYNQLFEENPINASGVDAKAILSARLSKSRRLENLIAQLPGEKKNGLFGNLIALSLGLTPNFKSNFDLAEDAKLQLSKDTYDDDLDNLLAQIGDQYADLFLAAKNLSDAILLSDILRVNTEITKAPLSASMIKRYDEHHQDLTLLKALVRQQLPEKYKEIFFDQSKNGYAGYIDGGASQEEFYKFIKPILEKMDGTEELLVKLNREDLLRKQRTFDNGSIPHQIHLGELHAILRRQEDFYPFLKDNREKIEKILTFRIPYYVGPLARGNSRFAWMTRKSEETITPWNFEEVVDKGASAQSFIERMTNFDKNLPNEKVLPKHSLLYEYFTVYNELTKVKYVTEGMRKPAFLSGEQKKAIVDLLFKTNRKVTVKQLKEDYFKKIECFDSVEISGVEDRFNASLGTYHDLLKIIKDKDFLDNEENEDILEDIVLTLTLFEDREMIEERLKTYAHLFDDKVMKQLKRRRYTGWGRLSRKLINGIRDKQSGKTILDFLKSDGFANRNFMQLIHDDSLTFKEDIQKAQVSGQGDSLHEHIANLAGSPAIKKGILQTVKVVDELVKVMGRHKPENIVIEMARENQTTQKGQKNSRERMKRIEEGIKELGSQILKEHPVENTQLQNEKLYLYYLQNGRDMYVDQELDINRLSDYDVDHIVPQSFLKDDSIDNKVLTRSDKARGKSDNVPSEEVVKKMKNYWRQLLNAKLITQRKFDNLTKAERGGLSELDKAGFIKRQLVETRQITKHVAQILDSRMNTKYDENDKLIREVKVITLKSKLVSDFRKDFQFYKVREINNYHHAHDAYLNAVVGTALIKKYPKLESEFVYGDYKVYDVRKMIAKSEQEIGKATAKYFFYSNIMNFFKTEITLANGEIRKRPLIETNGETGEIVWDKGRDFATVRKVLSMPQVNIVKKTEVQTGGFSKESILPKRNSDKLIARKKDWDPKKYGGFDSPTVAYSVLVVAKVEKGKSKKLKSVKELLGITIMERSSFEKNPIDFLEAKGYKEVKKDLIIKLPKYSLFELENGRKRMLASAGELQKGNELALPSKYVNFLYLASHYEKLKGSPEDNEQKQLFVEQHKHYLDEIIEQISEFSKRVILADANLDKVLSAYNKHRDKPIREQAENIIHLFTLTNLGAPAAFKYFDTTIDRKRYTSTKEVLDATLIHQSITGLYETRIDLSQLGGDGGEAAAKGGGGSSGGVLNLEEEYRLHEKPVPSSIDPSWLQLFPTVWAERAGMGLANQVPPVVVELRSGASPVAVRQYPMSKEAREGIRPHIQRFLDLGVLVPCQSPWNTPLLPVKKPGTNDYRPVQDLREINKRVQDIHPTVPNPYNLLSSLPPSHTWYSVLDLKDAFFCLKLHPNSQPLFAFEWRDPEKGNTGQLTWTRLPQGFKNSPTLFNEALHRDLAPFRALNPQVVLLQYVDDLLVAAPTYRDCKEGTQKLLQELSKLGYRVSAKKAQLCQKEVTYLGYLLKEGKRWLTPARKATVMKIPPPTTPRQVREFLGTAGFCRLWIPGFASLAAPLYPLTKPSIPFIWTEEHQKAFDRIKEALLSAPALALPDLTKPFTLYVDERAGVARGVLTQTLGPWRRPVAYLSKKLDPVASGWPTCLKAVAAVALLLKDADKLTLGQNVTVIASHSLESIVRQPPDRWMTNARMTHYQSLLLNERVSFAPPAVLNPATLLPVESEATPVHRCSEILAEETGTRRDLKDQPLPGVPAWYTDGSSFIAEGKRRAGAAIVDGKRTVWASSLPEGTSAQKAELVALTQALRLAEGKDINIYTDSRYAFATAHIHGAIYKQRGWLTSAGKDIKNKEEILALLEAIHLPKRVAIIHCPGHQKGNDPVATGNRRADEAAKQAALSTRVLAETTKPAGKRTADGSEFEKRTADGSEFESPKKKAKVE

SEQ ID NO: 827 - protein, 2103 aa, synthetic construct
MPAAKRVKLDGGDKKYSIGLDIGTNSVGWAVITDEYKVPSKKFKVLGNTDRHSIKKNLIGALLFDSGETAEATRLKRTARRRYTRRKNRICYLQEIFSNEMAKVDDSFFHRLEESFLVEEDKKHERHPIFGNIVDEVAYHEKYPTIYHLRKKLVDSTDKADLRLIYLALAHMIKFRGHFLIEGDLNPDNSDVDKLFIQLVQTYNQLFEENPINASGVDAKAILSARLSKSRRLENLIAQLPGEKKNGLFGNLIALSLGLTPNFKSNFDLAEDAKLQLSKDTYDDDLDNLLAQIGDQYADLFLAAKNLSDAILLSDILRVNTEITKAPLSASMIKRYDEHHQDLTLLKALVRQQLPEKYKEIFFDQSKNGYAGYIDGGASQEEFYKFIKPILEKMDGTEELLVKLNREDLLRKQRTFDNGSIPHQIHLGELHAILRRQEDFYPFLKDNREKIEKILTFRIPYYVGPLARGNSRFAWMTRKSEETITPWNFEEVVDKGASAQSFIERMTNFDKNLPNEKVLPKHSLLYEYFTVYNELTKVKYVTEGMRKPAFLSGEQKKAIVDLLFKTNRKVTVKQLKEDYFKKIECFDSVEISGVEDRFNASLGTYHDLLKIIKDKDFLDNEENEDILEDIVLTLTLFEDREMIEERLKTYAHLFDDKVMKQLKRRRYTGWGRLSRKLINGIRDKQSGKTILDFLKSDGFANRNFMQLIHDDSLTFKEDIQKAQVSGQGDSLHEHIANLAGSPAIKKGILQTVKVVDELVKVMGRHKPENIVIEMARENQTTQKGQKNSRERMKRIEEGIKELGSQILKEHPVENTQLQNEKLYLYYLQNGRDMYVDQELDINRLSDYDVDHIVPQSFLKDDSIDNKVLTRSDKARGKSDNVPSEEVVKKMKNYWRQLLNAKLITQRKFDNLTKAERGGLSELDKAGFIKRQLVETRQITKHVAQILDSRMNTKYDENDKLIREVKVITLKSKLVSDFRKDFQFYKVREINNYHHAHDAYLNAVVGTALIKKYPKLESEFVYGDYKVYDVRKMIAKSEQEIGKATAKYFFYSNIMNFFKTEITLANGEIRKRPLIETNGETGEIVWDKGRDFATVRKVLSMPQVNIVKKTEVQTGGFSKESILPKRNSDKLIARKKDWDPKKYGGFDSPTVAYSVLVVAKVEKGKSKKLKSVKELLGITIMERSSFEKNPIDFLEAKGYKEVKKDLIIKLPKYSLFELENGRKRMLASAGELQKGNELALPSKYVNFLYLASHYEKLKGSPEDNEQKQLFVEQHKHYLDEIIEQISEFSKRVILADANLDKVLSAYNKHRDKPIREQAENIIHLFTLTNLGAPAAFKYFDTTIDRKRYTSTKEVLDATLIHQSITGLYETRIDLSQLGGDGGEAAAKEAAAKEAAAKEAAAKGGVLNLEEEYRLHEKPVPSSIDPSWLQLFPTVWAERAGMGLANQVPPVVVELRSGASPVAVRQYPMSKEAREGIRPHIQRFLDLGVLVPCQSPWNTPLLPVKKPGTNDYRPVQDLREINKRVQDIHPTVPNPYNLLSSLPPSHTWYSVLDLKDAFFCLKLHPNSQPLFAFEWRDPEKGNTGQLTWTRLPQGFKNSPTLFNEALHRDLAPFRALNPQVVLLQYVDDLLVAAPTYRDCKEGTQKLLQELSKLGYRVSAKKAQLCQKEVTYLGYLLKEGKRWLTPARKATVMKIPPPTTPRQVREFLGTAGFCRLWIPGFASLAAPLYPLTKPSIPFIWTEEHQKAFDRIKEALLSAPALALPDLTKPFTLYVDERAGVARGVLTQTLGPWRRPVAYLSKKLDPVASGWPTCLKAVAAVALLLKDADKLTLGQNVTVIASHSLESIVRQPPDRWMTNARMTHYQSLLLNERVSFAPPAVLNPATLLPVESEATPVHRCSEILAEETGTRRDLKDQPLPGVPAWYTDGSSFIAEGKRRAGAAIVDGKRTVWASSLPEGTSAQKAELVALTQALRLAEGKDINIYTDSRYAFATAHIHGAIYKQRGWLTSAGKDIKNKEEILALLEAIHLPKRVAIIHCPGHQKGNDPVATGNRRADEAAKQAALSTRVLAETTKPAGKRTADGSEFEKRTADGSEFESPKKKAKVE

SEQ ID NO: 828 - protein, 2092 aa, synthetic construct
MPAAKRVKLDGGDKKYSIGLDIGTNSVGWAVITDEYKVPSKKFKVLGNTDRHSIKKNLIGALLFDSGETAEATRLKRTARRRYTRRKNRICYLQEIFSNEMAKVDDSFFHRLEESFLVEEDKKHERHPIFGNIVDEVAYHEKYPTIYHLRKKLVDSTDKADLRLIYLALAHMIKFRGHFLIEGDLNPDNSDVDKLFIQLVQTYNQLFEENPINASGVDAKAILSARLSKSRRLENLIAQLPGEKKNGLFGNLIALSLGLTPNFKSNFDLAEDAKLQLSKDTYDDDLDNLLAQIGDQYADLFLAAKNLSDAILLSDILRVNTEITKAPLSASMIKRYDEHHQDLTLLKALVRQQLPEKYKEIFFDQSKNGYAGYIDGGASQEEFYKFIKPILEKMDGTEELLVKLNREDLLRKQRTFDNGSIPHQIHLGELHAILRRQEDFYPFLKDNREKIEKILTFRIPYYVGPLARGNSRFAWMTRKSEETITPWNFEEVVDKGASAQSFIERMTNFDKNLPNEKVLPKHSLLYEYFTVYNELTKVKYVTEGMRKPAFLSGEQKKAIVDLLFKTNRKVTVKQLKEDYFKKIECFDSVEISGVEDRFNASLGTYHDLLKIIKDKDFLDNEENEDILEDIVLTLTLFEDREMIEERLKTYAHLFDDKVMKQLKRRRYTGWGRLSRKLINGIRDKQSGKTILDFLKSDGFANRNFMQLIHDDSLTFKEDIQKAQVSGQGDSLHEHIANLAGSPAIKKGILQTVKVVDELVKVMGRHKPENIVIEMARENQTTQKGQKNSRERMKRIEEGIKELGSQILKEHPVENTQLQNEKLYLYYLQNGRDMYVDQELDINRLSDYDVDHIVPQSFLKDDSIDNKVLTRSDKARGKSDNVPSEEVVKKMKNYWRQLLNAKLITQRKFDNLTKAERGGLSELDKAGFIKRQLVETRQITKHVAQILDSRMNTKYDENDKLIREVKVITLKSKLVSDFRKDFQFYKVREINNYHHAHDAYLNAVVGTALIKKYPKLESEFVYGDYKVYDVRKMIAKSEQEIGKATAKYFFYSNIMNFFKTEITLANGEIRKRPLIETNGETGEIVWDKGRDFATVRKVLSMPQVNIVKKTEVQTGGFSKESILPKRNSDKLIARKKDWDPKKYGGFDSPTVAYSVLVVAKVEKGKSKKLKSVKELLGITIMERSSFEKNPIDFLEAKGYKEVKKDLIIKLPKYSLFELENGRKRMLASAGELQKGNELALPSKYVNFLYLASHYEKLKGSPEDNEQKQLFVEQHKHYLDEIIEQISEFSKRVILADANLDKVLSAYNKHRDKPIREQAENIIHLFTLTNLGAPAAFKYFDTTIDRKRYTSTKEVLDATLIHQSITGLYETRIDLSQLGGDGGGGSGGGGSSGGVLNLEEEYRLHEKPVPSSIDPSWLQLFPTVWAERAGMGLANQVPPVVVELRSGASPVAVRQYPMSKEAREGIRPHIQRFLDLGVLVPCQSPWNTPLLPVKKPGTNDYRPVQDLREINKRVQDIHPTVPNPYNLLSSLPPSHTWYSVLDLKDAFFCLKLHPNSQPLFAFEWRDPEKGNTGQLTWTRLPQGFKNSPTLFNEALHRDLAPFRALNPQVVLLQYVDDLLVAAPTYRDCKEGTQKLLQELSKLGYRVSAKKAQLCQKEVTYLGYLLKEGKRWLTPARKATVMKIPPPTTPRQVREFLGTAGFCRLWIPGFASLAAPLYPLTKPSIPFIWTEEHQKAFDRIKEALLSAPALALPDLTKPFTLYVDERAGVARGVLTQTLGPWRRPVAYLSKKLDPVASGWPTCLKAVAAVALLLKDADKLTLGQNVTVIASHSLESIVRQPPDRWMTNARMTHYQSLLLNERVSFAPPAVLNPATLLPVESEATPVHRCSEILAEETGTRRDLKDQPLPGVPAWYTDGSSFIAEGKRRAGAAIVDGKRTVWASSLPEGTSAQKAELVALTQALRLAEGKDINIYTDSRYAFATAHIHGAIYKQRGWLTSAGKDIKNKEEILALLEAIHLPKRVAIIHCPGHQKGNDPVATGNRRADEAAKQAALSTRVLAETTKPAGKRTADGSEFEKRTADGSEFESPKKKAKVE

SEQ ID NO: 829 - protein, 2094 aa, synthetic construct
MPAAKRVKLDGGDKKYSIGLDIGTNSVGWAVITDEYKVPSKKFKVLGNTDRHSIKKNLIGALLFDSGETAEATRLKRTARRRYTRRKNRICYLQEIFSNEMAKVDDSFFHRLEESFLVEEDKKHERHPIFGNIVDEVAYHEKYPTIYHLRKKLVDSTDKADLRLIYLALAHMIKFRGHFLIEGDLNPDNSDVDKLFIQLVQTYNQLFEENPINASGVDAKAILSARLSKSRRLENLIAQLPGEKKNGLFGNLIALSLGLTPNFKSNFDLAEDAKLQLSKDTYDDDLDNLLAQIGDQYADLFLAAKNLSDAILLSDILRVNTEITKAPLSASMIKRYDEHHQDLTLLKALVRQQLPEKYKEIFFDQSKNGYAGYIDGGASQEEFYKFIKPILEKMDGTEELLVKLNREDLLRKQRTFDNGSIPHQIHLGELHAILRRQEDFYPFLKDNREKIEKILTFRIPYYVGPLARGNSRFAWMTRKSEETITPWNFEEVVDKGASAQSFIERMTNFDKNLPNEKVLPKHSLLYEYFTVYNELTKVKYVTEGMRKPAFLSGEQKKAIVDLLFKTNRKVTVKQLKEDYFKKIECFDSVEISGVEDRFNASLGTYHDLLKIIKDKDFLDNEENEDILEDIVLTLTLFEDREMIEERLKTYAHLFDDKVMKQLKRRRYTGWGRLSRKLINGIRDKQSGKTILDFLKSDGFANRNFMQLIHDDSLTFKEDIQKAQVSGQGDSLHEHIANLAGSPAIKKGILQTVKVVDELVKVMGRHKPENIVIEMARENQTTQKGQKNSRERMKRIEEGIKELGSQILKEHPVENTQLQNEKLYLYYLQNGRDMYVDQELDINRLSDYDVDHIVPQSFLKDDSIDNKVLTRSDKARGKSDNVPSEEVVKKMKNYWRQLLNAKLITQRKFDNLTKAERGGLSELDKAGFIKRQLVETRQITKHVAQILDSRMNTKYDENDKLIREVKVITLKSKLVSDFRKDFQFYKVREINNYHHAHDAYLNAVVGTALIKKYPKLESEFVYGDYKVYDVRKMIAKSEQEIGKATAKYFFYSNIMNFFKTEITLANGEIRKRPLIETNGETGEIVWDKGRDFATVRKVLSMPQVNIVKKTEVQTGGFSKESILPKRNSDKLIARKKDWDPKKYGGFDSPTVAYSVLVVAKVEKGKSKKLKSVKELLGITIMERSSFEKNPIDFLEAKGYKEVKKDLIIKLPKYSLFELENGRKRMLASAGELQKGNELALPSKYVNFLYLASHYEKLKGSPEDNEQKQLFVEQHKHYLDEIIEQISEFSKRVILADANLDKVLSAYNKHRDKPIREQAENIIHLFTLTNLGAPAAFKYFDTTIDRKRYTSTKEVLDATLIHQSITGLYETRIDLSQLGGDGGEAAAKGGSPAPGGVLNLEEEYRLHEKPVPSSIDPSWLQLFPTVWAERAGMGLANQVPPVVVELRSGASPVAVRQYPMSKEAREGIRPHIQRFLDLGVLVPCQSPWNTPLLPVKKPGTNDYRPVQDLREINKRVQDIHPTVPNPYNLLSSLPPSHTWYSVLDLKDAFFCLKLHPNSQPLFAFEWRDPEKGNTGQLTWTRLPQGFKNSPTLFNEALHRDLAPFRALNPQVVLLQYVDDLLVAAPTYRDCKEGTQKLLQELSKLGYRVSAKKAQLCQKEVTYLGYLLKEGKRWLTPARKATVMKIPPPTTPRQVREFLGTAGFCRLWIPGFASLAAPLYPLTKPSIPFIWTEEHQKAFDRIKEALLSAPALALPDLTKPFTLYVDERAGVARGVLTQTLGPWRRPVAYLSKKLDPVASGWPTCLKAVAAVALLLKDADKLTLGQNVTVIASHSLESIVRQPPDRWMTNARMTHYQSLLLNERVSFAPPAVLNPATLLPVESEATPVHRCSEILAEETGTRRDLKDQPLPGVPAWYTDGSSFIAEGKRRAGAAIVDGKRTVWASSLPEGTSAQKAELVALTQALRLAEGKDINIYTDSRYAFATAHIHGAIYKQRGWLTSAGKDIKNKEEILALLEAIHLPKRVAIIHCPGHQKGNDPVATGNRRADEAAKQAALSTRVLAETTKPAGKRTADGSEFEKRTADGSEFESPKKKAKVE

SEQ ID NO: 830 - protein, 2094 aa, synthetic construct
MPAAKRVKLDGGDKKYSIGLDIGTNSVGWAVITDEYKVPSKKFKVLGNTDRHSIKKNLIGALLFDSGETAEATRLKRTARRRYTRRKNRICYLQEIFSNEMAKVDDSFFHRLEESFLVEEDKKHERHPIFGNIVDEVAYHEKYPTIYHLRKKLVDSTDKADLRLIYLALAHMIKFRGHFLIEGDLNPDNSDVDKLFIQLVQTYNQLFEENPINASGVDAKAILSARLSKSRRLENLIAQLPGEKKNGLFGNLIALSLGLTPNFKSNFDLAEDAKLQLSKDTYDDDLDNLLAQIGDQYADLFLAAKNLSDAILLSDILRVNTEITKAPLSASMIKRYDEHHQDLTLLKALVRQQLPEKYKEIFFDQSKNGYAGYIDGGASQEEFYKFIKPILEKMDGTEELLVKLNREDLLRKQRTFDNGSIPHQIHLGELHAILRRQEDFYPFLKDNREKIEKILTFRIPYYVGPLARGNSRFAWMTRKSEETITPWNFEEVVDKGASAQSFIERMTNFDKNLPNEKVLPKHSLLYEYFTVYNELTKVKYVTEGMRKPAFLSGEQKKAIVDLLFKTNRKVTVKQLKEDYFKKIECFDSVEISGVEDRFNASLGTYHDLLKIIKDKDFLDNEENEDILEDIVLTLTLFEDREMIEERLKTYAHLFDDKVMKQLKRRRYTGWGRLSRKLINGIRDKQSGKTILDFLKSDGFANRNFMQLIHDDSLTFKEDIQKAQVSGQGDSLHEHIANLAGSPAIKKGILQTVKVVDELVKVMGRHKPENIVIEMARENQTTQKGQKNSRERMKRIEEGIKELGSQILKEHPVENTQLQNEKLYLYYLQNGRDMYVDQELDINRLSDYDVDHIVPQSFLKDDSIDNKVLTRSDKARGKSDNVPSEEVVKKMKNYWRQLLNAKLITQRKFDNLTKAERGGLSELDKAGFIKRQLVETRQITKHVAQILDSRMNTKYDENDKLIREVKVITLKSKLVSDFRKDFQFYKVREINNYHHAHDAYLNAVVGTALIKKYPKLESEFVYGDYKVYDVRKMIAKSEQEIGKATAKYFFYSNIMNFFKTEITLANGEIRKRPLIETNGETGEIVWDKGRDFATVRKVLSMPQVNIVKKTEVQTGGFSKESILPKRNSDKLIARKKDWDPKKYGGFDSPTVAYSVLVVAKVEKGKSKKLKSVKELLGITIMERSSFEKNPIDFLEAKGYKEVKKDLIIKLPKYSLFELENGRKRMLASAGELQKGNELALPSKYVNFLYLASHYEKLKGSPEDNEQKQLFVEQHKHYLDEIIEQISEFSKRVILADANLDKVLSAYNKHRDKPIREQAENIIHLFTLTNLGAPAAFKYFDTTIDRKRYTSTKEVLDATLIHQSITGLYETRIDLSQLGGDGGEAAAKGGGGGSGGVLNLEEEYRLHEKPVPSSIDPSWLQLFPTVWAERAGMGLANQVPPVVVELRSGASPVAVRQYPMSKEAREGIRPHIQRFLDLGVLVPCQSPWNTPLLPVKKPGTNDYRPVQDLREINKRVQDIHPTVPNPYNLLSSLPPSHTWYSVLDLKDAFFCLKLHPNSQPLFAFEWRDPEKGNTGQLTWTRLPQGFKNSPTLFNEALHRDLAPFRALNPQVVLLQYVDDLLVAAPTYRDCKEGTQKLLQELSKLGYRVSAKKAQLCQKEVTYLGYLLKEGKRWLTPARKATVMKIPPPTTPRQVREFLGTAGFCRLWIPGFASLAAPLYPLTKPSIPFIWTEEHQKAFDRIKEALLSAPALALPDLTKPFTLYVDERAGVARGVLTQTLGPWRRPVAYLSKKLDPVASGWPTCLKAVAAVALLLKDADKLTLGQNVTVIASHSLESIVRQPPDRWMTNARMTHYQSLLLNERVSFAPPAVLNPATLLPVESEATPVHRCSEILAEETGTRRDLKDQPLPGVPAWYTDGSSFIAEGKRRAGAAIVDGKRTVWASSLPEGTSAQKAELVALTQALRLAEGKDINIYTDSRYAFATAHIHGAIYKQRGWLTSAGKDIKNKEEILALLEAIHLPKRVAIIHCPGHQKGNDPVATGNRRADEAAKQAALSTRVLAETTKPAGKRTADGSEFEKRTADGSEFESPKKKAKVE

SEQ ID NO: 831 - protein, 2094 aa, synthetic construct
MPAAKRVKLDGGDKKYSIGLDIGTNSVGWAVITDEYKVPSKKFKVLGNTDRHSIKKNLIGALLFDSGETAEATRLKRTARRRYTRRKNRICYLQEIFSNEMAKVDDSFFHRLEESFLVEEDKKHERHPIFGNIVDEVAYHEKYPTIYHLRKKLVDSTDKADLRLIYLALAHMIKFRGHFLIEGDLNPDNSDVDKLFIQLVQTYNQLFEENPINASGVDAKAILSARLSKSRRLENLIAQLPGEKKNGLFGNLIALSLGLTPNFKSNFDLAEDAKLQLSKDTYDDDLDNLLAQIGDQYADLFLAAKNLSDAILLSDILRVNTEITKAPLSASMIKRYDEHHQDLTLLKALVRQQLPEKYKEIFFDQSKNGYAGYIDGGASQEEFYKFIKPILEKMDGTEELLVKLNREDLLRKQRTFDNGSIPHQIHLGELHAILRRQEDFYPFLKDNREKIEKILTFRIPYYVGPLARGNSRFAWMTRKSEETITPWNFEEVVDKGASAQSFIERMTNFDKNLPNEKVLPKHSLLYEYFTVYNELTKVKYVTEGMRKPAFLSGEQKKAIVDLLFKTNRKVTVKQLKEDYFKKIECFDSVEISGVEDRFNASLGTYHDLLKIIKDKDFLDNEENEDILEDIVLTLTLFEDREMIEERLKTYAHLFDDKVMKQLKRRRYTGWGRLSRKLINGIRDKQSGKTILDFLKSDGFANRNFMQLIHDDSLTFKEDIQKAQVSGQGDSLHEHIANLAGSPAIKKGILQTVKVVDELVKVMGRHKPENIVIEMARENQTTQKGQKNSRERMKRIEEGIKELGSQILKEHPVENTQLQNEKLYLYYLQNGRDMYVDQELDINRLSDYDVDHIVPQSFLKDDSIDNKVLTRSDKARGKSDNVPSEEVVKKMKNYWRQLLNAKLITQRKFDNLTKAERGGLSELDKAGFIKRQLVETRQITKHVAQILDSRMNTKYDENDKLIREVKVITLKSKLVSDFRKDFQFYKVREINNYHHAHDAYLNAVVGTALIKKYPKLESEFVYGDYKVYDVRKMIAKSEQEIGKATAKYFFYSNIMNFFKTEITLANGEIRKRPLIETNGETGEIVWDKGRDFATVRKVLSMPQVNIVKKTEVQTGGFSKESILPKRNSDKLIARKKDWDPKKYGGFDSPTVAYSVLVVAKVEKGKSKKLKSVKELLGITIMERSSFEKNPIDFLEAKGYKEVKKDLIIKLPKYSLFELENGRKRMLASAGELQKGNELALPSKYVNFLYLASHYEKLKGSPEDNEQKQLFVEQHKHYLDEIIEQISEFSKRVILADANLDKVLSAYNKHRDKPIREQAENIIHLFTLTNLGAPAAFKYFDTTIDRKRYTSTKEVLDATLIHQSITGLYETRIDLSQLGGDGGPAPGSSEAAAKGGVLNLEEEYRLHEKPVPSSIDPSWLQLFPTVWAERAGMGLANQVPPVVVELRSGASPVAVRQYPMSKEAREGIRPHIQRFLDLGVLVPCQSPWNTPLLPVKKPGTNDYRPVQDLREINKRVQDIHPTVPNPYNLLSSLPPSHTWYSVLDLKDAFFCLKLHPNSQPLFAFEWRDPEKGNTGQLTWTRLPQGFKNSPTLFNEALHRDLAPFRALNPQVVLLQYVDDLLVAAPTYRDCKEGTQKLLQELSKLGYRVSAKKAQLCQKEVTYLGYLLKEGKRWLTPARKATVMKIPPPTTPRQVREFLGTAGFCRLWIPGFASLAAPLYPLTKPSIPFIWTEEHQKAFDRIKEALLSAPALALPDLTKPFTLYVDERAGVARGVLTQTLGPWRRPVAYLSKKLDPVASGWPTCLKAVAAVALLLKDADKLTLGQNVTVIASHSLESIVRQPPDRWMTNARMTHYQSLLLNERVSFAPPAVLNPATLLPVESEATPVHRCSEILAEETGTRRDLKDQPLPGVPAWYTDGSSFIAEGKRRAGAAIVDGKRTVWASSLPEGTSAQKAELVALTQALRLAEGKDINIYTDSRYAFATAHIHGAIYKQRGWLTSAGKDIKNKEEILALLEAIHLPKRVAIIHCPGHQKGNDPVATGNRRADEAAKQAALSTRVLAETTKPAGKRTADGSEFEKRTADGSEFESPKKKAKVE

SEQ ID NO: 832 - protein, 2091 aa, synthetic construct
MPAAKRVKLDGGDKKYSIGLDIGTNSVGWAVITDEYKVPSKKFKVLGNTDRHSIKKNLIGALLFDSGETAEATRLKRTARRRYTRRKNRICYLQEIFSNEMAKVDDSFFHRLEESFLVEEDKKHERHPIFGNIVDEVAYHEKYPTIYHLRKKLVDSTDKADLRLIYLALAHMIKFRGHFLIEGDLNPDNSDVDKLFIQLVQTYNQLFEENPINASGVDAKAILSARLSKSRRLENLIAQLPGEKKNGLFGNLIALSLGLTPNFKSNFDLAEDAKLQLSKDTYDDDLDNLLAQIGDQYADLFLAAKNLSDAILLSDILRVNTEITKAPLSASMIKRYDEHHQDLTLLKALVRQQLPEKYKEIFFDQSKNGYAGYIDGGASQEEFYKFIKPILEKMDGTEELLVKLNREDLLRKQRTFDNGSIPHQIHLGELHAILRRQEDFYPFLKDNREKIEKILTFRIPYYVGPLARGNSRFAWMTRKSEETITPWNFEEVVDKGASAQSFIERMTNFDKNLPNEKVLPKHSLLYEYFTVYNELTKVKYVTEGMRKPAFLSGEQKKAIVDLLFKTNRKVTVKQLKEDYFKKIECFDSVEISGVEDRFNASLGTYHDLLKIIKDKDFLDNEENEDILEDIVLTLTLFEDREMIEERLKTYAHLFDDKVMKQLKRRRYTGWGRLSRKLINGIRDKQSGKTILDFLKSDGFANRNFMQLIHDDSLTFKEDIQKAQVSGQGDSLHEHIANLAGSPAIKKGILQTVKVVDELVKVMGRHKPENIVIEMARENQTTQKGQKNSRERMKRIEEGIKELGSQILKEHPVENTQLQNEKLYLYYLQNGRDMYVDQELDINRLSDYDVDHIVPQSFLKDDSIDNKVLTRSDKARGKSDNVPSEEVVKKMKNYWRQLLNAKLITQRKFDNLTKAERGGLSELDKAGFIKRQLVETRQITKHVAQILDSRMNTKYDENDKLIREVKVITLKSKLVSDFRKDFQFYKVREINNYHHAHDAYLNAVVGTALIKKYPKLESEFVYGDYKVYDVRKMIAKSEQEIGKATAKYFFYSNIMNFFKTEITLANGEIRKRPLIETNGETGEIVWDKGRDFATVRKVLSMPQVNIVKKTEVQTGGFSKESILPKRNSDKLIARKKDWDPKKYGGFDSPTVAYSVLVVAKVEKGKSKKLKSVKELLGITIMERSSFEKNPIDFLEAKGYKEVKKDLIIKLPKYSLFELENGRKRMLASAGELQKGNELALPSKYVNFLYLASHYEKLKGSPEDNEQKQLFVEQHKHYLDEIIEQISEFSKRVILADANLDKVLSAYNKHRDKPIREQAENIIHLFTLTNLGAPAAFKYFDTTIDRKRYTSTKEVLDATLIHQSITGLYETRIDLSQLGGDGGEAAAKGGSGGVLNLEEEYRLHEKPVPSSIDPSWLQLFPTVWAERAGMGLANQVPPVVVELRSGASPVAVRQYPMSKEAREGIRPHIQRFLDLGVLVPCQSPWNTPLLPVKKPGTNDYRPVQDLREINKRVQDIHPTVPNPYNLLSSLPPSHTWYSVLDLKDAFFCLKLHPNSQPLFAFEWRDPEKGNTGQLTWTRLPQGFKNSPTLFNEALHRDLAPFRALNPQVVLLQYVDDLLVAAPTYRDCKEGTQKLLQELSKLGYRVSAKKAQLCQKEVTYLGYLLKEGKRWLTPARKATVMKIPPPTTPRQVREFLGTAGFCRLWIPGFASLAAPLYPLTKPSIPFIWTEEHQKAFDRIKEALLSAPALALPDLTKPFTLYVDERAGVARGVLTQTLGPWRRPVAYLSKKLDPVASGWPTCLKAVAAVALLLKDADKLTLGQNVTVIASHSLESIVRQPPDRWMTNARMTHYQSLLLNERVSFAPPAVLNPATLLPVESEATPVHRCSEILAEETGTRRDLKDQPLPGVPAWYTDGSSFIAEGKRRAGAAIVDGKRTVWASSLPEGTSAQKAELVALTQALRLAEGKDINIYTDSRYAFATAHIHGAIYKQRGWLTSAGKDIKNKEEILALLEAIHLPKRVAIIHCPGHQKGNDPVATGNRRADEAAKQAALSTRVLAETTKPAGKRTADGSEFEKRTADGSEFESPKKKAKVE

SEQ ID NO: 833 - protein, 2093 aa, synthetic construct
MPAAKRVKLDGGDKKYSIGLDIGTNSVGWAVITDEYKVPSKKFKVLGNTDRHSIKKNLIGALLFDSGETAEATRLKRTARRRYTRRKNRICYLQEIFSNEMAKVDDSFFHRLEESFLVEEDKKHERHPIFGNIVDEVAYHEKYPTIYHLRKKLVDSTDKADLRLIYLALAHMIKFRGHFLIEGDLNPDNSDVDKLFIQLVQTYNQLFEENPINASGVDAKAILSARLSKSRRLENLIAQLPGEKKNGLFGNLIALSLGLTPNFKSNFDLAEDAKLQLSKDTYDDDLDNLLAQIGDQYADLFLAAKNLSDAILLSDILRVNTEITKAPLSASMIKRYDEHHQDLTLLKALVRQQLPEKYKEIFFDQSKNGYAGYIDGGASQEEFYKFIKPILEKMDGTEELLVKLNREDLLRKQRTFDNGSIPHQIHLGELHAILRRQEDFYPFLKDNREKIEKILTFRIPYYVGPLARGNSRFAWMTRKSEETITPWNFEEVVDKGASAQSFIERMTNFDKNLPNEKVLPKHSLLYEYFTVYNELTKVKYVTEGMRKPAFLSGEQKKAIVDLLFKTNRKVTVKQLKEDYFKKIECFDSVEISGVEDRFNASLGTYHDLLKIIKDKDFLDNEENEDILEDIVLTLTLFEDREMIEERLKTYAHLFDDKVMKQLKRRRYTGWGRLSRKLINGIRDKQSGKTILDFLKSDGFANRNFMQLIHDDSLTFKEDIQKAQVSGQGDSLHEHIANLAGSPAIKKGILQTVKVVDELVKVMGRHKPENIVIEMARENQTTQKGQKNSRERMKRIEEGIKELGSQILKEHPVENTQLQNEKLYLYYLQNGRDMYVDQELDINRLSDYDVDHIVPQSFLKDDSIDNKVLTRSDKARGKSDNVPSEEVVKKMKNYWRQLLNAKLITQRKFDNLTKAERGGLSELDKAGFIKRQLVETRQITKHVAQILDSRMNTKYDENDKLIREVKVITLKSKLVSDFRKDFQFYKVREINNYHHAHDAYLNAVVGTALIKKYPKLESEFVYGDYKVYDVRKMIAKSEQEIGKATAKYFFYSNIMNFFKTEITLANGEIRKRPLIETNGETGEIVWDKGRDFATVRKVLSMPQVNIVKKTEVQTGGFSKESILPKRNSDKLIARKKDWDPKKYGGFDSPTVAYSVLVVAKVEKGKSKKLKSVKELLGITIMERSSFEKNPIDFLEAKGYKEVKKDLIIKLPKYSLFELENGRKRMLASAGELQKGNELALPSKYVNFLYLASHYEKLKGSPEDNEQKQLFVEQHKHYLDEIIEQISEFSKRVILADANLDKVLSAYNKHRDKPIREQAENIIHLFTLTNLGAPAAFKYFDTTIDRKRYTSTKEVLDATLIHQSITGLYETRIDLSQLGGDGGEAAAKEAAAKGGVLNLEEEYRLHEKPVPSSIDPSWLQLFPTVWAERAGMGLANQVPPVVVELRSGASPVAVRQYPMSKEAREGIRPHIQRFLDLGVLVPCQSPWNTPLLPVKKPGTNDYRPVQDLREINKRVQDIHPTVPNPYNLLSSLPPSHTWYSVLDLKDAFFCLKLHPNSQPLFAFEWRDPEKGNTGQLTWTRLPQGFKNSPTLFNEALHRDLAPFRALNPQVVLLQYVDDLLVAAPTYRDCKEGTQKLLQELSKLGYRVSAKKAQLCQKEVTYLGYLLKEGKRWLTPARKATVMKIPPPTTPRQVREFLGTAGFCRLWIPGFASLAAPLYPLTKPSIPFIWTEEHQKAFDRIKEALLSAPALALPDLTKPFTLYVDERAGVARGVLTQTLGPWRRPVAYLSKKLDPVASGWPTCLKAVAAVALLLKDADKLTLGQNVTVIASHSLESIVRQPPDRWMTNARMTHYQSLLLNERVSFAPPAVLNPATLLPVESEATPVHRCSEILAEETGTRRDLKDQPLPGVPAWYTDGSSFIAEGKRRAGAAIVDGKRTVWASSLPEGTSAQKAELVALTQALRLAEGKDINIYTDSRYAFATAHIHGAIYKQRGWLTSAGKDIKNKEEILALLEAIHLPKRVAIIHCPGHQKGNDPVATGNRRADEAAKQAALSTRVLAETTKPAGKRTADGSEFEKRTADGSEFESPKKKAKVE

SEQ ID NO: 834 - protein, 2094 aa, synthetic construct
MPAAKRVKLDGGDKKYSIGLDIGTNSVGWAVITDEYKVPSKKFKVLGNTDRHSIKKNLIGALLFDSGETAEATRLKRTARRRYTRRKNRICYLQEIFSNEMAKVDDSFFHRLEESFLVEEDKKHERHPIFGNIVDEVAYHEKYPTIYHLRKKLVDSTDKADLRLIYLALAHMIKFRGHFLIEGDLNPDNSDVDKLFIQLVQTYNQLFEENPINASGVDAKAILSARLSKSRRLENLIAQLPGEKKNGLFGNLIALSLGLTPNFKSNFDLAEDAKLQLSKDTYDDDLDNLLAQIGDQYADLFLAAKNLSDAILLSDILRVNTEITKAPLSASMIKRYDEHHQDLTLLKALVRQQLPEKYKEIFFDQSKNGYAGYIDGGASQEEFYKFIKPILEKMDGTEELLVKLNREDLLRKQRTFDNGSIPHQIHLGELHAILRRQEDFYPFLKDNREKIEKILTFRIPYYVGPLARGNSRFAWMTRKSEETITPWNFEEVVDKGASAQSFIERMTNFDKNLPNEKVLPKHSLLYEYFTVYNELTKVKYVTEGMRKPAFLSGEQKKAIVDLLFKTNRKVTVKQLKEDYFKKIECFDSVEISGVEDRFNASLGTYHDLLKIIKDKDFLDNEENEDILEDIVLTLTLFEDREMIEERLKTYAHLFDDKVMKQLKRRRYTGWGRLSRKLINGIRDKQSGKTILDFLKSDGFANRNFMQLIHDDSLTFKEDIQKAQVSGQGDSLHEHIANLAGSPAIKKGILQTVKVVDELVKVMGRHKPENIVIEMARENQTTQKGQKNSRERMKRIEEGIKELGSQILKEHPVENTQLQNEKLYLYYLQNGRDMYVDQELDINRLSDYDVDHIVPQSFLKDDSIDNKVLTRSDKARGKSDNVPSEEVVKKMKNYWRQLLNAKLITQRKFDNLTKAERGGLSELDKAGFIKRQLVETRQITKHVAQILDSRMNTKYDENDKLIREVKVITLKSKLVSDFRKDFQFYKVREINNYHHAHDAYLNAVVGTALIKKYPKLESEFVYGDYKVYDVRKMIAKSEQEIGKATAKYFFYSNIMNFFKTEITLANGEIRKRPLIETNGETGEIVWDKGRDFATVRKVLSMPQVNIVKKTEVQTGGFSKESILPKRNSDKLIARKKDWDPKKYGGFDSPTVAYSVLVVAKVEKGKSKKLKSVKELLGITIMERSSFEKNPIDFLEAKGYKEVKKDLIIKLPKYSLFELENGRKRMLASAGELQKGNELALPSKYVNFLYLASHYEKLKGSPEDNEQKQLFVEQHKHYLDEIIEQISEFSKRVILADANLDKVLSAYNKHRDKPIREQAENIIHLFTLTNLGAPAAFKYFDTTIDRKRYTSTKEVLDATLIHQSITGLYETRIDLSQLGGDGGEAAAKPAPGSSGGVLNLEEEYRLHEKPVPSSIDPSWLQLFPTVWAERAGMGLANQVPPVVVELRSGASPVAVRQYPMSKEAREGIRPHIQRFLDLGVLVPCQSPWNTPLLPVKKPGTNDYRPVQDLREINKRVQDIHPTVPNPYNLLSSLPPSHTWYSVLDLKDAFFCLKLHPNSQPLFAFEWRDPEKGNTGQLTWTRLPQGFKNSPTLFNEALHRDLAPFRALNPQVVLLQYVDDLLVAAPTYRDCKEGTQKLLQELSKLGYRVSAKKAQLCQKEVTYLGYLLKEGKRWLTPARKATVMKIPPPTTPRQVREFLGTAGFCRLWIPGFASLAAPLYPLTKPSIPFIWTEEHQKAFDRIKEALLSAPALALPDLTKPFTLYVDERAGVARGVLTQTLGPWRRPVAYLSKKLDPVASGWPTCLKAVAAVALLLKDADKLTLGQNVTVIASHSLESIVRQPPDRWMTNARMTHYQSLLLNERVSFAPPAVLNPATLLPVESEATPVHRCSEILAEETGTRRDLKDQPLPGVPAWYTDGSSFIAEGKRRAGAAIVDGKRTVWASSLPEGTSAQKAELVALTQALRLAEGKDINIYTDSRYAFATAHIHGAIYKQRGWLTSAGKDIKNKEEILALLEAIHLPKRVAIIHCPGHQKGNDPVATGNRRADEAAKQAALSTRVLAETTKPAGKRTADGSEFEKRTADGSEFESPKKKAKVE

SEQ ID NO: 835 - protein, 2092 aa, synthetic construct
MPAAKRVKLDGGDKKYSIGLDIGTNSVGWAVITDEYKVPSKKFKVLGNTDRHSIKKNLIGALLFDSGETAEATRLKRTARRRYTRRKNRICYLQEIFSNEMAKVDDSFFHRLEESFLVEEDKKHERHPIFGNIVDEVAYHEKYPTIYHLRKKLVDSTDKADLRLIYLALAHMIKFRGHFLIEGDLNPDNSDVDKLFIQLVQTYNQLFEENPINASGVDAKAILSARLSKSRRLENLIAQLPGEKKNGLFGNLIALSLGLTPNFKSNFDLAEDAKLQLSKDTYDDDLDNLLAQIGDQYADLFLAAKNLSDAILLSDILRVNTEITKAPLSASMIKRYDEHHQDLTLLKALVRQQLPEKYKEIFFDQSKNGYAGYIDGGASQEEFYKFIKPILEKMDGTEELLVKLNREDLLRKQRTFDNGSIPHQIHLGELHAILRRQEDFYPFLKDNREKIEKILTFRIPYYVGPLARGNSRFAWMTRKSEETITPWNFEEVVDKGASAQSFIERMTNFDKNLPNEKVLPKHSLLYEYFTVYNELTKVKYVTEGMRKPAFLSGEQKKAIVDLLFKTNRKVTVKQLKEDYFKKIECFDSVEISGVEDRFNASLGTYHDLLKIIKDKDFLDNEENEDILEDIVLTLTLFEDREMIEERLKTYAHLFDDKVMKQLKRRRYTGWGRLSRKLINGIRDKQSGKTILDFLKSDGFANRNFMQLIHDDSLTFKEDIQKAQVSGQGDSLHEHIANLAGSPAIKKGILQTVKVVDELVKVMGRHKPENIVIEMARENQTTQKGQKNSRERMKRIEEGIKELGSQILKEHPVENTQLQNEKLYLYYLQNGRDMYVDQELDINRLSDYDVDHIVPQSFLKDDSIDNKVLTRSDKARGKSDNVPSEEVVKKMKNYWRQLLNAKLITQRKFDNLTKAERGGLSELDKAGFIKRQLVETRQITKHVAQILDSRMNTKYDENDKLIREVKVITLKSKLVSDFRKDFQFYKVREINNYHHAHDAYLNAVVGTALIKKYPKLESEFVYGDYKVYDVRKMIAKSEQEIGKATAKYFFYSNIMNFFKTEITLANGEIRKRPLIETNGETGEIVWDKGRDFATVRKVLSMPQVNIVKKTEVQTGGFSKESILPKRNSDKLIARKKDWDPKKYGGFDSPTVAYSVLVVAKVEKGKSKKLKSVKELLGITIMERSSFEKNPIDFLEAKGYKEVKKDLIIKLPKYSLFELENGRKRMLASAGELQKGNELALPSKYVNFLYLASHYEKLKGSPEDNEQKQLFVEQHKHYLDEIIEQISEFSKRVILADANLDKVLSAYNKHRDKPIREQAENIIHLFTLTNLGAPAAFKYFDTTIDRKRYTSTKEVLDATLIHQSITGLYETRIDLSQLGGDGGGSSGSSGSSGGVLNLEEEYRLHEKPVPSSIDPSWLQLFPTVWAERAGMGLANQVPPVVVELRSGASPVAVRQYPMSKEAREGIRPHIQRFLDLGVLVPCQSPWNTPLLPVKKPGTNDYRPVQDLREINKRVQDIHPTVPNPYNLLSSLPPSHTWYSVLDLKDAFFCLKLHPNSQPLFAFEWRDPEKGNTGQLTWTRLPQGFKNSPTLFNEALHRDLAPFRALNPQVVLLQYVDDLLVAAPTYRDCKEGTQKLLQELSKLGYRVSAKKAQLCQKEVTYLGYLLKEGKRWLTPARKATVMKIPPPTTPRQVREFLGTAGFCRLWIPGFASLAAPLYPLTKPSIPFIWTEEHQKAFDRIKEALLSAPALALPDLTKPFTLYVDERAGVARGVLTQTLGPWRRPVAYLSKKLDPVASGWPTCLKAVAAVALLLKDADKLTLGQNVTVIASHSLESIVRQPPDRWMTNARMTHYQSLLLNERVSFAPPAVLNPATLLPVESEATPVHRCSEILAEETGTRRDLKDQPLPGVPAWYTDGSSFIAEGKRRAGAAIVDGKRTVWASSLPEGTSAQKAELVALTQALRLAEGKDINIYTDSRYAFATAHIHGAIYKQRGWLTSAGKDIKNKEEILALLEAIHLPKRVAIIHCPGHQKGNDPVATGNRRADEAAKQAALSTRVLAETTKPAGKRTADGSEFEKRTADGSEFESPKKKAKVE

SEQ ID NO: 836 - protein, 2091 aa, synthetic construct
MPAAKRVKLDGGDKKYSIGLDIGTNSVGWAVITDEYKVPSKKFKVLGNTDRHSIKKNLIGALLFDSGETAEATRLKRTARRRYTRRKNRICYLQEIFSNEMAKVDDSFFHRLEESFLVEEDKKHERHPIFGNIVDEVAYHEKYPTIYHLRKKLVDSTDKADLRLIYLALAHMIKFRGHFLIEGDLNPDNSDVDKLFIQLVQTYNQLFEENPINASGVDAKAILSARLSKSRRLENLIAQLPGEKKNGLFGNLIALSLGLTPNFKSNFDLAEDAKLQLSKDTYDDDLDNLLAQIGDQYADLFLAAKNLSDAILLSDILRVNTEITKAPLSASMIKRYDEHHQDLTLLKALVRQQLPEKYKEIFFDQSKNGYAGYIDGGASQEEFYKFIKPILEKMDGTEELLVKLNREDLLRKQRTFDNGSIPHQIHLGELHAILRRQEDFYPFLKDNREKIEKILTFRIPYYVGPLARGNSRFAWMTRKSEETITPWNFEEVVDKGASAQSFIERMTNFDKNLPNEKVLPKHSLLYEYFTVYNELTKVKYVTEGMRKPAFLSGEQKKAIVDLLFKTNRKVTVKQLKEDYFKKIECFDSVEISGVEDRFNASLGTYHDLLKIIKDKDFLDNEENEDILEDIVLTLTLFEDREMIEERLKTYAHLFDDKVMKQLKRRRYTGWGRLSRKLINGIRDKQSGKTILDFLKSDGFANRNFMQLIHDDSLTFKEDIQKAQVSGQGDSLHEHIANLAGSPAIKKGILQTVKVVDELVKVMGRHKPENIVIEMARENQTTQKGQKNSRERMKRIEEGIKELGSQILKEHPVENTQLQNEKLYLYYLQNGRDMYVDQELDINRLSDYDVDHIVPQSFLKDDSIDNKVLTRSDKARGKSDNVPSEEVVKKMKNYWRQLLNAKLITQRKFDNLTKAERGGLSELDKAGFIKRQLVETRQITKHVAQILDSRMNTKYDENDKLIREVKVITLKSKLVSDFRKDFQFYKVREINNYHHAHDAYLNAVVGTALIKKYPKLESEFVYGDYKVYDVRKMIAKSEQEIGKATAKYFFYSNIMNFFKTEITLANGEIRKRPLIETNGETGEIVWDKGRDFATVRKVLSMPQVNIVKKTEVQTGGFSKESILPKRNSDKLIARKKDWDPKKYGGFDSPTVAYSVLVVAKVEKGKSKKLKSVKELLGITIMERSSFEKNPIDFLEAKGYKEVKKDLIIKLPKYSLFELENGRKRMLASAGELQKGNELALPSKYVNFLYLASHYEKLKGSPEDNEQKQLFVEQHKHYLDEIIEQISEFSKRVILADANLDKVLSAYNKHRDKPIREQAENIIHLFTLTNLGAPAAFKYFDTTIDRKRYTSTKEVLDATLIHQSITGLYETRIDLSQLGGDGGEAAAKGSSGGVLNLEEEYRLHEKPVPSSIDPSWLQLFPTVWAERAGMGLANQVPPVVVELRSGASPVAVRQYPMSKEAREGIRPHIQRFLDLGVLVPCQSPWNTPLLPVKKPGTNDYRPVQDLREINKRVQDIHPTVPNPYNLLSSLPPSHTWYSVLDLKDAFFCLKLHPNSQPLFAFEWRDPEKGNTGQLTWTRLPQGFKNSPTLFNEALHRDLAPFRALNPQVVLLQYVDDLLVAAPTYRDCKEGTQKLLQELSKLGYRVSAKKAQLCQKEVTYLGYLLKEGKRWLTPARKATVMKIPPPTTPRQVREFLGTAGFCRLWIPGFASLAAPLYPLTKPSIPFIWTEEHQKAFDRIKEALLSAPALALPDLTKPFTLYVDERAGVARGVLTQTLGPWRRPVAYLSKKLDPVASGWPTCLKAVAAVALLLKDADKLTLGQNVTVIASHSLESIVRQPPDRWMTNARMTHYQSLLLNERVSFAPPAVLNPATLLPVESEATPVHRCSEILAEETGTRRDLKDQPLPGVPAWYTDGSSFIAEGKRRAGAAIVDGKRTVWASSLPEGTSAQKAELVALTQALRLAEGKDINIYTDSRYAFATAHIHGAIYKQRGWLTSAGKDIKNKEEILALLEAIHLPKRVAIIHCPGHQKGNDPVATGNRRADEAAKQAALSTRVLAETTKPAGKRTADGSEFEKRTADGSEFESPKKKAKVE

SEQ ID NO: 837 - protein, 2091 aa, synthetic construct
MPAAKRVKLDGGDKKYSIGLDIGTNSVGWAVITDEYKVPSKKFKVLGNTDRHSIKKNLIGALLFDSGETAEATRLKRTARRRYTRRKNRICYLQEIFSNEMAKVDDSFFHRLEESFLVEEDKKHERHPIFGNIVDEVAYHEKYPTIYHLRKKLVDSTDKADLRLIYLALAHMIKFRGHFLIEGDLNPDNSDVDKLFIQLVQTYNQLFEENPINASGVDAKAILSARLSKSRRLENLIAQLPGEKKNGLFGNLIALSLGLTPNFKSNFDLAEDAKLQLSKDTYDDDLDNLLAQIGDQYADLFLAAKNLSDAILLSDILRVNTEITKAPLSASMIKRYDEHHQDLTLLKALVRQQLPEKYKEIFFDQSKNGYAGYIDGGASQEEFYKFIKPILEKMDGTEELLVKLNREDLLRKQRTFDNGSIPHQIHLGELHAILRRQEDFYPFLKDNREKIEKILTFRIPYYVGPLARGNSRFAWMTRKSEETITPWNFEEVVDKGASAQSFIERMTNFDKNLPNEKVLPKHSLLYEYFTVYNELTKVKYVTEGMRKPAFLSGEQKKAIVDLLFKTNRKVTVKQLKEDYFKKIECFDSVEISGVEDRFNASLGTYHDLLKIIKDKDFLDNEENEDILEDIVLTLTLFEDREMIEERLKTYAHLFDDKVMKQLKRRRYTGWGRLSRKLINGIRDKQSGKTILDFLKSDGFANRNFMQLIHDDSLTFKEDIQKAQVSGQGDSLHEHIANLAGSPAIKKGILQTVKVVDELVKVMGRHKPENIVIEMARENQTTQKGQKNSRERMKRIEEGIKELGSQILKEHPVENTQLQNEKLYLYYLQNGRDMYVDQELDINRLSDYDVDHIVPQSFLKDDSIDNKVLTRSDKARGKSDNVPSEEVVKKMKNYWRQLLNAKLITQRKFDNLTKAERGGLSELDKAGFIKRQLVETRQITKHVAQILDSRMNTKYDENDKLIREVKVITLKSKLVSDFRKDFQFYKVREINNYHHAHDAYLNAVVGTALIKKYPKLESEFVYGDYKVYDVRKMIAKSEQEIGKATAKYFFYSNIMNFFKTEITLANGEIRKRPLIETNGETGEIVWDKGRDFATVRKVLSMPQVNIVKKTEVQTGGFSKESILPKRNSDKLIARKKDWDPKKYGGFDSPTVAYSVLVVAKVEKGKSKKLKSVKELLGITIMERSSFEKNPIDFLEAKGYKEVKKDLIIKLPKYSLFELENGRKRMLASAGELQKGNELALPSKYVNFLYLASHYEKLKGSPEDNEQKQLFVEQHKHYLDEIIEQISEFSKRVILADANLDKVLSAYNKHRDKPIREQAENIIHLFTLTNLGAPAAFKYFDTTIDRKRYTSTKEVLDATLIHQSITGLYETRIDLSQLGGDGGGGGEAAAKGGVLNLEEEYRLHEKPVPSSIDPSWLQLFPTVWAERAGMGLANQVPPVVVELRSGASPVAVRQYPMSKEAREGIRPHIQRFLDLGVLVPCQSPWNTPLLPVKKPGTNDYRPVQDLREINKRVQDIHPTVPNPYNLLSSLPPSHTWYSVLDLKDAFFCLKLHPNSQPLFAFEWRDPEKGNTGQLTWTRLPQGFKNSPTLFNEALHRDLAPFRALNPQVVLLQYVDDLLVAAPTYRDCKEGTQKLLQELSKLGYRVSAKKAQLCQKEVTYLGYLLKEGKRWLTPARKATVMKIPPPTTPRQVREFLGTAGFCRLWIPGFASLAAPLYPLTKPSIPFIWTEEHQKAFDRIKEALLSAPALALPDLTKPFTLYVDERAGVARGVLTQTLGPWRRPVAYLSKKLDPVASGWPTCLKAVAAVALLLKDADKLTLGQNVTVIASHSLESIVRQPPDRWMTNARMTHYQSLLLNERVSFAPPAVLNPATLLPVESEATPVHRCSEILAEETGTRRDLKDQPLPGVPAWYTDGSSFIAEGKRRAGAAIVDGKRTVWASSLPEGTSAQKAELVALTQALRLAEGKDINIYTDSRYAFATAHIHGAIYKQRGWLTSAGKDIKNKEEILALLEAIHLPKRVAIIHCPGHQKGNDPVATGNRRADEAAKQAALSTRVLAETTKPAGKRTADGSEFEKRTADGSEFESPKKKAKVE

SEQ ID NO: 838 - protein, 2091 aa, synthetic construct
MPAAKRVKLDGGDKKYSIGLDIGTNSVGWAVITDEYKVPSKKFKVLGNTDRHSIKKNLIGALLFDSGETAEATRLKRTARRRYTRRKNRICYLQEIFSNEMAKVDDSFFHRLEESFLVEEDKKHERHPIFGNIVDEVAYHEKYPTIYHLRKKLVDSTDKADLRLIYLALAHMIKFRGHFLIEGDLNPDNSDVDKLFIQLVQTYNQLFEENPINASGVDAKAILSARLSKSRRLENLIAQLPGEKKNGLFGNLIALSLGLTPNFKSNFDLAEDAKLQLSKDTYDDDLDNLLAQIGDQYADLFLAAKNLSDAILLSDILRVNTEITKAPLSASMIKRYDEHHQDLTLLKALVRQQLPEKYKEIFFDQSKNGYAGYIDGGASQEEFYKFIKPILEKMDGTEELLVKLNREDLLRKQRTFDNGSIPHQIHLGELHAILRRQEDFYPFLKDNREKIEKILTFRIPYYVGPLARGNSRFAWMTRKSEETITPWNFEEVVDKGASAQSFIERMTNFDKNLPNEKVLPKHSLLYEYFTVYNELTKVKYVTEGMRKPAFLSGEQKKAIVDLLFKTNRKVTVKQLKEDYFKKIECFDSVEISGVEDRFNASLGTYHDLLKIIKDKDFLDNEENEDILEDIVLTLTLFEDREMIEERLKTYAHLFDDKVMKQLKRRRYTGWGRLSRKLINGIRDKQSGKTILDFLKSDGFANRNFMQLIHDDSLTFKEDIQKAQVSGQGDSLHEHIANLAGSPAIKKGILQTVKVVDELVKVMGRHKPENIVIEMARENQTTQKGQKNSRERMKRIEEGIKELGSQILKEHPVENTQLQNEKLYLYYLQNGRDMYVDQELDINRLSDYDVDHIVPQSFLKDDSIDNKVLTRSDKARGKSDNVPSEEVVKKMKNYWRQLLNAKLITQRKFDNLTKAERGGLSELDKAGFIKRQLVETRQITKHVAQILDSRMNTKYDENDKLIREVKVITLKSKLVSDFRKDFQFYKVREINNYHHAHDAYLNAVVGTALIKKYPKLESEFVYGDYKVYDVRKMIAKSEQEIGKATAKYFFYSNIMNFFKTEITLANGEIRKRPLIETNGETGEIVWDKGRDFATVRKVLSMPQVNIVKKTEVQTGGFSKESILPKRNSDKLIARKKDWDPKKYGGFDSPTVAYSVLVVAKVEKGKSKKLKSVKELLGITIMERSSFEKNPIDFLEAKGYKEVKKDLIIKLPKYSLFELENGRKRMLASAGELQKGNELALPSKYVNFLYLASHYEKLKGSPEDNEQKQLFVEQHKHYLDEIIEQISEFSKRVILADANLDKVLSAYNKHRDKPIREQAENIIHLFTLTNLGAPAAFKYFDTTIDRKRYTSTKEVLDATLIHQSITGLYETRIDLSQLGGDGGGSSEAAAKGGVLNLEEEYRLHEKPVPSSIDPSWLQLFPTVWAERAGMGLANQVPPVVVELRSGASPVAVRQYPMSKEAREGIRPHIQRFLDLGVLVPCQSPWNTPLLPVKKPGTNDYRPVQDLREINKRVQDIHPTVPNPYNLLSSLPPSHTWYSVLDLKDAFFCLKLHPNSQPLFAFEWRDPEKGNTGQLTWTRLPQGFKNSPTLFNEALHRDLAPFRALNPQVVLLQYVDDLLVAAPTYRDCKEGTQKLLQELSKLGYRVSAKKAQLCQKEVTYLGYLLKEGKRWLTPARKATVMKIPPPTTPRQVREFLGTAGFCRLWIPGFASLAAPLYPLTKPSIPFIWTEEHQKAFDRIKEALLSAPALALPDLTKPFTLYVDERAGVARGVLTQTLGPWRRPVAYLSKKLDPVASGWPTCLKAVAAVALLLKDADKLTLGQNVTVIASHSLESIVRQPPDRWMTNARMTHYQSLLLNERVSFAPPAVLNPATLLPVESEATPVHRCSEILAEETGTRRDLKDQPLPGVPAWYTDGSSFIAEGKRRAGAAIVDGKRTVWASSLPEGTSAQKAELVALTQALRLAEGKDINIYTDSRYAFATAHIHGAIYKQRGWLTSAGKDIKNKEEILALLEAIHLPKRVAIIHCPGHQKGNDPVATGNRRADEAAKQAALSTRVLAETTKPAGKRTADGSEFEKRTADGSEFESPKKKAKVE

SEQ ID NO: 839 - protein, 2094 aa, synthetic construct
MPAAKRVKLDGGDKKYSIGLDIGTNSVGWAVITDEYKVPSKKFKVLGNTDRHSIKKNLIGALLFDSGETAEATRLKRTARRRYTRRKNRICYLQEIFSNEMAKVDDSFFHRLEESFLVEEDKKHERHPIFGNIVDEVAYHEKYPTIYHLRKKLVDSTDKADLRLIYLALAHMIKFRGHFLIEGDLNPDNSDVDKLFIQLVQTYNQLFEENPINASGVDAKAILSARLSKSRRLENLIAQLPGEKKNGLFGNLIALSLGLTPNFKSNFDLAEDAKLQLSKDTYDDDLDNLLAQIGDQYADLFLAAKNLSDAILLSDILRVNTEITKAPLSASMIKRYDEHHQDLTLLKALVRQQLPEKYKEIFFDQSKNGYAGYIDGGASQEEFYKFIKPILEKMDGTEELLVKLNREDLLRKQRTFDNGSIPHQIHLGELHAILRRQEDFYPFLKDNREKIEKILTFRIPYYVGPLARGNSRFAWMTRKSEETITPWNFEEVVDKGASAQSFIERMTNFDKNLPNEKVLPKHSLLYEYFTVYNELTKVKYVTEGMRKPAFLSGEQKKAIVDLLFKTNRKVTVKQLKEDYFKKIECFDSVEISGVEDRFNASLGTYHDLLKIIKDKDFLDNEENEDILEDIVLTLTLFEDREMIEERLKTYAHLFDDKVMKQLKRRRYTGWGRLSRKLINGIRDKQSGKTILDFLKSDGFANRNFMQLIHDDSLTFKEDIQKAQVSGQGDSLHEHIANLAGSPAIKKGILQTVKVVDELVKVMGRHKPENIVIEMARENQTTQKGQKNSRERMKRIEEGIKELGSQILKEHPVENTQLQNEKLYLYYLQNGRDMYVDQELDINRLSDYDVDHIVPQSFLKDDSIDNKVLTRSDKARGKSDNVPSEEVVKKMKNYWRQLLNAKLITQRKFDNLTKAERGGLSELDKAGFIKRQLVETRQITKHVAQILDSRMNTKYDENDKLIREVKVITLKSKLVSDFRKDFQFYKVREINNYHHAHDAYLNAVVGTALIKKYPKLESEFVYGDYKVYDVRKMIAKSEQEIGKATAKYFFYSNIMNFFKTEITLANGEIRKRPLIETNGETGEIVWDKGRDFATVRKVLSMPQVNIVKKTEVQTGGFSKESILPKRNSDKLIARKKDWDPKKYGGFDSPTVAYSVLVVAKVEKGKSKKLKSVKELLGITIMERSSFEKNPIDFLEAKGYKEVKKDLIIKLPKYSLFELENGRKRMLASAGELQKGNELALPSKYVNFLYLASHYEKLKGSPEDNEQKQLFVEQHKHYLDEIIEQISEFSKRVILADANLDKVLSAYNKHRDKPIREQAENIIHLFTLTNLGAPAAFKYFDTTIDRKRYTSTKEVLDATLIHQSITGLYETRIDLSQLGGDGGGSSPAPEAAAKGGVLNLEEEYRLHEKPVPSSIDPSWLQLFPTVWAERAGMGLANQVPPVVVELRSGASPVAVRQYPMSKEAREGIRPHIQRFLDLGVLVPCQSPWNTPLLPVKKPGTNDYRPVQDLREINKRVQDIHPTVPNPYNLLSSLPPSHTWYSVLDLKDAFFCLKLHPNSQPLFAFEWRDPEKGNTGQLTWTRLPQGFKNSPTLFNEALHRDLAPFRALNPQVVLLQYVDDLLVAAPTYRDCKEGTQKLLQELSKLGYRVSAKKAQLCQKEVTYLGYLLKEGKRWLTPARKATVMKIPPPTTPRQVREFLGTAGFCRLWIPGFASLAAPLYPLTKPSIPFIWTEEHQKAFDRIKEALLSAPALALPDLTKPFTLYVDERAGVARGVLTQTLGPWRRPVAYLSKKLDPVASGWPTCLKAVAAVALLLKDADKLTLGQNVTVIASHSLESIVRQPPDRWMTNARMTHYQSLLLNERVSFAPPAVLNPATLLPVESEATPVHRCSEILAEETGTRRDLKDQPLPGVPAWYTDGSSFIAEGKRRAGAAIVDGKRTVWASSLPEGTSAQKAELVALTQALRLAEGKDINIYTDSRYAFATAHIHGAIYKQRGWLTSAGKDIKNKEEILALLEAIHLPKRVAIIHCPGHQKGNDPVATGNRRADEAAKQAALSTRVLAETTKPAGKRTADGSEFEKRTADGSEFESPKKKAKVE

SEQ ID NO: 840 - protein, 2092 aa, synthetic construct
MPAAKRVKLDGGDKKYSIGLDIGTNSVGWAVITDEYKVPSKKFKVLGNTDRHSIKKNLIGALLFDSGETAEATRLKRTARRRYTRRKNRICYLQEIFSNEMAKVDDSFFHRLEESFLVEEDKKHERHPIFGNIVDEVAYHEKYPTIYHLRKKLVDSTDKADLRLIYLALAHMIKFRGHFLIEGDLNPDNSDVDKLFIQLVQTYNQLFEENPINASGVDAKAILSARLSKSRRLENLIAQLPGEKKNGLFGNLIALSLGLTPNFKSNFDLAEDAKLQLSKDTYDDDLDNLLAQIGDQYADLFLAAKNLSDAILLSDILRVNTEITKAPLSASMIKRYDEHHQDLTLLKALVRQQLPEKYKEIFFDQSKNGYAGYIDGGASQEEFYKFIKPILEKMDGTEELLVKLNREDLLRKQRTFDNGSIPHQIHLGELHAILRRQEDFYPFLKDNREKIEKILTFRIPYYVGPLARGNSRFAWMTRKSEETITPWNFEEVVDKGASAQSFIERMTNFDKNLPNEKVLPKHSLLYEYFTVYNELTKVKYVTEGMRKPAFLSGEQKKAIVDLLFKTNRKVTVKQLKEDYFKKIECFDSVEISGVEDRFNASLGTYHDLLKIIKDKDFLDNEENEDILEDIVLTLTLFEDREMIEERLKTYAHLFDDKVMKQLKRRRYTGWGRLSRKLINGIRDKQSGKTILDFLKSDGFANRNFMQLIHDDSLTFKEDIQKAQVSGQGDSLHEHIANLAGSPAIKKGILQTVKVVDELVKVMGRHKPENIVIEMARENQTTQKGQKNSRERMKRIEEGIKELGSQILKEHPVENTQLQNEKLYLYYLQNGRDMYVDQELDINRLSDYDVDHIVPQSFLKDDSIDNKVLTRSDKARGKSDNVPSEEVVKKMKNYWRQLLNAKLITQRKFDNLTKAERGGLSELDKAGFIKRQLVETRQITKHVAQILDSRMNTKYDENDKLIREVKVITLKSKLVSDFRKDFQFYKVREINNYHHAHDAYLNAVVGTALIKKYPKLESEFVYGDYKVYDVRKMIAKSEQEIGKATAKYFFYSNIMNFFKTEITLANGEIRKRPLIETNGETGEIVWDKGRDFATVRKVLSMPQVNIVKKTEVQTGGFSKESILPKRNSDKLIARKKDWDPKKYGGFDSPTVAYSVLVVAKVEKGKSKKLKSVKELLGITIMERSSFEKNPIDFLEAKGYKEVKKDLIIKLPKYSLFELENGRKRMLASAGELQKGNELALPSKYVNFLYLASHYEKLKGSPEDNEQKQLFVEQHKHYLDEIIEQISEFSKRVILADANLDKVLSAYNKHRDKPIREQAENIIHLFTLTNLGAPAAFKYFDTTIDRKRYTSTKEVLDATLIHQSITGLYETRIDLSQLGGDGGGSSPAPGGSGGVLNLEEEYRLHEKPVPSSIDPSWLQLFPTVWAERAGMGLANQVPPVVVELRSGASPVAVRQYPMSKEAREGIRPHIQRFLDLGVLVPCQSPWNTPLLPVKKPGTNDYRPVQDLREINKRVQDIHPTVPNPYNLLSSLPPSHTWYSVLDLKDAFFCLKLHPNSQPLFAFEWRDPEKGNTGQLTWTRLPQGFKNSPTLFNEALHRDLAPFRALNPQVVLLQYVDDLLVAAPTYRDCKEGTQKLLQELSKLGYRVSAKKAQLCQKEVTYLGYLLKEGKRWLTPARKATVMKIPPPTTPRQVREFLGTAGFCRLWIPGFASLAAPLYPLTKPSIPFIWTEEHQKAFDRIKEALLSAPALALPDLTKPFTLYVDERAGVARGVLTQTLGPWRRPVAYLSKKLDPVASGWPTCLKAVAAVALLLKDADKLTLGQNVTVIASHSLESIVRQPPDRWMTNARMTHYQSLLLNERVSFAPPAVLNPATLLPVESEATPVHRCSEILAEETGTRRDLKDQPLPGVPAWYTDGSSFIAEGKRRAGAAIVDGKRTVWASSLPEGTSAQKAELVALTQALRLAEGKDINIYTDSRYAFATAHIHGAIYKQRGWLTSAGKDIKNKEEILALLEAIHLPKRVAIIHCPGHQKGNDPVATGNRRADEAAKQAALSTRVLAETTKPAGKRTADGSEFEKRTADGSEFESPKKKAKVE

SEQ ID NO: 841 - protein, 2094 aa, synthetic construct
MPAAKRVKLDGGDKKYSIGLDIGTNSVGWAVITDEYKVPSKKFKVLGNTDRHSIKKNLIGALLFDSGETAEATRLKRTARRRYTRRKNRICYLQEIFSNEMAKVDDSFFHRLEESFLVEEDKKHERHPIFGNIVDEVAYHEKYPTIYHLRKKLVDSTDKADLRLIYLALAHMIKFRGHFLIEGDLNPDNSDVDKLFIQLVQTYNQLFEENPINASGVDAKAILSARLSKSRRLENLIAQLPGEKKNGLFGNLIALSLGLTPNFKSNFDLAEDAKLQLSKDTYDDDLDNLLAQIGDQYADLFLAAKNLSDAILLSDILRVNTEITKAPLSASMIKRYDEHHQDLTLLKALVRQQLPEKYKEIFFDQSKNGYAGYIDGGASQEEFYKFIKPILEKMDGTEELLVKLNREDLLRKQRTFDNGSIPHQIHLGELHAILRRQEDFYPFLKDNREKIEKILTFRIPYYVGPLARGNSRFAWMTRKSEETITPWNFEEVVDKGASAQSFIERMTNFDKNLPNEKVLPKHSLLYEYFTVYNELTKVKYVTEGMRKPAFLSGEQKKAIVDLLFKTNRKVTVKQLKEDYFKKIECFDSVEISGVEDRFNASLGTYHDLLKIIKDKDFLDNEENEDILEDIVLTLTLFEDREMIEERLKTYAHLFDDKVMKQLKRRRYTGWGRLSRKLINGIRDKQSGKTILDFLKSDGFANRNFMQLIHDDSLTFKEDIQKAQVSGQGDSLHEHIANLAGSPAIKKGILQTVKVVDELVKVMGRHKPENIVIEMARENQTTQKGQKNSRERMKRIEEGIKELGSQILKEHPVENTQLQNEKLYLYYLQNGRDMYVDQELDINRLSDYDVDHIVPQSFLKDDSIDNKVLTRSDKARGKSDNVPSEEVVKKMKNYWRQLLNAKLITQRKFDNLTKAERGGLSELDKAGFIKRQLVETRQITKHVAQILDSRMNTKYDENDKLIREVKVITLKSKLVSDFRKDFQFYKVREINNYHHAHDAYLNAVVGTALIKKYPKLESEFVYGDYKVYDVRKMIAKSEQEIGKATAKYFFYSNIMNFFKTEITLANGEIRKRPLIETNGETGEIVWDKGRDFATVRKVLSMPQVNIVKKTEVQTGGFSKESILPKRNSDKLIARKKDWDPKKYGGFDSPTVAYSVLVVAKVEKGKSKKLKSVKELLGITIMERSSFEKNPIDFLEAKGYKEVKKDLIIKLPKYSLFELENGRKRMLASAGELQKGNELALPSKYVNFLYLASHYEKLKGSPEDNEQKQLFVEQHKHYLDEIIEQISEFSKRVILADANLDKVLSAYNKHRDKPIREQAENIIHLFTLTNLGAPAAFKYFDTTIDRKRYTSTKEVLDATLIHQSITGLYETRIDLSQLGGDGGGGGEAAAKGGSGGVLNLEEEYRLHEKPVPSSIDPSWLQLFPTVWAERAGMGLANQVPPVVVELRSGASPVAVRQYPMSKEAREGIRPHIQRFLDLGVLVPCQSPWNTPLLPVKKPGTNDYRPVQDLREINKRVQDIHPTVPNPYNLLSSLPPSHTWYSVLDLKDAFFCLKLHPNSQPLFAFEWRDPEKGNTGQLTWTRLPQGFKNSPTLFNEALHRDLAPFRALNPQVVLLQYVDDLLVAAPTYRDCKEGTQKLLQELSKLGYRVSAKKAQLCQKEVTYLGYLLKEGKRWLTPARKATVMKIPPPTTPRQVREFLGTAGFCRLWIPGFASLAAPLYPLTKPSIPFIWTEEHQKAFDRIKEALLSAPALALPDLTKPFTLYVDERAGVARGVLTQTLGPWRRPVAYLSKKLDPVASGWPTCLKAVAAVALLLKDADKLTLGQNVTVIASHSLESIVRQPPDRWMTNARMTHYQSLLLNERVSFAPPAVLNPATLLPVESEATPVHRCSEILAEETGTRRDLKDQPLPGVPAWYTDGSSFIAEGKRRAGAAIVDGKRTVWASSLPEGTSAQKAELVALTQALRLAEGKDINIYTDSRYAFATAHIHGAIYKQRGWLTSAGKDIKNKEEILALLEAIHLPKRVAIIHCPGHQKGNDPVATGNRRADEAAKQAALSTRVLAETTKPAGKRTADGSEFEKRTADGSEFESPKKKAKVE

SEQ ID NO: 842 - protein, 2091 aa, synthetic construct
MPAAKRVKLDGGDKKYSIGLDIGTNSVGWAVITDEYKVPSKKFKVLGNTDRHSIKKNLIGALLFDSGETAEATRLKRTARRRYTRRKNRICYLQEIFSNEMAKVDDSFFHRLEESFLVEEDKKHERHPIFGNIVDEVAYHEKYPTIYHLRKKLVDSTDKADLRLIYLALAHMIKFRGHFLIEGDLNPDNSDVDKLFIQLVQTYNQLFEENPINASGVDAKAILSARLSKSRRLENLIAQLPGEKKNGLFGNLIALSLGLTPNFKSNFDLAEDAKLQLSKDTYDDDLDNLLAQIGDQYADLFLAAKNLSDAILLSDILRVNTEITKAPLSASMIKRYDEHHQDLTLLKALVRQQLPEKYKEIFFDQSKNGYAGYIDGGASQEEFYKFIKPILEKMDGTEELLVKLNREDLLRKQRTFDNGSIPHQIHLGELHAILRRQEDFYPFLKDNREKIEKILTFRIPYYVGPLARGNSRFAWMTRKSEETITPWNFEEVVDKGASAQSFIERMTNFDKNLPNEKVLPKHSLLYEYFTVYNELTKVKYVTEGMRKPAFLSGEQKKAIVDLLFKTNRKVTVKQLKEDYFKKIECFDSVEISGVEDRFNASLGTYHDLLKIIKDKDFLDNEENEDILEDIVLTLTLFEDREMIEERLKTYAHLFDDKVMKQLKRRRYTGWGRLSRKLINGIRDKQSGKTILDFLKSDGFANRNFMQLIHDDSLTFKEDIQKAQVSGQGDSLHEHIANLAGSPAIKKGILQTVKVVDELVKVMGRHKPENIVIEMARENQTTQKGQKNSRERMKRIEEGIKELGSQILKEHPVENTQLQNEKLYLYYLQNGRDMYVDQELDINRLSDYDVDHIVPQSFLKDDSIDNKVLTRSDKARGKSDNVPSEEVVKKMKNYWRQLLNAKLITQRKFDNLTKAERGGLSELDKAGFIKRQLVETRQITKHVAQILDSRMNTKYDENDKLIREVKVITLKSKLVSDFRKDFQFYKVREINNYHHAHDAYLNAVVGTALIKKYPKLESEFVYGDYKVYDVRKMIAKSEQEIGKATAKYFFYSNIMNFFKTEITLANGEIRKRPLIETNGETGEIVWDKGRDFATVRKVLSMPQVNIVKKTEVQTGGFSKESILPKRNSDKLIARKKDWDPKKYGGFDSPTVAYSVLVVAKVEKGKSKKLKSVKELLGITIMERSSFEKNPIDFLEAKGYKEVKKDLIIKLPKYSLFELENGRKRMLASAGELQKGNELALPSKYVNFLYLASHYEKLKGSPEDNEQKQLFVEQHKHYLDEIIEQISEFSKRVILADANLDKVLSAYNKHRDKPIREQAENIIHLFTLTNLGAPAAFKYFDTTIDRKRYTSTKEVLDATLIHQSITGLYETRIDLSQLGGDGGGGGGGGGGGGVLNLEEEYRLHEKPVPSSIDPSWLQLFPTVWAERAGMGLANQVPPVVVELRSGASPVAVRQYPMSKEAREGIRPHIQRFLDLGVLVPCQSPWNTPLLPVKKPGTNDYRPVQDLREINKRVQDIHPTVPNPYNLLSSLPPSHTWYSVLDLKDAFFCLKLHPNSQPLFAFEWRDPEKGNTGQLTWTRLPQGFKNSPTLFNEALHRDLAPFRALNPQVVLLQYVDDLLVAAPTYRDCKEGTQKLLQELSKLGYRVSAKKAQLCQKEVTYLGYLLKEGKRWLTPARKATVMKIPPPTTPRQVREFLGTAGFCRLWIPGFASLAAPLYPLTKPSIPFIWTEEHQKAFDRIKEALLSAPALALPDLTKPFTLYVDERAGVARGVLTQTLGPWRRPVAYLSKKLDPVASGWPTCLKAVAAVALLLKDADKLTLGQNVTVIASHSLESIVRQPPDRWMTNARMTHYQSLLLNERVSFAPPAVLNPATLLPVESEATPVHRCSEILAEETGTRRDLKDQPLPGVPAWYTDGSSFIAEGKRRAGAAIVDGKRTVWASSLPEGTSAQKAELVALTQALRLAEGKDINIYTDSRYAFATAHIHGAIYKQRGWLTSAGKDIKNKEEILALLEAIHLPKRVAIIHCPGHQKGNDPVATGNRRADEAAKQAALSTRVLAETTKPAGKRTADGSEFEKRTADGSEFESPKKKAKVE

SEQ ID NO: 843 - protein, 2103 aa, synthetic construct
MPAAKRVKLDGGDKKYSIGLDIGTNSVGWAVITDEYKVPSKKFKVLGNTDRHSIKKNLIGALLFDSGETAEATRLKRTARRRYTRRKNRICYLQEIFSNEMAKVDDSFFHRLEESFLVEEDKKHERHPIFGNIVDEVAYHEKYPTIYHLRKKLVDSTDKADLRLIYLALAHMIKFRGHFLIEGDLNPDNSDVDKLFIQLVQTYNQLFEENPINASGVDAKAILSARLSKSRRLENLIAQLPGEKKNGLFGNLIALSLGLTPNFKSNFDLAEDAKLQLSKDTYDDDLDNLLAQIGDQYADLFLAAKNLSDAILLSDILRVNTEITKAPLSASMIKRYDEHHQDLTLLKALVRQQLPEKYKEIFFDQSKNGYAGYIDGGASQEEFYKFIKPILEKMDGTEELLVKLNREDLLRKQRTFDNGSIPHQIHLGELHAILRRQEDFYPFLKDNREKIEKILTFRIPYYVGPLARGNSRFAWMTRKSEETITPWNFEEVVDKGASAQSFIERMTNFDKNLPNEKVLPKHSLLYEYFTVYNELTKVKYVTEGMRKPAFLSGEQKKAIVDLLFKTNRKVTVKQLKEDYFKKIECFDSVEISGVEDRFNASLGTYHDLLKIIKDKDFLDNEENEDILEDIVLTLTLFEDREMIEERLKTYAHLFDDKVMKQLKRRRYTGWGRLSRKLINGIRDKQSGKTILDFLKSDGFANRNFMQLIHDDSLTFKEDIQKAQVSGQGDSLHEHIANLAGSPAIKKGILQTVKVVDELVKVMGRHKPENIVIEMARENQTTQKGQKNSRERMKRIEEGIKELGSQILKEHPVENTQLQNEKLYLYYLQNGRDMYVDQELDINRLSDYDVDHIVPQSFLKDDSIDNKVLTRSDKARGKSDNVPSEEVVKKMKNYWRQLLNAKLITQRKFDNLTKAERGGLSELDKAGFIKRQLVETRQITKHVAQILDSRMNTKYDENDKLIREVKVITLKSKLVSDFRKDFQFYKVREINNYHHAHDAYLNAVVGTALIKKYPKLESEFVYGDYKVYDVRKMIAKSEQEIGKATAKYFFYSNIMNFFKTEITLANGEIRKRPLIETNGETGEIVWDKGRDFATVRKVLSMPQVNIVKKTEVQTGGFSKESILPKRNSDKLIARKKDWDPKKYGGFDSPTVAYSVLVVAKVEKGKSKKLKSVKELLGITIMERSSFEKNPIDFLEAKGYKEVKKDLIIKLPKYSLFELENGRKRMLASAGELQKGNELALPSKYVNFLYLASHYEKLKGSPEDNEQKQLFVEQHKHYLDEIIEQISEFSKRVILADANLDKVLSAYNKHRDKPIREQAENIIHLFTLTNLGAPAAFKYFDTTIDRKRYTSTKEVLDATLIHQSITGLYETRIDLSQLGGDGGGGGGSGGGGSGGGGSGGGGSGGVLNLEEEYRLHEKPVPSSIDPSWLQLFPTVWAERAGMGLANQVPPVVVELRSGASPVAVRQYPMSKEAREGIRPHIQRFLDLGVLVPCQSPWNTPLLPVKKPGTNDYRPVQDLREINKRVQDIHPTVPNPYNLLSSLPPSHTWYSVLDLKDAFFCLKLHPNSQPLFAFEWRDPEKGNTGQLTWTRLPQGFKNSPTLFNEALHRDLAPFRALNPQVVLLQYVDDLLVAAPTYRDCKEGTQKLLQELSKLGYRVSAKKAQLCQKEVTYLGYLLKEGKRWLTPARKATVMKIPPPTTPRQVREFLGTAGFCRLWIPGFASLAAPLYPLTKPSIPFIWTEEHQKAFDRIKEALLSAPALALPDLTKPFTLYVDERAGVARGVLTQTLGPWRRPVAYLSKKLDPVASGWPTCLKAVAAVALLLKDADKLTLGQNVTVIASHSLESIVRQPPDRWMTNARMTHYQSLLLNERVSFAPPAVLNPATLLPVESEATPVHRCSEILAEETGTRRDLKDQPLPGVPAWYTDGSSFIAEGKRRAGAAIVDGKRTVWASSLPEGTSAQKAELVALTQALRLAEGKDINIYTDSRYAFATAHIHGAIYKQRGWLTSAGKDIKNKEEILALLEAIHLPKRVAIIHCPGHQKGNDPVATGNRRADEAAKQAALSTRVLAETTKPAGKRTADGSEFEKRTADGSEFESPKKKAKVE

SEQ ID NO: 844 - protein, 2094 aa, synthetic construct
MPAAKRVKLDGGDKKYSIGLDIGTNSVGWAVITDEYKVPSKKFKVLGNTDRHSIKKNLIGALLFDSGETAEATRLKRTARRRYTRRKNRICYLQEIFSNEMAKVDDSFFHRLEESFLVEEDKKHERHPIFGNIVDEVAYHEKYPTIYHLRKKLVDSTDKADLRLIYLALAHMIKFRGHFLIEGDLNPDNSDVDKLFIQLVQTYNQLFEENPINASGVDAKAILSARLSKSRRLENLIAQLPGEKKNGLFGNLIALSLGLTPNFKSNFDLAEDAKLQLSKDTYDDDLDNLLAQIGDQYADLFLAAKNLSDAILLSDILRVNTEITKAPLSASMIKRYDEHHQDLTLLKALVRQQLPEKYKEIFFDQSKNGYAGYIDGGASQEEFYKFIKPILEKMDGTEELLVKLNREDLLRKQRTFDNGSIPHQIHLGELHAILRRQEDFYPFLKDNREKIEKILTFRIPYYVGPLARGNSRFAWMTRKSEETITPWNFEEVVDKGASAQSFIERMTNFDKNLPNEKVLPKHSLLYEYFTVYNELTKVKYVTEGMRKPAFLSGEQKKAIVDLLFKTNRKVTVKQLKEDYFKKIECFDSVEISGVEDRFNASLGTYHDLLKIIKDKDFLDNEENEDILEDIVLTLTLFEDREMIEERLKTYAHLFDDKVMKQLKRRRYTGWGRLSRKLINGIRDKQSGKTILDFLKSDGFANRNFMQLIHDDSLTFKEDIQKAQVSGQGDSLHEHIANLAGSPAIKKGILQTVKVVDELVKVMGRHKPENIVIEMARENQTTQKGQKNSRERMKRIEEGIKELGSQILKEHPVENTQLQNEKLYLYYLQNGRDMYVDQELDINRLSDYDVDHIVPQSFLKDDSIDNKVLTRSDKARGKSDNVPSEEVVKKMKNYWRQLLNAKLITQRKFDNLTKAERGGLSELDKAGFIKRQLVETRQITKHVAQILDSRMNTKYDENDKLIREVKVITLKSKLVSDFRKDFQFYKVREINNYHHAHDAYLNAVVGTALIKKYPKLESEFVYGDYKVYDVRKMIAKSEQEIGKATAKYFFYSNIMNFFKTEITLANGEIRKRPLIETNGETGEIVWDKGRDFATVRKVLSMPQVNIVKKTEVQTGGFSKESILPKRNSDKLIARKKDWDPKKYGGFDSPTVAYSVLVVAKVEKGKSKKLKSVKELLGITIMERSSFEKNPIDFLEAKGYKEVKKDLIIKLPKYSLFELENGRKRMLASAGELQKGNELALPSKYVNFLYLASHYEKLKGSPEDNEQKQLFVEQHKHYLDEIIEQISEFSKRVILADANLDKVLSAYNKHRDKPIREQAENIIHLFTLTNLGAPAAFKYFDTTIDRKRYTSTKEVLDATLIHQSITGLYETRIDLSQLGGDGGGGSEAAAKPAPGGVLNLEEEYRLHEKPVPSSIDPSWLQLFPTVWAERAGMGLANQVPPVVVELRSGASPVAVRQYPMSKEAREGIRPHIQRFLDLGVLVPCQSPWNTPLLPVKKPGTNDYRPVQDLREINKRVQDIHPTVPNPYNLLSSLPPSHTWYSVLDLKDAFFCLKLHPNSQPLFAFEWRDPEKGNTGQLTWTRLPQGFKNSPTLFNEALHRDLAPFRALNPQVVLLQYVDDLLVAAPTYRDCKEGTQKLLQELSKLGYRVSAKKAQLCQKEVTYLGYLLKEGKRWLTPARKATVMKIPPPTTPRQVREFLGTAGFCRLWIPGFASLAAPLYPLTKPSIPFIWTEEHQKAFDRIKEALLSAPALALPDLTKPFTLYVDERAGVARGVLTQTLGPWRRPVAYLSKKLDPVASGWPTCLKAVAAVALLLKDADKLTLGQNVTVIASHSLESIVRQPPDRWMTNARMTHYQSLLLNERVSFAPPAVLNPATLLPVESEATPVHRCSEILAEETGTRRDLKDQPLPGVPAWYTDGSSFIAEGKRRAGAAIVDGKRTVWASSLPEGTSAQKAELVALTQALRLAEGKDINIYTDSRYAFATAHIHGAIYKQRGWLTSAGKDIKNKEEILALLEAIHLPKRVAIIHCPGHQKGNDPVATGNRRADEAAKQAALSTRVLAETTKPAGKRTADGSEFEKRTADGSEFESPKKKAKVE

SEQ ID NO: 845 - protein, 2092 aa, synthetic construct
MPAAKRVKLDGGDKKYSIGLDIGTNSVGWAVITDEYKVPSKKFKVLGNTDRHSIKKNLIGALLFDSGETAEATRLKRTARRRYTRRKNRICYLQEIFSNEMAKVDDSFFHRLEESFLVEEDKKHERHPIFGNIVDEVAYHEKYPTIYHLRKKLVDSTDKADLRLIYLALAHMIKFRGHFLIEGDLNPDNSDVDKLFIQLVQTYNQLFEENPINASGVDAKAILSARLSKSRRLENLIAQLPGEKKNGLFGNLIALSLGLTPNFKSNFDLAEDAKLQLSKDTYDDDLDNLLAQIGDQYADLFLAAKNLSDAILLSDILRVNTEITKAPLSASMIKRYDEHHQDLTLLKALVRQQLPEKYKEIFFDQSKNGYAGYIDGGASQEEFYKFIKPILEKMDGTEELLVKLNREDLLRKQRTFDNGSIPHQIHLGELHAILRRQEDFYPFLKDNREKIEKILTFRIPYYVGPLARGNSRFAWMTRKSEETITPWNFEEVVDKGASAQSFIERMTNFDKNLPNEKVLPKHSLLYEYFTVYNELTKVKYVTEGMRKPAFLSGEQKKAIVDLLFKTNRKVTVKQLKEDYFKKIECFDSVEISGVEDRFNASLGTYHDLLKIIKDKDFLDNEENEDILEDIVLTLTLFEDREMIEERLKTYAHLFDDKVMKQLKRRRYTGWGRLSRKLINGIRDKQSGKTILDFLKSDGFANRNFMQLIHDDSLTFKEDIQKAQVSGQGDSLHEHIANLAGSPAIKKGILQTVKVVDELVKVMGRHKPENIVIEMARENQTTQKGQKNSRERMKRIEEGIKELGSQILKEHPVENTQLQNEKLYLYYLQNGRDMYVDQELDINRLSDYDVDHIVPQSFLKDDSIDNKVLTRSDKARGKSDNVPSEEVVKKMKNYWRQLLNAKLITQRKFDNLTKAERGGLSELDKAGFIKRQLVETRQITKHVAQILDSRMNTKYDENDKLIREVKVITLKSKLVSDFRKDFQFYKVREINNYHHAHDAYLNAVVGTALIKKYPKLESEFVYGDYKVYDVRKMIAKSEQEIGKATAKYFFYSNIMNFFKTEITLANGEIRKRPLIETNGETGEIVWDKGRDFATVRKVLSMPQVNIVKKTEVQTGGFSKESILPKRNSDKLIARKKDWDPKKYGGFDSPTVAYSVLVVAKVEKGKSKKLKSVKELLGITIMERSSFEKNPIDFLEAKGYKEVKKDLIIKLPKYSLFELENGRKRMLASAGELQKGNELALPSKYVNFLYLASHYEKLKGSPEDNEQKQLFVEQHKHYLDEIIEQISEFSKRVILADANLDKVLSAYNKHRDKPIREQAENIIHLFTLTNLGAPAAFKYFDTTIDRKRYTSTKEVLDATLIHQSITGLYETRIDLSQLGGDGGGSSPAPGGGGGVLNLEEEYRLHEKPVPSSIDPSWLQLFPTVWAERAGMGLANQVPPVVVELRSGASPVAVRQYPMSKEAREGIRPHIQRFLDLGVLVPCQSPWNTPLLPVKKPGTNDYRPVQDLREINKRVQDIHPTVPNPYNLLSSLPPSHTWYSVLDLKDAFFCLKLHPNSQPLFAFEWRDPEKGNTGQLTWTRLPQGFKNSPTLFNEALHRDLAPFRALNPQVVLLQYVDDLLVAAPTYRDCKEGTQKLLQELSKLGYRVSAKKAQLCQKEVTYLGYLLKEGKRWLTPARKATVMKIPPPTTPRQVREFLGTAGFCRLWIPGFASLAAPLYPLTKPSIPFIWTEEHQKAFDRIKEALLSAPALALPDLTKPFTLYVDERAGVARGVLTQTLGPWRRPVAYLSKKLDPVASGWPTCLKAVAAVALLLKDADKLTLGQNVTVIASHSLESIVRQPPDRWMTNARMTHYQSLLLNERVSFAPPAVLNPATLLPVESEATPVHRCSEILAEETGTRRDLKDQPLPGVPAWYTDGSSFIAEGKRRAGAAIVDGKRTVWASSLPEGTSAQKAELVALTQALRLAEGKDINIYTDSRYAFATAHIHGAIYKQRGWLTSAGKDIKNKEEILALLEAIHLPKRVAIIHCPGHQKGNDPVATGNRRADEAAKQAALSTRVLAETTKPAGKRTADGSEFEKRTADGSEFESPKKKAKVE

SEQ ID NO: 846 - protein, 2095 aa, synthetic construct
MPAAKRVKLDGGDKKYSIGLDIGTNSVGWAVITDEYKVPSKKFKVLGNTDRHSIKKNLIGALLFDSGETAEATRLKRTARRRYTRRKNRICYLQEIFSNEMAKVDDSFFHRLEESFLVEEDKKHERHPIFGNIVDEVAYHEKYPTIYHLRKKLVDSTDKADLRLIYLALAHMIKFRGHFLIEGDLNPDNSDVDKLFIQLVQTYNQLFEENPINASGVDAKAILSARLSKSRRLENLIAQLPGEKKNGLFGNLIALSLGLTPNFKSNFDLAEDAKLQLSKDTYDDDLDNLLAQIGDQYADLFLAAKNLSDAILLSDILRVNTEITKAPLSASMIKRYDEHHQDLTLLKALVRQQLPEKYKEIFFDQSKNGYAGYIDGGASQEEFYKFIKPILEKMDGTEELLVKLNREDLLRKQRTFDNGSIPHQIHLGELHAILRRQEDFYPFLKDNREKIEKILTFRIPYYVGPLARGNSRFAWMTRKSEETITPWNFEEVVDKGASAQSFIERMTNFDKNLPNEKVLPKHSLLYEYFTVYNELTKVKYVTEGMRKPAFLSGEQKKAIVDLLFKTNRKVTVKQLKEDYFKKIECFDSVEISGVEDRFNASLGTYHDLLKIIKDKDFLDNEENEDILEDIVLTLTLFEDREMIEERLKTYAHLFDDKVMKQLKRRRYTGWGRLSRKLINGIRDKQSGKTILDFLKSDGFANRNFMQLIHDDSLTFKEDIQKAQVSGQGDSLHEHIANLAGSPAIKKGILQTVKVVDELVKVMGRHKPENIVIEMARENQTTQKGQKNSRERMKRIEEGIKELGSQILKEHPVENTQLQNEKLYLYYLQNGRDMYVDQELDINRLSDYDVDHIVPQSFLKDDSIDNKVLTRSDKARGKSDNVPSEEVVKKMKNYWRQLLNAKLITQRKFDNLTKAERGGLSELDKAGFIKRQLVETRQITKHVAQILDSRMNTKYDENDKLIREVKVITLKSKLVSDFRKDFQFYKVREINNYHHAHDAYLNAVVGTALIKKYPKLESEFVYGDYKVYDVRKMIAKSEQEIGKATAKYFFYSNIMNFFKTEITLANGEIRKRPLIETNGETGEIVWDKGRDFATVRKVLSMPQVNIVKKTEVQTGGFSKESILPKRNSDKLIARKKDWDPKKYGGFDSPTVAYSVLVVAKVEKGKSKKLKSVKELLGITIMERSSFEKNPIDFLEAKGYKEVKKDLIIKLPKYSLFELENGRKRMLASAGELQKGNELALPSKYVNFLYLASHYEKLKGSPEDNEQKQLFVEQHKHYLDEIIEQISEFSKRVILADANLDKVLSAYNKHRDKPIREQAENIIHLFTLTNLGAPAAFKYFDTTIDRKRYTSTKEVLDATLIHQSITGLYETRIDLSQLGGDGGGSSGSSGSSGSSGGVLNLEEEYRLHEKPVPSSIDPSWLQLFPTVWAERAGMGLANQVPPVVVELRSGASPVAVRQYPMSKEAREGIRPHIQRFLDLGVLVPCQSPWNTPLLPVKKPGTNDYRPVQDLREINKRVQDIHPTVPNPYNLLSSLPPSHTWYSVLDLKDAFFCLKLHPNSQPLFAFEWRDPEKGNTGQLTWTRLPQGFKNSPTLFNEALHRDLAPFRALNPQVVLLQYVDDLLVAAPTYRDCKEGTQKLLQELSKLGYRVSAKKAQLCQKEVTYLGYLLKEGKRWLTPARKATVMKIPPPTTPRQVREFLGTAGFCRLWIPGFASLAAPLYPLTKPSIPFIWTEEHQKAFDRIKEALLSAPALALPDLTKPFTLYVDERAGVARGVLTQTLGPWRRPVAYLSKKLDPVASGWPTCLKAVAAVALLLKDADKLTLGQNVTVIASHSLESIVRQPPDRWMTNARMTHYQSLLLNERVSFAPPAVLNPATLLPVESEATPVHRCSEILAEETGTRRDLKDQPLPGVPAWYTDGSSFIAEGKRRAGAAIVDGKRTVWASSLPEGTSAQKAELVALTQALRLAEGKDINIYTDSRYAFATAHIHGAIYKQRGWLTSAGKDIKNKEEILALLEAIHLPKRVAIIHCPGHQKGNDPVATGNRRADEAAKQAALSTRVLAETTKPAGKRTADGSEFEKRTADGSEFESPKKKAKVE

SEQ ID NO: 847 - protein, 2094 aa, synthetic construct
MPAAKRVKLDGGDKKYSIGLDIGTNSVGWAVITDEYKVPSKKFKVLGNTDRHSIKKNLIGALLFDSGETAEATRLKRTARRRYTRRKNRICYLQEIFSNEMAKVDDSFFHRLEESFLVEEDKKHERHPIFGNIVDEVAYHEKYPTIYHLRKKLVDSTDKADLRLIYLALAHMIKFRGHFLIEGDLNPDNSDVDKLFIQLVQTYNQLFEENPINASGVDAKAILSARLSKSRRLENLIAQLPGEKKNGLFGNLIALSLGLTPNFKSNFDLAEDAKLQLSKDTYDDDLDNLLAQIGDQYADLFLAAKNLSDAILLSDILRVNTEITKAPLSASMIKRYDEHHQDLTLLKALVRQQLPEKYKEIFFDQSKNGYAGYIDGGASQEEFYKFIKPILEKMDGTEELLVKLNREDLLRKQRTFDNGSIPHQIHLGELHAILRRQEDFYPFLKDNREKIEKILTFRIPYYVGPLARGNSRFAWMTRKSEETITPWNFEEVVDKGASAQSFIERMTNFDKNLPNEKVLPKHSLLYEYFTVYNELTKVKYVTEGMRKPAFLSGEQKKAIVDLLFKTNRKVTVKQLKEDYFKKIECFDSVEISGVEDRFNASLGTYHDLLKIIKDKDFLDNEENEDILEDIVLTLTLFEDREMIEERLKTYAHLFDDKVMKQLKRRRYTGWGRLSRKLINGIRDKQSGKTILDFLKSDGFANRNFMQLIHDDSLTFKEDIQKAQVSGQGDSLHEHIANLAGSPAIKKGILQTVKVVDELVKVMGRHKPENIVIEMARENQTTQKGQKNSRERMKRIEEGIKELGSQILKEHPVENTQLQNEKLYLYYLQNGRDMYVDQELDINRLSDYDVDHIVPQSFLKDDSIDNKVLTRSDKARGKSDNVPSEEVVKKMKNYWRQLLNAKLITQRKFDNLTKAERGGLSELDKAGFIKRQLVETRQITKHVAQILDSRMNTKYDENDKLIREVKVITLKSKLVSDFRKDFQFYKVREINNYHHAHDAYLNAVVGTALIKKYPKLESEFVYGDYKVYDVRKMIAKSEQEIGKATAKYFFYSNIMNFFKTEITLANGEIRKRPLIETNGETGEIVWDKGRDFATVRKVLSMPQVNIVKKTEVQTGGFSKESILPKRNSDKLIARKKDWDPKKYGGFDSPTVAYSVLVVAKVEKGKSKKLKSVKELLGITIMERSSFEKNPIDFLEAKGYKEVKKDLIIKLPKYSLFELENGRKRMLASAGELQKGNELALPSKYVNFLYLASHYEKLKGSPEDNEQKQLFVEQHKHYLDEIIEQISEFSKRVILADANLDKVLSAYNKHRDKPIREQAENIIHLFTLTNLGAPAAFKYFDTTIDRKRYTSTKEVLDATLIHQSITGLYETRIDLSQLGGDGGPAPGGSEAAAKGGVLNLEEEYRLHEKPVPSSIDPSWLQLFPTVWAERAGMGLANQVPPVVVELRSGASPVAVRQYPMSKEAREGIRPHIQRFLDLGVLVPCQSPWNTPLLPVKKPGTNDYRPVQDLREINKRVQDIHPTVPNPYNLLSSLPPSHTWYSVLDLKDAFFCLKLHPNSQPLFAFEWRDPEKGNTGQLTWTRLPQGFKNSPTLFNEALHRDLAPFRALNPQVVLLQYVDDLLVAAPTYRDCKEGTQKLLQELSKLGYRVSAKKAQLCQKEVTYLGYLLKEGKRWLTPARKATVMKIPPPTTPRQVREFLGTAGFCRLWIPGFASLAAPLYPLTKPSIPFIWTEEHQKAFDRIKEALLSAPALALPDLTKPFTLYVDERAGVARGVLTQTLGPWRRPVAYLSKKLDPVASGWPTCLKAVAAVALLLKDADKLTLGQNVTVIASHSLESIVRQPPDRWMTNARMTHYQSLLLNERVSFAPPAVLNPATLLPVESEATPVHRCSEILAEETGTRRDLKDQPLPGVPAWYTDGSSFIAEGKRRAGAAIVDGKRTVWASSLPEGTSAQKAELVALTQALRLAEGKDINIYTDSRYAFATAHIHGAIYKQRGWLTSAGKDIKNKEEILALLEAIHLPKRVAIIHCPGHQKGNDPVATGNRRADEAAKQAALSTRVLAETTKPAGKRTADGSEFEKRTADGSEFESPKKKAKVE

SEQ ID NO: 848 - protein, 2088 aa, synthetic construct
MPAAKRVKLDGGDKKYSIGLDIGTNSVGWAVITDEYKVPSKKFKVLGNTDRHSIKKNLIGALLFDSGETAEATRLKRTARRRYTRRKNRICYLQEIFSNEMAKVDDSFFHRLEESFLVEEDKKHERHPIFGNIVDEVAYHEKYPTIYHLRKKLVDSTDKADLRLIYLALAHMIKFRGHFLIEGDLNPDNSDVDKLFIQLVQTYNQLFEENPINASGVDAKAILSARLSKSRRLENLIAQLPGEKKNGLFGNLIALSLGLTPNFKSNFDLAEDAKLQLSKDTYDDDLDNLLAQIGDQYADLFLAAKNLSDAILLSDILRVNTEITKAPLSASMIKRYDEHHQDLTLLKALVRQQLPEKYKEIFFDQSKNGYAGYIDGGASQEEFYKFIKPILEKMDGTEELLVKLNREDLLRKQRTFDNGSIPHQIHLGELHAILRRQEDFYPFLKDNREKIEKILTFRIPYYVGPLARGNSRFAWMTRKSEETITPWNFEEVVDKGASAQSFIERMTNFDKNLPNEKVLPKHSLLYEYFTVYNELTKVKYVTEGMRKPAFLSGEQKKAIVDLLFKTNRKVTVKQLKEDYFKKIECFDSVEISGVEDRFNASLGTYHDLLKIIKDKDFLDNEENEDILEDIVLTLTLFEDREMIEERLKTYAHLFDDKVMKQLKRRRYTGWGRLSRKLINGIRDKQSGKTILDFLKSDGFANRNFMQLIHDDSLTFKEDIQKAQVSGQGDSLHEHIANLAGSPAIKKGILQTVKVVDELVKVMGRHKPENIVIEMARENQTTQKGQKNSRERMKRIEEGIKELGSQILKEHPVENTQLQNEKLYLYYLQNGRDMYVDQELDINRLSDYDVDHIVPQSFLKDDSIDNKVLTRSDKARGKSDNVPSEEVVKKMKNYWRQLLNAKLITQRKFDNLTKAERGGLSELDKAGFIKRQLVETRQITKHVAQILDSRMNTKYDENDKLIREVKVITLKSKLVSDFRKDFQFYKVREINNYHHAHDAYLNAVVGTALIKKYPKLESEFVYGDYKVYDVRKMIAKSEQEIGKATAKYFFYSNIMNFFKTEITLANGEIRKRPLIETNGETGEIVWDKGRDFATVRKVLSMPQVNIVKKTEVQTGGFSKESILPKRNSDKLIARKKDWDPKKYGGFDSPTVAYSVLVVAKVEKGKSKKLKSVKELLGITIMERSSFEKNPIDFLEAKGYKEVKKDLIIKLPKYSLFELENGRKRMLASAGELQKGNELALPSKYVNFLYLASHYEKLKGSPEDNEQKQLFVEQHKHYLDEIIEQISEFSKRVILADANLDKVLSAYNKHRDKPIREQAENIIHLFTLTNLGAPAAFKYFDTTIDRKRYTSTKEVLDATLIHQSITGLYETRIDLSQLGGDGGPAPAPGGVLNLEEEYRLHEKPVPSSIDPSWLQLFPTVWAERAGMGLANQVPPVVVELRSGASPVAVRQYPMSKEAREGIRPHIQRFLDLGVLVPCQSPWNTPLLPVKKPGTNDYRPVQDLREINKRVQDIHPTVPNPYNLLSSLPPSHTWYSVLDLKDAFFCLKLHPNSQPLFAFEWRDPEKGNTGQLTWTRLPQGFKNSPTLFNEALHRDLAPFRALNPQVVLLQYVDDLLVAAPTYRDCKEGTQKLLQELSKLGYRVSAKKAQLCQKEVTYLGYLLKEGKRWLTPARKATVMKIPPPTTPRQVREFLGTAGFCRLWIPGFASLAAPLYPLTKPSIPFIWTEEHQKAFDRIKEALLSAPALALPDLTKPFTLYVDERAGVARGVLTQTLGPWRRPVAYLSKKLDPVASGWPTCLKAVAAVALLLKDADKLTLGQNVTVIASHSLESIVRQPPDRWMTNARMTHYQSLLLNERVSFAPPAVLNPATLLPVESEATPVHRCSEILAEETGTRRDLKDQPLPGVPAWYTDGSSFIAEGKRRAGAAIVDGKRTVWASSLPEGTSAQKAELVALTQALRLAEGKDINIYTDSRYAFATAHIHGAIYKQRGWLTSAGKDIKNKEEILALLEAIHLPKRVAIIHCPGHQKGNDPVATGNRRADEAAKQAALSTRVLAETTKPAGKRTADGSEFEKRTADGSEFESPKKKAKVE

SEQ ID NO: 849 - protein, 2092 aa, synthetic construct
MPAAKRVKLDGGDKKYSIGLDIGTNSVGWAVITDEYKVPSKKFKVLGNTDRHSIKKNLIGALLFDSGETAEATRLKRTARRRYTRRKNRICYLQEIFSNEMAKVDDSFFHRLEESFLVEEDKKHERHPIFGNIVDEVAYHEKYPTIYHLRKKLVDSTDKADLRLIYLALAHMIKFRGHFLIEGDLNPDNSDVDKLFIQLVQTYNQLFEENPINASGVDAKAILSARLSKSRRLENLIAQLPGEKKNGLFGNLIALSLGLTPNFKSNFDLAEDAKLQLSKDTYDDDLDNLLAQIGDQYADLFLAAKNLSDAILLSDILRVNTEITKAPLSASMIKRYDEHHQDLTLLKALVRQQLPEKYKEIFFDQSKNGYAGYIDGGASQEEFYKFIKPILEKMDGTEELLVKLNREDLLRKQRTFDNGSIPHQIHLGELHAILRRQEDFYPFLKDNREKIEKILTFRIPYYVGPLARGNSRFAWMTRKSEETITPWNFEEVVDKGASAQSFIERMTNFDKNLPNEKVLPKHSLLYEYFTVYNELTKVKYVTEGMRKPAFLSGEQKKAIVDLLFKTNRKVTVKQLKEDYFKKIECFDSVEISGVEDRFNASLGTYHDLLKIIKDKDFLDNEENEDILEDIVLTLTLFEDREMIEERLKTYAHLFDDKVMKQLKRRRYTGWGRLSRKLINGIRDKQSGKTILDFLKSDGFANRNFMQLIHDDSLTFKEDIQKAQVSGQGDSLHEHIANLAGSPAIKKGILQTVKVVDELVKVMGRHKPENIVIEMARENQTTQKGQKNSRERMKRIEEGIKELGSQILKEHPVENTQLQNEKLYLYYLQNGRDMYVDQELDINRLSDYDVDHIVPQSFLKDDSIDNKVLTRSDKARGKSDNVPSEEVVKKMKNYWRQLLNAKLITQRKFDNLTKAERGGLSELDKAGFIKRQLVETRQITKHVAQILDSRMNTKYDENDKLIREVKVITLKSKLVSDFRKDFQFYKVREINNYHHAHDAYLNAVVGTALIKKYPKLESEFVYGDYKVYDVRKMIAKSEQEIGKATAKYFFYSNIMNFFKTEITLANGEIRKRPLIETNGETGEIVWDKGRDFATVRKVLSMPQVNIVKKTEVQTGGFSKESILPKRNSDKLIARKKDWDPKKYGGFDSPTVAYSVLVVAKVEKGKSKKLKSVKELLGITIMERSSFEKNPIDFLEAKGYKEVKKDLIIKLPKYSLFELENGRKRMLASAGELQKGNELALPSKYVNFLYLASHYEKLKGSPEDNEQKQLFVEQHKHYLDEIIEQISEFSKRVILADANLDKVLSAYNKHRDKPIREQAENIIHLFTLTNLGAPAAFKYFDTTIDRKRYTSTKEVLDATLIHQSITGLYETRIDLSQLGGDGGGSSGGGGGSGGVLNLEEEYRLHEKPVPSSIDPSWLQLFPTVWAERAGMGLANQVPPVVVELRSGASPVAVRQYPMSKEAREGIRPHIQRFLDLGVLVPCQSPWNTPLLPVKKPGTNDYRPVQDLREINKRVQDIHPTVPNPYNLLSSLPPSHTWYSVLDLKDAFFCLKLHPNSQPLFAFEWRDPEKGNTGQLTWTRLPQGFKNSPTLFNEALHRDLAPFRALNPQVVLLQYVDDLLVAAPTYRDCKEGTQKLLQELSKLGYRVSAKKAQLCQKEVTYLGYLLKEGKRWLTPARKATVMKIPPPTTPRQVREFLGTAGFCRLWIPGFASLAAPLYPLTKPSIPFIWTEEHQKAFDRIKEALLSAPALALPDLTKPFTLYVDERAGVARGVLTQTLGPWRRPVAYLSKKLDPVASGWPTCLKAVAAVALLLKDADKLTLGQNVTVIASHSLESIVRQPPDRWMTNARMTHYQSLLLNERVSFAPPAVLNPATLLPVESEATPVHRCSEILAEETGTRRDLKDQPLPGVPAWYTDGSSFIAEGKRRAGAAIVDGKRTVWASSLPEGTSAQKAELVALTQALRLAEGKDINIYTDSRYAFATAHIHGAIYKQRGWLTSAGKDIKNKEEILALLEAIHLPKRVAIIHCPGHQKGNDPVATGNRRADEAAKQAALSTRVLAETTKPAGKRTADGSEFEKRTADGSEFESPKKKAKVE

SEQ ID NO: 850 - protein, 2092 aa, synthetic construct
MPAAKRVKLDGGDKKYSIGLDIGTNSVGWAVITDEYKVPSKKFKVLGNTDRHSIKKNLIGALLFDSGETAEATRLKRTARRRYTRRKNRICYLQEIFSNEMAKVDDSFFHRLEESFLVEEDKKHERHPIFGNIVDEVAYHEKYPTIYHLRKKLVDSTDKADLRLIYLALAHMIKFRGHFLIEGDLNPDNSDVDKLFIQLVQTYNQLFEENPINASGVDAKAILSARLSKSRRLENLIAQLPGEKKNGLFGNLIALSLGLTPNFKSNFDLAEDAKLQLSKDTYDDDLDNLLAQIGDQYADLFLAAKNLSDAILLSDILRVNTEITKAPLSASMIKRYDEHHQDLTLLKALVRQQLPEKYKEIFFDQSKNGYAGYIDGGASQEEFYKFIKPILEKMDGTEELLVKLNREDLLRKQRTFDNGSIPHQIHLGELHAILRRQEDFYPFLKDNREKIEKILTFRIPYYVGPLARGNSRFAWMTRKSEETITPWNFEEVVDKGASAQSFIERMTNFDKNLPNEKVLPKHSLLYEYFTVYNELTKVKYVTEGMRKPAFLSGEQKKAIVDLLFKTNRKVTVKQLKEDYFKKIECFDSVEISGVEDRFNASLGTYHDLLKIIKDKDFLDNEENEDILEDIVLTLTLFEDREMIEERLKTYAHLFDDKVMKQLKRRRYTGWGRLSRKLINGIRDKQSGKTILDFLKSDGFANRNFMQLIHDDSLTFKEDIQKAQVSGQGDSLHEHIANLAGSPAIKKGILQTVKVVDELVKVMGRHKPENIVIEMARENQTTQKGQKNSRERMKRIEEGIKELGSQILKEHPVENTQLQNEKLYLYYLQNGRDMYVDQELDINRLSDYDVDHIVPQSFLKDDSIDNKVLTRSDKARGKSDNVPSEEVVKKMKNYWRQLLNAKLITQRKFDNLTKAERGGLSELDKAGFIKRQLVETRQITKHVAQILDSRMNTKYDENDKLIREVKVITLKSKLVSDFRKDFQFYKVREINNYHHAHDAYLNAVVGTALIKKYPKLESEFVYGDYKVYDVRKMIAKSEQEIGKATAKYFFYSNIMNFFKTEITLANGEIRKRPLIETNGETGEIVWDKGRDFATVRKVLSMPQVNIVKKTEVQTGGFSKESILPKRNSDKLIARKKDWDPKKYGGFDSPTVAYSVLVVAKVEKGKSKKLKSVKELLGITIMERSSFEKNPIDFLEAKGYKEVKKDLIIKLPKYSLFELENGRKRMLASAGELQKGNELALPSKYVNFLYLASHYEKLKGSPEDNEQKQLFVEQHKHYLDEIIEQISEFSKRVILADANLDKVLSAYNKHRDKPIREQAENIIHLFTLTNLGAPAAFKYFDTTIDRKRYTSTKEVLDATLIHQSITGLYETRIDLSQLGGDGGGGSGGSGGSGGVLNLEEEYRLHEKPVPSSIDPSWLQLFPTVWAERAGMGLANQVPPVVVELRSGASPVAVRQYPMSKEAREGIRPHIQRFLDLGVLVPCQSPWNTPLLPVKKPGTNDYRPVQDLREINKRVQDIHPTVPNPYNLLSSLPPSHTWYSVLDLKDAFFCLKLHPNSQPLFAFEWRDPEKGNTGQLTWTRLPQGFKNSPTLFNEALHRDLAPFRALNPQVVLLQYVDDLLVAAPTYRDCKEGTQKLLQELSKLGYRVSAKKAQLCQKEVTYLGYLLKEGKRWLTPARKATVMKIPPPTTPRQVREFLGTAGFCRLWIPGFASLAAPLYPLTKPSIPFIWTEEHQKAFDRIKEALLSAPALALPDLTKPFTLYVDERAGVARGVLTQTLGPWRRPVAYLSKKLDPVASGWPTCLKAVAAVALLLKDADKLTLGQNVTVIASHSLESIVRQPPDRWMTNARMTHYQSLLLNERVSFAPPAVLNPATLLPVESEATPVHRCSEILAEETGTRRDLKDQPLPGVPAWYTDGSSFIAEGKRRAGAAIVDGKRTVWASSLPEGTSAQKAELVALTQALRLAEGKDINIYTDSRYAFATAHIHGAIYKQRGWLTSAGKDIKNKEEILALLEAIHLPKRVAIIHCPGHQKGNDPVATGNRRADEAAKQAALSTRVLAETTKPAGKRTADGSEFEKRTADGSEFESPKKKAKVE

SEQ ID NO: 851 - protein, 2086 aa, synthetic construct
MPAAKRVKLDGGDKKYSIGLDIGTNSVGWAVITDEYKVPSKKFKVLGNTDRHSIKKNLIGALLFDSGETAEATRLKRTARRRYTRRKNRICYLQEIFSNEMAKVDDSFFHRLEESFLVEEDKKHERHPIFGNIVDEVAYHEKYPTIYHLRKKLVDSTDKADLRLIYLALAHMIKFRGHFLIEGDLNPDNSDVDKLFIQLVQTYNQLFEENPINASGVDAKAILSARLSKSRRLENLIAQLPGEKKNGLFGNLIALSLGLTPNFKSNFDLAEDAKLQLSKDTYDDDLDNLLAQIGDQYADLFLAAKNLSDAILLSDILRVNTEITKAPLSASMIKRYDEHHQDLTLLKALVRQQLPEKYKEIFFDQSKNGYAGYIDGGASQEEFYKFIKPILEKMDGTEELLVKLNREDLLRKQRTFDNGSIPHQIHLGELHAILRRQEDFYPFLKDNREKIEKILTFRIPYYVGPLARGNSRFAWMTRKSEETITPWNFEEVVDKGASAQSFIERMTNFDKNLPNEKVLPKHSLLYEYFTVYNELTKVKYVTEGMRKPAFLSGEQKKAIVDLLFKTNRKVTVKQLKEDYFKKIECFDSVEISGVEDRFNASLGTYHDLLKIIKDKDFLDNEENEDILEDIVLTLTLFEDREMIEERLKTYAHLFDDKVMKQLKRRRYTGWGRLSRKLINGIRDKQSGKTILDFLKSDGFANRNFMQLIHDDSLTFKEDIQKAQVSGQGDSLHEHIANLAGSPAIKKGILQTVKVVDELVKVMGRHKPENIVIEMARENQTTQKGQKNSRERMKRIEEGIKELGSQILKEHPVENTQLQNEKLYLYYLQNGRDMYVDQELDINRLSDYDVDHIVPQSFLKDDSIDNKVLTRSDKARGKSDNVPSEEVVKKMKNYWRQLLNAKLITQRKFDNLTKAERGGLSELDKAGFIKRQLVETRQITKHVAQILDSRMNTKYDENDKLIREVKVITLKSKLVSDFRKDFQFYKVREINNYHHAHDAYLNAVVGTALIKKYPKLESEFVYGDYKVYDVRKMIAKSEQEIGKATAKYFFYSNIMNFFKTEITLANGEIRKRPLIETNGETGEIVWDKGRDFATVRKVLSMPQVNIVKKTEVQTGGFSKESILPKRNSDKLIARKKDWDPKKYGGFDSPTVAYSVLVVAKVEKGKSKKLKSVKELLGITIMERSSFEKNPIDFLEAKGYKEVKKDLIIKLPKYSLFELENGRKRMLASAGELQKGNELALPSKYVNFLYLASHYEKLKGSPEDNEQKQLFVEQHKHYLDEIIEQISEFSKRVILADANLDKVLSAYNKHRDKPIREQAENIIHLFTLTNLGAPAAFKYFDTTIDRKRYTSTKEVLDATLIHQSITGLYETRIDLSQLGGDGGGGSGGVLNLEEEYRLHEKPVPSSIDPSWLQLFPTVWAERAGMGLANQVPPVVVELRSGASPVAVRQYPMSKEAREGIRPHIQRFLDLGVLVPCQSPWNTPLLPVKKPGTNDYRPVQDLREINKRVQDIHPTVPNPYNLLSSLPPSHTWYSVLDLKDAFFCLKLHPNSQPLFAFEWRDPEKGNTGQLTWTRLPQGFKNSPTLFNEALHRDLAPFRALNPQVVLLQYVDDLLVAAPTYRDCKEGTQKLLQELSKLGYRVSAKKAQLCQKEVTYLGYLLKEGKRWLTPARKATVMKIPPPTTPRQVREFLGTAGFCRLWIPGFASLAAPLYPLTKPSIPFIWTEEHQKAFDRIKEALLSAPALALPDLTKPFTLYVDERAGVARGVLTQTLGPWRRPVAYLSKKLDPVASGWPTCLKAVAAVALLLKDADKLTLGQNVTVIASHSLESIVRQPPDRWMTNARMTHYQSLLLNERVSFAPPAVLNPATLLPVESEATPVHRCSEILAEETGTRRDLKDQPLPGVPAWYTDGSSFIAEGKRRAGAAIVDGKRTVWASSLPEGTSAQKAELVALTQALRLAEGKDINIYTDSRYAFATAHIHGAIYKQRGWLTSAGKDIKNKEEILALLEAIHLPKRVAIIHCPGHQKGNDPVATGNRRADEAAKQAALSTRVLAETTKPAGKRTADGSEFEKRTADGSEFESPKKKAKVE

SEQ ID NO: 852 - protein, 2091 aa, synthetic construct
MPAAKRVKLDGGDKKYSIGLDIGTNSVGWAVITDEYKVPSKKFKVLGNTDRHSIKKNLIGALLFDSGETAEATRLKRTARRRYTRRKNRICYLQEIFSNEMAKVDDSFFHRLEESFLVEEDKKHERHPIFGNIVDEVAYHEKYPTIYHLRKKLVDSTDKADLRLIYLALAHMIKFRGHFLIEGDLNPDNSDVDKLFIQLVQTYNQLFEENPINASGVDAKAILSARLSKSRRLENLIAQLPGEKKNGLFGNLIALSLGLTPNFKSNFDLAEDAKLQLSKDTYDDDLDNLLAQIGDQYADLFLAAKNLSDAILLSDILRVNTEITKAPLSASMIKRYDEHHQDLTLLKALVRQQLPEKYKEIFFDQSKNGYAGYIDGGASQEEFYKFIKPILEKMDGTEELLVKLNREDLLRKQRTFDNGSIPHQIHLGELHAILRRQEDFYPFLKDNREKIEKILTFRIPYYVGPLARGNSRFAWMTRKSEETITPWNFEEVVDKGASAQSFIERMTNFDKNLPNEKVLPKHSLLYEYFTVYNELTKVKYVTEGMRKPAFLSGEQKKAIVDLLFKTNRKVTVKQLKEDYFKKIECFDSVEISGVEDRFNASLGTYHDLLKIIKDKDFLDNEENEDILEDIVLTLTLFEDREMIEERLKTYAHLFDDKVMKQLKRRRYTGWGRLSRKLINGIRDKQSGKTILDFLKSDGFANRNFMQLIHDDSLTFKEDIQKAQVSGQGDSLHEHIANLAGSPAIKKGILQTVKVVDELVKVMGRHKPENIVIEMARENQTTQKGQKNSRERMKRIEEGIKELGSQILKEHPVENTQLQNEKLYLYYLQNGRDMYVDQELDINRLSDYDVDHIVPQSFLKDDSIDNKVLTRSDKARGKSDNVPSEEVVKKMKNYWRQLLNAKLITQRKFDNLTKAERGGLSELDKAGFIKRQLVETRQITKHVAQILDSRMNTKYDENDKLIREVKVITLKSKLVSDFRKDFQFYKVREINNYHHAHDAYLNAVVGTALIKKYPKLESEFVYGDYKVYDVRKMIAKSEQEIGKATAKYFFYSNIMNFFKTEITLANGEIRKRPLIETNGETGEIVWDKGRDFATVRKVLSMPQVNIVKKTEVQTGGFSKESILPKRNSDKLIARKKDWDPKKYGGFDSPTVAYSVLVVAKVEKGKSKKLKSVKELLGITIMERSSFEKNPIDFLEAKGYKEVKKDLIIKLPKYSLFELENGRKRMLASAGELQKGNELALPSKYVNFLYLASHYEKLKGSPEDNEQKQLFVEQHKHYLDEIIEQISEFSKRVILADANLDKVLSAYNKHRDKPIREQAENIIHLFTLTNLGAPAAFKYFDTTIDRKRYTSTKEVLDATLIHQSITGLYETRIDLSQLGGDGGGGSEAAAKGGVLNLEEEYRLHEKPVPSSIDPSWLQLFPTVWAERAGMGLANQVPPVVVELRSGASPVAVRQYPMSKEAREGIRPHIQRFLDLGVLVPCQSPWNTPLLPVKKPGTNDYRPVQDLREINKRVQDIHPTVPNPYNLLSSLPPSHTWYSVLDLKDAFFCLKLHPNSQPLFAFEWRDPEKGNTGQLTWTRLPQGFKNSPTLFNEALHRDLAPFRALNPQVVLLQYVDDLLVAAPTYRDCKEGTQKLLQELSKLGYRVSAKKAQLCQKEVTYLGYLLKEGKRWLTPARKATVMKIPPPTTPRQVREFLGTAGFCRLWIPGFASLAAPLYPLTKPSIPFIWTEEHQKAFDRIKEALLSAPALALPDLTKPFTLYVDERAGVARGVLTQTLGPWRRPVAYLSKKLDPVASGWPTCLKAVAAVALLLKDADKLTLGQNVTVIASHSLESIVRQPPDRWMTNARMTHYQSLLLNERVSFAPPAVLNPATLLPVESEATPVHRCSEILAEETGTRRDLKDQPLPGVPAWYTDGSSFIAEGKRRAGAAIVDGKRTVWASSLPEGTSAQKAELVALTQALRLAEGKDINIYTDSRYAFATAHIHGAIYKQRGWLTSAGKDIKNKEEILALLEAIHLPKRVAIIHCPGHQKGNDPVATGNRRADEAAKQAALSTRVLAETTKPAGKRTADGSEFEKRTADGSEFESPKKKAKVE

SEQ ID NO: 853 - protein, 2094 aa, synthetic construct
MPAAKRVKLDGGDKKYSIGLDIGTNSVGWAVITDEYKVPSKKFKVLGNTDRHSIKKNLIGALLFDSGETAEATRLKRTARRRYTRRKNRICYLQEIFSNEMAKVDDSFFHRLEESFLVEEDKKHERHPIFGNIVDEVAYHEKYPTIYHLRKKLVDSTDKADLRLIYLALAHMIKFRGHFLIEGDLNPDNSDVDKLFIQLVQTYNQLFEENPINASGVDAKAILSARLSKSRRLENLIAQLPGEKKNGLFGNLIALSLGLTPNFKSNFDLAEDAKLQLSKDTYDDDLDNLLAQIGDQYADLFLAAKNLSDAILLSDILRVNTEITKAPLSASMIKRYDEHHQDLTLLKALVRQQLPEKYKEIFFDQSKNGYAGYIDGGASQEEFYKFIKPILEKMDGTEELLVKLNREDLLRKQRTFDNGSIPHQIHLGELHAILRRQEDFYPFLKDNREKIEKILTFRIPYYVGPLARGNSRFAWMTRKSEETITPWNFEEVVDKGASAQSFIERMTNFDKNLPNEKVLPKHSLLYEYFTVYNELTKVKYVTEGMRKPAFLSGEQKKAIVDLLFKTNRKVTVKQLKEDYFKKIECFDSVEISGVEDRFNASLGTYHDLLKIIKDKDFLDNEENEDILEDIVLTLTLFEDREMIEERLKTYAHLFDDKVMKQLKRRRYTGWGRLSRKLINGIRDKQSGKTILDFLKSDGFANRNFMQLIHDDSLTFKEDIQKAQVSGQGDSLHEHIANLAGSPAIKKGILQTVKVVDELVKVMGRHKPENIVIEMARENQTTQKGQKNSRERMKRIEEGIKELGSQILKEHPVENTQLQNEKLYLYYLQNGRDMYVDQELDINRLSDYDVDHIVPQSFLKDDSIDNKVLTRSDKARGKSDNVPSEEVVKKMKNYWRQLLNAKLITQRKFDNLTKAERGGLSELDKAGFIKRQLVETRQITKHVAQILDSRMNTKYDENDKLIREVKVITLKSKLVSDFRKDFQFYKVREINNYHHAHDAYLNAVVGTALIKKYPKLESEFVYGDYKVYDVRKMIAKSEQEIGKATAKYFFYSNIMNFFKTEITLANGEIRKRPLIETNGETGEIVWDKGRDFATVRKVLSMPQVNIVKKTEVQTGGFSKESILPKRNSDKLIARKKDWDPKKYGGFDSPTVAYSVLVVAKVEKGKSKKLKSVKELLGITIMERSSFEKNPIDFLEAKGYKEVKKDLIIKLPKYSLFELENGRKRMLASAGELQKGNELALPSKYVNFLYLASHYEKLKGSPEDNEQKQLFVEQHKHYLDEIIEQISEFSKRVILADANLDKVLSAYNKHRDKPIREQAENIIHLFTLTNLGAPAAFKYFDTTIDRKRYTSTKEVLDATLIHQSITGLYETRIDLSQLGGDGGGSSEAAAKGGGGGVLNLEEEYRLHEKPVPSSIDPSWLQLFPTVWAERAGMGLANQVPPVVVELRSGASPVAVRQYPMSKEAREGIRPHIQRFLDLGVLVPCQSPWNTPLLPVKKPGTNDYRPVQDLREINKRVQDIHPTVPNPYNLLSSLPPSHTWYSVLDLKDAFFCLKLHPNSQPLFAFEWRDPEKGNTGQLTWTRLPQGFKNSPTLFNEALHRDLAPFRALNPQVVLLQYVDDLLVAAPTYRDCKEGTQKLLQELSKLGYRVSAKKAQLCQKEVTYLGYLLKEGKRWLTPARKATVMKIPPPTTPRQVREFLGTAGFCRLWIPGFASLAAPLYPLTKPSIPFIWTEEHQKAFDRIKEALLSAPALALPDLTKPFTLYVDERAGVARGVLTQTLGPWRRPVAYLSKKLDPVASGWPTCLKAVAAVALLLKDADKLTLGQNVTVIASHSLESIVRQPPDRWMTNARMTHYQSLLLNERVSFAPPAVLNPATLLPVESEATPVHRCSEILAEETGTRRDLKDQPLPGVPAWYTDGSSFIAEGKRRAGAAIVDGKRTVWASSLPEGTSAQKAELVALTQALRLAEGKDINIYTDSRYAFATAHIHGAIYKQRGWLTSAGKDIKNKEEILALLEAIHLPKRVAIIHCPGHQKGNDPVATGNRRADEAAKQAALSTRVLAETTKPAGKRTADGSEFEKRTADGSEFESPKKKAKVE

SEQ ID NO: 854 - protein, 2094 aa, synthetic construct
MPAAKRVKLDGGDKKYSIGLDIGTNSVGWAVITDEYKVPSKKFKVLGNTDRHSIKKNLIGALLFDSGETAEATRLKRTARRRYTRRKNRICYLQEIFSNEMAKVDDSFFHRLEESFLVEEDKKHERHPIFGNIVDEVAYHEKYPTIYHLRKKLVDSTDKADLRLIYLALAHMIKFRGHFLIEGDLNPDNSDVDKLFIQLVQTYNQLFEENPINASGVDAKAILSARLSKSRRLENLIAQLPGEKKNGLFGNLIALSLGLTPNFKSNFDLAEDAKLQLSKDTYDDDLDNLLAQIGDQYADLFLAAKNLSDAILLSDILRVNTEITKAPLSASMIKRYDEHHQDLTLLKALVRQQLPEKYKEIFFDQSKNGYAGYIDGGASQEEFYKFIKPILEKMDGTEELLVKLNREDLLRKQRTFDNGSIPHQIHLGELHAILRRQEDFYPFLKDNREKIEKILTFRIPYYVGPLARGNSRFAWMTRKSEETITPWNFEEVVDKGASAQSFIERMTNFDKNLPNEKVLPKHSLLYEYFTVYNELTKVKYVTEGMRKPAFLSGEQKKAIVDLLFKTNRKVTVKQLKEDYFKKIECFDSVEISGVEDRFNASLGTYHDLLKIIKDKDFLDNEENEDILEDIVLTLTLFEDREMIEERLKTYAHLFDDKVMKQLKRRRYTGWGRLSRKLINGIRDKQSGKTILDFLKSDGFANRNFMQLIHDDSLTFKEDIQKAQVSGQGDSLHEHIANLAGSPAIKKGILQTVKVVDELVKVMGRHKPENIVIEMARENQTTQKGQKNSRERMKRIEEGIKELGSQILKEHPVENTQLQNEKLYLYYLQNGRDMYVDQELDINRLSDYDVDHIVPQSFLKDDSIDNKVLTRSDKARGKSDNVPSEEVVKKMKNYWRQLLNAKLITQRKFDNLTKAERGGLSELDKAGFIKRQLVETRQITKHVAQILDSRMNTKYDENDKLIREVKVITLKSKLVSDFRKDFQFYKVREINNYHHAHDAYLNAVVGTALIKKYPKLESEFVYGDYKVYDVRKMIAKSEQEIGKATAKYFFYSNIMNFFKTEITLANGEIRKRPLIETNGETGEIVWDKGRDFATVRKVLSMPQVNIVKKTEVQTGGFSKESILPKRNSDKLIARKKDWDPKKYGGFDSPTVAYSVLVVAKVEKGKSKKLKSVKELLGITIMERSSFEKNPIDFLEAKGYKEVKKDLIIKLPKYSLFELENGRKRMLASAGELQKGNELALPSKYVNFLYLASHYEKLKGSPEDNEQKQLFVEQHKHYLDEIIEQISEFSKRVILADANLDKVLSAYNKHRDKPIREQAENIIHLFTLTNLGAPAAFKYFDTTIDRKRYTSTKEVLDATLIHQSITGLYETRIDLSQLGGDGGGGSEAAAKGGGGGVLNLEEEYRLHEKPVPSSIDPSWLQLFPTVWAERAGMGLANQVPPVVVELRSGASPVAVRQYPMSKEAREGIRPHIQRFLDLGVLVPCQSPWNTPLLPVKKPGTNDYRPVQDLREINKRVQDIHPTVPNPYNLLSSLPPSHTWYSVLDLKDAFFCLKLHPNSQPLFAFEWRDPEKGNTGQLTWTRLPQGFKNSPTLFNEALHRDLAPFRALNPQVVLLQYVDDLLVAAPTYRDCKEGTQKLLQELSKLGYRVSAKKAQLCQKEVTYLGYLLKEGKRWLTPARKATVMKIPPPTTPRQVREFLGTAGFCRLWIPGFASLAAPLYPLTKPSIPFIWTEEHQKAFDRIKEALLSAPALALPDLTKPFTLYVDERAGVARGVLTQTLGPWRRPVAYLSKKLDPVASGWPTCLKAVAAVALLLKDADKLTLGQNVTVIASHSLESIVRQPPDRWMTNARMTHYQSLLLNERVSFAPPAVLNPATLLPVESEATPVHRCSEILAEETGTRRDLKDQPLPGVPAWYTDGSSFIAEGKRRAGAAIVDGKRTVWASSLPEGTSAQKAELVALTQALRLAEGKDINIYTDSRYAFATAHIHGAIYKQRGWLTSAGKDIKNKEEILALLEAIHLPKRVAIIHCPGHQKGNDPVATGNRRADEAAKQAALSTRVLAETTKPAGKRTADGSEFEKRTADGSEFESPKKKAKVE

SEQ ID NO: 855 - protein, 2089 aa, synthetic construct
MPAAKRVKLDGGDKKYSIGLDIGTNSVGWAVITDEYKVPSKKFKVLGNTDRHSIKKNLIGALLFDSGETAEATRLKRTARRRYTRRKNRICYLQEIFSNEMAKVDDSFFHRLEESFLVEEDKKHERHPIFGNIVDEVAYHEKYPTIYHLRKKLVDSTDKADLRLIYLALAHMIKFRGHFLIEGDLNPDNSDVDKLFIQLVQTYNQLFEENPINASGVDAKAILSARLSKSRRLENLIAQLPGEKKNGLFGNLIALSLGLTPNFKSNFDLAEDAKLQLSKDTYDDDLDNLLAQIGDQYADLFLAAKNLSDAILLSDILRVNTEITKAPLSASMIKRYDEHHQDLTLLKALVRQQLPEKYKEIFFDQSKNGYAGYIDGGASQEEFYKFIKPILEKMDGTEELLVKLNREDLLRKQRTFDNGSIPHQIHLGELHAILRRQEDFYPFLKDNREKIEKILTFRIPYYVGPLARGNSRFAWMTRKSEETITPWNFEEVVDKGASAQSFIERMTNFDKNLPNEKVLPKHSLLYEYFTVYNELTKVKYVTEGMRKPAFLSGEQKKAIVDLLFKTNRKVTVKQLKEDYFKKIECFDSVEISGVEDRFNASLGTYHDLLKIIKDKDFLDNEENEDILEDIVLTLTLFEDREMIEERLKTYAHLFDDKVMKQLKRRRYTGWGRLSRKLINGIRDKQSGKTILDFLKSDGFANRNFMQLIHDDSLTFKEDIQKAQVSGQGDSLHEHIANLAGSPAIKKGILQTVKVVDELVKVMGRHKPENIVIEMARENQTTQKGQKNSRERMKRIEEGIKELGSQILKEHPVENTQLQNEKLYLYYLQNGRDMYVDQELDINRLSDYDVDHIVPQSFLKDDSIDNKVLTRSDKARGKSDNVPSEEVVKKMKNYWRQLLNAKLITQRKFDNLTKAERGGLSELDKAGFIKRQLVETRQITKHVAQILDSRMNTKYDENDKLIREVKVITLKSKLVSDFRKDFQFYKVREINNYHHAHDAYLNAVVGTALIKKYPKLESEFVYGDYKVYDVRKMIAKSEQEIGKATAKYFFYSNIMNFFKTEITLANGEIRKRPLIETNGETGEIVWDKGRDFATVRKVLSMPQVNIVKKTEVQTGGFSKESILPKRNSDKLIARKKDWDPKKYGGFDSPTVAYSVLVVAKVEKGKSKKLKSVKELLGITIMERSSFEKNPIDFLEAKGYKEVKKDLIIKLPKYSLFELENGRKRMLASAGELQKGNELALPSKYVNFLYLASHYEKLKGSPEDNEQKQLFVEQHKHYLDEIIEQISEFSKRVILADANLDKVLSAYNKHRDKPIREQAENIIHLFTLTNLGAPAAFKYFDTTIDRKRYTSTKEVLDATLIHQSITGLYETRIDLSQLGGDGGGGSGGGGGVLNLEEEYRLHEKPVPSSIDPSWLQLFPTVWAERAGMGLANQVPPVVVELRSGASPVAVRQYPMSKEAREGIRPHIQRFLDLGVLVPCQSPWNTPLLPVKKPGTNDYRPVQDLREINKRVQDIHPTVPNPYNLLSSLPPSHTWYSVLDLKDAFFCLKLHPNSQPLFAFEWRDPEKGNTGQLTWTRLPQGFKNSPTLFNEALHRDLAPFRALNPQVVLLQYVDDLLVAAPTYRDCKEGTQKLLQELSKLGYRVSAKKAQLCQKEVTYLGYLLKEGKRWLTPARKATVMKIPPPTTPRQVREFLGTAGFCRLWIPGFASLAAPLYPLTKPSIPFIWTEEHQKAFDRIKEALLSAPALALPDLTKPFTLYVDERAGVARGVLTQTLGPWRRPVAYLSKKLDPVASGWPTCLKAVAAVALLLKDADKLTLGQNVTVIASHSLESIVRQPPDRWMTNARMTHYQSLLLNERVSFAPPAVLNPATLLPVESEATPVHRCSEILAEETGTRRDLKDQPLPGVPAWYTDGSSFIAEGKRRAGAAIVDGKRTVWASSLPEGTSAQKAELVALTQALRLAEGKDINIYTDSRYAFATAHIHGAIYKQRGWLTSAGKDIKNKEEILALLEAIHLPKRVAIIHCPGHQKGNDPVATGNRRADEAAKQAALSTRVLAETTKPAGKRTADGSEFEKRTADGSEFESPKKKAKVE

SEQ ID NO: 856 - protein, 2094 aa, synthetic construct
MPAAKRVKLDGGDKKYSIGLDIGTNSVGWAVITDEYKVPSKKFKVLGNTDRHSIKKNLIGALLFDSGETAEATRLKRTARRRYTRRKNRICYLQEIFSNEMAKVDDSFFHRLEESFLVEEDKKHERHPIFGNIVDEVAYHEKYPTIYHLRKKLVDSTDKADLRLIYLALAHMIKFRGHFLIEGDLNPDNSDVDKLFIQLVQTYNQLFEENPINASGVDAKAILSARLSKSRRLENLIAQLPGEKKNGLFGNLIALSLGLTPNFKSNFDLAEDAKLQLSKDTYDDDLDNLLAQIGDQYADLFLAAKNLSDAILLSDILRVNTEITKAPLSASMIKRYDEHHQDLTLLKALVRQQLPEKYKEIFFDQSKNGYAGYIDGGASQEEFYKFIKPILEKMDGTEELLVKLNREDLLRKQRTFDNGSIPHQIHLGELHAILRRQEDFYPFLKDNREKIEKILTFRIPYYVGPLARGNSRFAWMTRKSEETITPWNFEEVVDKGASAQSFIERMTNFDKNLPNEKVLPKHSLLYEYFTVYNELTKVKYVTEGMRKPAFLSGEQKKAIVDLLFKTNRKVTVKQLKEDYFKKIECFDSVEISGVEDRFNASLGTYHDLLKIIKDKDFLDNEENEDILEDIVLTLTLFEDREMIEERLKTYAHLFDDKVMKQLKRRRYTGWGRLSRKLINGIRDKQSGKTILDFLKSDGFANRNFMQLIHDDSLTFKEDIQKAQVSGQGDSLHEHIANLAGSPAIKKGILQTVKVVDELVKVMGRHKPENIVIEMARENQTTQKGQKNSRERMKRIEEGIKELGSQILKEHPVENTQLQNEKLYLYYLQNGRDMYVDQELDINRLSDYDVDHIVPQSFLKDDSIDNKVLTRSDKARGKSDNVPSEEVVKKMKNYWRQLLNAKLITQRKFDNLTKAERGGLSELDKAGFIKRQLVETRQITKHVAQILDSRMNTKYDENDKLIREVKVITLKSKLVSDFRKDFQFYKVREINNYHHAHDAYLNAVVGTALIKKYPKLESEFVYGDYKVYDVRKMIAKSEQEIGKATAKYFFYSNIMNFFKTEITLANGEIRKRPLIETNGETGEIVWDKGRDFATVRKVLSMPQVNIVKKTEVQTGGFSKESILPKRNSDKLIARKKDWDPKKYGGFDSPTVAYSVLVVAKVEKGKSKKLKSVKELLGITIMERSSFEKNPIDFLEAKGYKEVKKDLIIKLPKYSLFELENGRKRMLASAGELQKGNELALPSKYVNFLYLASHYEKLKGSPEDNEQKQLFVEQHKHYLDEIIEQISEFSKRVILADANLDKVLSAYNKHRDKPIREQAENIIHLFTLTNLGAPAAFKYFDTTIDRKRYTSTKEVLDATLIHQSITGLYETRIDLSQLGGDGGEAAAKPAPGGGGGVLNLEEEYRLHEKPVPSSIDPSWLQLFPTVWAERAGMGLANQVPPVVVELRSGASPVAVRQYPMSKEAREGIRPHIQRFLDLGVLVPCQSPWNTPLLPVKKPGTNDYRPVQDLREINKRVQDIHPTVPNPYNLLSSLPPSHTWYSVLDLKDAFFCLKLHPNSQPLFAFEWRDPEKGNTGQLTWTRLPQGFKNSPTLFNEALHRDLAPFRALNPQVVLLQYVDDLLVAAPTYRDCKEGTQKLLQELSKLGYRVSAKKAQLCQKEVTYLGYLLKEGKRWLTPARKATVMKIPPPTTPRQVREFLGTAGFCRLWIPGFASLAAPLYPLTKPSIPFIWTEEHQKAFDRIKEALLSAPALALPDLTKPFTLYVDERAGVARGVLTQTLGPWRRPVAYLSKKLDPVASGWPTCLKAVAAVALLLKDADKLTLGQNVTVIASHSLESIVRQPPDRWMTNARMTHYQSLLLNERVSFAPPAVLNPATLLPVESEATPVHRCSEILAEETGTRRDLKDQPLPGVPAWYTDGSSFIAEGKRRAGAAIVDGKRTVWASSLPEGTSAQKAELVALTQALRLAEGKDINIYTDSRYAFATAHIHGAIYKQRGWLTSAGKDIKNKEEILALLEAIHLPKRVAIIHCPGHQKGNDPVATGNRRADEAAKQAALSTRVLAETTKPAGKRTADGSEFEKRTADGSEFESPKKKAKVE

SEQ ID NO: 857 - protein, 2094 aa, synthetic construct
MPAAKRVKLDGGDKKYSIGLDIGTNSVGWAVITDEYKVPSKKFKVLGNTDRHSIKKNLIGALLFDSGETAEATRLKRTARRRYTRRKNRICYLQEIFSNEMAKVDDSFFHRLEESFLVEEDKKHERHPIFGNIVDEVAYHEKYPTIYHLRKKLVDSTDKADLRLIYLALAHMIKFRGHFLIEGDLNPDNSDVDKLFIQLVQTYNQLFEENPINASGVDAKAILSARLSKSRRLENLIAQLPGEKKNGLFGNLIALSLGLTPNFKSNFDLAEDAKLQLSKDTYDDDLDNLLAQIGDQYADLFLAAKNLSDAILLSDILRVNTEITKAPLSASMIKRYDEHHQDLTLLKALVRQQLPEKYKEIFFDQSKNGYAGYIDGGASQEEFYKFIKPILEKMDGTEELLVKLNREDLLRKQRTFDNGSIPHQIHLGELHAILRRQEDFYPFLKDNREKIEKILTFRIPYYVGPLARGNSRFAWMTRKSEETITPWNFEEVVDKGASAQSFIERMTNFDKNLPNEKVLPKHSLLYEYFTVYNELTKVKYVTEGMRKPAFLSGEQKKAIVDLLFKTNRKVTVKQLKEDYFKKIECFDSVEISGVEDRFNASLGTYHDLLKIIKDKDFLDNEENEDILEDIVLTLTLFEDREMIEERLKTYAHLFDDKVMKQLKRRRYTGWGRLSRKLINGIRDKQSGKTILDFLKSDGFANRNFMQLIHDDSLTFKEDIQKAQVSGQGDSLHEHIANLAGSPAIKKGILQTVKVVDELVKVMGRHKPENIVIEMARENQTTQKGQKNSRERMKRIEEGIKELGSQILKEHPVENTQLQNEKLYLYYLQNGRDMYVDQELDINRLSDYDVDHIVPQSFLKDDSIDNKVLTRSDKARGKSDNVPSEEVVKKMKNYWRQLLNAKLITQRKFDNLTKAERGGLSELDKAGFIKRQLVETRQITKHVAQILDSRMNTKYDENDKLIREVKVITLKSKLVSDFRKDFQFYKVREINNYHHAHDAYLNAVVGTALIKKYPKLESEFVYGDYKVYDVRKMIAKSEQEIGKATAKYFFYSNIMNFFKTEITLANGEIRKRPLIETNGETGEIVWDKGRDFATVRKVLSMPQVNIVKKTEVQTGGFSKESILPKRNSDKLIARKKDWDPKKYGGFDSPTVAYSVLVVAKVEKGKSKKLKSVKELLGITIMERSSFEKNPIDFLEAKGYKEVKKDLIIKLPKYSLFELENGRKRMLASAGELQKGNELALPSKYVNFLYLASHYEKLKGSPEDNEQKQLFVEQHKHYLDEIIEQISEFSKRVILADANLDKVLSAYNKHRDKPIREQAENIIHLFTLTNLGAPAAFKYFDTTIDRKRYTSTKEVLDATLIHQSITGLYETRIDLSQLGGDGGGSSEAAAKGGSGGVLNLEEEYRLHEKPVPSSIDPSWLQLFPTVWAERAGMGLANQVPPVVVELRSGASPVAVRQYPMSKEAREGIRPHIQRFLDLGVLVPCQSPWNTPLLPVKKPGTNDYRPVQDLREINKRVQDIHPTVPNPYNLLSSLPPSHTWYSVLDLKDAFFCLKLHPNSQPLFAFEWRDPEKGNTGQLTWTRLPQGFKNSPTLFNEALHRDLAPFRALNPQVVLLQYVDDLLVAAPTYRDCKEGTQKLLQELSKLGYRVSAKKAQLCQKEVTYLGYLLKEGKRWLTPARKATVMKIPPPTTPRQVREFLGTAGFCRLWIPGFASLAAPLYPLTKPSIPFIWTEEHQKAFDRIKEALLSAPALALPDLTKPFTLYVDERAGVARGVLTQTLGPWRRPVAYLSKKLDPVASGWPTCLKAVAAVALLLKDADKLTLGQNVTVIASHSLESIVRQPPDRWMTNARMTHYQSLLLNERVSFAPPAVLNPATLLPVESEATPVHRCSEILAEETGTRRDLKDQPLPGVPAWYTDGSSFIAEGKRRAGAAIVDGKRTVWASSLPEGTSAQKAELVALTQALRLAEGKDINIYTDSRYAFATAHIHGAIYKQRGWLTSAGKDIKNKEEILALLEAIHLPKRVAIIHCPGHQKGNDPVATGNRRADEAAKQAALSTRVLAETTKPAGKRTADGSEFEKRTADGSEFESPKKKAKVE

SEQ ID NO: 858 - protein, 2092 aa, synthetic construct
MPAAKRVKLDGGDKKYSIGLDIGTNSVGWAVITDEYKVPSKKFKVLGNTDRHSIKKNLIGALLFDSGETAEATRLKRTARRRYTRRKNRICYLQEIFSNEMAKVDDSFFHRLEESFLVEEDKKHERHPIFGNIVDEVAYHEKYPTIYHLRKKLVDSTDKADLRLIYLALAHMIKFRGHFLIEGDLNPDNSDVDKLFIQLVQTYNQLFEENPINASGVDAKAILSARLSKSRRLENLIAQLPGEKKNGLFGNLIALSLGLTPNFKSNFDLAEDAKLQLSKDTYDDDLDNLLAQIGDQYADLFLAAKNLSDAILLSDILRVNTEITKAPLSASMIKRYDEHHQDLTLLKALVRQQLPEKYKEIFFDQSKNGYAGYIDGGASQEEFYKFIKPILEKMDGTEELLVKLNREDLLRKQRTFDNGSIPHQIHLGELHAILRRQEDFYPFLKDNREKIEKILTFRIPYYVGPLARGNSRFAWMTRKSEETITPWNFEEVVDKGASAQSFIERMTNFDKNLPNEKVLPKHSLLYEYFTVYNELTKVKYVTEGMRKPAFLSGEQKKAIVDLLFKTNRKVTVKQLKEDYFKKIECFDSVEISGVEDRFNASLGTYHDLLKIIKDKDFLDNEENEDILEDIVLTLTLFEDREMIEERLKTYAHLFDDKVMKQLKRRRYTGWGRLSRKLINGIRDKQSGKTILDFLKSDGFANRNFMQLIHDDSLTFKEDIQKAQVSGQGDSLHEHIANLAGSPAIKKGILQTVKVVDELVKVMGRHKPENIVIEMARENQTTQKGQKNSRERMKRIEEGIKELGSQILKEHPVENTQLQNEKLYLYYLQNGRDMYVDQELDINRLSDYDVDHIVPQSFLKDDSIDNKVLTRSDKARGKSDNVPSEEVVKKMKNYWRQLLNAKLITQRKFDNLTKAERGGLSELDKAGFIKRQLVETRQITKHVAQILDSRMNTKYDENDKLIREVKVITLKSKLVSDFRKDFQFYKVREINNYHHAHDAYLNAVVGTALIKKYPKLESEFVYGDYKVYDVRKMIAKSEQEIGKATAKYFFYSNIMNFFKTEITLANGEIRKRPLIETNGETGEIVWDKGRDFATVRKVLSMPQVNIVKKTEVQTGGFSKESILPKRNSDKLIARKKDWDPKKYGGFDSPTVAYSVLVVAKVEKGKSKKLKSVKELLGITIMERSSFEKNPIDFLEAKGYKEVKKDLIIKLPKYSLFELENGRKRMLASAGELQKGNELALPSKYVNFLYLASHYEKLKGSPEDNEQKQLFVEQHKHYLDEIIEQISEFSKRVILADANLDKVLSAYNKHRDKPIREQAENIIHLFTLTNLGAPAAFKYFDTTIDRKRYTSTKEVLDATLIHQSITGLYETRIDLSQLGGDGGPAPGGSGGGGGVLNLEEEYRLHEKPVPSSIDPSWLQLFPTVWAERAGMGLANQVPPVVVELRSGASPVAVRQYPMSKEAREGIRPHIQRFLDLGVLVPCQSPWNTPLLPVKKPGTNDYRPVQDLREINKRVQDIHPTVPNPYNLLSSLPPSHTWYSVLDLKDAFFCLKLHPNSQPLFAFEWRDPEKGNTGQLTWTRLPQGFKNSPTLFNEALHRDLAPFRALNPQVVLLQYVDDLLVAAPTYRDCKEGTQKLLQELSKLGYRVSAKKAQLCQKEVTYLGYLLKEGKRWLTPARKATVMKIPPPTTPRQVREFLGTAGFCRLWIPGFASLAAPLYPLTKPSIPFIWTEEHQKAFDRIKEALLSAPALALPDLTKPFTLYVDERAGVARGVLTQTLGPWRRPVAYLSKKLDPVASGWPTCLKAVAAVALLLKDADKLTLGQNVTVIASHSLESIVRQPPDRWMTNARMTHYQSLLLNERVSFAPPAVLNPATLLPVESEATPVHRCSEILAEETGTRRDLKDQPLPGVPAWYTDGSSFIAEGKRRAGAAIVDGKRTVWASSLPEGTSAQKAELVALTQALRLAEGKDINIYTDSRYAFATAHIHGAIYKQRGWLTSAGKDIKNKEEILALLEAIHLPKRVAIIHCPGHQKGNDPVATGNRRADEAAKQAALSTRVLAETTKPAGKRTADGSEFEKRTADGSEFESPKKKAKVE

SEQ ID NO: 859 - protein, 2089 aa, synthetic construct
MPAAKRVKLDGGDKKYSIGLDIGTNSVGWAVITDEYKVPSKKFKVLGNTDRHSIKKNLIGALLFDSGETAEATRLKRTARRRYTRRKNRICYLQEIFSNEMAKVDDSFFHRLEESFLVEEDKKHERHPIFGNIVDEVAYHEKYPTIYHLRKKLVDSTDKADLRLIYLALAHMIKFRGHFLIEGDLNPDNSDVDKLFIQLVQTYNQLFEENPINASGVDAKAILSARLSKSRRLENLIAQLPGEKKNGLFGNLIALSLGLTPNFKSNFDLAEDAKLQLSKDTYDDDLDNLLAQIGDQYADLFLAAKNLSDAILLSDILRVNTEITKAPLSASMIKRYDEHHQDLTLLKALVRQQLPEKYKEIFFDQSKNGYAGYIDGGASQEEFYKFIKPILEKMDGTEELLVKLNREDLLRKQRTFDNGSIPHQIHLGELHAILRRQEDFYPFLKDNREKIEKILTFRIPYYVGPLARGNSRFAWMTRKSEETITPWNFEEVVDKGASAQSFIERMTNFDKNLPNEKVLPKHSLLYEYFTVYNELTKVKYVTEGMRKPAFLSGEQKKAIVDLLFKTNRKVTVKQLKEDYFKKIECFDSVEISGVEDRFNASLGTYHDLLKIIKDKDFLDNEENEDILEDIVLTLTLFEDREMIEERLKTYAHLFDDKVMKQLKRRRYTGWGRLSRKLINGIRDKQSGKTILDFLKSDGFANRNFMQLIHDDSLTFKEDIQKAQVSGQGDSLHEHIANLAGSPAIKKGILQTVKVVDELVKVMGRHKPENIVIEMARENQTTQKGQKNSRERMKRIEEGIKELGSQILKEHPVENTQLQNEKLYLYYLQNGRDMYVDQELDINRLSDYDVDHIVPQSFLKDDSIDNKVLTRSDKARGKSDNVPSEEVVKKMKNYWRQLLNAKLITQRKFDNLTKAERGGLSELDKAGFIKRQLVETRQITKHVAQILDSRMNTKYDENDKLIREVKVITLKSKLVSDFRKDFQFYKVREINNYHHAHDAYLNAVVGTALIKKYPKLESEFVYGDYKVYDVRKMIAKSEQEIGKATAKYFFYSNIMNFFKTEITLANGEIRKRPLIETNGETGEIVWDKGRDFATVRKVLSMPQVNIVKKTEVQTGGFSKESILPKRNSDKLIARKKDWDPKKYGGFDSPTVAYSVLVVAKVEKGKSKKLKSVKELLGITIMERSSFEKNPIDFLEAKGYKEVKKDLIIKLPKYSLFELENGRKRMLASAGELQKGNELALPSKYVNFLYLASHYEKLKGSPEDNEQKQLFVEQHKHYLDEIIEQISEFSKRVILADANLDKVLSAYNKHRDKPIREQAENIIHLFTLTNLGAPAAFKYFDTTIDRKRYTSTKEVLDATLIHQSITGLYETRIDLSQLGGDGGPAPGSSGGVLNLEEEYRLHEKPVPSSIDPSWLQLFPTVWAERAGMGLANQVPPVVVELRSGASPVAVRQYPMSKEAREGIRPHIQRFLDLGVLVPCQSPWNTPLLPVKKPGTNDYRPVQDLREINKRVQDIHPTVPNPYNLLSSLPPSHTWYSVLDLKDAFFCLKLHPNSQPLFAFEWRDPEKGNTGQLTWTRLPQGFKNSPTLFNEALHRDLAPFRALNPQVVLLQYVDDLLVAAPTYRDCKEGTQKLLQELSKLGYRVSAKKAQLCQKEVTYLGYLLKEGKRWLTPARKATVMKIPPPTTPRQVREFLGTAGFCRLWIPGFASLAAPLYPLTKPSIPFIWTEEHQKAFDRIKEALLSAPALALPDLTKPFTLYVDERAGVARGVLTQTLGPWRRPVAYLSKKLDPVASGWPTCLKAVAAVALLLKDADKLTLGQNVTVIASHSLESIVRQPPDRWMTNARMTHYQSLLLNERVSFAPPAVLNPATLLPVESEATPVHRCSEILAEETGTRRDLKDQPLPGVPAWYTDGSSFIAEGKRRAGAAIVDGKRTVWASSLPEGTSAQKAELVALTQALRLAEGKDINIYTDSRYAFATAHIHGAIYKQRGWLTSAGKDIKNKEEILALLEAIHLPKRVAIIHCPGHQKGNDPVATGNRRADEAAKQAALSTRVLAETTKPAGKRTADGSEFEKRTADGSEFESPKKKAKVE

SEQ ID NO: 860 - protein, 2090 aa, synthetic construct
MPAAKRVKLDGGDKKYSIGLDIGTNSVGWAVITDEYKVPSKKFKVLGNTDRHSIKKNLIGALLFDSGETAEATRLKRTARRRYTRRKNRICYLQEIFSNEMAKVDDSFFHRLEESFLVEEDKKHERHPIFGNIVDEVAYHEKYPTIYHLRKKLVDSTDKADLRLIYLALAHMIKFRGHFLIEGDLNPDNSDVDKLFIQLVQTYNQLFEENPINASGVDAKAILSARLSKSRRLENLIAQLPGEKKNGLFGNLIALSLGLTPNFKSNFDLAEDAKLQLSKDTYDDDLDNLLAQIGDQYADLFLAAKNLSDAILLSDILRVNTEITKAPLSASMIKRYDEHHQDLTLLKALVRQQLPEKYKEIFFDQSKNGYAGYIDGGASQEEFYKFIKPILEKMDGTEELLVKLNREDLLRKQRTFDNGSIPHQIHLGELHAILRRQEDFYPFLKDNREKIEKILTFRIPYYVGPLARGNSRFAWMTRKSEETITPWNFEEVVDKGASAQSFIERMTNFDKNLPNEKVLPKHSLLYEYFTVYNELTKVKYVTEGMRKPAFLSGEQKKAIVDLLFKTNRKVTVKQLKEDYFKKIECFDSVEISGVEDRFNASLGTYHDLLKIIKDKDFLDNEENEDILEDIVLTLTLFEDREMIEERLKTYAHLFDDKVMKQLKRRRYTGWGRLSRKLINGIRDKQSGKTILDFLKSDGFANRNFMQLIHDDSLTFKEDIQKAQVSGQGDSLHEHIANLAGSPAIKKGILQTVKVVDELVKVMGRHKPENIVIEMARENQTTQKGQKNSRERMKRIEEGIKELGSQILKEHPVENTQLQNEKLYLYYLQNGRDMYVDQELDINRLSDYDVDHIVPQSFLKDDSIDNKVLTRSDKARGKSDNVPSEEVVKKMKNYWRQLLNAKLITQRKFDNLTKAERGGLSELDKAGFIKRQLVETRQITKHVAQILDSRMNTKYDENDKLIREVKVITLKSKLVSDFRKDFQFYKVREINNYHHAHDAYLNAVVGTALIKKYPKLESEFVYGDYKVYDVRKMIAKSEQEIGKATAKYFFYSNIMNFFKTEITLANGEIRKRPLIETNGETGEIVWDKGRDFATVRKVLSMPQVNIVKKTEVQTGGFSKESILPKRNSDKLIARKKDWDPKKYGGFDSPTVAYSVLVVAKVEKGKSKKLKSVKELLGITIMERSSFEKNPIDFLEAKGYKEVKKDLIIKLPKYSLFELENGRKRMLASAGELQKGNELALPSKYVNFLYLASHYEKLKGSPEDNEQKQLFVEQHKHYLDEIIEQISEFSKRVILADANLDKVLSAYNKHRDKPIREQAENIIHLFTLTNLGAPAAFKYFDTTIDRKRYTSTKEVLDATLIHQSITGLYETRIDLSQLGGDGGPAPAPAPGGVLNLEEEYRLHEKPVPSSIDPSWLQLFPTVWAERAGMGLANQVPPVVVELRSGASPVAVRQYPMSKEAREGIRPHIQRFLDLGVLVPCQSPWNTPLLPVKKPGTNDYRPVQDLREINKRVQDIHPTVPNPYNLLSSLPPSHTWYSVLDLKDAFFCLKLHPNSQPLFAFEWRDPEKGNTGQLTWTRLPQGFKNSPTLFNEALHRDLAPFRALNPQVVLLQYVDDLLVAAPTYRDCKEGTQKLLQELSKLGYRVSAKKAQLCQKEVTYLGYLLKEGKRWLTPARKATVMKIPPPTTPRQVREFLGTAGFCRLWIPGFASLAAPLYPLTKPSIPFIWTEEHQKAFDRIKEALLSAPALALPDLTKPFTLYVDERAGVARGVLTQTLGPWRRPVAYLSKKLDPVASGWPTCLKAVAAVALLLKDADKLTLGQNVTVIASHSLESIVRQPPDRWMTNARMTHYQSLLLNERVSFAPPAVLNPATLLPVESEATPVHRCSEILAEETGTRRDLKDQPLPGVPAWYTDGSSFIAEGKRRAGAAIVDGKRTVWASSLPEGTSAQKAELVALTQALRLAEGKDINIYTDSRYAFATAHIHGAIYKQRGWLTSAGKDIKNKEEILALLEAIHLPKRVAIIHCPGHQKGNDPVATGNRRADEAAKQAALSTRVLAETTKPAGKRTADGSEFEKRTADGSEFESPKKKAKVE

SEQ ID NO: 861 - protein, 2094 aa, synthetic construct
MPAAKRVKLDGGDKKYSIGLDIGTNSVGWAVITDEYKVPSKKFKVLGNTDRHSIKKNLIGALLFDSGETAEATRLKRTARRRYTRRKNRICYLQEIFSNEMAKVDDSFFHRLEESFLVEEDKKHERHPIFGNIVDEVAYHEKYPTIYHLRKKLVDSTDKADLRLIYLALAHMIKFRGHFLIEGDLNPDNSDVDKLFIQLVQTYNQLFEENPINASGVDAKAILSARLSKSRRLENLIAQLPGEKKNGLFGNLIALSLGLTPNFKSNFDLAEDAKLQLSKDTYDDDLDNLLAQIGDQYADLFLAAKNLSDAILLSDILRVNTEITKAPLSASMIKRYDEHHQDLTLLKALVRQQLPEKYKEIFFDQSKNGYAGYIDGGASQEEFYKFIKPILEKMDGTEELLVKLNREDLLRKQRTFDNGSIPHQIHLGELHAILRRQEDFYPFLKDNREKIEKILTFRIPYYVGPLARGNSRFAWMTRKSEETITPWNFEEVVDKGASAQSFIERMTNFDKNLPNEKVLPKHSLLYEYFTVYNELTKVKYVTEGMRKPAFLSGEQKKAIVDLLFKTNRKVTVKQLKEDYFKKIECFDSVEISGVEDRFNASLGTYHDLLKIIKDKDFLDNEENEDILEDIVLTLTLFEDREMIEERLKTYAHLFDDKVMKQLKRRRYTGWGRLSRKLINGIRDKQSGKTILDFLKSDGFANRNFMQLIHDDSLTFKEDIQKAQVSGQGDSLHEHIANLAGSPAIKKGILQTVKVVDELVKVMGRHKPENIVIEMARENQTTQKGQKNSRERMKRIEEGIKELGSQILKEHPVENTQLQNEKLYLYYLQNGRDMYVDQELDINRLSDYDVDHIVPQSFLKDDSIDNKVLTRSDKARGKSDNVPSEEVVKKMKNYWRQLLNAKLITQRKFDNLTKAERGGLSELDKAGFIKRQLVETRQITKHVAQILDSRMNTKYDENDKLIREVKVITLKSKLVSDFRKDFQFYKVREINNYHHAHDAYLNAVVGTALIKKYPKLESEFVYGDYKVYDVRKMIAKSEQEIGKATAKYFFYSNIMNFFKTEITLANGEIRKRPLIETNGETGEIVWDKGRDFATVRKVLSMPQVNIVKKTEVQTGGFSKESILPKRNSDKLIARKKDWDPKKYGGFDSPTVAYSVLVVAKVEKGKSKKLKSVKELLGITIMERSSFEKNPIDFLEAKGYKEVKKDLIIKLPKYSLFELENGRKRMLASAGELQKGNELALPSKYVNFLYLASHYEKLKGSPEDNEQKQLFVEQHKHYLDEIIEQISEFSKRVILADANLDKVLSAYNKHRDKPIREQAENIIHLFTLTNLGAPAAFKYFDTTIDRKRYTSTKEVLDATLIHQSITGLYETRIDLSQLGGDGGGGSGGGEAAAKGGVLNLEEEYRLHEKPVPSSIDPSWLQLFPTVWAERAGMGLANQVPPVVVELRSGASPVAVRQYPMSKEAREGIRPHIQRFLDLGVLVPCQSPWNTPLLPVKKPGTNDYRPVQDLREINKRVQDIHPTVPNPYNLLSSLPPSHTWYSVLDLKDAFFCLKLHPNSQPLFAFEWRDPEKGNTGQLTWTRLPQGFKNSPTLFNEALHRDLAPFRALNPQVVLLQYVDDLLVAAPTYRDCKEGTQKLLQELSKLGYRVSAKKAQLCQKEVTYLGYLLKEGKRWLTPARKATVMKIPPPTTPRQVREFLGTAGFCRLWIPGFASLAAPLYPLTKPSIPFIWTEEHQKAFDRIKEALLSAPALALPDLTKPFTLYVDERAGVARGVLTQTLGPWRRPVAYLSKKLDPVASGWPTCLKAVAAVALLLKDADKLTLGQNVTVIASHSLESIVRQPPDRWMTNARMTHYQSLLLNERVSFAPPAVLNPATLLPVESEATPVHRCSEILAEETGTRRDLKDQPLPGVPAWYTDGSSFIAEGKRRAGAAIVDGKRTVWASSLPEGTSAQKAELVALTQALRLAEGKDINIYTDSRYAFATAHIHGAIYKQRGWLTSAGKDIKNKEEILALLEAIHLPKRVAIIHCPGHQKGNDPVATGNRRADEAAKQAALSTRVLAETTKPAGKRTADGSEFEKRTADGSEFESPKKKAKVE

SEQ ID NO: 862 - protein, 2095 aa, synthetic construct
MPAAKRVKLDGGDKKYSIGLDIGTNSVGWAVITDEYKVPSKKFKVLGNTDRHSIKKNLIGALLFDSGETAEATRLKRTARRRYTRRKNRICYLQEIFSNEMAKVDDSFFHRLEESFLVEEDKKHERHPIFGNIVDEVAYHEKYPTIYHLRKKLVDSTDKADLRLIYLALAHMIKFRGHFLIEGDLNPDNSDVDKLFIQLVQTYNQLFEENPINASGVDAKAILSARLSKSRRLENLIAQLPGEKKNGLFGNLIALSLGLTPNFKSNFDLAEDAKLQLSKDTYDDDLDNLLAQIGDQYADLFLAAKNLSDAILLSDILRVNTEITKAPLSASMIKRYDEHHQDLTLLKALVRQQLPEKYKEIFFDQSKNGYAGYIDGGASQEEFYKFIKPILEKMDGTEELLVKLNREDLLRKQRTFDNGSIPHQIHLGELHAILRRQEDFYPFLKDNREKIEKILTFRIPYYVGPLARGNSRFAWMTRKSEETITPWNFEEVVDKGASAQSFIERMTNFDKNLPNEKVLPKHSLLYEYFTVYNELTKVKYVTEGMRKPAFLSGEQKKAIVDLLFKTNRKVTVKQLKEDYFKKIECFDSVEISGVEDRFNASLGTYHDLLKIIKDKDFLDNEENEDILEDIVLTLTLFEDREMIEERLKTYAHLFDDKVMKQLKRRRYTGWGRLSRKLINGIRDKQSGKTILDFLKSDGFANRNFMQLIHDDSLTFKEDIQKAQVSGQGDSLHEHIANLAGSPAIKKGILQTVKVVDELVKVMGRHKPENIVIEMARENQTTQKGQKNSRERMKRIEEGIKELGSQILKEHPVENTQLQNEKLYLYYLQNGRDMYVDQELDINRLSDYDVDHIVPQSFLKDDSIDNKVLTRSDKARGKSDNVPSEEVVKKMKNYWRQLLNAKLITQRKFDNLTKAERGGLSELDKAGFIKRQLVETRQITKHVAQILDSRMNTKYDENDKLIREVKVITLKSKLVSDFRKDFQFYKVREINNYHHAHDAYLNAVVGTALIKKYPKLESEFVYGDYKVYDVRKMIAKSEQEIGKATAKYFFYSNIMNFFKTEITLANGEIRKRPLIETNGETGEIVWDKGRDFATVRKVLSMPQVNIVKKTEVQTGGFSKESILPKRNSDKLIARKKDWDPKKYGGFDSPTVAYSVLVVAKVEKGKSKKLKSVKELLGITIMERSSFEKNPIDFLEAKGYKEVKKDLIIKLPKYSLFELENGRKRMLASAGELQKGNELALPSKYVNFLYLASHYEKLKGSPEDNEQKQLFVEQHKHYLDEIIEQISEFSKRVILADANLDKVLSAYNKHRDKPIREQAENIIHLFTLTNLGAPAAFKYFDTTIDRKRYTSTKEVLDATLIHQSITGLYETRIDLSQLGGDGGGSAGSAAGSGEFGGVLNLEEEYRLHEKPVPSSIDPSWLQLFPTVWAERAGMGLANQVPPVVVELRSGASPVAVRQYPMSKEAREGIRPHIQRFLDLGVLVPCQSPWNTPLLPVKKPGTNDYRPVQDLREINKRVQDIHPTVPNPYNLLSSLPPSHTWYSVLDLKDAFFCLKLHPNSQPLFAFEWRDPEKGNTGQLTWTRLPQGFKNSPTLFNEALHRDLAPFRALNPQVVLLQYVDDLLVAAPTYRDCKEGTQKLLQELSKLGYRVSAKKAQLCQKEVTYLGYLLKEGKRWLTPARKATVMKIPPPTTPRQVREFLGTAGFCRLWIPGFASLAAPLYPLTKPSIPFIWTEEHQKAFDRIKEALLSAPALALPDLTKPFTLYVDERAGVARGVLTQTLGPWRRPVAYLSKKLDPVASGWPTCLKAVAAVALLLKDADKLTLGQNVTVIASHSLESIVRQPPDRWMTNARMTHYQSLLLNERVSFAPPAVLNPATLLPVESEATPVHRCSEILAEETGTRRDLKDQPLPGVPAWYTDGSSFIAEGKRRAGAAIVDGKRTVWASSLPEGTSAQKAELVALTQALRLAEGKDINIYTDSRYAFATAHIHGAIYKQRGWLTSAGKDIKNKEEILALLEAIHLPKRVAIIHCPGHQKGNDPVATGNRRADEAAKQAALSTRVLAETTKPAGKRTADGSEFEKRTADGSEFESPKKKAKVE

SEQ ID NO: 863 - protein, 2094 aa, synthetic construct
MPAAKRVKLDGGDKKYSIGLDIGTNSVGWAVITDEYKVPSKKFKVLGNTDRHSIKKNLIGALLFDSGETAEATRLKRTARRRYTRRKNRICYLQEIFSNEMAKVDDSFFHRLEESFLVEEDKKHERHPIFGNIVDEVAYHEKYPTIYHLRKKLVDSTDKADLRLIYLALAHMIKFRGHFLIEGDLNPDNSDVDKLFIQLVQTYNQLFEENPINASGVDAKAILSARLSKSRRLENLIAQLPGEKKNGLFGNLIALSLGLTPNFKSNFDLAEDAKLQLSKDTYDDDLDNLLAQIGDQYADLFLAAKNLSDAILLSDILRVNTEITKAPLSASMIKRYDEHHQDLTLLKALVRQQLPEKYKEIFFDQSKNGYAGYIDGGASQEEFYKFIKPILEKMDGTEELLVKLNREDLLRKQRTFDNGSIPHQIHLGELHAILRRQEDFYPFLKDNREKIEKILTFRIPYYVGPLARGNSRFAWMTRKSEETITPWNFEEVVDKGASAQSFIERMTNFDKNLPNEKVLPKHSLLYEYFTVYNELTKVKYVTEGMRKPAFLSGEQKKAIVDLLFKTNRKVTVKQLKEDYFKKIECFDSVEISGVEDRFNASLGTYHDLLKIIKDKDFLDNEENEDILEDIVLTLTLFEDREMIEERLKTYAHLFDDKVMKQLKRRRYTGWGRLSRKLINGIRDKQSGKTILDFLKSDGFANRNFMQLIHDDSLTFKEDIQKAQVSGQGDSLHEHIANLAGSPAIKKGILQTVKVVDELVKVMGRHKPENIVIEMARENQTTQKGQKNSRERMKRIEEGIKELGSQILKEHPVENTQLQNEKLYLYYLQNGRDMYVDQELDINRLSDYDVDHIVPQSFLKDDSIDNKVLTRSDKARGKSDNVPSEEVVKKMKNYWRQLLNAKLITQRKFDNLTKAERGGLSELDKAGFIKRQLVETRQITKHVAQILDSRMNTKYDENDKLIREVKVITLKSKLVSDFRKDFQFYKVREINNYHHAHDAYLNAVVGTALIKKYPKLESEFVYGDYKVYDVRKMIAKSEQEIGKATAKYFFYSNIMNFFKTEITLANGEIRKRPLIETNGETGEIVWDKGRDFATVRKVLSMPQVNIVKKTEVQTGGFSKESILPKRNSDKLIARKKDWDPKKYGGFDSPTVAYSVLVVAKVEKGKSKKLKSVKELLGITIMERSSFEKNPIDFLEAKGYKEVKKDLIIKLPKYSLFELENGRKRMLASAGELQKGNELALPSKYVNFLYLASHYEKLKGSPEDNEQKQLFVEQHKHYLDEIIEQISEFSKRVILADANLDKVLSAYNKHRDKPIREQAENIIHLFTLTNLGAPAAFKYFDTTIDRKRYTSTKEVLDATLIHQSITGLYETRIDLSQLGGDGGPAPEAAAKGGSGGVLNLEEEYRLHEKPVPSSIDPSWLQLFPTVWAERAGMGLANQVPPVVVELRSGASPVAVRQYPMSKEAREGIRPHIQRFLDLGVLVPCQSPWNTPLLPVKKPGTNDYRPVQDLREINKRVQDIHPTVPNPYNLLSSLPPSHTWYSVLDLKDAFFCLKLHPNSQPLFAFEWRDPEKGNTGQLTWTRLPQGFKNSPTLFNEALHRDLAPFRALNPQVVLLQYVDDLLVAAPTYRDCKEGTQKLLQELSKLGYRVSAKKAQLCQKEVTYLGYLLKEGKRWLTPARKATVMKIPPPTTPRQVREFLGTAGFCRLWIPGFASLAAPLYPLTKPSIPFIWTEEHQKAFDRIKEALLSAPALALPDLTKPFTLYVDERAGVARGVLTQTLGPWRRPVAYLSKKLDPVASGWPTCLKAVAAVALLLKDADKLTLGQNVTVIASHSLESIVRQPPDRWMTNARMTHYQSLLLNERVSFAPPAVLNPATLLPVESEATPVHRCSEILAEETGTRRDLKDQPLPGVPAWYTDGSSFIAEGKRRAGAAIVDGKRTVWASSLPEGTSAQKAELVALTQALRLAEGKDINIYTDSRYAFATAHIHGAIYKQRGWLTSAGKDIKNKEEILALLEAIHLPKRVAIIHCPGHQKGNDPVATGNRRADEAAKQAALSTRVLAETTKPAGKRTADGSEFEKRTADGSEFESPKKKAKVE

SEQ ID NO: 864 - protein, 2092 aa, synthetic construct
MPAAKRVKLDGGDKKYSIGLDIGTNSVGWAVITDEYKVPSKKFKVLGNTDRHSIKKNLIGALLFDSGETAEATRLKRTARRRYTRRKNRICYLQEIFSNEMAKVDDSFFHRLEESFLVEEDKKHERHPIFGNIVDEVAYHEKYPTIYHLRKKLVDSTDKADLRLIYLALAHMIKFRGHFLIEGDLNPDNSDVDKLFIQLVQTYNQLFEENPINASGVDAKAILSARLSKSRRLENLIAQLPGEKKNGLFGNLIALSLGLTPNFKSNFDLAEDAKLQLSKDTYDDDLDNLLAQIGDQYADLFLAAKNLSDAILLSDILRVNTEITKAPLSASMIKRYDEHHQDLTLLKALVRQQLPEKYKEIFFDQSKNGYAGYIDGGASQEEFYKFIKPILEKMDGTEELLVKLNREDLLRKQRTFDNGSIPHQIHLGELHAILRRQEDFYPFLKDNREKIEKILTFRIPYYVGPLARGNSRFAWMTRKSEETITPWNFEEVVDKGASAQSFIERMTNFDKNLPNEKVLPKHSLLYEYFTVYNELTKVKYVTEGMRKPAFLSGEQKKAIVDLLFKTNRKVTVKQLKEDYFKKIECFDSVEISGVEDRFNASLGTYHDLLKIIKDKDFLDNEENEDILEDIVLTLTLFEDREMIEERLKTYAHLFDDKVMKQLKRRRYTGWGRLSRKLINGIRDKQSGKTILDFLKSDGFANRNFMQLIHDDSLTFKEDIQKAQVSGQGDSLHEHIANLAGSPAIKKGILQTVKVVDELVKVMGRHKPENIVIEMARENQTTQKGQKNSRERMKRIEEGIKELGSQILKEHPVENTQLQNEKLYLYYLQNGRDMYVDQELDINRLSDYDVDHIVPQSFLKDDSIDNKVLTRSDKARGKSDNVPSEEVVKKMKNYWRQLLNAKLITQRKFDNLTKAERGGLSELDKAGFIKRQLVETRQITKHVAQILDSRMNTKYDENDKLIREVKVITLKSKLVSDFRKDFQFYKVREINNYHHAHDAYLNAVVGTALIKKYPKLESEFVYGDYKVYDVRKMIAKSEQEIGKATAKYFFYSNIMNFFKTEITLANGEIRKRPLIETNGETGEIVWDKGRDFATVRKVLSMPQVNIVKKTEVQTGGFSKESILPKRNSDKLIARKKDWDPKKYGGFDSPTVAYSVLVVAKVEKGKSKKLKSVKELLGITIMERSSFEKNPIDFLEAKGYKEVKKDLIIKLPKYSLFELENGRKRMLASAGELQKGNELALPSKYVNFLYLASHYEKLKGSPEDNEQKQLFVEQHKHYLDEIIEQISEFSKRVILADANLDKVLSAYNKHRDKPIREQAENIIHLFTLTNLGAPAAFKYFDTTIDRKRYTSTKEVLDATLIHQSITGLYETRIDLSQLGGDGGPAPGSSGGGGGVLNLEEEYRLHEKPVPSSIDPSWLQLFPTVWAERAGMGLANQVPPVVVELRSGASPVAVRQYPMSKEAREGIRPHIQRFLDLGVLVPCQSPWNTPLLPVKKPGTNDYRPVQDLREINKRVQDIHPTVPNPYNLLSSLPPSHTWYSVLDLKDAFFCLKLHPNSQPLFAFEWRDPEKGNTGQLTWTRLPQGFKNSPTLFNEALHRDLAPFRALNPQVVLLQYVDDLLVAAPTYRDCKEGTQKLLQELSKLGYRVSAKKAQLCQKEVTYLGYLLKEGKRWLTPARKATVMKIPPPTTPRQVREFLGTAGFCRLWIPGFASLAAPLYPLTKPSIPFIWTEEHQKAFDRIKEALLSAPALALPDLTKPFTLYVDERAGVARGVLTQTLGPWRRPVAYLSKKLDPVASGWPTCLKAVAAVALLLKDADKLTLGQNVTVIASHSLESIVRQPPDRWMTNARMTHYQSLLLNERVSFAPPAVLNPATLLPVESEATPVHRCSEILAEETGTRRDLKDQPLPGVPAWYTDGSSFIAEGKRRAGAAIVDGKRTVWASSLPEGTSAQKAELVALTQALRLAEGKDINIYTDSRYAFATAHIHGAIYKQRGWLTSAGKDIKNKEEILALLEAIHLPKRVAIIHCPGHQKGNDPVATGNRRADEAAKQAALSTRVLAETTKPAGKRTADGSEFEKRTADGSEFESPKKKAKVE

SEQ ID NO: 865 - protein, 2092 aa, synthetic construct
MPAAKRVKLDGGDKKYSIGLDIGTNSVGWAVITDEYKVPSKKFKVLGNTDRHSIKKNLIGALLFDSGETAEATRLKRTARRRYTRRKNRICYLQEIFSNEMAKVDDSFFHRLEESFLVEEDKKHERHPIFGNIVDEVAYHEKYPTIYHLRKKLVDSTDKADLRLIYLALAHMIKFRGHFLIEGDLNPDNSDVDKLFIQLVQTYNQLFEENPINASGVDAKAILSARLSKSRRLENLIAQLPGEKKNGLFGNLIALSLGLTPNFKSNFDLAEDAKLQLSKDTYDDDLDNLLAQIGDQYADLFLAAKNLSDAILLSDILRVNTEITKAPLSASMIKRYDEHHQDLTLLKALVRQQLPEKYKEIFFDQSKNGYAGYIDGGASQEEFYKFIKPILEKMDGTEELLVKLNREDLLRKQRTFDNGSIPHQIHLGELHAILRRQEDFYPFLKDNREKIEKILTFRIPYYVGPLARGNSRFAWMTRKSEETITPWNFEEVVDKGASAQSFIERMTNFDKNLPNEKVLPKHSLLYEYFTVYNELTKVKYVTEGMRKPAFLSGEQKKAIVDLLFKTNRKVTVKQLKEDYFKKIECFDSVEISGVEDRFNASLGTYHDLLKIIKDKDFLDNEENEDILEDIVLTLTLFEDREMIEERLKTYAHLFDDKVMKQLKRRRYTGWGRLSRKLINGIRDKQSGKTILDFLKSDGFANRNFMQLIHDDSLTFKEDIQKAQVSGQGDSLHEHIANLAGSPAIKKGILQTVKVVDELVKVMGRHKPENIVIEMARENQTTQKGQKNSRERMKRIEEGIKELGSQILKEHPVENTQLQNEKLYLYYLQNGRDMYVDQELDINRLSDYDVDHIVPQSFLKDDSIDNKVLTRSDKARGKSDNVPSEEVVKKMKNYWRQLLNAKLITQRKFDNLTKAERGGLSELDKAGFIKRQLVETRQITKHVAQILDSRMNTKYDENDKLIREVKVITLKSKLVSDFRKDFQFYKVREINNYHHAHDAYLNAVVGTALIKKYPKLESEFVYGDYKVYDVRKMIAKSEQEIGKATAKYFFYSNIMNFFKTEITLANGEIRKRPLIETNGETGEIVWDKGRDFATVRKVLSMPQVNIVKKTEVQTGGFSKESILPKRNSDKLIARKKDWDPKKYGGFDSPTVAYSVLVVAKVEKGKSKKLKSVKELLGITIMERSSFEKNPIDFLEAKGYKEVKKDLIIKLPKYSLFELENGRKRMLASAGELQKGNELALPSKYVNFLYLASHYEKLKGSPEDNEQKQLFVEQHKHYLDEIIEQISEFSKRVILADANLDKVLSAYNKHRDKPIREQAENIIHLFTLTNLGAPAAFKYFDTTIDRKRYTSTKEVLDATLIHQSITGLYETRIDLSQLGGDGGGGSGSSGGGGGVLNLEEEYRLHEKPVPSSIDPSWLQLFPTVWAERAGMGLANQVPPVVVELRSGASPVAVRQYPMSKEAREGIRPHIQRFLDLGVLVPCQSPWNTPLLPVKKPGTNDYRPVQDLREINKRVQDIHPTVPNPYNLLSSLPPSHTWYSVLDLKDAFFCLKLHPNSQPLFAFEWRDPEKGNTGQLTWTRLPQGFKNSPTLFNEALHRDLAPFRALNPQVVLLQYVDDLLVAAPTYRDCKEGTQKLLQELSKLGYRVSAKKAQLCQKEVTYLGYLLKEGKRWLTPARKATVMKIPPPTTPRQVREFLGTAGFCRLWIPGFASLAAPLYPLTKPSIPFIWTEEHQKAFDRIKEALLSAPALALPDLTKPFTLYVDERAGVARGVLTQTLGPWRRPVAYLSKKLDPVASGWPTCLKAVAAVALLLKDADKLTLGQNVTVIASHSLESIVRQPPDRWMTNARMTHYQSLLLNERVSFAPPAVLNPATLLPVESEATPVHRCSEILAEETGTRRDLKDQPLPGVPAWYTDGSSFIAEGKRRAGAAIVDGKRTVWASSLPEGTSAQKAELVALTQALRLAEGKDINIYTDSRYAFATAHIHGAIYKQRGWLTSAGKDIKNKEEILALLEAIHLPKRVAIIHCPGHQKGNDPVATGNRRADEAAKQAALSTRVLAETTKPAGKRTADGSEFEKRTADGSEFESPKKKAKVE

SEQ ID NO: 866 - protein, 2094 aa, synthetic construct
MPAAKRVKLDGGDKKYSIGLDIGTNSVGWAVITDEYKVPSKKFKVLGNTDRHSIKKNLIGALLFDSGETAEATRLKRTARRRYTRRKNRICYLQEIFSNEMAKVDDSFFHRLEESFLVEEDKKHERHPIFGNIVDEVAYHEKYPTIYHLRKKLVDSTDKADLRLIYLALAHMIKFRGHFLIEGDLNPDNSDVDKLFIQLVQTYNQLFEENPINASGVDAKAILSARLSKSRRLENLIAQLPGEKKNGLFGNLIALSLGLTPNFKSNFDLAEDAKLQLSKDTYDDDLDNLLAQIGDQYADLFLAAKNLSDAILLSDILRVNTEITKAPLSASMIKRYDEHHQDLTLLKALVRQQLPEKYKEIFFDQSKNGYAGYIDGGASQEEFYKFIKPILEKMDGTEELLVKLNREDLLRKQRTFDNGSIPHQIHLGELHAILRRQEDFYPFLKDNREKIEKILTFRIPYYVGPLARGNSRFAWMTRKSEETITPWNFEEVVDKGASAQSFIERMTNFDKNLPNEKVLPKHSLLYEYFTVYNELTKVKYVTEGMRKPAFLSGEQKKAIVDLLFKTNRKVTVKQLKEDYFKKIECFDSVEISGVEDRFNASLGTYHDLLKIIKDKDFLDNEENEDILEDIVLTLTLFEDREMIEERLKTYAHLFDDKVMKQLKRRRYTGWGRLSRKLINGIRDKQSGKTILDFLKSDGFANRNFMQLIHDDSLTFKEDIQKAQVSGQGDSLHEHIANLAGSPAIKKGILQTVKVVDELVKVMGRHKPENIVIEMARENQTTQKGQKNSRERMKRIEEGIKELGSQILKEHPVENTQLQNEKLYLYYLQNGRDMYVDQELDINRLSDYDVDHIVPQSFLKDDSIDNKVLTRSDKARGKSDNVPSEEVVKKMKNYWRQLLNAKLITQRKFDNLTKAERGGLSELDKAGFIKRQLVETRQITKHVAQILDSRMNTKYDENDKLIREVKVITLKSKLVSDFRKDFQFYKVREINNYHHAHDAYLNAVVGTALIKKYPKLESEFVYGDYKVYDVRKMIAKSEQEIGKATAKYFFYSNIMNFFKTEITLANGEIRKRPLIETNGETGEIVWDKGRDFATVRKVLSMPQVNIVKKTEVQTGGFSKESILPKRNSDKLIARKKDWDPKKYGGFDSPTVAYSVLVVAKVEKGKSKKLKSVKELLGITIMERSSFEKNPIDFLEAKGYKEVKKDLIIKLPKYSLFELENGRKRMLASAGELQKGNELALPSKYVNFLYLASHYEKLKGSPEDNEQKQLFVEQHKHYLDEIIEQISEFSKRVILADANLDKVLSAYNKHRDKPIREQAENIIHLFTLTNLGAPAAFKYFDTTIDRKRYTSTKEVLDATLIHQSITGLYETRIDLSQLGGDGGPAPEAAAKGGGGGVLNLEEEYRLHEKPVPSSIDPSWLQLFPTVWAERAGMGLANQVPPVVVELRSGASPVAVRQYPMSKEAREGIRPHIQRFLDLGVLVPCQSPWNTPLLPVKKPGTNDYRPVQDLREINKRVQDIHPTVPNPYNLLSSLPPSHTWYSVLDLKDAFFCLKLHPNSQPLFAFEWRDPEKGNTGQLTWTRLPQGFKNSPTLFNEALHRDLAPFRALNPQVVLLQYVDDLLVAAPTYRDCKEGTQKLLQELSKLGYRVSAKKAQLCQKEVTYLGYLLKEGKRWLTPARKATVMKIPPPTTPRQVREFLGTAGFCRLWIPGFASLAAPLYPLTKPSIPFIWTEEHQKAFDRIKEALLSAPALALPDLTKPFTLYVDERAGVARGVLTQTLGPWRRPVAYLSKKLDPVASGWPTCLKAVAAVALLLKDADKLTLGQNVTVIASHSLESIVRQPPDRWMTNARMTHYQSLLLNERVSFAPPAVLNPATLLPVESEATPVHRCSEILAEETGTRRDLKDQPLPGVPAWYTDGSSFIAEGKRRAGAAIVDGKRTVWASSLPEGTSAQKAELVALTQALRLAEGKDINIYTDSRYAFATAHIHGAIYKQRGWLTSAGKDIKNKEEILALLEAIHLPKRVAIIHCPGHQKGNDPVATGNRRADEAAKQAALSTRVLAETTKPAGKRTADGSEFEKRTADGSEFESPKKKAKVE

SEQ ID NO: 867 - protein, 2089 aa, synthetic construct
MPAAKRVKLDGGDKKYSIGLDIGTNSVGWAVITDEYKVPSKKFKVLGNTDRHSIKKNLIGALLFDSGETAEATRLKRTARRRYTRRKNRICYLQEIFSNEMAKVDDSFFHRLEESFLVEEDKKHERHPIFGNIVDEVAYHEKYPTIYHLRKKLVDSTDKADLRLIYLALAHMIKFRGHFLIEGDLNPDNSDVDKLFIQLVQTYNQLFEENPINASGVDAKAILSARLSKSRRLENLIAQLPGEKKNGLFGNLIALSLGLTPNFKSNFDLAEDAKLQLSKDTYDDDLDNLLAQIGDQYADLFLAAKNLSDAILLSDILRVNTEITKAPLSASMIKRYDEHHQDLTLLKALVRQQLPEKYKEIFFDQSKNGYAGYIDGGASQEEFYKFIKPILEKMDGTEELLVKLNREDLLRKQRTFDNGSIPHQIHLGELHAILRRQEDFYPFLKDNREKIEKILTFRIPYYVGPLARGNSRFAWMTRKSEETITPWNFEEVVDKGASAQSFIERMTNFDKNLPNEKVLPKHSLLYEYFTVYNELTKVKYVTEGMRKPAFLSGEQKKAIVDLLFKTNRKVTVKQLKEDYFKKIECFDSVEISGVEDRFNASLGTYHDLLKIIKDKDFLDNEENEDILEDIVLTLTLFEDREMIEERLKTYAHLFDDKVMKQLKRRRYTGWGRLSRKLINGIRDKQSGKTILDFLKSDGFANRNFMQLIHDDSLTFKEDIQKAQVSGQGDSLHEHIANLAGSPAIKKGILQTVKVVDELVKVMGRHKPENIVIEMARENQTTQKGQKNSRERMKRIEEGIKELGSQILKEHPVENTQLQNEKLYLYYLQNGRDMYVDQELDINRLSDYDVDHIVPQSFLKDDSIDNKVLTRSDKARGKSDNVPSEEVVKKMKNYWRQLLNAKLITQRKFDNLTKAERGGLSELDKAGFIKRQLVETRQITKHVAQILDSRMNTKYDENDKLIREVKVITLKSKLVSDFRKDFQFYKVREINNYHHAHDAYLNAVVGTALIKKYPKLESEFVYGDYKVYDVRKMIAKSEQEIGKATAKYFFYSNIMNFFKTEITLANGEIRKRPLIETNGETGEIVWDKGRDFATVRKVLSMPQVNIVKKTEVQTGGFSKESILPKRNSDKLIARKKDWDPKKYGGFDSPTVAYSVLVVAKVEKGKSKKLKSVKELLGITIMERSSFEKNPIDFLEAKGYKEVKKDLIIKLPKYSLFELENGRKRMLASAGELQKGNELALPSKYVNFLYLASHYEKLKGSPEDNEQKQLFVEQHKHYLDEIIEQISEFSKRVILADANLDKVLSAYNKHRDKPIREQAENIIHLFTLTNLGAPAAFKYFDTTIDRKRYTSTKEVLDATLIHQSITGLYETRIDLSQLGGDGGGSSPAPGGVLNLEEEYRLHEKPVPSSIDPSWLQLFPTVWAERAGMGLANQVPPVVVELRSGASPVAVRQYPMSKEAREGIRPHIQRFLDLGVLVPCQSPWNTPLLPVKKPGTNDYRPVQDLREINKRVQDIHPTVPNPYNLLSSLPPSHTWYSVLDLKDAFFCLKLHPNSQPLFAFEWRDPEKGNTGQLTWTRLPQGFKNSPTLFNEALHRDLAPFRALNPQVVLLQYVDDLLVAAPTYRDCKEGTQKLLQELSKLGYRVSAKKAQLCQKEVTYLGYLLKEGKRWLTPARKATVMKIPPPTTPRQVREFLGTAGFCRLWIPGFASLAAPLYPLTKPSIPFIWTEEHQKAFDRIKEALLSAPALALPDLTKPFTLYVDERAGVARGVLTQTLGPWRRPVAYLSKKLDPVASGWPTCLKAVAAVALLLKDADKLTLGQNVTVIASHSLESIVRQPPDRWMTNARMTHYQSLLLNERVSFAPPAVLNPATLLPVESEATPVHRCSEILAEETGTRRDLKDQPLPGVPAWYTDGSSFIAEGKRRAGAAIVDGKRTVWASSLPEGTSAQKAELVALTQALRLAEGKDINIYTDSRYAFATAHIHGAIYKQRGWLTSAGKDIKNKEEILALLEAIHLPKRVAIIHCPGHQKGNDPVATGNRRADEAAKQAALSTRVLAETTKPAGKRTADGSEFEKRTADGSEFESPKKKAKVE

SEQ ID NO: 868 - protein, 2092 aa, synthetic construct
MPAAKRVKLDGGDKKYSIGLDIGTNSVGWAVITDEYKVPSKKFKVLGNTDRHSIKKNLIGALLFDSGETAEATRLKRTARRRYTRRKNRICYLQEIFSNEMAKVDDSFFHRLEESFLVEEDKKHERHPIFGNIVDEVAYHEKYPTIYHLRKKLVDSTDKADLRLIYLALAHMIKFRGHFLIEGDLNPDNSDVDKLFIQLVQTYNQLFEENPINASGVDAKAILSARLSKSRRLENLIAQLPGEKKNGLFGNLIALSLGLTPNFKSNFDLAEDAKLQLSKDTYDDDLDNLLAQIGDQYADLFLAAKNLSDAILLSDILRVNTEITKAPLSASMIKRYDEHHQDLTLLKALVRQQLPEKYKEIFFDQSKNGYAGYIDGGASQEEFYKFIKPILEKMDGTEELLVKLNREDLLRKQRTFDNGSIPHQIHLGELHAILRRQEDFYPFLKDNREKIEKILTFRIPYYVGPLARGNSRFAWMTRKSEETITPWNFEEVVDKGASAQSFIERMTNFDKNLPNEKVLPKHSLLYEYFTVYNELTKVKYVTEGMRKPAFLSGEQKKAIVDLLFKTNRKVTVKQLKEDYFKKIECFDSVEISGVEDRFNASLGTYHDLLKIIKDKDFLDNEENEDILEDIVLTLTLFEDREMIEERLKTYAHLFDDKVMKQLKRRRYTGWGRLSRKLINGIRDKQSGKTILDFLKSDGFANRNFMQLIHDDSLTFKEDIQKAQVSGQGDSLHEHIANLAGSPAIKKGILQTVKVVDELVKVMGRHKPENIVIEMARENQTTQKGQKNSRERMKRIEEGIKELGSQILKEHPVENTQLQNEKLYLYYLQNGRDMYVDQELDINRLSDYDVDHIVPQSFLKDDSIDNKVLTRSDKARGKSDNVPSEEVVKKMKNYWRQLLNAKLITQRKFDNLTKAERGGLSELDKAGFIKRQLVETRQITKHVAQILDSRMNTKYDENDKLIREVKVITLKSKLVSDFRKDFQFYKVREINNYHHAHDAYLNAVVGTALIKKYPKLESEFVYGDYKVYDVRKMIAKSEQEIGKATAKYFFYSNIMNFFKTEITLANGEIRKRPLIETNGETGEIVWDKGRDFATVRKVLSMPQVNIVKKTEVQTGGFSKESILPKRNSDKLIARKKDWDPKKYGGFDSPTVAYSVLVVAKVEKGKSKKLKSVKELLGITIMERSSFEKNPIDFLEAKGYKEVKKDLIIKLPKYSLFELENGRKRMLASAGELQKGNELALPSKYVNFLYLASHYEKLKGSPEDNEQKQLFVEQHKHYLDEIIEQISEFSKRVILADANLDKVLSAYNKHRDKPIREQAENIIHLFTLTNLGAPAAFKYFDTTIDRKRYTSTKEVLDATLIHQSITGLYETRIDLSQLGGDGGGSSGGGPAPGGVLNLEEEYRLHEKPVPSSIDPSWLQLFPTVWAERAGMGLANQVPPVVVELRSGASPVAVRQYPMSKEAREGIRPHIQRFLDLGVLVPCQSPWNTPLLPVKKPGTNDYRPVQDLREINKRVQDIHPTVPNPYNLLSSLPPSHTWYSVLDLKDAFFCLKLHPNSQPLFAFEWRDPEKGNTGQLTWTRLPQGFKNSPTLFNEALHRDLAPFRALNPQVVLLQYVDDLLVAAPTYRDCKEGTQKLLQELSKLGYRVSAKKAQLCQKEVTYLGYLLKEGKRWLTPARKATVMKIPPPTTPRQVREFLGTAGFCRLWIPGFASLAAPLYPLTKPSIPFIWTEEHQKAFDRIKEALLSAPALALPDLTKPFTLYVDERAGVARGVLTQTLGPWRRPVAYLSKKLDPVASGWPTCLKAVAAVALLLKDADKLTLGQNVTVIASHSLESIVRQPPDRWMTNARMTHYQSLLLNERVSFAPPAVLNPATLLPVESEATPVHRCSEILAEETGTRRDLKDQPLPGVPAWYTDGSSFIAEGKRRAGAAIVDGKRTVWASSLPEGTSAQKAELVALTQALRLAEGKDINIYTDSRYAFATAHIHGAIYKQRGWLTSAGKDIKNKEEILALLEAIHLPKRVAIIHCPGHQKGNDPVATGNRRADEAAKQAALSTRVLAETTKPAGKRTADGSEFEKRTADGSEFESPKKKAKVE

SEQ ID NO: 869 - protein, 2089 aa, synthetic construct
MPAAKRVKLDGGDKKYSIGLDIGTNSVGWAVITDEYKVPSKKFKVLGNTDRHSIKKNLIGALLFDSGETAEATRLKRTARRRYTRRKNRICYLQEIFSNEMAKVDDSFFHRLEESFLVEEDKKHERHPIFGNIVDEVAYHEKYPTIYHLRKKLVDSTDKADLRLIYLALAHMIKFRGHFLIEGDLNPDNSDVDKLFIQLVQTYNQLFEENPINASGVDAKAILSARLSKSRRLENLIAQLPGEKKNGLFGNLIALSLGLTPNFKSNFDLAEDAKLQLSKDTYDDDLDNLLAQIGDQYADLFLAAKNLSDAILLSDILRVNTEITKAPLSASMIKRYDEHHQDLTLLKALVRQQLPEKYKEIFFDQSKNGYAGYIDGGASQEEFYKFIKPILEKMDGTEELLVKLNREDLLRKQRTFDNGSIPHQIHLGELHAILRRQEDFYPFLKDNREKIEKILTFRIPYYVGPLARGNSRFAWMTRKSEETITPWNFEEVVDKGASAQSFIERMTNFDKNLPNEKVLPKHSLLYEYFTVYNELTKVKYVTEGMRKPAFLSGEQKKAIVDLLFKTNRKVTVKQLKEDYFKKIECFDSVEISGVEDRFNASLGTYHDLLKIIKDKDFLDNEENEDILEDIVLTLTLFEDREMIEERLKTYAHLFDDKVMKQLKRRRYTGWGRLSRKLINGIRDKQSGKTILDFLKSDGFANRNFMQLIHDDSLTFKEDIQKAQVSGQGDSLHEHIANLAGSPAIKKGILQTVKVVDELVKVMGRHKPENIVIEMARENQTTQKGQKNSRERMKRIEEGIKELGSQILKEHPVENTQLQNEKLYLYYLQNGRDMYVDQELDINRLSDYDVDHIVPQSFLKDDSIDNKVLTRSDKARGKSDNVPSEEVVKKMKNYWRQLLNAKLITQRKFDNLTKAERGGLSELDKAGFIKRQLVETRQITKHVAQILDSRMNTKYDENDKLIREVKVITLKSKLVSDFRKDFQFYKVREINNYHHAHDAYLNAVVGTALIKKYPKLESEFVYGDYKVYDVRKMIAKSEQEIGKATAKYFFYSNIMNFFKTEITLANGEIRKRPLIETNGETGEIVWDKGRDFATVRKVLSMPQVNIVKKTEVQTGGFSKESILPKRNSDKLIARKKDWDPKKYGGFDSPTVAYSVLVVAKVEKGKSKKLKSVKELLGITIMERSSFEKNPIDFLEAKGYKEVKKDLIIKLPKYSLFELENGRKRMLASAGELQKGNELALPSKYVNFLYLASHYEKLKGSPEDNEQKQLFVEQHKHYLDEIIEQISEFSKRVILADANLDKVLSAYNKHRDKPIREQAENIIHLFTLTNLGAPAAFKYFDTTIDRKRYTSTKEVLDATLIHQSITGLYETRIDLSQLGGDGGGGSGGSGGVLNLEEEYRLHEKPVPSSIDPSWLQLFPTVWAERAGMGLANQVPPVVVELRSGASPVAVRQYPMSKEAREGIRPHIQRFLDLGVLVPCQSPWNTPLLPVKKPGTNDYRPVQDLREINKRVQDIHPTVPNPYNLLSSLPPSHTWYSVLDLKDAFFCLKLHPNSQPLFAFEWRDPEKGNTGQLTWTRLPQGFKNSPTLFNEALHRDLAPFRALNPQVVLLQYVDDLLVAAPTYRDCKEGTQKLLQELSKLGYRVSAKKAQLCQKEVTYLGYLLKEGKRWLTPARKATVMKIPPPTTPRQVREFLGTAGFCRLWIPGFASLAAPLYPLTKPSIPFIWTEEHQKAFDRIKEALLSAPALALPDLTKPFTLYVDERAGVARGVLTQTLGPWRRPVAYLSKKLDPVASGWPTCLKAVAAVALLLKDADKLTLGQNVTVIASHSLESIVRQPPDRWMTNARMTHYQSLLLNERVSFAPPAVLNPATLLPVESEATPVHRCSEILAEETGTRRDLKDQPLPGVPAWYTDGSSFIAEGKRRAGAAIVDGKRTVWASSLPEGTSAQKAELVALTQALRLAEGKDINIYTDSRYAFATAHIHGAIYKQRGWLTSAGKDIKNKEEILALLEAIHLPKRVAIIHCPGHQKGNDPVATGNRRADEAAKQAALSTRVLAETTKPAGKRTADGSEFEKRTADGSEFESPKKKAKVE

SEQ ID NO: 870 - protein, 2094 aa, synthetic construct
MPAAKRVKLDGGDKKYSIGLDIGTNSVGWAVITDEYKVPSKKFKVLGNTDRHSIKKNLIGALLFDSGETAEATRLKRTARRRYTRRKNRICYLQEIFSNEMAKVDDSFFHRLEESFLVEEDKKHERHPIFGNIVDEVAYHEKYPTIYHLRKKLVDSTDKADLRLIYLALAHMIKFRGHFLIEGDLNPDNSDVDKLFIQLVQTYNQLFEENPINASGVDAKAILSARLSKSRRLENLIAQLPGEKKNGLFGNLIALSLGLTPNFKSNFDLAEDAKLQLSKDTYDDDLDNLLAQIGDQYADLFLAAKNLSDAILLSDILRVNTEITKAPLSASMIKRYDEHHQDLTLLKALVRQQLPEKYKEIFFDQSKNGYAGYIDGGASQEEFYKFIKPILEKMDGTEELLVKLNREDLLRKQRTFDNGSIPHQIHLGELHAILRRQEDFYPFLKDNREKIEKILTFRIPYYVGPLARGNSRFAWMTRKSEETITPWNFEEVVDKGASAQSFIERMTNFDKNLPNEKVLPKHSLLYEYFTVYNELTKVKYVTEGMRKPAFLSGEQKKAIVDLLFKTNRKVTVKQLKEDYFKKIECFDSVEISGVEDRFNASLGTYHDLLKIIKDKDFLDNEENEDILEDIVLTLTLFEDREMIEERLKTYAHLFDDKVMKQLKRRRYTGWGRLSRKLINGIRDKQSGKTILDFLKSDGFANRNFMQLIHDDSLTFKEDIQKAQVSGQGDSLHEHIANLAGSPAIKKGILQTVKVVDELVKVMGRHKPENIVIEMARENQTTQKGQKNSRERMKRIEEGIKELGSQILKEHPVENTQLQNEKLYLYYLQNGRDMYVDQELDINRLSDYDVDHIVPQSFLKDDSIDNKVLTRSDKARGKSDNVPSEEVVKKMKNYWRQLLNAKLITQRKFDNLTKAERGGLSELDKAGFIKRQLVETRQITKHVAQILDSRMNTKYDENDKLIREVKVITLKSKLVSDFRKDFQFYKVREINNYHHAHDAYLNAVVGTALIKKYPKLESEFVYGDYKVYDVRKMIAKSEQEIGKATAKYFFYSNIMNFFKTEITLANGEIRKRPLIETNGETGEIVWDKGRDFATVRKVLSMPQVNIVKKTEVQTGGFSKESILPKRNSDKLIARKKDWDPKKYGGFDSPTVAYSVLVVAKVEKGKSKKLKSVKELLGITIMERSSFEKNPIDFLEAKGYKEVKKDLIIKLPKYSLFELENGRKRMLASAGELQKGNELALPSKYVNFLYLASHYEKLKGSPEDNEQKQLFVEQHKHYLDEIIEQISEFSKRVILADANLDKVLSAYNKHRDKPIREQAENIIHLFTLTNLGAPAAFKYFDTTIDRKRYTSTKEVLDATLIHQSITGLYETRIDLSQLGGDGGGGGPAPEAAAKGGVLNLEEEYRLHEKPVPSSIDPSWLQLFPTVWAERAGMGLANQVPPVVVELRSGASPVAVRQYPMSKEAREGIRPHIQRFLDLGVLVPCQSPWNTPLLPVKKPGTNDYRPVQDLREINKRVQDIHPTVPNPYNLLSSLPPSHTWYSVLDLKDAFFCLKLHPNSQPLFAFEWRDPEKGNTGQLTWTRLPQGFKNSPTLFNEALHRDLAPFRALNPQVVLLQYVDDLLVAAPTYRDCKEGTQKLLQELSKLGYRVSAKKAQLCQKEVTYLGYLLKEGKRWLTPARKATVMKIPPPTTPRQVREFLGTAGFCRLWIPGFASLAAPLYPLTKPSIPFIWTEEHQKAFDRIKEALLSAPALALPDLTKPFTLYVDERAGVARGVLTQTLGPWRRPVAYLSKKLDPVASGWPTCLKAVAAVALLLKDADKLTLGQNVTVIASHSLESIVRQPPDRWMTNARMTHYQSLLLNERVSFAPPAVLNPATLLPVESEATPVHRCSEILAEETGTRRDLKDQPLPGVPAWYTDGSSFIAEGKRRAGAAIVDGKRTVWASSLPEGTSAQKAELVALTQALRLAEGKDINIYTDSRYAFATAHIHGAIYKQRGWLTSAGKDIKNKEEILALLEAIHLPKRVAIIHCPGHQKGNDPVATGNRRADEAAKQAALSTRVLAETTKPAGKRTADGSEFEKRTADGSEFESPKKKAKVE

SEQ ID NO: 871 - protein, 2129 aa, synthetic construct
MPAAKRVKLDGGDKKYSIGLDIGTNSVGWAVITDEYKVPSKKFKVLGNTDRHSIKKNLIGALLFDSGETAEATRLKRTARRRYTRRKNRICYLQEIFSNEMAKVDDSFFHRLEESFLVEEDKKHERHPIFGNIVDEVAYHEKYPTIYHLRKKLVDSTDKADLRLIYLALAHMIKFRGHFLIEGDLNPDNSDVDKLFIQLVQTYNQLFEENPINASGVDAKAILSARLSKSRRLENLIAQLPGEKKNGLFGNLIALSLGLTPNFKSNFDLAEDAKLQLSKDTYDDDLDNLLAQIGDQYADLFLAAKNLSDAILLSDILRVNTEITKAPLSASMIKRYDEHHQDLTLLKALVRQQLPEKYKEIFFDQSKNGYAGYIDGGASQEEFYKFIKPILEKMDGTEELLVKLNREDLLRKQRTFDNGSIPHQIHLGELHAILRRQEDFYPFLKDNREKIEKILTFRIPYYVGPLARGNSRFAWMTRKSEETITPWNFEEVVDKGASAQSFIERMTNFDKNLPNEKVLPKHSLLYEYFTVYNELTKVKYVTEGMRKPAFLSGEQKKAIVDLLFKTNRKVTVKQLKEDYFKKIECFDSVEISGVEDRFNASLGTYHDLLKIIKDKDFLDNEENEDILEDIVLTLTLFEDREMIEERLKTYAHLFDDKVMKQLKRRRYTGWGRLSRKLINGIRDKQSGKTILDFLKSDGFANRNFMQLIHDDSLTFKEDIQKAQVSGQGDSLHEHIANLAGSPAIKKGILQTVKVVDELVKVMGRHKPENIVIEMARENQTTQKGQKNSRERMKRIEEGIKELGSQILKEHPVENTQLQNEKLYLYYLQNGRDMYVDQELDINRLSDYDVDHIVPQSFLKDDSIDNKVLTRSDKARGKSDNVPSEEVVKKMKNYWRQLLNAKLITQRKFDNLTKAERGGLSELDKAGFIKRQLVETRQITKHVAQILDSRMNTKYDENDKLIREVKVITLKSKLVSDFRKDFQFYKVREINNYHHAHDAYLNAVVGTALIKKYPKLESEFVYGDYKVYDVRKMIAKSEQEIGKATAKYFFYSNIMNFFKTEITLANGEIRKRPLIETNGETGEIVWDKGRDFATVRKVLSMPQVNIVKKTEVQTGGFSKESILPKRNSDKLIARKKDWDPKKYGGFDSPTVAYSVLVVAKVEKGKSKKLKSVKELLGITIMERSSFEKNPIDFLEAKGYKEVKKDLIIKLPKYSLFELENGRKRMLASAGELQKGNELALPSKYVNFLYLASHYEKLKGSPEDNEQKQLFVEQHKHYLDEIIEQISEFSKRVILADANLDKVLSAYNKHRDKPIREQAENIIHLFTLTNLGAPAAFKYFDTTIDRKRYTSTKEVLDATLIHQSITGLYETRIDLSQLGGDGGAEAAAKEAAAKEAAAKEAAAKALEAEAAAKEAAAKEAAAKEAAAKAGGVLNLEEEYRLHEKPVPSSIDPSWLQLFPTVWAERAGMGLANQVPPVVVELRSGASPVAVRQYPMSKEAREGIRPHIQRFLDLGVLVPCQSPWNTPLLPVKKPGTNDYRPVQDLREINKRVQDIHPTVPNPYNLLSSLPPSHTWYSVLDLKDAFFCLKLHPNSQPLFAFEWRDPEKGNTGQLTWTRLPQGFKNSPTLFNEALHRDLAPFRALNPQVVLLQYVDDLLVAAPTYRDCKEGTQKLLQELSKLGYRVSAKKAQLCQKEVTYLGYLLKEGKRWLTPARKATVMKIPPPTTPRQVREFLGKAGFCRLFIPGFASLAAPLYPLTKPSIPFIWTEEHQKAFDRIKEALLSAPALALPDLTKPFTLYVDERAGVARGVLTQTLGPWRRPVAYLSKKLDPVASGWPTCLKAVAAVALLLKDADKLTLGQNVTVIASHSLESIVRQPPDRWMTNARMTHYQSLLLNERVSFAPPAVLNPATLLPVESEATPVHRCSEILAEETGTRRDLKDQPLPGVPAWYTDGSSFIAEGKRRAGAAIVDGKRTVWASSLPEGTSAQKAELVALTQALRLAEGKDINIYTDSRYAFATAHIHGAIYKQRGWLTSAGKDIKNKEEILALLEAIHLPKRVAIIHCPGHQKGNDPVATGNRRADEAAKQAALSTRVLAETTKPAGKRTADGSEFEKRTADGSEFESPKKKAKVE

SEQ ID NO: 872 - protein, 2092 aa, synthetic construct
MPAAKRVKLDGGDKKYSIGLDIGTNSVGWAVITDEYKVPSKKFKVLGNTDRHSIKKNLIGALLFDSGETAEATRLKRTARRRYTRRKNRICYLQEIFSNEMAKVDDSFFHRLEESFLVEEDKKHERHPIFGNIVDEVAYHEKYPTIYHLRKKLVDSTDKADLRLIYLALAHMIKFRGHFLIEGDLNPDNSDVDKLFIQLVQTYNQLFEENPINASGVDAKAILSARLSKSRRLENLIAQLPGEKKNGLFGNLIALSLGLTPNFKSNFDLAEDAKLQLSKDTYDDDLDNLLAQIGDQYADLFLAAKNLSDAILLSDILRVNTEITKAPLSASMIKRYDEHHQDLTLLKALVRQQLPEKYKEIFFDQSKNGYAGYIDGGASQEEFYKFIKPILEKMDGTEELLVKLNREDLLRKQRTFDNGSIPHQIHLGELHAILRRQEDFYPFLKDNREKIEKILTFRIPYYVGPLARGNSRFAWMTRKSEETITPWNFEEVVDKGASAQSFIERMTNFDKNLPNEKVLPKHSLLYEYFTVYNELTKVKYVTEGMRKPAFLSGEQKKAIVDLLFKTNRKVTVKQLKEDYFKKIECFDSVEISGVEDRFNASLGTYHDLLKIIKDKDFLDNEENEDILEDIVLTLTLFEDREMIEERLKTYAHLFDDKVMKQLKRRRYTGWGRLSRKLINGIRDKQSGKTILDFLKSDGFANRNFMQLIHDDSLTFKEDIQKAQVSGQGDSLHEHIANLAGSPAIKKGILQTVKVVDELVKVMGRHKPENIVIEMARENQTTQKGQKNSRERMKRIEEGIKELGSQILKEHPVENTQLQNEKLYLYYLQNGRDMYVDQELDINRLSDYDVDHIVPQSFLKDDSIDNKVLTRSDKARGKSDNVPSEEVVKKMKNYWRQLLNAKLITQRKFDNLTKAERGGLSELDKAGFIKRQLVETRQITKHVAQILDSRMNTKYDENDKLIREVKVITLKSKLVSDFRKDFQFYKVREINNYHHAHDAYLNAVVGTALIKKYPKLESEFVYGDYKVYDVRKMIAKSEQEIGKATAKYFFYSNIMNFFKTEITLANGEIRKRPLIETNGETGEIVWDKGRDFATVRKVLSMPQVNIVKKTEVQTGGFSKESILPKRNSDKLIARKKDWDPKKYGGFDSPTVAYSVLVVAKVEKGKSKKLKSVKELLGITIMERSSFEKNPIDFLEAKGYKEVKKDLIIKLPKYSLFELENGRKRMLASAGELQKGNELALPSKYVNFLYLASHYEKLKGSPEDNEQKQLFVEQHKHYLDEIIEQISEFSKRVILADANLDKVLSAYNKHRDKPIREQAENIIHLFTLTNLGAPAAFKYFDTTIDRKRYTSTKEVLDATLIHQSITGLYETRIDLSQLGGDGGPAPGGGGSSGGVLNLEEEYRLHEKPVPSSIDPSWLQLFPTVWAERAGMGLANQVPPVVVELRSGASPVAVRQYPMSKEAREGIRPHIQRFLDLGVLVPCQSPWNTPLLPVKKPGTNDYRPVQDLREINKRVQDIHPTVPNPYNLLSSLPPSHTWYSVLDLKDAFFCLKLHPNSQPLFAFEWRDPEKGNTGQLTWTRLPQGFKNSPTLFNEALHRDLAPFRALNPQVVLLQYVDDLLVAAPTYRDCKEGTQKLLQELSKLGYRVSAKKAQLCQKEVTYLGYLLKEGKRWLTPARKATVMKIPPPTTPRQVREFLGKAGFCRLFIPGFASLAAPLYPLTKPSIPFIWTEEHQKAFDRIKEALLSAPALALPDLTKPFTLYVDERAGVARGVLTQTLGPWRRPVAYLSKKLDPVASGWPTCLKAVAAVALLLKDADKLTLGQNVTVIASHSLESIVRQPPDRWMTNARMTHYQSLLLNERVSFAPPAVLNPATLLPVESEATPVHRCSEILAEETGTRRDLKDQPLPGVPAWYTDGSSFIAEGKRRAGAAIVDGKRTVWASSLPEGTSAQKAELVALTQALRLAEGKDINIYTDSRYAFATAHIHGAIYKQRGWLTSAGKDIKNKEEILALLEAIHLPKRVAIIHCPGHQKGNDPVATGNRRADEAAKQAALSTRVLAETTKPAGKRTADGSEFEKRTADGSEFESPKKKAKVE

SEQ ID NO: 873 - protein, 2108 aa, synthetic construct
MPAAKRVKLDGGDKKYSIGLDIGTNSVGWAVITDEYKVPSKKFKVLGNTDRHSIKKNLIGALLFDSGETAEATRLKRTARRRYTRRKNRICYLQEIFSNEMAKVDDSFFHRLEESFLVEEDKKHERHPIFGNIVDEVAYHEKYPTIYHLRKKLVDSTDKADLRLIYLALAHMIKFRGHFLIEGDLNPDNSDVDKLFIQLVQTYNQLFEENPINASGVDAKAILSARLSKSRRLENLIAQLPGEKKNGLFGNLIALSLGLTPNFKSNFDLAEDAKLQLSKDTYDDDLDNLLAQIGDQYADLFLAAKNLSDAILLSDILRVNTEITKAPLSASMIKRYDEHHQDLTLLKALVRQQLPEKYKEIFFDQSKNGYAGYIDGGASQEEFYKFIKPILEKMDGTEELLVKLNREDLLRKQRTFDNGSIPHQIHLGELHAILRRQEDFYPFLKDNREKIEKILTFRIPYYVGPLARGNSRFAWMTRKSEETITPWNFEEVVDKGASAQSFIERMTNFDKNLPNEKVLPKHSLLYEYFTVYNELTKVKYVTEGMRKPAFLSGEQKKAIVDLLFKTNRKVTVKQLKEDYFKKIECFDSVEISGVEDRFNASLGTYHDLLKIIKDKDFLDNEENEDILEDIVLTLTLFEDREMIEERLKTYAHLFDDKVMKQLKRRRYTGWGRLSRKLINGIRDKQSGKTILDFLKSDGFANRNFMQLIHDDSLTFKEDIQKAQVSGQGDSLHEHIANLAGSPAIKKGILQTVKVVDELVKVMGRHKPENIVIEMARENQTTQKGQKNSRERMKRIEEGIKELGSQILKEHPVENTQLQNEKLYLYYLQNGRDMYVDQELDINRLSDYDVDHIVPQSFLKDDSIDNKVLTRSDKARGKSDNVPSEEVVKKMKNYWRQLLNAKLITQRKFDNLTKAERGGLSELDKAGFIKRQLVETRQITKHVAQILDSRMNTKYDENDKLIREVKVITLKSKLVSDFRKDFQFYKVREINNYHHAHDAYLNAVVGTALIKKYPKLESEFVYGDYKVYDVRKMIAKSEQEIGKATAKYFFYSNIMNFFKTEITLANGEIRKRPLIETNGETGEIVWDKGRDFATVRKVLSMPQVNIVKKTEVQTGGFSKESILPKRNSDKLIARKKDWDPKKYGGFDSPTVAYSVLVVAKVEKGKSKKLKSVKELLGITIMERSSFEKNPIDFLEAKGYKEVKKDLIIKLPKYSLFELENGRKRMLASAGELQKGNELALPSKYVNFLYLASHYEKLKGSPEDNEQKQLFVEQHKHYLDEIIEQISEFSKRVILADANLDKVLSAYNKHRDKPIREQAENIIHLFTLTNLGAPAAFKYFDTTIDRKRYTSTKEVLDATLIHQSITGLYETRIDLSQLGGDGGGGGGSGGGGSGGGGSGGGGSGGGGSGGVLNLEEEYRLHEKPVPSSIDPSWLQLFPTVWAERAGMGLANQVPPVVVELRSGASPVAVRQYPMSKEAREGIRPHIQRFLDLGVLVPCQSPWNTPLLPVKKPGTNDYRPVQDLREINKRVQDIHPTVPNPYNLLSSLPPSHTWYSVLDLKDAFFCLKLHPNSQPLFAFEWRDPEKGNTGQLTWTRLPQGFKNSPTLFNEALHRDLAPFRALNPQVVLLQYVDDLLVAAPTYRDCKEGTQKLLQELSKLGYRVSAKKAQLCQKEVTYLGYLLKEGKRWLTPARKATVMKIPPPTTPRQVREFLGKAGFCRLFIPGFASLAAPLYPLTKPSIPFIWTEEHQKAFDRIKEALLSAPALALPDLTKPFTLYVDERAGVARGVLTQTLGPWRRPVAYLSKKLDPVASGWPTCLKAVAAVALLLKDADKLTLGQNVTVIASHSLESIVRQPPDRWMTNARMTHYQSLLLNERVSFAPPAVLNPATLLPVESEATPVHRCSEILAEETGTRRDLKDQPLPGVPAWYTDGSSFIAEGKRRAGAAIVDGKRTVWASSLPEGTSAQKAELVALTQALRLAEGKDINIYTDSRYAFATAHIHGAIYKQRGWLTSAGKDIKNKEEILALLEAIHLPKRVAIIHCPGHQKGNDPVATGNRRADEAAKQAALSTRVLAETTKPAGKRTADGSEFEKRTADGSEFESPKKKAKVE

SEQ ID NO: 874 - protein, 2094 aa, synthetic construct
MPAAKRVKLDGGDKKYSIGLDIGTNSVGWAVITDEYKVPSKKFKVLGNTDRHSIKKNLIGALLFDSGETAEATRLKRTARRRYTRRKNRICYLQEIFSNEMAKVDDSFFHRLEESFLVEEDKKHERHPIFGNIVDEVAYHEKYPTIYHLRKKLVDSTDKADLRLIYLALAHMIKFRGHFLIEGDLNPDNSDVDKLFIQLVQTYNQLFEENPINASGVDAKAILSARLSKSRRLENLIAQLPGEKKNGLFGNLIALSLGLTPNFKSNFDLAEDAKLQLSKDTYDDDLDNLLAQIGDQYADLFLAAKNLSDAILLSDILRVNTEITKAPLSASMIKRYDEHHQDLTLLKALVRQQLPEKYKEIFFDQSKNGYAGYIDGGASQEEFYKFIKPILEKMDGTEELLVKLNREDLLRKQRTFDNGSIPHQIHLGELHAILRRQEDFYPFLKDNREKIEKILTFRIPYYVGPLARGNSRFAWMTRKSEETITPWNFEEVVDKGASAQSFIERMTNFDKNLPNEKVLPKHSLLYEYFTVYNELTKVKYVTEGMRKPAFLSGEQKKAIVDLLFKTNRKVTVKQLKEDYFKKIECFDSVEISGVEDRFNASLGTYHDLLKIIKDKDFLDNEENEDILEDIVLTLTLFEDREMIEERLKTYAHLFDDKVMKQLKRRRYTGWGRLSRKLINGIRDKQSGKTILDFLKSDGFANRNFMQLIHDDSLTFKEDIQKAQVSGQGDSLHEHIANLAGSPAIKKGILQTVKVVDELVKVMGRHKPENIVIEMARENQTTQKGQKNSRERMKRIEEGIKELGSQILKEHPVENTQLQNEKLYLYYLQNGRDMYVDQELDINRLSDYDVDHIVPQSFLKDDSIDNKVLTRSDKARGKSDNVPSEEVVKKMKNYWRQLLNAKLITQRKFDNLTKAERGGLSELDKAGFIKRQLVETRQITKHVAQILDSRMNTKYDENDKLIREVKVITLKSKLVSDFRKDFQFYKVREINNYHHAHDAYLNAVVGTALIKKYPKLESEFVYGDYKVYDVRKMIAKSEQEIGKATAKYFFYSNIMNFFKTEITLANGEIRKRPLIETNGETGEIVWDKGRDFATVRKVLSMPQVNIVKKTEVQTGGFSKESILPKRNSDKLIARKKDWDPKKYGGFDSPTVAYSVLVVAKVEKGKSKKLKSVKELLGITIMERSSFEKNPIDFLEAKGYKEVKKDLIIKLPKYSLFELENGRKRMLASAGELQKGNELALPSKYVNFLYLASHYEKLKGSPEDNEQKQLFVEQHKHYLDEIIEQISEFSKRVILADANLDKVLSAYNKHRDKPIREQAENIIHLFTLTNLGAPAAFKYFDTTIDRKRYTSTKEVLDATLIHQSITGLYETRIDLSQLGGDGGEAAAKPAPGSSGGVLNLEEEYRLHEKPVPSSIDPSWLQLFPTVWAERAGMGLANQVPPVVVELRSGASPVAVRQYPMSKEAREGIRPHIQRFLDLGVLVPCQSPWNTPLLPVKKPGTNDYRPVQDLREINKRVQDIHPTVPNPYNLLSSLPPSHTWYSVLDLKDAFFCLKLHPNSQPLFAFEWRDPEKGNTGQLTWTRLPQGFKNSPTLFNEALHRDLAPFRALNPQVVLLQYVDDLLVAAPTYRDCKEGTQKLLQELSKLGYRVSAKKAQLCQKEVTYLGYLLKEGKRWLTPARKATVMKIPPPTTPRQVREFLGKAGFCRLFIPGFASLAAPLYPLTKPSIPFIWTEEHQKAFDRIKEALLSAPALALPDLTKPFTLYVDERAGVARGVLTQTLGPWRRPVAYLSKKLDPVASGWPTCLKAVAAVALLLKDADKLTLGQNVTVIASHSLESIVRQPPDRWMTNARMTHYQSLLLNERVSFAPPAVLNPATLLPVESEATPVHRCSEILAEETGTRRDLKDQPLPGVPAWYTDGSSFIAEGKRRAGAAIVDGKRTVWASSLPEGTSAQKAELVALTQALRLAEGKDINIYTDSRYAFATAHIHGAIYKQRGWLTSAGKDIKNKEEILALLEAIHLPKRVAIIHCPGHQKGNDPVATGNRRADEAAKQAALSTRVLAETTKPAGKRTADGSEFEKRTADGSEFESPKKKAKVE

SEQ ID NO: 875 - protein, 2092 aa, synthetic construct
MPAAKRVKLDGGDKKYSIGLDIGTNSVGWAVITDEYKVPSKKFKVLGNTDRHSIKKNLIGALLFDSGETAEATRLKRTARRRYTRRKNRICYLQEIFSNEMAKVDDSFFHRLEESFLVEEDKKHERHPIFGNIVDEVAYHEKYPTIYHLRKKLVDSTDKADLRLIYLALAHMIKFRGHFLIEGDLNPDNSDVDKLFIQLVQTYNQLFEENPINASGVDAKAILSARLSKSRRLENLIAQLPGEKKNGLFGNLIALSLGLTPNFKSNFDLAEDAKLQLSKDTYDDDLDNLLAQIGDQYADLFLAAKNLSDAILLSDILRVNTEITKAPLSASMIKRYDEHHQDLTLLKALVRQQLPEKYKEIFFDQSKNGYAGYIDGGASQEEFYKFIKPILEKMDGTEELLVKLNREDLLRKQRTFDNGSIPHQIHLGELHAILRRQEDFYPFLKDNREKIEKILTFRIPYYVGPLARGNSRFAWMTRKSEETITPWNFEEVVDKGASAQSFIERMTNFDKNLPNEKVLPKHSLLYEYFTVYNELTKVKYVTEGMRKPAFLSGEQKKAIVDLLFKTNRKVTVKQLKEDYFKKIECFDSVEISGVEDRFNASLGTYHDLLKIIKDKDFLDNEENEDILEDIVLTLTLFEDREMIEERLKTYAHLFDDKVMKQLKRRRYTGWGRLSRKLINGIRDKQSGKTILDFLKSDGFANRNFMQLIHDDSLTFKEDIQKAQVSGQGDSLHEHIANLAGSPAIKKGILQTVKVVDELVKVMGRHKPENIVIEMARENQTTQKGQKNSRERMKRIEEGIKELGSQILKEHPVENTQLQNEKLYLYYLQNGRDMYVDQELDINRLSDYDVDHIVPQSFLKDDSIDNKVLTRSDKARGKSDNVPSEEVVKKMKNYWRQLLNAKLITQRKFDNLTKAERGGLSELDKAGFIKRQLVETRQITKHVAQILDSRMNTKYDENDKLIREVKVITLKSKLVSDFRKDFQFYKVREINNYHHAHDAYLNAVVGTALIKKYPKLESEFVYGDYKVYDVRKMIAKSEQEIGKATAKYFFYSNIMNFFKTEITLANGEIRKRPLIETNGETGEIVWDKGRDFATVRKVLSMPQVNIVKKTEVQTGGFSKESILPKRNSDKLIARKKDWDPKKYGGFDSPTVAYSVLVVAKVEKGKSKKLKSVKELLGITIMERSSFEKNPIDFLEAKGYKEVKKDLIIKLPKYSLFELENGRKRMLASAGELQKGNELALPSKYVNFLYLASHYEKLKGSPEDNEQKQLFVEQHKHYLDEIIEQISEFSKRVILADANLDKVLSAYNKHRDKPIREQAENIIHLFTLTNLGAPAAFKYFDTTIDRKRYTSTKEVLDATLIHQSITGLYETRIDLSQLGGDGGGGSPAPGSSGGVLNLEEEYRLHEKPVPSSIDPSWLQLFPTVWAERAGMGLANQVPPVVVELRSGASPVAVRQYPMSKEAREGIRPHIQRFLDLGVLVPCQSPWNTPLLPVKKPGTNDYRPVQDLREINKRVQDIHPTVPNPYNLLSSLPPSHTWYSVLDLKDAFFCLKLHPNSQPLFAFEWRDPEKGNTGQLTWTRLPQGFKNSPTLFNEALHRDLAPFRALNPQVVLLQYVDDLLVAAPTYRDCKEGTQKLLQELSKLGYRVSAKKAQLCQKEVTYLGYLLKEGKRWLTPARKATVMKIPPPTTPRQVREFLGKAGFCRLFIPGFASLAAPLYPLTKPSIPFIWTEEHQKAFDRIKEALLSAPALALPDLTKPFTLYVDERAGVARGVLTQTLGPWRRPVAYLSKKLDPVASGWPTCLKAVAAVALLLKDADKLTLGQNVTVIASHSLESIVRQPPDRWMTNARMTHYQSLLLNERVSFAPPAVLNPATLLPVESEATPVHRCSEILAEETGTRRDLKDQPLPGVPAWYTDGSSFIAEGKRRAGAAIVDGKRTVWASSLPEGTSAQKAELVALTQALRLAEGKDINIYTDSRYAFATAHIHGAIYKQRGWLTSAGKDIKNKEEILALLEAIHLPKRVAIIHCPGHQKGNDPVATGNRRADEAAKQAALSTRVLAETTKPAGKRTADGSEFEKRTADGSEFESPKKKAKVE

SEQ ID NO: 876 - protein, 2086 aa, synthetic construct
MPAAKRVKLDGGDKKYSIGLDIGTNSVGWAVITDEYKVPSKKFKVLGNTDRHSIKKNLIGALLFDSGETAEATRLKRTARRRYTRRKNRICYLQEIFSNEMAKVDDSFFHRLEESFLVEEDKKHERHPIFGNIVDEVAYHEKYPTIYHLRKKLVDSTDKADLRLIYLALAHMIKFRGHFLIEGDLNPDNSDVDKLFIQLVQTYNQLFEENPINASGVDAKAILSARLSKSRRLENLIAQLPGEKKNGLFGNLIALSLGLTPNFKSNFDLAEDAKLQLSKDTYDDDLDNLLAQIGDQYADLFLAAKNLSDAILLSDILRVNTEITKAPLSASMIKRYDEHHQDLTLLKALVRQQLPEKYKEIFFDQSKNGYAGYIDGGASQEEFYKFIKPILEKMDGTEELLVKLNREDLLRKQRTFDNGSIPHQIHLGELHAILRRQEDFYPFLKDNREKIEKILTFRIPYYVGPLARGNSRFAWMTRKSEETITPWNFEEVVDKGASAQSFIERMTNFDKNLPNEKVLPKHSLLYEYFTVYNELTKVKYVTEGMRKPAFLSGEQKKAIVDLLFKTNRKVTVKQLKEDYFKKIECFDSVEISGVEDRFNASLGTYHDLLKIIKDKDFLDNEENEDILEDIVLTLTLFEDREMIEERLKTYAHLFDDKVMKQLKRRRYTGWGRLSRKLINGIRDKQSGKTILDFLKSDGFANRNFMQLIHDDSLTFKEDIQKAQVSGQGDSLHEHIANLAGSPAIKKGILQTVKVVDELVKVMGRHKPENIVIEMARENQTTQKGQKNSRERMKRIEEGIKELGSQILKEHPVENTQLQNEKLYLYYLQNGRDMYVDQELDINRLSDYDVDHIVPQSFLKDDSIDNKVLTRSDKARGKSDNVPSEEVVKKMKNYWRQLLNAKLITQRKFDNLTKAERGGLSELDKAGFIKRQLVETRQITKHVAQILDSRMNTKYDENDKLIREVKVITLKSKLVSDFRKDFQFYKVREINNYHHAHDAYLNAVVGTALIKKYPKLESEFVYGDYKVYDVRKMIAKSEQEIGKATAKYFFYSNIMNFFKTEITLANGEIRKRPLIETNGETGEIVWDKGRDFATVRKVLSMPQVNIVKKTEVQTGGFSKESILPKRNSDKLIARKKDWDPKKYGGFDSPTVAYSVLVVAKVEKGKSKKLKSVKELLGITIMERSSFEKNPIDFLEAKGYKEVKKDLIIKLPKYSLFELENGRKRMLASAGELQKGNELALPSKYVNFLYLASHYEKLKGSPEDNEQKQLFVEQHKHYLDEIIEQISEFSKRVILADANLDKVLSAYNKHRDKPIREQAENIIHLFTLTNLGAPAAFKYFDTTIDRKRYTSTKEVLDATLIHQSITGLYETRIDLSQLGGDGGGSSGGVLNLEEEYRLHEKPVPSSIDPSWLQLFPTVWAERAGMGLANQVPPVVVELRSGASPVAVRQYPMSKEAREGIRPHIQRFLDLGVLVPCQSPWNTPLLPVKKPGTNDYRPVQDLREINKRVQDIHPTVPNPYNLLSSLPPSHTWYSVLDLKDAFFCLKLHPNSQPLFAFEWRDPEKGNTGQLTWTRLPQGFKNSPTLFNEALHRDLAPFRALNPQVVLLQYVDDLLVAAPTYRDCKEGTQKLLQELSKLGYRVSAKKAQLCQKEVTYLGYLLKEGKRWLTPARKATVMKIPPPTTPRQVREFLGKAGFCRLFIPGFASLAAPLYPLTKPSIPFIWTEEHQKAFDRIKEALLSAPALALPDLTKPFTLYVDERAGVARGVLTQTLGPWRRPVAYLSKKLDPVASGWPTCLKAVAAVALLLKDADKLTLGQNVTVIASHSLESIVRQPPDRWMTNARMTHYQSLLLNERVSFAPPAVLNPATLLPVESEATPVHRCSEILAEETGTRRDLKDQPLPGVPAWYTDGSSFIAEGKRRAGAAIVDGKRTVWASSLPEGTSAQKAELVALTQALRLAEGKDINIYTDSRYAFATAHIHGAIYKQRGWLTSAGKDIKNKEEILALLEAIHLPKRVAIIHCPGHQKGNDPVATGNRRADEAAKQAALSTRVLAETTKPAGKRTADGSEFEKRTADGSEFESPKKKAKVE

SEQ ID NO: 877 - protein, 2099 aa, synthetic construct
MPAAKRVKLDGGDKKYSIGLDIGTNSVGWAVITDEYKVPSKKFKVLGNTDRHSIKKNLIGALLFDSGETAEATRLKRTARRRYTRRKNRICYLQEIFSNEMAKVDDSFFHRLEESFLVEEDKKHERHPIFGNIVDEVAYHEKYPTIYHLRKKLVDSTDKADLRLIYLALAHMIKFRGHFLIEGDLNPDNSDVDKLFIQLVQTYNQLFEENPINASGVDAKAILSARLSKSRRLENLIAQLPGEKKNGLFGNLIALSLGLTPNFKSNFDLAEDAKLQLSKDTYDDDLDNLLAQIGDQYADLFLAAKNLSDAILLSDILRVNTEITKAPLSASMIKRYDEHHQDLTLLKALVRQQLPEKYKEIFFDQSKNGYAGYIDGGASQEEFYKFIKPILEKMDGTEELLVKLNREDLLRKQRTFDNGSIPHQIHLGELHAILRRQEDFYPFLKDNREKIEKILTFRIPYYVGPLARGNSRFAWMTRKSEETITPWNFEEVVDKGASAQSFIERMTNFDKNLPNEKVLPKHSLLYEYFTVYNELTKVKYVTEGMRKPAFLSGEQKKAIVDLLFKTNRKVTVKQLKEDYFKKIECFDSVEISGVEDRFNASLGTYHDLLKIIKDKDFLDNEENEDILEDIVLTLTLFEDREMIEERLKTYAHLFDDKVMKQLKRRRYTGWGRLSRKLINGIRDKQSGKTILDFLKSDGFANRNFMQLIHDDSLTFKEDIQKAQVSGQGDSLHEHIANLAGSPAIKKGILQTVKVVDELVKVMGRHKPENIVIEMARENQTTQKGQKNSRERMKRIEEGIKELGSQILKEHPVENTQLQNEKLYLYYLQNGRDMYVDQELDINRLSDYDVDHIVPQSFLKDDSIDNKVLTRSDKARGKSDNVPSEEVVKKMKNYWRQLLNAKLITQRKFDNLTKAERGGLSELDKAGFIKRQLVETRQITKHVAQILDSRMNTKYDENDKLIREVKVITLKSKLVSDFRKDFQFYKVREINNYHHAHDAYLNAVVGTALIKKYPKLESEFVYGDYKVYDVRKMIAKSEQEIGKATAKYFFYSNIMNFFKTEITLANGEIRKRPLIETNGETGEIVWDKGRDFATVRKVLSMPQVNIVKKTEVQTGGFSKESILPKRNSDKLIARKKDWDPKKYGGFDSPTVAYSVLVVAKVEKGKSKKLKSVKELLGITIMERSSFEKNPIDFLEAKGYKEVKKDLIIKLPKYSLFELENGRKRMLASAGELQKGNELALPSKYVNFLYLASHYEKLKGSPEDNEQKQLFVEQHKHYLDEIIEQISEFSKRVILADANLDKVLSAYNKHRDKPIREQAENIIHLFTLTNLGAPAAFKYFDTTIDRKRYTSTKEVLDATLIHQSITGLYETRIDLSQLGGDGGSGSETPGTSESATPESGGVLNLEEEYRLHEKPVPSSIDPSWLQLFPTVWAERAGMGLANQVPPVVVELRSGASPVAVRQYPMSKEAREGIRPHIQRFLDLGVLVPCQSPWNTPLLPVKKPGTNDYRPVQDLREINKRVQDIHPTVPNPYNLLSSLPPSHTWYSVLDLKDAFFCLKLHPNSQPLFAFEWRDPEKGNTGQLTWTRLPQGFKNSPTLFNEALHRDLAPFRALNPQVVLLQYVDDLLVAAPTYRDCKEGTQKLLQELSKLGYRVSAKKAQLCQKEVTYLGYLLKEGKRWLTPARKATVMKIPPPTTPRQVREFLGKAGFCRLFIPGFASLAAPLYPLTKPSIPFIWTEEHQKAFDRIKEALLSAPALALPDLTKPFTLYVDERAGVARGVLTQTLGPWRRPVAYLSKKLDPVASGWPTCLKAVAAVALLLKDADKLTLGQNVTVIASHSLESIVRQPPDRWMTNARMTHYQSLLLNERVSFAPPAVLNPATLLPVESEATPVHRCSEILAEETGTRRDLKDQPLPGVPAWYTDGSSFIAEGKRRAGAAIVDGKRTVWASSLPEGTSAQKAELVALTQALRLAEGKDINIYTDSRYAFATAHIHGAIYKQRGWLTSAGKDIKNKEEILALLEAIHLPKRVAIIHCPGHQKGNDPVATGNRRADEAAKQAALSTRVLAETTKPAGKRTADGSEFEKRTADGSEFESPKKKAKVE

SEQ ID NO: 878 - protein, 2092 aa, synthetic construct
MPAAKRVKLDGGDKKYSIGLDIGTNSVGWAVITDEYKVPSKKFKVLGNTDRHSIKKNLIGALLFDSGETAEATRLKRTARRRYTRRKNRICYLQEIFSNEMAKVDDSFFHRLEESFLVEEDKKHERHPIFGNIVDEVAYHEKYPTIYHLRKKLVDSTDKADLRLIYLALAHMIKFRGHFLIEGDLNPDNSDVDKLFIQLVQTYNQLFEENPINASGVDAKAILSARLSKSRRLENLIAQLPGEKKNGLFGNLIALSLGLTPNFKSNFDLAEDAKLQLSKDTYDDDLDNLLAQIGDQYADLFLAAKNLSDAILLSDILRVNTEITKAPLSASMIKRYDEHHQDLTLLKALVRQQLPEKYKEIFFDQSKNGYAGYIDGGASQEEFYKFIKPILEKMDGTEELLVKLNREDLLRKQRTFDNGSIPHQIHLGELHAILRRQEDFYPFLKDNREKIEKILTFRIPYYVGPLARGNSRFAWMTRKSEETITPWNFEEVVDKGASAQSFIERMTNFDKNLPNEKVLPKHSLLYEYFTVYNELTKVKYVTEGMRKPAFLSGEQKKAIVDLLFKTNRKVTVKQLKEDYFKKIECFDSVEISGVEDRFNASLGTYHDLLKIIKDKDFLDNEENEDILEDIVLTLTLFEDREMIEERLKTYAHLFDDKVMKQLKRRRYTGWGRLSRKLINGIRDKQSGKTILDFLKSDGFANRNFMQLIHDDSLTFKEDIQKAQVSGQGDSLHEHIANLAGSPAIKKGILQTVKVVDELVKVMGRHKPENIVIEMARENQTTQKGQKNSRERMKRIEEGIKELGSQILKEHPVENTQLQNEKLYLYYLQNGRDMYVDQELDINRLSDYDVDHIVPQSFLKDDSIDNKVLTRSDKARGKSDNVPSEEVVKKMKNYWRQLLNAKLITQRKFDNLTKAERGGLSELDKAGFIKRQLVETRQITKHVAQILDSRMNTKYDENDKLIREVKVITLKSKLVSDFRKDFQFYKVREINNYHHAHDAYLNAVVGTALIKKYPKLESEFVYGDYKVYDVRKMIAKSEQEIGKATAKYFFYSNIMNFFKTEITLANGEIRKRPLIETNGETGEIVWDKGRDFATVRKVLSMPQVNIVKKTEVQTGGFSKESILPKRNSDKLIARKKDWDPKKYGGFDSPTVAYSVLVVAKVEKGKSKKLKSVKELLGITIMERSSFEKNPIDFLEAKGYKEVKKDLIIKLPKYSLFELENGRKRMLASAGELQKGNELALPSKYVNFLYLASHYEKLKGSPEDNEQKQLFVEQHKHYLDEIIEQISEFSKRVILADANLDKVLSAYNKHRDKPIREQAENIIHLFTLTNLGAPAAFKYFDTTIDRKRYTSTKEVLDATLIHQSITGLYETRIDLSQLGGDGGGGGPAPGGSGGVLNLEEEYRLHEKPVPSSIDPSWLQLFPTVWAERAGMGLANQVPPVVVELRSGASPVAVRQYPMSKEAREGIRPHIQRFLDLGVLVPCQSPWNTPLLPVKKPGTNDYRPVQDLREINKRVQDIHPTVPNPYNLLSSLPPSHTWYSVLDLKDAFFCLKLHPNSQPLFAFEWRDPEKGNTGQLTWTRLPQGFKNSPTLFNEALHRDLAPFRALNPQVVLLQYVDDLLVAAPTYRDCKEGTQKLLQELSKLGYRVSAKKAQLCQKEVTYLGYLLKEGKRWLTPARKATVMKIPPPTTPRQVREFLGKAGFCRLFIPGFASLAAPLYPLTKPSIPFIWTEEHQKAFDRIKEALLSAPALALPDLTKPFTLYVDERAGVARGVLTQTLGPWRRPVAYLSKKLDPVASGWPTCLKAVAAVALLLKDADKLTLGQNVTVIASHSLESIVRQPPDRWMTNARMTHYQSLLLNERVSFAPPAVLNPATLLPVESEATPVHRCSEILAEETGTRRDLKDQPLPGVPAWYTDGSSFIAEGKRRAGAAIVDGKRTVWASSLPEGTSAQKAELVALTQALRLAEGKDINIYTDSRYAFATAHIHGAIYKQRGWLTSAGKDIKNKEEILALLEAIHLPKRVAIIHCPGHQKGNDPVATGNRRADEAAKQAALSTRVLAETTKPAGKRTADGSEFEKRTADGSEFESPKKKAKVE

SEQ ID NO: 879 - protein, 2108 aa, synthetic construct
MPAAKRVKLDGGDKKYSIGLDIGTNSVGWAVITDEYKVPSKKFKVLGNTDRHSIKKNLIGALLFDSGETAEATRLKRTARRRYTRRKNRICYLQEIFSNEMAKVDDSFFHRLEESFLVEEDKKHERHPIFGNIVDEVAYHEKYPTIYHLRKKLVDSTDKADLRLIYLALAHMIKFRGHFLIEGDLNPDNSDVDKLFIQLVQTYNQLFEENPINASGVDAKAILSARLSKSRRLENLIAQLPGEKKNGLFGNLIALSLGLTPNFKSNFDLAEDAKLQLSKDTYDDDLDNLLAQIGDQYADLFLAAKNLSDAILLSDILRVNTEITKAPLSASMIKRYDEHHQDLTLLKALVRQQLPEKYKEIFFDQSKNGYAGYIDGGASQEEFYKFIKPILEKMDGTEELLVKLNREDLLRKQRTFDNGSIPHQIHLGELHAILRRQEDFYPFLKDNREKIEKILTFRIPYYVGPLARGNSRFAWMTRKSEETITPWNFEEVVDKGASAQSFIERMTNFDKNLPNEKVLPKHSLLYEYFTVYNELTKVKYVTEGMRKPAFLSGEQKKAIVDLLFKTNRKVTVKQLKEDYFKKIECFDSVEISGVEDRFNASLGTYHDLLKIIKDKDFLDNEENEDILEDIVLTLTLFEDREMIEERLKTYAHLFDDKVMKQLKRRRYTGWGRLSRKLINGIRDKQSGKTILDFLKSDGFANRNFMQLIHDDSLTFKEDIQKAQVSGQGDSLHEHIANLAGSPAIKKGILQTVKVVDELVKVMGRHKPENIVIEMARENQTTQKGQKNSRERMKRIEEGIKELGSQILKEHPVENTQLQNEKLYLYYLQNGRDMYVDQELDINRLSDYDVDHIVPQSFLKDDSIDNKVLTRSDKARGKSDNVPSEEVVKKMKNYWRQLLNAKLITQRKFDNLTKAERGGLSELDKAGFIKRQLVETRQITKHVAQILDSRMNTKYDENDKLIREVKVITLKSKLVSDFRKDFQFYKVREINNYHHAHDAYLNAVVGTALIKKYPKLESEFVYGDYKVYDVRKMIAKSEQEIGKATAKYFFYSNIMNFFKTEITLANGEIRKRPLIETNGETGEIVWDKGRDFATVRKVLSMPQVNIVKKTEVQTGGFSKESILPKRNSDKLIARKKDWDPKKYGGFDSPTVAYSVLVVAKVEKGKSKKLKSVKELLGITIMERSSFEKNPIDFLEAKGYKEVKKDLIIKLPKYSLFELENGRKRMLASAGELQKGNELALPSKYVNFLYLASHYEKLKGSPEDNEQKQLFVEQHKHYLDEIIEQISEFSKRVILADANLDKVLSAYNKHRDKPIREQAENIIHLFTLTNLGAPAAFKYFDTTIDRKRYTSTKEVLDATLIHQSITGLYETRIDLSQLGGDGGEAAAKEAAAKEAAAKEAAAKEAAAKGGVLNLEEEYRLHEKPVPSSIDPSWLQLFPTVWAERAGMGLANQVPPVVVELRSGASPVAVRQYPMSKEAREGIRPHIQRFLDLGVLVPCQSPWNTPLLPVKKPGTNDYRPVQDLREINKRVQDIHPTVPNPYNLLSSLPPSHTWYSVLDLKDAFFCLKLHPNSQPLFAFEWRDPEKGNTGQLTWTRLPQGFKNSPTLFNEALHRDLAPFRALNPQVVLLQYVDDLLVAAPTYRDCKEGTQKLLQELSKLGYRVSAKKAQLCQKEVTYLGYLLKEGKRWLTPARKATVMKIPPPTTPRQVREFLGKAGFCRLFIPGFASLAAPLYPLTKPSIPFIWTEEHQKAFDRIKEALLSAPALALPDLTKPFTLYVDERAGVARGVLTQTLGPWRRPVAYLSKKLDPVASGWPTCLKAVAAVALLLKDADKLTLGQNVTVIASHSLESIVRQPPDRWMTNARMTHYQSLLLNERVSFAPPAVLNPATLLPVESEATPVHRCSEILAEETGTRRDLKDQPLPGVPAWYTDGSSFIAEGKRRAGAAIVDGKRTVWASSLPEGTSAQKAELVALTQALRLAEGKDINIYTDSRYAFATAHIHGAIYKQRGWLTSAGKDIKNKEEILALLEAIHLPKRVAIIHCPGHQKGNDPVATGNRRADEAAKQAALSTRVLAETTKPAGKRTADGSEFEKRTADGSEFESPKKKAKVE

SEQ ID NO: 880 - protein, 2092 aa, synthetic construct
MPAAKRVKLDGGDKKYSIGLDIGTNSVGWAVITDEYKVPSKKFKVLGNTDRHSIKKNLIGALLFDSGETAEATRLKRTARRRYTRRKNRICYLQEIFSNEMAKVDDSFFHRLEESFLVEEDKKHERHPIFGNIVDEVAYHEKYPTIYHLRKKLVDSTDKADLRLIYLALAHMIKFRGHFLIEGDLNPDNSDVDKLFIQLVQTYNQLFEENPINASGVDAKAILSARLSKSRRLENLIAQLPGEKKNGLFGNLIALSLGLTPNFKSNFDLAEDAKLQLSKDTYDDDLDNLLAQIGDQYADLFLAAKNLSDAILLSDILRVNTEITKAPLSASMIKRYDEHHQDLTLLKALVRQQLPEKYKEIFFDQSKNGYAGYIDGGASQEEFYKFIKPILEKMDGTEELLVKLNREDLLRKQRTFDNGSIPHQIHLGELHAILRRQEDFYPFLKDNREKIEKILTFRIPYYVGPLARGNSRFAWMTRKSEETITPWNFEEVVDKGASAQSFIERMTNFDKNLPNEKVLPKHSLLYEYFTVYNELTKVKYVTEGMRKPAFLSGEQKKAIVDLLFKTNRKVTVKQLKEDYFKKIECFDSVEISGVEDRFNASLGTYHDLLKIIKDKDFLDNEENEDILEDIVLTLTLFEDREMIEERLKTYAHLFDDKVMKQLKRRRYTGWGRLSRKLINGIRDKQSGKTILDFLKSDGFANRNFMQLIHDDSLTFKEDIQKAQVSGQGDSLHEHIANLAGSPAIKKGILQTVKVVDELVKVMGRHKPENIVIEMARENQTTQKGQKNSRERMKRIEEGIKELGSQILKEHPVENTQLQNEKLYLYYLQNGRDMYVDQELDINRLSDYDVDHIVPQSFLKDDSIDNKVLTRSDKARGKSDNVPSEEVVKKMKNYWRQLLNAKLITQRKFDNLTKAERGGLSELDKAGFIKRQLVETRQITKHVAQILDSRMNTKYDENDKLIREVKVITLKSKLVSDFRKDFQFYKVREINNYHHAHDAYLNAVVGTALIKKYPKLESEFVYGDYKVYDVRKMIAKSEQEIGKATAKYFFYSNIMNFFKTEITLANGEIRKRPLIETNGETGEIVWDKGRDFATVRKVLSMPQVNIVKKTEVQTGGFSKESILPKRNSDKLIARKKDWDPKKYGGFDSPTVAYSVLVVAKVEKGKSKKLKSVKELLGITIMERSSFEKNPIDFLEAKGYKEVKKDLIIKLPKYSLFELENGRKRMLASAGELQKGNELALPSKYVNFLYLASHYEKLKGSPEDNEQKQLFVEQHKHYLDEIIEQISEFSKRVILADANLDKVLSAYNKHRDKPIREQAENIIHLFTLTNLGAPAAFKYFDTTIDRKRYTSTKEVLDATLIHQSITGLYETRIDLSQLGGDGGPAPGGSGSSGGVLNLEEEYRLHEKPVPSSIDPSWLQLFPTVWAERAGMGLANQVPPVVVELRSGASPVAVRQYPMSKEAREGIRPHIQRFLDLGVLVPCQSPWNTPLLPVKKPGTNDYRPVQDLREINKRVQDIHPTVPNPYNLLSSLPPSHTWYSVLDLKDAFFCLKLHPNSQPLFAFEWRDPEKGNTGQLTWTRLPQGFKNSPTLFNEALHRDLAPFRALNPQVVLLQYVDDLLVAAPTYRDCKEGTQKLLQELSKLGYRVSAKKAQLCQKEVTYLGYLLKEGKRWLTPARKATVMKIPPPTTPRQVREFLGKAGFCRLFIPGFASLAAPLYPLTKPSIPFIWTEEHQKAFDRIKEALLSAPALALPDLTKPFTLYVDERAGVARGVLTQTLGPWRRPVAYLSKKLDPVASGWPTCLKAVAAVALLLKDADKLTLGQNVTVIASHSLESIVRQPPDRWMTNARMTHYQSLLLNERVSFAPPAVLNPATLLPVESEATPVHRCSEILAEETGTRRDLKDQPLPGVPAWYTDGSSFIAEGKRRAGAAIVDGKRTVWASSLPEGTSAQKAELVALTQALRLAEGKDINIYTDSRYAFATAHIHGAIYKQRGWLTSAGKDIKNKEEILALLEAIHLPKRVAIIHCPGHQKGNDPVATGNRRADEAAKQAALSTRVLAETTKPAGKRTADGSEFEKRTADGSEFESPKKKAKVE

SEQ ID NO: 881 - protein, 2089 aa, synthetic construct
MPAAKRVKLDGGDKKYSIGLDIGTNSVGWAVITDEYKVPSKKFKVLGNTDRHSIKKNLIGALLFDSGETAEATRLKRTARRRYTRRKNRICYLQEIFSNEMAKVDDSFFHRLEESFLVEEDKKHERHPIFGNIVDEVAYHEKYPTIYHLRKKLVDSTDKADLRLIYLALAHMIKFRGHFLIEGDLNPDNSDVDKLFIQLVQTYNQLFEENPINASGVDAKAILSARLSKSRRLENLIAQLPGEKKNGLFGNLIALSLGLTPNFKSNFDLAEDAKLQLSKDTYDDDLDNLLAQIGDQYADLFLAAKNLSDAILLSDILRVNTEITKAPLSASMIKRYDEHHQDLTLLKALVRQQLPEKYKEIFFDQSKNGYAGYIDGGASQEEFYKFIKPILEKMDGTEELLVKLNREDLLRKQRTFDNGSIPHQIHLGELHAILRRQEDFYPFLKDNREKIEKILTFRIPYYVGPLARGNSRFAWMTRKSEETITPWNFEEVVDKGASAQSFIERMTNFDKNLPNEKVLPKHSLLYEYFTVYNELTKVKYVTEGMRKPAFLSGEQKKAIVDLLFKTNRKVTVKQLKEDYFKKIECFDSVEISGVEDRFNASLGTYHDLLKIIKDKDFLDNEENEDILEDIVLTLTLFEDREMIEERLKTYAHLFDDKVMKQLKRRRYTGWGRLSRKLINGIRDKQSGKTILDFLKSDGFANRNFMQLIHDDSLTFKEDIQKAQVSGQGDSLHEHIANLAGSPAIKKGILQTVKVVDELVKVMGRHKPENIVIEMARENQTTQKGQKNSRERMKRIEEGIKELGSQILKEHPVENTQLQNEKLYLYYLQNGRDMYVDQELDINRLSDYDVDHIVPQSFLKDDSIDNKVLTRSDKARGKSDNVPSEEVVKKMKNYWRQLLNAKLITQRKFDNLTKAERGGLSELDKAGFIKRQLVETRQITKHVAQILDSRMNTKYDENDKLIREVKVITLKSKLVSDFRKDFQFYKVREINNYHHAHDAYLNAVVGTALIKKYPKLESEFVYGDYKVYDVRKMIAKSEQEIGKATAKYFFYSNIMNFFKTEITLANGEIRKRPLIETNGETGEIVWDKGRDFATVRKVLSMPQVNIVKKTEVQTGGFSKESILPKRNSDKLIARKKDWDPKKYGGFDSPTVAYSVLVVAKVEKGKSKKLKSVKELLGITIMERSSFEKNPIDFLEAKGYKEVKKDLIIKLPKYSLFELENGRKRMLASAGELQKGNELALPSKYVNFLYLASHYEKLKGSPEDNEQKQLFVEQHKHYLDEIIEQISEFSKRVILADANLDKVLSAYNKHRDKPIREQAENIIHLFTLTNLGAPAAFKYFDTTIDRKRYTSTKEVLDATLIHQSITGLYETRIDLSQLGGDGGGGSGSSGGVLNLEEEYRLHEKPVPSSIDPSWLQLFPTVWAERAGMGLANQVPPVVVELRSGASPVAVRQYPMSKEAREGIRPHIQRFLDLGVLVPCQSPWNTPLLPVKKPGTNDYRPVQDLREINKRVQDIHPTVPNPYNLLSSLPPSHTWYSVLDLKDAFFCLKLHPNSQPLFAFEWRDPEKGNTGQLTWTRLPQGFKNSPTLFNEALHRDLAPFRALNPQVVLLQYVDDLLVAAPTYRDCKEGTQKLLQELSKLGYRVSAKKAQLCQKEVTYLGYLLKEGKRWLTPARKATVMKIPPPTTPRQVREFLGKAGFCRLFIPGFASLAAPLYPLTKPSIPFIWTEEHQKAFDRIKEALLSAPALALPDLTKPFTLYVDERAGVARGVLTQTLGPWRRPVAYLSKKLDPVASGWPTCLKAVAAVALLLKDADKLTLGQNVTVIASHSLESIVRQPPDRWMTNARMTHYQSLLLNERVSFAPPAVLNPATLLPVESEATPVHRCSEILAEETGTRRDLKDQPLPGVPAWYTDGSSFIAEGKRRAGAAIVDGKRTVWASSLPEGTSAQKAELVALTQALRLAEGKDINIYTDSRYAFATAHIHGAIYKQRGWLTSAGKDIKNKEEILALLEAIHLPKRVAIIHCPGHQKGNDPVATGNRRADEAAKQAALSTRVLAETTKPAGKRTADGSEFEKRTADGSEFESPKKKAKVE

SEQ ID NO: 882 - protein, 2089 aa, synthetic construct
MPAAKRVKLDGGDKKYSIGLDIGTNSVGWAVITDEYKVPSKKFKVLGNTDRHSIKKNLIGALLFDSGETAEATRLKRTARRRYTRRKNRICYLQEIFSNEMAKVDDSFFHRLEESFLVEEDKKHERHPIFGNIVDEVAYHEKYPTIYHLRKKLVDSTDKADLRLIYLALAHMIKFRGHFLIEGDLNPDNSDVDKLFIQLVQTYNQLFEENPINASGVDAKAILSARLSKSRRLENLIAQLPGEKKNGLFGNLIALSLGLTPNFKSNFDLAEDAKLQLSKDTYDDDLDNLLAQIGDQYADLFLAAKNLSDAILLSDILRVNTEITKAPLSASMIKRYDEHHQDLTLLKALVRQQLPEKYKEIFFDQSKNGYAGYIDGGASQEEFYKFIKPILEKMDGTEELLVKLNREDLLRKQRTFDNGSIPHQIHLGELHAILRRQEDFYPFLKDNREKIEKILTFRIPYYVGPLARGNSRFAWMTRKSEETITPWNFEEVVDKGASAQSFIERMTNFDKNLPNEKVLPKHSLLYEYFTVYNELTKVKYVTEGMRKPAFLSGEQKKAIVDLLFKTNRKVTVKQLKEDYFKKIECFDSVEISGVEDRFNASLGTYHDLLKIIKDKDFLDNEENEDILEDIVLTLTLFEDREMIEERLKTYAHLFDDKVMKQLKRRRYTGWGRLSRKLINGIRDKQSGKTILDFLKSDGFANRNFMQLIHDDSLTFKEDIQKAQVSGQGDSLHEHIANLAGSPAIKKGILQTVKVVDELVKVMGRHKPENIVIEMARENQTTQKGQKNSRERMKRIEEGIKELGSQILKEHPVENTQLQNEKLYLYYLQNGRDMYVDQELDINRLSDYDVDHIVPQSFLKDDSIDNKVLTRSDKARGKSDNVPSEEVVKKMKNYWRQLLNAKLITQRKFDNLTKAERGGLSELDKAGFIKRQLVETRQITKHVAQILDSRMNTKYDENDKLIREVKVITLKSKLVSDFRKDFQFYKVREINNYHHAHDAYLNAVVGTALIKKYPKLESEFVYGDYKVYDVRKMIAKSEQEIGKATAKYFFYSNIMNFFKTEITLANGEIRKRPLIETNGETGEIVWDKGRDFATVRKVLSMPQVNIVKKTEVQTGGFSKESILPKRNSDKLIARKKDWDPKKYGGFDSPTVAYSVLVVAKVEKGKSKKLKSVKELLGITIMERSSFEKNPIDFLEAKGYKEVKKDLIIKLPKYSLFELENGRKRMLASAGELQKGNELALPSKYVNFLYLASHYEKLKGSPEDNEQKQLFVEQHKHYLDEIIEQISEFSKRVILADANLDKVLSAYNKHRDKPIREQAENIIHLFTLTNLGAPAAFKYFDTTIDRKRYTSTKEVLDATLIHQSITGLYETRIDLSQLGGDGGGGGGGGGGVLNLEEEYRLHEKPVPSSIDPSWLQLFPTVWAERAGMGLANQVPPVVVELRSGASPVAVRQYPMSKEAREGIRPHIQRFLDLGVLVPCQSPWNTPLLPVKKPGTNDYRPVQDLREINKRVQDIHPTVPNPYNLLSSLPPSHTWYSVLDLKDAFFCLKLHPNSQPLFAFEWRDPEKGNTGQLTWTRLPQGFKNSPTLFNEALHRDLAPFRALNPQVVLLQYVDDLLVAAPTYRDCKEGTQKLLQELSKLGYRVSAKKAQLCQKEVTYLGYLLKEGKRWLTPARKATVMKIPPPTTPRQVREFLGKAGFCRLFIPGFASLAAPLYPLTKPSIPFIWTEEHQKAFDRIKEALLSAPALALPDLTKPFTLYVDERAGVARGVLTQTLGPWRRPVAYLSKKLDPVASGWPTCLKAVAAVALLLKDADKLTLGQNVTVIASHSLESIVRQPPDRWMTNARMTHYQSLLLNERVSFAPPAVLNPATLLPVESEATPVHRCSEILAEETGTRRDLKDQPLPGVPAWYTDGSSFIAEGKRRAGAAIVDGKRTVWASSLPEGTSAQKAELVALTQALRLAEGKDINIYTDSRYAFATAHIHGAIYKQRGWLTSAGKDIKNKEEILALLEAIHLPKRVAIIHCPGHQKGNDPVATGNRRADEAAKQAALSTRVLAETTKPAGKRTADGSEFEKRTADGSEFESPKKKAKVE

SEQ ID NO: 883 - protein, 2091 aa, synthetic construct
MPAAKRVKLDGGDKKYSIGLDIGTNSVGWAVITDEYKVPSKKFKVLGNTDRHSIKKNLIGALLFDSGETAEATRLKRTARRRYTRRKNRICYLQEIFSNEMAKVDDSFFHRLEESFLVEEDKKHERHPIFGNIVDEVAYHEKYPTIYHLRKKLVDSTDKADLRLIYLALAHMIKFRGHFLIEGDLNPDNSDVDKLFIQLVQTYNQLFEENPINASGVDAKAILSARLSKSRRLENLIAQLPGEKKNGLFGNLIALSLGLTPNFKSNFDLAEDAKLQLSKDTYDDDLDNLLAQIGDQYADLFLAAKNLSDAILLSDILRVNTEITKAPLSASMIKRYDEHHQDLTLLKALVRQQLPEKYKEIFFDQSKNGYAGYIDGGASQEEFYKFIKPILEKMDGTEELLVKLNREDLLRKQRTFDNGSIPHQIHLGELHAILRRQEDFYPFLKDNREKIEKILTFRIPYYVGPLARGNSRFAWMTRKSEETITPWNFEEVVDKGASAQSFIERMTNFDKNLPNEKVLPKHSLLYEYFTVYNELTKVKYVTEGMRKPAFLSGEQKKAIVDLLFKTNRKVTVKQLKEDYFKKIECFDSVEISGVEDRFNASLGTYHDLLKIIKDKDFLDNEENEDILEDIVLTLTLFEDREMIEERLKTYAHLFDDKVMKQLKRRRYTGWGRLSRKLINGIRDKQSGKTILDFLKSDGFANRNFMQLIHDDSLTFKEDIQKAQVSGQGDSLHEHIANLAGSPAIKKGILQTVKVVDELVKVMGRHKPENIVIEMARENQTTQKGQKNSRERMKRIEEGIKELGSQILKEHPVENTQLQNEKLYLYYLQNGRDMYVDQELDINRLSDYDVDHIVPQSFLKDDSIDNKVLTRSDKARGKSDNVPSEEVVKKMKNYWRQLLNAKLITQRKFDNLTKAERGGLSELDKAGFIKRQLVETRQITKHVAQILDSRMNTKYDENDKLIREVKVITLKSKLVSDFRKDFQFYKVREINNYHHAHDAYLNAVVGTALIKKYPKLESEFVYGDYKVYDVRKMIAKSEQEIGKATAKYFFYSNIMNFFKTEITLANGEIRKRPLIETNGETGEIVWDKGRDFATVRKVLSMPQVNIVKKTEVQTGGFSKESILPKRNSDKLIARKKDWDPKKYGGFDSPTVAYSVLVVAKVEKGKSKKLKSVKELLGITIMERSSFEKNPIDFLEAKGYKEVKKDLIIKLPKYSLFELENGRKRMLASAGELQKGNELALPSKYVNFLYLASHYEKLKGSPEDNEQKQLFVEQHKHYLDEIIEQISEFSKRVILADANLDKVLSAYNKHRDKPIREQAENIIHLFTLTNLGAPAAFKYFDTTIDRKRYTSTKEVLDATLIHQSITGLYETRIDLSQLGGDGGGSSEAAAKGGVLNLEEEYRLHEKPVPSSIDPSWLQLFPTVWAERAGMGLANQVPPVVVELRSGASPVAVRQYPMSKEAREGIRPHIQRFLDLGVLVPCQSPWNTPLLPVKKPGTNDYRPVQDLREINKRVQDIHPTVPNPYNLLSSLPPSHTWYSVLDLKDAFFCLKLHPNSQPLFAFEWRDPEKGNTGQLTWTRLPQGFKNSPTLFNEALHRDLAPFRALNPQVVLLQYVDDLLVAAPTYRDCKEGTQKLLQELSKLGYRVSAKKAQLCQKEVTYLGYLLKEGKRWLTPARKATVMKIPPPTTPRQVREFLGKAGFCRLFIPGFASLAAPLYPLTKPSIPFIWTEEHQKAFDRIKEALLSAPALALPDLTKPFTLYVDERAGVARGVLTQTLGPWRRPVAYLSKKLDPVASGWPTCLKAVAAVALLLKDADKLTLGQNVTVIASHSLESIVRQPPDRWMTNARMTHYQSLLLNERVSFAPPAVLNPATLLPVESEATPVHRCSEILAEETGTRRDLKDQPLPGVPAWYTDGSSFIAEGKRRAGAAIVDGKRTVWASSLPEGTSAQKAELVALTQALRLAEGKDINIYTDSRYAFATAHIHGAIYKQRGWLTSAGKDIKNKEEILALLEAIHLPKRVAIIHCPGHQKGNDPVATGNRRADEAAKQAALSTRVLAETTKPAGKRTADGSEFEKRTADGSEFESPKKKAKVE

SEQ ID NO: 884 - protein, 2089 aa, synthetic construct
MPAAKRVKLDGGDKKYSIGLDIGTNSVGWAVITDEYKVPSKKFKVLGNTDRHSIKKNLIGALLFDSGETAEATRLKRTARRRYTRRKNRICYLQEIFSNEMAKVDDSFFHRLEESFLVEEDKKHERHPIFGNIVDEVAYHEKYPTIYHLRKKLVDSTDKADLRLIYLALAHMIKFRGHFLIEGDLNPDNSDVDKLFIQLVQTYNQLFEENPINASGVDAKAILSARLSKSRRLENLIAQLPGEKKNGLFGNLIALSLGLTPNFKSNFDLAEDAKLQLSKDTYDDDLDNLLAQIGDQYADLFLAAKNLSDAILLSDILRVNTEITKAPLSASMIKRYDEHHQDLTLLKALVRQQLPEKYKEIFFDQSKNGYAGYIDGGASQEEFYKFIKPILEKMDGTEELLVKLNREDLLRKQRTFDNGSIPHQIHLGELHAILRRQEDFYPFLKDNREKIEKILTFRIPYYVGPLARGNSRFAWMTRKSEETITPWNFEEVVDKGASAQSFIERMTNFDKNLPNEKVLPKHSLLYEYFTVYNELTKVKYVTEGMRKPAFLSGEQKKAIVDLLFKTNRKVTVKQLKEDYFKKIECFDSVEISGVEDRFNASLGTYHDLLKIIKDKDFLDNEENEDILEDIVLTLTLFEDREMIEERLKTYAHLFDDKVMKQLKRRRYTGWGRLSRKLINGIRDKQSGKTILDFLKSDGFANRNFMQLIHDDSLTFKEDIQKAQVSGQGDSLHEHIANLAGSPAIKKGILQTVKVVDELVKVMGRHKPENIVIEMARENQTTQKGQKNSRERMKRIEEGIKELGSQILKEHPVENTQLQNEKLYLYYLQNGRDMYVDQELDINRLSDYDVDHIVPQSFLKDDSIDNKVLTRSDKARGKSDNVPSEEVVKKMKNYWRQLLNAKLITQRKFDNLTKAERGGLSELDKAGFIKRQLVETRQITKHVAQILDSRMNTKYDENDKLIREVKVITLKSKLVSDFRKDFQFYKVREINNYHHAHDAYLNAVVGTALIKKYPKLESEFVYGDYKVYDVRKMIAKSEQEIGKATAKYFFYSNIMNFFKTEITLANGEIRKRPLIETNGETGEIVWDKGRDFATVRKVLSMPQVNIVKKTEVQTGGFSKESILPKRNSDKLIARKKDWDPKKYGGFDSPTVAYSVLVVAKVEKGKSKKLKSVKELLGITIMERSSFEKNPIDFLEAKGYKEVKKDLIIKLPKYSLFELENGRKRMLASAGELQKGNELALPSKYVNFLYLASHYEKLKGSPEDNEQKQLFVEQHKHYLDEIIEQISEFSKRVILADANLDKVLSAYNKHRDKPIREQAENIIHLFTLTNLGAPAAFKYFDTTIDRKRYTSTKEVLDATLIHQSITGLYETRIDLSQLGGDGGGSSPAPGGVLNLEEEYRLHEKPVPSSIDPSWLQLFPTVWAERAGMGLANQVPPVVVELRSGASPVAVRQYPMSKEAREGIRPHIQRFLDLGVLVPCQSPWNTPLLPVKKPGTNDYRPVQDLREINKRVQDIHPTVPNPYNLLSSLPPSHTWYSVLDLKDAFFCLKLHPNSQPLFAFEWRDPEKGNTGQLTWTRLPQGFKNSPTLFNEALHRDLAPFRALNPQVVLLQYVDDLLVAAPTYRDCKEGTQKLLQELSKLGYRVSAKKAQLCQKEVTYLGYLLKEGKRWLTPARKATVMKIPPPTTPRQVREFLGKAGFCRLFIPGFASLAAPLYPLTKPSIPFIWTEEHQKAFDRIKEALLSAPALALPDLTKPFTLYVDERAGVARGVLTQTLGPWRRPVAYLSKKLDPVASGWPTCLKAVAAVALLLKDADKLTLGQNVTVIASHSLESIVRQPPDRWMTNARMTHYQSLLLNERVSFAPPAVLNPATLLPVESEATPVHRCSEILAEETGTRRDLKDQPLPGVPAWYTDGSSFIAEGKRRAGAAIVDGKRTVWASSLPEGTSAQKAELVALTQALRLAEGKDINIYTDSRYAFATAHIHGAIYKQRGWLTSAGKDIKNKEEILALLEAIHLPKRVAIIHCPGHQKGNDPVATGNRRADEAAKQAALSTRVLAETTKPAGKRTADGSEFEKRTADGSEFESPKKKAKVE

SEQ ID NO: 885 - protein, 2092 aa, synthetic construct
MPAAKRVKLDGGDKKYSIGLDIGTNSVGWAVITDEYKVPSKKFKVLGNTDRHSIKKNLIGALLFDSGETAEATRLKRTARRRYTRRKNRICYLQEIFSNEMAKVDDSFFHRLEESFLVEEDKKHERHPIFGNIVDEVAYHEKYPTIYHLRKKLVDSTDKADLRLIYLALAHMIKFRGHFLIEGDLNPDNSDVDKLFIQLVQTYNQLFEENPINASGVDAKAILSARLSKSRRLENLIAQLPGEKKNGLFGNLIALSLGLTPNFKSNFDLAEDAKLQLSKDTYDDDLDNLLAQIGDQYADLFLAAKNLSDAILLSDILRVNTEITKAPLSASMIKRYDEHHQDLTLLKALVRQQLPEKYKEIFFDQSKNGYAGYIDGGASQEEFYKFIKPILEKMDGTEELLVKLNREDLLRKQRTFDNGSIPHQIHLGELHAILRRQEDFYPFLKDNREKIEKILTFRIPYYVGPLARGNSRFAWMTRKSEETITPWNFEEVVDKGASAQSFIERMTNFDKNLPNEKVLPKHSLLYEYFTVYNELTKVKYVTEGMRKPAFLSGEQKKAIVDLLFKTNRKVTVKQLKEDYFKKIECFDSVEISGVEDRFNASLGTYHDLLKIIKDKDFLDNEENEDILEDIVLTLTLFEDREMIEERLKTYAHLFDDKVMKQLKRRRYTGWGRLSRKLINGIRDKQSGKTILDFLKSDGFANRNFMQLIHDDSLTFKEDIQKAQVSGQGDSLHEHIANLAGSPAIKKGILQTVKVVDELVKVMGRHKPENIVIEMARENQTTQKGQKNSRERMKRIEEGIKELGSQILKEHPVENTQLQNEKLYLYYLQNGRDMYVDQELDINRLSDYDVDHIVPQSFLKDDSIDNKVLTRSDKARGKSDNVPSEEVVKKMKNYWRQLLNAKLITQRKFDNLTKAERGGLSELDKAGFIKRQLVETRQITKHVAQILDSRMNTKYDENDKLIREVKVITLKSKLVSDFRKDFQFYKVREINNYHHAHDAYLNAVVGTALIKKYPKLESEFVYGDYKVYDVRKMIAKSEQEIGKATAKYFFYSNIMNFFKTEITLANGEIRKRPLIETNGETGEIVWDKGRDFATVRKVLSMPQVNIVKKTEVQTGGFSKESILPKRNSDKLIARKKDWDPKKYGGFDSPTVAYSVLVVAKVEKGKSKKLKSVKELLGITIMERSSFEKNPIDFLEAKGYKEVKKDLIIKLPKYSLFELENGRKRMLASAGELQKGNELALPSKYVNFLYLASHYEKLKGSPEDNEQKQLFVEQHKHYLDEIIEQISEFSKRVILADANLDKVLSAYNKHRDKPIREQAENIIHLFTLTNLGAPAAFKYFDTTIDRKRYTSTKEVLDATLIHQSITGLYETRIDLSQLGGDGGGGSGGSGGSGGVLNLEEEYRLHEKPVPSSIDPSWLQLFPTVWAERAGMGLANQVPPVVVELRSGASPVAVRQYPMSKEAREGIRPHIQRFLDLGVLVPCQSPWNTPLLPVKKPGTNDYRPVQDLREINKRVQDIHPTVPNPYNLLSSLPPSHTWYSVLDLKDAFFCLKLHPNSQPLFAFEWRDPEKGNTGQLTWTRLPQGFKNSPTLFNEALHRDLAPFRALNPQVVLLQYVDDLLVAAPTYRDCKEGTQKLLQELSKLGYRVSAKKAQLCQKEVTYLGYLLKEGKRWLTPARKATVMKIPPPTTPRQVREFLGKAGFCRLFIPGFASLAAPLYPLTKPSIPFIWTEEHQKAFDRIKEALLSAPALALPDLTKPFTLYVDERAGVARGVLTQTLGPWRRPVAYLSKKLDPVASGWPTCLKAVAAVALLLKDADKLTLGQNVTVIASHSLESIVRQPPDRWMTNARMTHYQSLLLNERVSFAPPAVLNPATLLPVESEATPVHRCSEILAEETGTRRDLKDQPLPGVPAWYTDGSSFIAEGKRRAGAAIVDGKRTVWASSLPEGTSAQKAELVALTQALRLAEGKDINIYTDSRYAFATAHIHGAIYKQRGWLTSAGKDIKNKEEILALLEAIHLPKRVAIIHCPGHQKGNDPVATGNRRADEAAKQAALSTRVLAETTKPAGKRTADGSEFEKRTADGSEFESPKKKAKVE

SEQ ID NO: 886 - protein, 2095 aa, synthetic construct
MPAAKRVKLDGGDKKYSIGLDIGTNSVGWAVITDEYKVPSKKFKVLGNTDRHSIKKNLIGALLFDSGETAEATRLKRTARRRYTRRKNRICYLQEIFSNEMAKVDDSFFHRLEESFLVEEDKKHERHPIFGNIVDEVAYHEKYPTIYHLRKKLVDSTDKADLRLIYLALAHMIKFRGHFLIEGDLNPDNSDVDKLFIQLVQTYNQLFEENPINASGVDAKAILSARLSKSRRLENLIAQLPGEKKNGLFGNLIALSLGLTPNFKSNFDLAEDAKLQLSKDTYDDDLDNLLAQIGDQYADLFLAAKNLSDAILLSDILRVNTEITKAPLSASMIKRYDEHHQDLTLLKALVRQQLPEKYKEIFFDQSKNGYAGYIDGGASQEEFYKFIKPILEKMDGTEELLVKLNREDLLRKQRTFDNGSIPHQIHLGELHAILRRQEDFYPFLKDNREKIEKILTFRIPYYVGPLARGNSRFAWMTRKSEETITPWNFEEVVDKGASAQSFIERMTNFDKNLPNEKVLPKHSLLYEYFTVYNELTKVKYVTEGMRKPAFLSGEQKKAIVDLLFKTNRKVTVKQLKEDYFKKIECFDSVEISGVEDRFNASLGTYHDLLKIIKDKDFLDNEENEDILEDIVLTLTLFEDREMIEERLKTYAHLFDDKVMKQLKRRRYTGWGRLSRKLINGIRDKQSGKTILDFLKSDGFANRNFMQLIHDDSLTFKEDIQKAQVSGQGDSLHEHIANLAGSPAIKKGILQTVKVVDELVKVMGRHKPENIVIEMARENQTTQKGQKNSRERMKRIEEGIKELGSQILKEHPVENTQLQNEKLYLYYLQNGRDMYVDQELDINRLSDYDVDHIVPQSFLKDDSIDNKVLTRSDKARGKSDNVPSEEVVKKMKNYWRQLLNAKLITQRKFDNLTKAERGGLSELDKAGFIKRQLVETRQITKHVAQILDSRMNTKYDENDKLIREVKVITLKSKLVSDFRKDFQFYKVREINNYHHAHDAYLNAVVGTALIKKYPKLESEFVYGDYKVYDVRKMIAKSEQEIGKATAKYFFYSNIMNFFKTEITLANGEIRKRPLIETNGETGEIVWDKGRDFATVRKVLSMPQVNIVKKTEVQTGGFSKESILPKRNSDKLIARKKDWDPKKYGGFDSPTVAYSVLVVAKVEKGKSKKLKSVKELLGITIMERSSFEKNPIDFLEAKGYKEVKKDLIIKLPKYSLFELENGRKRMLASAGELQKGNELALPSKYVNFLYLASHYEKLKGSPEDNEQKQLFVEQHKHYLDEIIEQISEFSKRVILADANLDKVLSAYNKHRDKPIREQAENIIHLFTLTNLGAPAAFKYFDTTIDRKRYTSTKEVLDATLIHQSITGLYETRIDLSQLGGDGGGGSGGSGGSGGSGGVLNLEEEYRLHEKPVPSSIDPSWLQLFPTVWAERAGMGLANQVPPVVVELRSGASPVAVRQYPMSKEAREGIRPHIQRFLDLGVLVPCQSPWNTPLLPVKKPGTNDYRPVQDLREINKRVQDIHPTVPNPYNLLSSLPPSHTWYSVLDLKDAFFCLKLHPNSQPLFAFEWRDPEKGNTGQLTWTRLPQGFKNSPTLFNEALHRDLAPFRALNPQVVLLQYVDDLLVAAPTYRDCKEGTQKLLQELSKLGYRVSAKKAQLCQKEVTYLGYLLKEGKRWLTPARKATVMKIPPPTTPRQVREFLGKAGFCRLFIPGFASLAAPLYPLTKPSIPFIWTEEHQKAFDRIKEALLSAPALALPDLTKPFTLYVDERAGVARGVLTQTLGPWRRPVAYLSKKLDPVASGWPTCLKAVAAVALLLKDADKLTLGQNVTVIASHSLESIVRQPPDRWMTNARMTHYQSLLLNERVSFAPPAVLNPATLLPVESEATPVHRCSEILAEETGTRRDLKDQPLPGVPAWYTDGSSFIAEGKRRAGAAIVDGKRTVWASSLPEGTSAQKAELVALTQALRLAEGKDINIYTDSRYAFATAHIHGAIYKQRGWLTSAGKDIKNKEEILALLEAIHLPKRVAIIHCPGHQKGNDPVATGNRRADEAAKQAALSTRVLAETTKPAGKRTADGSEFEKRTADGSEFESPKKKAKVE

SEQ ID NO: 887 - protein, 2095 aa, synthetic construct
MPAAKRVKLDGGDKKYSIGLDIGTNSVGWAVITDEYKVPSKKFKVLGNTDRHSIKKNLIGALLFDSGETAEATRLKRTARRRYTRRKNRICYLQEIFSNEMAKVDDSFFHRLEESFLVEEDKKHERHPIFGNIVDEVAYHEKYPTIYHLRKKLVDSTDKADLRLIYLALAHMIKFRGHFLIEGDLNPDNSDVDKLFIQLVQTYNQLFEENPINASGVDAKAILSARLSKSRRLENLIAQLPGEKKNGLFGNLIALSLGLTPNFKSNFDLAEDAKLQLSKDTYDDDLDNLLAQIGDQYADLFLAAKNLSDAILLSDILRVNTEITKAPLSASMIKRYDEHHQDLTLLKALVRQQLPEKYKEIFFDQSKNGYAGYIDGGASQEEFYKFIKPILEKMDGTEELLVKLNREDLLRKQRTFDNGSIPHQIHLGELHAILRRQEDFYPFLKDNREKIEKILTFRIPYYVGPLARGNSRFAWMTRKSEETITPWNFEEVVDKGASAQSFIERMTNFDKNLPNEKVLPKHSLLYEYFTVYNELTKVKYVTEGMRKPAFLSGEQKKAIVDLLFKTNRKVTVKQLKEDYFKKIECFDSVEISGVEDRFNASLGTYHDLLKIIKDKDFLDNEENEDILEDIVLTLTLFEDREMIEERLKTYAHLFDDKVMKQLKRRRYTGWGRLSRKLINGIRDKQSGKTILDFLKSDGFANRNFMQLIHDDSLTFKEDIQKAQVSGQGDSLHEHIANLAGSPAIKKGILQTVKVVDELVKVMGRHKPENIVIEMARENQTTQKGQKNSRERMKRIEEGIKELGSQILKEHPVENTQLQNEKLYLYYLQNGRDMYVDQELDINRLSDYDVDHIVPQSFLKDDSIDNKVLTRSDKARGKSDNVPSEEVVKKMKNYWRQLLNAKLITQRKFDNLTKAERGGLSELDKAGFIKRQLVETRQITKHVAQILDSRMNTKYDENDKLIREVKVITLKSKLVSDFRKDFQFYKVREINNYHHAHDAYLNAVVGTALIKKYPKLESEFVYGDYKVYDVRKMIAKSEQEIGKATAKYFFYSNIMNFFKTEITLANGEIRKRPLIETNGETGEIVWDKGRDFATVRKVLSMPQVNIVKKTEVQTGGFSKESILPKRNSDKLIARKKDWDPKKYGGFDSPTVAYSVLVVAKVEKGKSKKLKSVKELLGITIMERSSFEKNPIDFLEAKGYKEVKKDLIIKLPKYSLFELENGRKRMLASAGELQKGNELALPSKYVNFLYLASHYEKLKGSPEDNEQKQLFVEQHKHYLDEIIEQISEFSKRVILADANLDKVLSAYNKHRDKPIREQAENIIHLFTLTNLGAPAAFKYFDTTIDRKRYTSTKEVLDATLIHQSITGLYETRIDLSQLGGDGGGSSGSSGSSGSSGGVLNLEEEYRLHEKPVPSSIDPSWLQLFPTVWAERAGMGLANQVPPVVVELRSGASPVAVRQYPMSKEAREGIRPHIQRFLDLGVLVPCQSPWNTPLLPVKKPGTNDYRPVQDLREINKRVQDIHPTVPNPYNLLSSLPPSHTWYSVLDLKDAFFCLKLHPNSQPLFAFEWRDPEKGNTGQLTWTRLPQGFKNSPTLFNEALHRDLAPFRALNPQVVLLQYVDDLLVAAPTYRDCKEGTQKLLQELSKLGYRVSAKKAQLCQKEVTYLGYLLKEGKRWLTPARKATVMKIPPPTTPRQVREFLGKAGFCRLFIPGFASLAAPLYPLTKPSIPFIWTEEHQKAFDRIKEALLSAPALALPDLTKPFTLYVDERAGVARGVLTQTLGPWRRPVAYLSKKLDPVASGWPTCLKAVAAVALLLKDADKLTLGQNVTVIASHSLESIVRQPPDRWMTNARMTHYQSLLLNERVSFAPPAVLNPATLLPVESEATPVHRCSEILAEETGTRRDLKDQPLPGVPAWYTDGSSFIAEGKRRAGAAIVDGKRTVWASSLPEGTSAQKAELVALTQALRLAEGKDINIYTDSRYAFATAHIHGAIYKQRGWLTSAGKDIKNKEEILALLEAIHLPKRVAIIHCPGHQKGNDPVATGNRRADEAAKQAALSTRVLAETTKPAGKRTADGSEFEKRTADGSEFESPKKKAKVE

SEQ ID NO: 888 - protein, 2092 aa, synthetic construct
MPAAKRVKLDGGDKKYSIGLDIGTNSVGWAVITDEYKVPSKKFKVLGNTDRHSIKKNLIGALLFDSGETAEATRLKRTARRRYTRRKNRICYLQEIFSNEMAKVDDSFFHRLEESFLVEEDKKHERHPIFGNIVDEVAYHEKYPTIYHLRKKLVDSTDKADLRLIYLALAHMIKFRGHFLIEGDLNPDNSDVDKLFIQLVQTYNQLFEENPINASGVDAKAILSARLSKSRRLENLIAQLPGEKKNGLFGNLIALSLGLTPNFKSNFDLAEDAKLQLSKDTYDDDLDNLLAQIGDQYADLFLAAKNLSDAILLSDILRVNTEITKAPLSASMIKRYDEHHQDLTLLKALVRQQLPEKYKEIFFDQSKNGYAGYIDGGASQEEFYKFIKPILEKMDGTEELLVKLNREDLLRKQRTFDNGSIPHQIHLGELHAILRRQEDFYPFLKDNREKIEKILTFRIPYYVGPLARGNSRFAWMTRKSEETITPWNFEEVVDKGASAQSFIERMTNFDKNLPNEKVLPKHSLLYEYFTVYNELTKVKYVTEGMRKPAFLSGEQKKAIVDLLFKTNRKVTVKQLKEDYFKKIECFDSVEISGVEDRFNASLGTYHDLLKIIKDKDFLDNEENEDILEDIVLTLTLFEDREMIEERLKTYAHLFDDKVMKQLKRRRYTGWGRLSRKLINGIRDKQSGKTILDFLKSDGFANRNFMQLIHDDSLTFKEDIQKAQVSGQGDSLHEHIANLAGSPAIKKGILQTVKVVDELVKVMGRHKPENIVIEMARENQTTQKGQKNSRERMKRIEEGIKELGSQILKEHPVENTQLQNEKLYLYYLQNGRDMYVDQELDINRLSDYDVDHIVPQSFLKDDSIDNKVLTRSDKARGKSDNVPSEEVVKKMKNYWRQLLNAKLITQRKFDNLTKAERGGLSELDKAGFIKRQLVETRQITKHVAQILDSRMNTKYDENDKLIREVKVITLKSKLVSDFRKDFQFYKVREINNYHHAHDAYLNAVVGTALIKKYPKLESEFVYGDYKVYDVRKMIAKSEQEIGKATAKYFFYSNIMNFFKTEITLANGEIRKRPLIETNGETGEIVWDKGRDFATVRKVLSMPQVNIVKKTEVQTGGFSKESILPKRNSDKLIARKKDWDPKKYGGFDSPTVAYSVLVVAKVEKGKSKKLKSVKELLGITIMERSSFEKNPIDFLEAKGYKEVKKDLIIKLPKYSLFELENGRKRMLASAGELQKGNELALPSKYVNFLYLASHYEKLKGSPEDNEQKQLFVEQHKHYLDEIIEQISEFSKRVILADANLDKVLSAYNKHRDKPIREQAENIIHLFTLTNLGAPAAFKYFDTTIDRKRYTSTKEVLDATLIHQSITGLYETRIDLSQLGGDGGGGGGSSPAPGGVLNLEEEYRLHEKPVPSSIDPSWLQLFPTVWAERAGMGLANQVPPVVVELRSGASPVAVRQYPMSKEAREGIRPHIQRFLDLGVLVPCQSPWNTPLLPVKKPGTNDYRPVQDLREINKRVQDIHPTVPNPYNLLSSLPPSHTWYSVLDLKDAFFCLKLHPNSQPLFAFEWRDPEKGNTGQLTWTRLPQGFKNSPTLFNEALHRDLAPFRALNPQVVLLQYVDDLLVAAPTYRDCKEGTQKLLQELSKLGYRVSAKKAQLCQKEVTYLGYLLKEGKRWLTPARKATVMKIPPPTTPRQVREFLGKAGFCRLFIPGFASLAAPLYPLTKPSIPFIWTEEHQKAFDRIKEALLSAPALALPDLTKPFTLYVDERAGVARGVLTQTLGPWRRPVAYLSKKLDPVASGWPTCLKAVAAVALLLKDADKLTLGQNVTVIASHSLESIVRQPPDRWMTNARMTHYQSLLLNERVSFAPPAVLNPATLLPVESEATPVHRCSEILAEETGTRRDLKDQPLPGVPAWYTDGSSFIAEGKRRAGAAIVDGKRTVWASSLPEGTSAQKAELVALTQALRLAEGKDINIYTDSRYAFATAHIHGAIYKQRGWLTSAGKDIKNKEEILALLEAIHLPKRVAIIHCPGHQKGNDPVATGNRRADEAAKQAALSTRVLAETTKPAGKRTADGSEFEKRTADGSEFESPKKKAKVE

SEQ ID NO: 889 - protein, 2092 aa, synthetic construct
MPAAKRVKLDGGDKKYSIGLDIGTNSVGWAVITDEYKVPSKKFKVLGNTDRHSIKKNLIGALLFDSGETAEATRLKRTARRRYTRRKNRICYLQEIFSNEMAKVDDSFFHRLEESFLVEEDKKHERHPIFGNIVDEVAYHEKYPTIYHLRKKLVDSTDKADLRLIYLALAHMIKFRGHFLIEGDLNPDNSDVDKLFIQLVQTYNQLFEENPINASGVDAKAILSARLSKSRRLENLIAQLPGEKKNGLFGNLIALSLGLTPNFKSNFDLAEDAKLQLSKDTYDDDLDNLLAQIGDQYADLFLAAKNLSDAILLSDILRVNTEITKAPLSASMIKRYDEHHQDLTLLKALVRQQLPEKYKEIFFDQSKNGYAGYIDGGASQEEFYKFIKPILEKMDGTEELLVKLNREDLLRKQRTFDNGSIPHQIHLGELHAILRRQEDFYPFLKDNREKIEKILTFRIPYYVGPLARGNSRFAWMTRKSEETITPWNFEEVVDKGASAQSFIERMTNFDKNLPNEKVLPKHSLLYEYFTVYNELTKVKYVTEGMRKPAFLSGEQKKAIVDLLFKTNRKVTVKQLKEDYFKKIECFDSVEISGVEDRFNASLGTYHDLLKIIKDKDFLDNEENEDILEDIVLTLTLFEDREMIEERLKTYAHLFDDKVMKQLKRRRYTGWGRLSRKLINGIRDKQSGKTILDFLKSDGFANRNFMQLIHDDSLTFKEDIQKAQVSGQGDSLHEHIANLAGSPAIKKGILQTVKVVDELVKVMGRHKPENIVIEMARENQTTQKGQKNSRERMKRIEEGIKELGSQILKEHPVENTQLQNEKLYLYYLQNGRDMYVDQELDINRLSDYDVDHIVPQSFLKDDSIDNKVLTRSDKARGKSDNVPSEEVVKKMKNYWRQLLNAKLITQRKFDNLTKAERGGLSELDKAGFIKRQLVETRQITKHVAQILDSRMNTKYDENDKLIREVKVITLKSKLVSDFRKDFQFYKVREINNYHHAHDAYLNAVVGTALIKKYPKLESEFVYGDYKVYDVRKMIAKSEQEIGKATAKYFFYSNIMNFFKTEITLANGEIRKRPLIETNGETGEIVWDKGRDFATVRKVLSMPQVNIVKKTEVQTGGFSKESILPKRNSDKLIARKKDWDPKKYGGFDSPTVAYSVLVVAKVEKGKSKKLKSVKELLGITIMERSSFEKNPIDFLEAKGYKEVKKDLIIKLPKYSLFELENGRKRMLASAGELQKGNELALPSKYVNFLYLASHYEKLKGSPEDNEQKQLFVEQHKHYLDEIIEQISEFSKRVILADANLDKVLSAYNKHRDKPIREQAENIIHLFTLTNLGAPAAFKYFDTTIDRKRYTSTKEVLDATLIHQSITGLYETRIDLSQLGGDGGPAPGGSGGGGGVLNLEEEYRLHEKPVPSSIDPSWLQLFPTVWAERAGMGLANQVPPVVVELRSGASPVAVRQYPMSKEAREGIRPHIQRFLDLGVLVPCQSPWNTPLLPVKKPGTNDYRPVQDLREINKRVQDIHPTVPNPYNLLSSLPPSHTWYSVLDLKDAFFCLKLHPNSQPLFAFEWRDPEKGNTGQLTWTRLPQGFKNSPTLFNEALHRDLAPFRALNPQVVLLQYVDDLLVAAPTYRDCKEGTQKLLQELSKLGYRVSAKKAQLCQKEVTYLGYLLKEGKRWLTPARKATVMKIPPPTTPRQVREFLGKAGFCRLFIPGFASLAAPLYPLTKPSIPFIWTEEHQKAFDRIKEALLSAPALALPDLTKPFTLYVDERAGVARGVLTQTLGPWRRPVAYLSKKLDPVASGWPTCLKAVAAVALLLKDADKLTLGQNVTVIASHSLESIVRQPPDRWMTNARMTHYQSLLLNERVSFAPPAVLNPATLLPVESEATPVHRCSEILAEETGTRRDLKDQPLPGVPAWYTDGSSFIAEGKRRAGAAIVDGKRTVWASSLPEGTSAQKAELVALTQALRLAEGKDINIYTDSRYAFATAHIHGAIYKQRGWLTSAGKDIKNKEEILALLEAIHLPKRVAIIHCPGHQKGNDPVATGNRRADEAAKQAALSTRVLAETTKPAGKRTADGSEFEKRTADGSEFESPKKKAKVE

SEQ ID NO: 890 - protein, 2096 aa, synthetic construct
MPAAKRVKLDGGDKKYSIGLDIGTNSVGWAVITDEYKVPSKKFKVLGNTDRHSIKKNLIGALLFDSGETAEATRLKRTARRRYTRRKNRICYLQEIFSNEMAKVDDSFFHRLEESFLVEEDKKHERHPIFGNIVDEVAYHEKYPTIYHLRKKLVDSTDKADLRLIYLALAHMIKFRGHFLIEGDLNPDNSDVDKLFIQLVQTYNQLFEENPINASGVDAKAILSARLSKSRRLENLIAQLPGEKKNGLFGNLIALSLGLTPNFKSNFDLAEDAKLQLSKDTYDDDLDNLLAQIGDQYADLFLAAKNLSDAILLSDILRVNTEITKAPLSASMIKRYDEHHQDLTLLKALVRQQLPEKYKEIFFDQSKNGYAGYIDGGASQEEFYKFIKPILEKMDGTEELLVKLNREDLLRKQRTFDNGSIPHQIHLGELHAILRRQEDFYPFLKDNREKIEKILTFRIPYYVGPLARGNSRFAWMTRKSEETITPWNFEEVVDKGASAQSFIERMTNFDKNLPNEKVLPKHSLLYEYFTVYNELTKVKYVTEGMRKPAFLSGEQKKAIVDLLFKTNRKVTVKQLKEDYFKKIECFDSVEISGVEDRFNASLGTYHDLLKIIKDKDFLDNEENEDILEDIVLTLTLFEDREMIEERLKTYAHLFDDKVMKQLKRRRYTGWGRLSRKLINGIRDKQSGKTILDFLKSDGFANRNFMQLIHDDSLTFKEDIQKAQVSGQGDSLHEHIANLAGSPAIKKGILQTVKVVDELVKVMGRHKPENIVIEMARENQTTQKGQKNSRERMKRIEEGIKELGSQILKEHPVENTQLQNEKLYLYYLQNGRDMYVDQELDINRLSDYDVDHIVPQSFLKDDSIDNKVLTRSDKARGKSDNVPSEEVVKKMKNYWRQLLNAKLITQRKFDNLTKAERGGLSELDKAGFIKRQLVETRQITKHVAQILDSRMNTKYDENDKLIREVKVITLKSKLVSDFRKDFQFYKVREINNYHHAHDAYLNAVVGTALIKKYPKLESEFVYGDYKVYDVRKMIAKSEQEIGKATAKYFFYSNIMNFFKTEITLANGEIRKRPLIETNGETGEIVWDKGRDFATVRKVLSMPQVNIVKKTEVQTGGFSKESILPKRNSDKLIARKKDWDPKKYGGFDSPTVAYSVLVVAKVEKGKSKKLKSVKELLGITIMERSSFEKNPIDFLEAKGYKEVKKDLIIKLPKYSLFELENGRKRMLASAGELQKGNELALPSKYVNFLYLASHYEKLKGSPEDNEQKQLFVEQHKHYLDEIIEQISEFSKRVILADANLDKVLSAYNKHRDKPIREQAENIIHLFTLTNLGAPAAFKYFDTTIDRKRYTSTKEVLDATLIHQSITGLYETRIDLSQLGGDGGPAPAPAPAPAPAPGGVLNLEEEYRLHEKPVPSSIDPSWLQLFPTVWAERAGMGLANQVPPVVVELRSGASPVAVRQYPMSKEAREGIRPHIQRFLDLGVLVPCQSPWNTPLLPVKKPGTNDYRPVQDLREINKRVQDIHPTVPNPYNLLSSLPPSHTWYSVLDLKDAFFCLKLHPNSQPLFAFEWRDPEKGNTGQLTWTRLPQGFKNSPTLFNEALHRDLAPFRALNPQVVLLQYVDDLLVAAPTYRDCKEGTQKLLQELSKLGYRVSAKKAQLCQKEVTYLGYLLKEGKRWLTPARKATVMKIPPPTTPRQVREFLGKAGFCRLFIPGFASLAAPLYPLTKPSIPFIWTEEHQKAFDRIKEALLSAPALALPDLTKPFTLYVDERAGVARGVLTQTLGPWRRPVAYLSKKLDPVASGWPTCLKAVAAVALLLKDADKLTLGQNVTVIASHSLESIVRQPPDRWMTNARMTHYQSLLLNERVSFAPPAVLNPATLLPVESEATPVHRCSEILAEETGTRRDLKDQPLPGVPAWYTDGSSFIAEGKRRAGAAIVDGKRTVWASSLPEGTSAQKAELVALTQALRLAEGKDINIYTDSRYAFATAHIHGAIYKQRGWLTSAGKDIKNKEEILALLEAIHLPKRVAIIHCPGHQKGNDPVATGNRRADEAAKQAALSTRVLAETTKPAGKRTADGSEFEKRTADGSEFESPKKKAKVE

SEQ ID NO: 891 - protein, 2094 aa, synthetic construct
MPAAKRVKLDGGDKKYSIGLDIGTNSVGWAVITDEYKVPSKKFKVLGNTDRHSIKKNLIGALLFDSGETAEATRLKRTARRRYTRRKNRICYLQEIFSNEMAKVDDSFFHRLEESFLVEEDKKHERHPIFGNIVDEVAYHEKYPTIYHLRKKLVDSTDKADLRLIYLALAHMIKFRGHFLIEGDLNPDNSDVDKLFIQLVQTYNQLFEENPINASGVDAKAILSARLSKSRRLENLIAQLPGEKKNGLFGNLIALSLGLTPNFKSNFDLAEDAKLQLSKDTYDDDLDNLLAQIGDQYADLFLAAKNLSDAILLSDILRVNTEITKAPLSASMIKRYDEHHQDLTLLKALVRQQLPEKYKEIFFDQSKNGYAGYIDGGASQEEFYKFIKPILEKMDGTEELLVKLNREDLLRKQRTFDNGSIPHQIHLGELHAILRRQEDFYPFLKDNREKIEKILTFRIPYYVGPLARGNSRFAWMTRKSEETITPWNFEEVVDKGASAQSFIERMTNFDKNLPNEKVLPKHSLLYEYFTVYNELTKVKYVTEGMRKPAFLSGEQKKAIVDLLFKTNRKVTVKQLKEDYFKKIECFDSVEISGVEDRFNASLGTYHDLLKIIKDKDFLDNEENEDILEDIVLTLTLFEDREMIEERLKTYAHLFDDKVMKQLKRRRYTGWGRLSRKLINGIRDKQSGKTILDFLKSDGFANRNFMQLIHDDSLTFKEDIQKAQVSGQGDSLHEHIANLAGSPAIKKGILQTVKVVDELVKVMGRHKPENIVIEMARENQTTQKGQKNSRERMKRIEEGIKELGSQILKEHPVENTQLQNEKLYLYYLQNGRDMYVDQELDINRLSDYDVDHIVPQSFLKDDSIDNKVLTRSDKARGKSDNVPSEEVVKKMKNYWRQLLNAKLITQRKFDNLTKAERGGLSELDKAGFIKRQLVETRQITKHVAQILDSRMNTKYDENDKLIREVKVITLKSKLVSDFRKDFQFYKVREINNYHHAHDAYLNAVVGTALIKKYPKLESEFVYGDYKVYDVRKMIAKSEQEIGKATAKYFFYSNIMNFFKTEITLANGEIRKRPLIETNGETGEIVWDKGRDFATVRKVLSMPQVNIVKKTEVQTGGFSKESILPKRNSDKLIARKKDWDPKKYGGFDSPTVAYSVLVVAKVEKGKSKKLKSVKELLGITIMERSSFEKNPIDFLEAKGYKEVKKDLIIKLPKYSLFELENGRKRMLASAGELQKGNELALPSKYVNFLYLASHYEKLKGSPEDNEQKQLFVEQHKHYLDEIIEQISEFSKRVILADANLDKVLSAYNKHRDKPIREQAENIIHLFTLTNLGAPAAFKYFDTTIDRKRYTSTKEVLDATLIHQSITGLYETRIDLSQLGGDGGEAAAKGSSGGGGGVLNLEEEYRLHEKPVPSSIDPSWLQLFPTVWAERAGMGLANQVPPVVVELRSGASPVAVRQYPMSKEAREGIRPHIQRFLDLGVLVPCQSPWNTPLLPVKKPGTNDYRPVQDLREINKRVQDIHPTVPNPYNLLSSLPPSHTWYSVLDLKDAFFCLKLHPNSQPLFAFEWRDPEKGNTGQLTWTRLPQGFKNSPTLFNEALHRDLAPFRALNPQVVLLQYVDDLLVAAPTYRDCKEGTQKLLQELSKLGYRVSAKKAQLCQKEVTYLGYLLKEGKRWLTPARKATVMKIPPPTTPRQVREFLGKAGFCRLFIPGFASLAAPLYPLTKPSIPFIWTEEHQKAFDRIKEALLSAPALALPDLTKPFTLYVDERAGVARGVLTQTLGPWRRPVAYLSKKLDPVASGWPTCLKAVAAVALLLKDADKLTLGQNVTVIASHSLESIVRQPPDRWMTNARMTHYQSLLLNERVSFAPPAVLNPATLLPVESEATPVHRCSEILAEETGTRRDLKDQPLPGVPAWYTDGSSFIAEGKRRAGAAIVDGKRTVWASSLPEGTSAQKAELVALTQALRLAEGKDINIYTDSRYAFATAHIHGAIYKQRGWLTSAGKDIKNKEEILALLEAIHLPKRVAIIHCPGHQKGNDPVATGNRRADEAAKQAALSTRVLAETTKPAGKRTADGSEFEKRTADGSEFESPKKKAKVE

SEQ ID NO: 892 - protein, 2094 aa, synthetic construct
MPAAKRVKLDGGDKKYSIGLDIGTNSVGWAVITDEYKVPSKKFKVLGNTDRHSIKKNLIGALLFDSGETAEATRLKRTARRRYTRRKNRICYLQEIFSNEMAKVDDSFFHRLEESFLVEEDKKHERHPIFGNIVDEVAYHEKYPTIYHLRKKLVDSTDKADLRLIYLALAHMIKFRGHFLIEGDLNPDNSDVDKLFIQLVQTYNQLFEENPINASGVDAKAILSARLSKSRRLENLIAQLPGEKKNGLFGNLIALSLGLTPNFKSNFDLAEDAKLQLSKDTYDDDLDNLLAQIGDQYADLFLAAKNLSDAILLSDILRVNTEITKAPLSASMIKRYDEHHQDLTLLKALVRQQLPEKYKEIFFDQSKNGYAGYIDGGASQEEFYKFIKPILEKMDGTEELLVKLNREDLLRKQRTFDNGSIPHQIHLGELHAILRRQEDFYPFLKDNREKIEKILTFRIPYYVGPLARGNSRFAWMTRKSEETITPWNFEEVVDKGASAQSFIERMTNFDKNLPNEKVLPKHSLLYEYFTVYNELTKVKYVTEGMRKPAFLSGEQKKAIVDLLFKTNRKVTVKQLKEDYFKKIECFDSVEISGVEDRFNASLGTYHDLLKIIKDKDFLDNEENEDILEDIVLTLTLFEDREMIEERLKTYAHLFDDKVMKQLKRRRYTGWGRLSRKLINGIRDKQSGKTILDFLKSDGFANRNFMQLIHDDSLTFKEDIQKAQVSGQGDSLHEHIANLAGSPAIKKGILQTVKVVDELVKVMGRHKPENIVIEMARENQTTQKGQKNSRERMKRIEEGIKELGSQILKEHPVENTQLQNEKLYLYYLQNGRDMYVDQELDINRLSDYDVDHIVPQSFLKDDSIDNKVLTRSDKARGKSDNVPSEEVVKKMKNYWRQLLNAKLITQRKFDNLTKAERGGLSELDKAGFIKRQLVETRQITKHVAQILDSRMNTKYDENDKLIREVKVITLKSKLVSDFRKDFQFYKVREINNYHHAHDAYLNAVVGTALIKKYPKLESEFVYGDYKVYDVRKMIAKSEQEIGKATAKYFFYSNIMNFFKTEITLANGEIRKRPLIETNGETGEIVWDKGRDFATVRKVLSMPQVNIVKKTEVQTGGFSKESILPKRNSDKLIARKKDWDPKKYGGFDSPTVAYSVLVVAKVEKGKSKKLKSVKELLGITIMERSSFEKNPIDFLEAKGYKEVKKDLIIKLPKYSLFELENGRKRMLASAGELQKGNELALPSKYVNFLYLASHYEKLKGSPEDNEQKQLFVEQHKHYLDEIIEQISEFSKRVILADANLDKVLSAYNKHRDKPIREQAENIIHLFTLTNLGAPAAFKYFDTTIDRKRYTSTKEVLDATLIHQSITGLYETRIDLSQLGGDGGPAPEAAAKGSSGGVLNLEEEYRLHEKPVPSSIDPSWLQLFPTVWAERAGMGLANQVPPVVVELRSGASPVAVRQYPMSKEAREGIRPHIQRFLDLGVLVPCQSPWNTPLLPVKKPGTNDYRPVQDLREINKRVQDIHPTVPNPYNLLSSLPPSHTWYSVLDLKDAFFCLKLHPNSQPLFAFEWRDPEKGNTGQLTWTRLPQGFKNSPTLFNEALHRDLAPFRALNPQVVLLQYVDDLLVAAPTYRDCKEGTQKLLQELSKLGYRVSAKKAQLCQKEVTYLGYLLKEGKRWLTPARKATVMKIPPPTTPRQVREFLGKAGFCRLFIPGFASLAAPLYPLTKPSIPFIWTEEHQKAFDRIKEALLSAPALALPDLTKPFTLYVDERAGVARGVLTQTLGPWRRPVAYLSKKLDPVASGWPTCLKAVAAVALLLKDADKLTLGQNVTVIASHSLESIVRQPPDRWMTNARMTHYQSLLLNERVSFAPPAVLNPATLLPVESEATPVHRCSEILAEETGTRRDLKDQPLPGVPAWYTDGSSFIAEGKRRAGAAIVDGKRTVWASSLPEGTSAQKAELVALTQALRLAEGKDINIYTDSRYAFATAHIHGAIYKQRGWLTSAGKDIKNKEEILALLEAIHLPKRVAIIHCPGHQKGNDPVATGNRRADEAAKQAALSTRVLAETTKPAGKRTADGSEFEKRTADGSEFESPKKKAKVE

SEQ ID NO: 893 - protein, 2113 aa, synthetic construct
MPAAKRVKLDGGDKKYSIGLDIGTNSVGWAVITDEYKVPSKKFKVLGNTDRHSIKKNLIGALLFDSGETAEATRLKRTARRRYTRRKNRICYLQEIFSNEMAKVDDSFFHRLEESFLVEEDKKHERHPIFGNIVDEVAYHEKYPTIYHLRKKLVDSTDKADLRLIYLALAHMIKFRGHFLIEGDLNPDNSDVDKLFIQLVQTYNQLFEENPINASGVDAKAILSARLSKSRRLENLIAQLPGEKKNGLFGNLIALSLGLTPNFKSNFDLAEDAKLQLSKDTYDDDLDNLLAQIGDQYADLFLAAKNLSDAILLSDILRVNTEITKAPLSASMIKRYDEHHQDLTLLKALVRQQLPEKYKEIFFDQSKNGYAGYIDGGASQEEFYKFIKPILEKMDGTEELLVKLNREDLLRKQRTFDNGSIPHQIHLGELHAILRRQEDFYPFLKDNREKIEKILTFRIPYYVGPLARGNSRFAWMTRKSEETITPWNFEEVVDKGASAQSFIERMTNFDKNLPNEKVLPKHSLLYEYFTVYNELTKVKYVTEGMRKPAFLSGEQKKAIVDLLFKTNRKVTVKQLKEDYFKKIECFDSVEISGVEDRFNASLGTYHDLLKIIKDKDFLDNEENEDILEDIVLTLTLFEDREMIEERLKTYAHLFDDKVMKQLKRRRYTGWGRLSRKLINGIRDKQSGKTILDFLKSDGFANRNFMQLIHDDSLTFKEDIQKAQVSGQGDSLHEHIANLAGSPAIKKGILQTVKVVDELVKVMGRHKPENIVIEMARENQTTQKGQKNSRERMKRIEEGIKELGSQILKEHPVENTQLQNEKLYLYYLQNGRDMYVDQELDINRLSDYDVDHIVPQSFLKDDSIDNKVLTRSDKARGKSDNVPSEEVVKKMKNYWRQLLNAKLITQRKFDNLTKAERGGLSELDKAGFIKRQLVETRQITKHVAQILDSRMNTKYDENDKLIREVKVITLKSKLVSDFRKDFQFYKVREINNYHHAHDAYLNAVVGTALIKKYPKLESEFVYGDYKVYDVRKMIAKSEQEIGKATAKYFFYSNIMNFFKTEITLANGEIRKRPLIETNGETGEIVWDKGRDFATVRKVLSMPQVNIVKKTEVQTGGFSKESILPKRNSDKLIARKKDWDPKKYGGFDSPTVAYSVLVVAKVEKGKSKKLKSVKELLGITIMERSSFEKNPIDFLEAKGYKEVKKDLIIKLPKYSLFELENGRKRMLASAGELQKGNELALPSKYVNFLYLASHYEKLKGSPEDNEQKQLFVEQHKHYLDEIIEQISEFSKRVILADANLDKVLSAYNKHRDKPIREQAENIIHLFTLTNLGAPAAFKYFDTTIDRKRYTSTKEVLDATLIHQSITGLYETRIDLSQLGGDGGEAAAKEAAAKEAAAKEAAAKEAAAKEAAAKGGVLNLEEEYRLHEKPVPSSIDPSWLQLFPTVWAERAGMGLANQVPPVVVELRSGASPVAVRQYPMSKEAREGIRPHIQRFLDLGVLVPCQSPWNTPLLPVKKPGTNDYRPVQDLREINKRVQDIHPTVPNPYNLLSSLPPSHTWYSVLDLKDAFFCLKLHPNSQPLFAFEWRDPEKGNTGQLTWTRLPQGFKNSPTLFNEALHRDLAPFRALNPQVVLLQYVDDLLVAAPTYRDCKEGTQKLLQELSKLGYRVSAKKAQLCQKEVTYLGYLLKEGKRWLTPARKATVMKIPPPTTPRQVREFLGKAGFCRLFIPGFASLAAPLYPLTKPSIPFIWTEEHQKAFDRIKEALLSAPALALPDLTKPFTLYVDERAGVARGVLTQTLGPWRRPVAYLSKKLDPVASGWPTCLKAVAAVALLLKDADKLTLGQNVTVIASHSLESIVRQPPDRWMTNARMTHYQSLLLNERVSFAPPAVLNPATLLPVESEATPVHRCSEILAEETGTRRDLKDQPLPGVPAWYTDGSSFIAEGKRRAGAAIVDGKRTVWASSLPEGTSAQKAELVALTQALRLAEGKDINIYTDSRYAFATAHIHGAIYKQRGWLTSAGKDIKNKEEILALLEAIHLPKRVAIIHCPGHQKGNDPVATGNRRADEAAKQAALSTRVLAETTKPAGKRTADGSEFEKRTADGSEFESPKKKAKVE

SEQ ID NO: 894 - protein, 2088 aa, synthetic construct
MPAAKRVKLDGGDKKYSIGLDIGTNSVGWAVITDEYKVPSKKFKVLGNTDRHSIKKNLIGALLFDSGETAEATRLKRTARRRYTRRKNRICYLQEIFSNEMAKVDDSFFHRLEESFLVEEDKKHERHPIFGNIVDEVAYHEKYPTIYHLRKKLVDSTDKADLRLIYLALAHMIKFRGHFLIEGDLNPDNSDVDKLFIQLVQTYNQLFEENPINASGVDAKAILSARLSKSRRLENLIAQLPGEKKNGLFGNLIALSLGLTPNFKSNFDLAEDAKLQLSKDTYDDDLDNLLAQIGDQYADLFLAAKNLSDAILLSDILRVNTEITKAPLSASMIKRYDEHHQDLTLLKALVRQQLPEKYKEIFFDQSKNGYAGYIDGGASQEEFYKFIKPILEKMDGTEELLVKLNREDLLRKQRTFDNGSIPHQIHLGELHAILRRQEDFYPFLKDNREKIEKILTFRIPYYVGPLARGNSRFAWMTRKSEETITPWNFEEVVDKGASAQSFIERMTNFDKNLPNEKVLPKHSLLYEYFTVYNELTKVKYVTEGMRKPAFLSGEQKKAIVDLLFKTNRKVTVKQLKEDYFKKIECFDSVEISGVEDRFNASLGTYHDLLKIIKDKDFLDNEENEDILEDIVLTLTLFEDREMIEERLKTYAHLFDDKVMKQLKRRRYTGWGRLSRKLINGIRDKQSGKTILDFLKSDGFANRNFMQLIHDDSLTFKEDIQKAQVSGQGDSLHEHIANLAGSPAIKKGILQTVKVVDELVKVMGRHKPENIVIEMARENQTTQKGQKNSRERMKRIEEGIKELGSQILKEHPVENTQLQNEKLYLYYLQNGRDMYVDQELDINRLSDYDVDHIVPQSFLKDDSIDNKVLTRSDKARGKSDNVPSEEVVKKMKNYWRQLLNAKLITQRKFDNLTKAERGGLSELDKAGFIKRQLVETRQITKHVAQILDSRMNTKYDENDKLIREVKVITLKSKLVSDFRKDFQFYKVREINNYHHAHDAYLNAVVGTALIKKYPKLESEFVYGDYKVYDVRKMIAKSEQEIGKATAKYFFYSNIMNFFKTEITLANGEIRKRPLIETNGETGEIVWDKGRDFATVRKVLSMPQVNIVKKTEVQTGGFSKESILPKRNSDKLIARKKDWDPKKYGGFDSPTVAYSVLVVAKVEKGKSKKLKSVKELLGITIMERSSFEKNPIDFLEAKGYKEVKKDLIIKLPKYSLFELENGRKRMLASAGELQKGNELALPSKYVNFLYLASHYEKLKGSPEDNEQKQLFVEQHKHYLDEIIEQISEFSKRVILADANLDKVLSAYNKHRDKPIREQAENIIHLFTLTNLGAPAAFKYFDTTIDRKRYTSTKEVLDATLIHQSITGLYETRIDLSQLGGDGGEAAAKGGVLNLEEEYRLHEKPVPSSIDPSWLQLFPTVWAERAGMGLANQVPPVVVELRSGASPVAVRQYPMSKEAREGIRPHIQRFLDLGVLVPCQSPWNTPLLPVKKPGTNDYRPVQDLREINKRVQDIHPTVPNPYNLLSSLPPSHTWYSVLDLKDAFFCLKLHPNSQPLFAFEWRDPEKGNTGQLTWTRLPQGFKNSPTLFNEALHRDLAPFRALNPQVVLLQYVDDLLVAAPTYRDCKEGTQKLLQELSKLGYRVSAKKAQLCQKEVTYLGYLLKEGKRWLTPARKATVMKIPPPTTPRQVREFLGKAGFCRLFIPGFASLAAPLYPLTKPSIPFIWTEEHQKAFDRIKEALLSAPALALPDLTKPFTLYVDERAGVARGVLTQTLGPWRRPVAYLSKKLDPVASGWPTCLKAVAAVALLLKDADKLTLGQNVTVIASHSLESIVRQPPDRWMTNARMTHYQSLLLNERVSFAPPAVLNPATLLPVESEATPVHRCSEILAEETGTRRDLKDQPLPGVPAWYTDGSSFIAEGKRRAGAAIVDGKRTVWASSLPEGTSAQKAELVALTQALRLAEGKDINIYTDSRYAFATAHIHGAIYKQRGWLTSAGKDIKNKEEILALLEAIHLPKRVAIIHCPGHQKGNDPVATGNRRADEAAKQAALSTRVLAETTKPAGKRTADGSEFEKRTADGSEFESPKKKAKVE

SEQ ID NO: 895 - protein, 2088 aa, synthetic construct
MPAAKRVKLDGGDKKYSIGLDIGTNSVGWAVITDEYKVPSKKFKVLGNTDRHSIKKNLIGALLFDSGETAEATRLKRTARRRYTRRKNRICYLQEIFSNEMAKVDDSFFHRLEESFLVEEDKKHERHPIFGNIVDEVAYHEKYPTIYHLRKKLVDSTDKADLRLIYLALAHMIKFRGHFLIEGDLNPDNSDVDKLFIQLVQTYNQLFEENPINASGVDAKAILSARLSKSRRLENLIAQLPGEKKNGLFGNLIALSLGLTPNFKSNFDLAEDAKLQLSKDTYDDDLDNLLAQIGDQYADLFLAAKNLSDAILLSDILRVNTEITKAPLSASMIKRYDEHHQDLTLLKALVRQQLPEKYKEIFFDQSKNGYAGYIDGGASQEEFYKFIKPILEKMDGTEELLVKLNREDLLRKQRTFDNGSIPHQIHLGELHAILRRQEDFYPFLKDNREKIEKILTFRIPYYVGPLARGNSRFAWMTRKSEETITPWNFEEVVDKGASAQSFIERMTNFDKNLPNEKVLPKHSLLYEYFTVYNELTKVKYVTEGMRKPAFLSGEQKKAIVDLLFKTNRKVTVKQLKEDYFKKIECFDSVEISGVEDRFNASLGTYHDLLKIIKDKDFLDNEENEDILEDIVLTLTLFEDREMIEERLKTYAHLFDDKVMKQLKRRRYTGWGRLSRKLINGIRDKQSGKTILDFLKSDGFANRNFMQLIHDDSLTFKEDIQKAQVSGQGDSLHEHIANLAGSPAIKKGILQTVKVVDELVKVMGRHKPENIVIEMARENQTTQKGQKNSRERMKRIEEGIKELGSQILKEHPVENTQLQNEKLYLYYLQNGRDMYVDQELDINRLSDYDVDHIVPQSFLKDDSIDNKVLTRSDKARGKSDNVPSEEVVKKMKNYWRQLLNAKLITQRKFDNLTKAERGGLSELDKAGFIKRQLVETRQITKHVAQILDSRMNTKYDENDKLIREVKVITLKSKLVSDFRKDFQFYKVREINNYHHAHDAYLNAVVGTALIKKYPKLESEFVYGDYKVYDVRKMIAKSEQEIGKATAKYFFYSNIMNFFKTEITLANGEIRKRPLIETNGETGEIVWDKGRDFATVRKVLSMPQVNIVKKTEVQTGGFSKESILPKRNSDKLIARKKDWDPKKYGGFDSPTVAYSVLVVAKVEKGKSKKLKSVKELLGITIMERSSFEKNPIDFLEAKGYKEVKKDLIIKLPKYSLFELENGRKRMLASAGELQKGNELALPSKYVNFLYLASHYEKLKGSPEDNEQKQLFVEQHKHYLDEIIEQISEFSKRVILADANLDKVLSAYNKHRDKPIREQAENIIHLFTLTNLGAPAAFKYFDTTIDRKRYTSTKEVLDATLIHQSITGLYETRIDLSQLGGDGGGGGGGGGVLNLEEEYRLHEKPVPSSIDPSWLQLFPTVWAERAGMGLANQVPPVVVELRSGASPVAVRQYPMSKEAREGIRPHIQRFLDLGVLVPCQSPWNTPLLPVKKPGTNDYRPVQDLREINKRVQDIHPTVPNPYNLLSSLPPSHTWYSVLDLKDAFFCLKLHPNSQPLFAFEWRDPEKGNTGQLTWTRLPQGFKNSPTLFNEALHRDLAPFRALNPQVVLLQYVDDLLVAAPTYRDCKEGTQKLLQELSKLGYRVSAKKAQLCQKEVTYLGYLLKEGKRWLTPARKATVMKIPPPTTPRQVREFLGKAGFCRLFIPGFASLAAPLYPLTKPSIPFIWTEEHQKAFDRIKEALLSAPALALPDLTKPFTLYVDERAGVARGVLTQTLGPWRRPVAYLSKKLDPVASGWPTCLKAVAAVALLLKDADKLTLGQNVTVIASHSLESIVRQPPDRWMTNARMTHYQSLLLNERVSFAPPAVLNPATLLPVESEATPVHRCSEILAEETGTRRDLKDQPLPGVPAWYTDGSSFIAEGKRRAGAAIVDGKRTVWASSLPEGTSAQKAELVALTQALRLAEGKDINIYTDSRYAFATAHIHGAIYKQRGWLTSAGKDIKNKEEILALLEAIHLPKRVAIIHCPGHQKGNDPVATGNRRADEAAKQAALSTRVLAETTKPAGKRTADGSEFEKRTADGSEFESPKKKAKVE

SEQ ID NO: 896 - protein, 2094 aa, synthetic construct
MPAAKRVKLDGGDKKYSIGLDIGTNSVGWAVITDEYKVPSKKFKVLGNTDRHSIKKNLIGALLFDSGETAEATRLKRTARRRYTRRKNRICYLQEIFSNEMAKVDDSFFHRLEESFLVEEDKKHERHPIFGNIVDEVAYHEKYPTIYHLRKKLVDSTDKADLRLIYLALAHMIKFRGHFLIEGDLNPDNSDVDKLFIQLVQTYNQLFEENPINASGVDAKAILSARLSKSRRLENLIAQLPGEKKNGLFGNLIALSLGLTPNFKSNFDLAEDAKLQLSKDTYDDDLDNLLAQIGDQYADLFLAAKNLSDAILLSDILRVNTEITKAPLSASMIKRYDEHHQDLTLLKALVRQQLPEKYKEIFFDQSKNGYAGYIDGGASQEEFYKFIKPILEKMDGTEELLVKLNREDLLRKQRTFDNGSIPHQIHLGELHAILRRQEDFYPFLKDNREKIEKILTFRIPYYVGPLARGNSRFAWMTRKSEETITPWNFEEVVDKGASAQSFIERMTNFDKNLPNEKVLPKHSLLYEYFTVYNELTKVKYVTEGMRKPAFLSGEQKKAIVDLLFKTNRKVTVKQLKEDYFKKIECFDSVEISGVEDRFNASLGTYHDLLKIIKDKDFLDNEENEDILEDIVLTLTLFEDREMIEERLKTYAHLFDDKVMKQLKRRRYTGWGRLSRKLINGIRDKQSGKTILDFLKSDGFANRNFMQLIHDDSLTFKEDIQKAQVSGQGDSLHEHIANLAGSPAIKKGILQTVKVVDELVKVMGRHKPENIVIEMARENQTTQKGQKNSRERMKRIEEGIKELGSQILKEHPVENTQLQNEKLYLYYLQNGRDMYVDQELDINRLSDYDVDHIVPQSFLKDDSIDNKVLTRSDKARGKSDNVPSEEVVKKMKNYWRQLLNAKLITQRKFDNLTKAERGGLSELDKAGFIKRQLVETRQITKHVAQILDSRMNTKYDENDKLIREVKVITLKSKLVSDFRKDFQFYKVREINNYHHAHDAYLNAVVGTALIKKYPKLESEFVYGDYKVYDVRKMIAKSEQEIGKATAKYFFYSNIMNFFKTEITLANGEIRKRPLIETNGETGEIVWDKGRDFATVRKVLSMPQVNIVKKTEVQTGGFSKESILPKRNSDKLIARKKDWDPKKYGGFDSPTVAYSVLVVAKVEKGKSKKLKSVKELLGITIMERSSFEKNPIDFLEAKGYKEVKKDLIIKLPKYSLFELENGRKRMLASAGELQKGNELALPSKYVNFLYLASHYEKLKGSPEDNEQKQLFVEQHKHYLDEIIEQISEFSKRVILADANLDKVLSAYNKHRDKPIREQAENIIHLFTLTNLGAPAAFKYFDTTIDRKRYTSTKEVLDATLIHQSITGLYETRIDLSQLGGDGGPAPEAAAKGGGGGVLNLEEEYRLHEKPVPSSIDPSWLQLFPTVWAERAGMGLANQVPPVVVELRSGASPVAVRQYPMSKEAREGIRPHIQRFLDLGVLVPCQSPWNTPLLPVKKPGTNDYRPVQDLREINKRVQDIHPTVPNPYNLLSSLPPSHTWYSVLDLKDAFFCLKLHPNSQPLFAFEWRDPEKGNTGQLTWTRLPQGFKNSPTLFNEALHRDLAPFRALNPQVVLLQYVDDLLVAAPTYRDCKEGTQKLLQELSKLGYRVSAKKAQLCQKEVTYLGYLLKEGKRWLTPARKATVMKIPPPTTPRQVREFLGKAGFCRLFIPGFASLAAPLYPLTKPSIPFIWTEEHQKAFDRIKEALLSAPALALPDLTKPFTLYVDERAGVARGVLTQTLGPWRRPVAYLSKKLDPVASGWPTCLKAVAAVALLLKDADKLTLGQNVTVIASHSLESIVRQPPDRWMTNARMTHYQSLLLNERVSFAPPAVLNPATLLPVESEATPVHRCSEILAEETGTRRDLKDQPLPGVPAWYTDGSSFIAEGKRRAGAAIVDGKRTVWASSLPEGTSAQKAELVALTQALRLAEGKDINIYTDSRYAFATAHIHGAIYKQRGWLTSAGKDIKNKEEILALLEAIHLPKRVAIIHCPGHQKGNDPVATGNRRADEAAKQAALSTRVLAETTKPAGKRTADGSEFEKRTADGSEFESPKKKAKVE

SEQ ID NO: 897 - protein, 2091 aa, synthetic construct
MPAAKRVKLDGGDKKYSIGLDIGTNSVGWAVITDEYKVPSKKFKVLGNTDRHSIKKNLIGALLFDSGETAEATRLKRTARRRYTRRKNRICYLQEIFSNEMAKVDDSFFHRLEESFLVEEDKKHERHPIFGNIVDEVAYHEKYPTIYHLRKKLVDSTDKADLRLIYLALAHMIKFRGHFLIEGDLNPDNSDVDKLFIQLVQTYNQLFEENPINASGVDAKAILSARLSKSRRLENLIAQLPGEKKNGLFGNLIALSLGLTPNFKSNFDLAEDAKLQLSKDTYDDDLDNLLAQIGDQYADLFLAAKNLSDAILLSDILRVNTEITKAPLSASMIKRYDEHHQDLTLLKALVRQQLPEKYKEIFFDQSKNGYAGYIDGGASQEEFYKFIKPILEKMDGTEELLVKLNREDLLRKQRTFDNGSIPHQIHLGELHAILRRQEDFYPFLKDNREKIEKILTFRIPYYVGPLARGNSRFAWMTRKSEETITPWNFEEVVDKGASAQSFIERMTNFDKNLPNEKVLPKHSLLYEYFTVYNELTKVKYVTEGMRKPAFLSGEQKKAIVDLLFKTNRKVTVKQLKEDYFKKIECFDSVEISGVEDRFNASLGTYHDLLKIIKDKDFLDNEENEDILEDIVLTLTLFEDREMIEERLKTYAHLFDDKVMKQLKRRRYTGWGRLSRKLINGIRDKQSGKTILDFLKSDGFANRNFMQLIHDDSLTFKEDIQKAQVSGQGDSLHEHIANLAGSPAIKKGILQTVKVVDELVKVMGRHKPENIVIEMARENQTTQKGQKNSRERMKRIEEGIKELGSQILKEHPVENTQLQNEKLYLYYLQNGRDMYVDQELDINRLSDYDVDHIVPQSFLKDDSIDNKVLTRSDKARGKSDNVPSEEVVKKMKNYWRQLLNAKLITQRKFDNLTKAERGGLSELDKAGFIKRQLVETRQITKHVAQILDSRMNTKYDENDKLIREVKVITLKSKLVSDFRKDFQFYKVREINNYHHAHDAYLNAVVGTALIKKYPKLESEFVYGDYKVYDVRKMIAKSEQEIGKATAKYFFYSNIMNFFKTEITLANGEIRKRPLIETNGETGEIVWDKGRDFATVRKVLSMPQVNIVKKTEVQTGGFSKESILPKRNSDKLIARKKDWDPKKYGGFDSPTVAYSVLVVAKVEKGKSKKLKSVKELLGITIMERSSFEKNPIDFLEAKGYKEVKKDLIIKLPKYSLFELENGRKRMLASAGELQKGNELALPSKYVNFLYLASHYEKLKGSPEDNEQKQLFVEQHKHYLDEIIEQISEFSKRVILADANLDKVLSAYNKHRDKPIREQAENIIHLFTLTNLGAPAAFKYFDTTIDRKRYTSTKEVLDATLIHQSITGLYETRIDLSQLGGDGGEAAAKGGSGGVLNLEEEYRLHEKPVPSSIDPSWLQLFPTVWAERAGMGLANQVPPVVVELRSGASPVAVRQYPMSKEAREGIRPHIQRFLDLGVLVPCQSPWNTPLLPVKKPGTNDYRPVQDLREINKRVQDIHPTVPNPYNLLSSLPPSHTWYSVLDLKDAFFCLKLHPNSQPLFAFEWRDPEKGNTGQLTWTRLPQGFKNSPTLFNEALHRDLAPFRALNPQVVLLQYVDDLLVAAPTYRDCKEGTQKLLQELSKLGYRVSAKKAQLCQKEVTYLGYLLKEGKRWLTPARKATVMKIPPPTTPRQVREFLGKAGFCRLFIPGFASLAAPLYPLTKPSIPFIWTEEHQKAFDRIKEALLSAPALALPDLTKPFTLYVDERAGVARGVLTQTLGPWRRPVAYLSKKLDPVASGWPTCLKAVAAVALLLKDADKLTLGQNVTVIASHSLESIVRQPPDRWMTNARMTHYQSLLLNERVSFAPPAVLNPATLLPVESEATPVHRCSEILAEETGTRRDLKDQPLPGVPAWYTDGSSFIAEGKRRAGAAIVDGKRTVWASSLPEGTSAQKAELVALTQALRLAEGKDINIYTDSRYAFATAHIHGAIYKQRGWLTSAGKDIKNKEEILALLEAIHLPKRVAIIHCPGHQKGNDPVATGNRRADEAAKQAALSTRVLAETTKPAGKRTADGSEFEKRTADGSEFESPKKKAKVE

SEQ ID NO: 898 - protein, 2094 aa, synthetic construct
MPAAKRVKLDGGDKKYSIGLDIGTNSVGWAVITDEYKVPSKKFKVLGNTDRHSIKKNLIGALLFDSGETAEATRLKRTARRRYTRRKNRICYLQEIFSNEMAKVDDSFFHRLEESFLVEEDKKHERHPIFGNIVDEVAYHEKYPTIYHLRKKLVDSTDKADLRLIYLALAHMIKFRGHFLIEGDLNPDNSDVDKLFIQLVQTYNQLFEENPINASGVDAKAILSARLSKSRRLENLIAQLPGEKKNGLFGNLIALSLGLTPNFKSNFDLAEDAKLQLSKDTYDDDLDNLLAQIGDQYADLFLAAKNLSDAILLSDILRVNTEITKAPLSASMIKRYDEHHQDLTLLKALVRQQLPEKYKEIFFDQSKNGYAGYIDGGASQEEFYKFIKPILEKMDGTEELLVKLNREDLLRKQRTFDNGSIPHQIHLGELHAILRRQEDFYPFLKDNREKIEKILTFRIPYYVGPLARGNSRFAWMTRKSEETITPWNFEEVVDKGASAQSFIERMTNFDKNLPNEKVLPKHSLLYEYFTVYNELTKVKYVTEGMRKPAFLSGEQKKAIVDLLFKTNRKVTVKQLKEDYFKKIECFDSVEISGVEDRFNASLGTYHDLLKIIKDKDFLDNEENEDILEDIVLTLTLFEDREMIEERLKTYAHLFDDKVMKQLKRRRYTGWGRLSRKLINGIRDKQSGKTILDFLKSDGFANRNFMQLIHDDSLTFKEDIQKAQVSGQGDSLHEHIANLAGSPAIKKGILQTVKVVDELVKVMGRHKPENIVIEMARENQTTQKGQKNSRERMKRIEEGIKELGSQILKEHPVENTQLQNEKLYLYYLQNGRDMYVDQELDINRLSDYDVDHIVPQSFLKDDSIDNKVLTRSDKARGKSDNVPSEEVVKKMKNYWRQLLNAKLITQRKFDNLTKAERGGLSELDKAGFIKRQLVETRQITKHVAQILDSRMNTKYDENDKLIREVKVITLKSKLVSDFRKDFQFYKVREINNYHHAHDAYLNAVVGTALIKKYPKLESEFVYGDYKVYDVRKMIAKSEQEIGKATAKYFFYSNIMNFFKTEITLANGEIRKRPLIETNGETGEIVWDKGRDFATVRKVLSMPQVNIVKKTEVQTGGFSKESILPKRNSDKLIARKKDWDPKKYGGFDSPTVAYSVLVVAKVEKGKSKKLKSVKELLGITIMERSSFEKNPIDFLEAKGYKEVKKDLIIKLPKYSLFELENGRKRMLASAGELQKGNELALPSKYVNFLYLASHYEKLKGSPEDNEQKQLFVEQHKHYLDEIIEQISEFSKRVILADANLDKVLSAYNKHRDKPIREQAENIIHLFTLTNLGAPAAFKYFDTTIDRKRYTSTKEVLDATLIHQSITGLYETRIDLSQLGGDGGGGSPAPEAAAKGGVLNLEEEYRLHEKPVPSSIDPSWLQLFPTVWAERAGMGLANQVPPVVVELRSGASPVAVRQYPMSKEAREGIRPHIQRFLDLGVLVPCQSPWNTPLLPVKKPGTNDYRPVQDLREINKRVQDIHPTVPNPYNLLSSLPPSHTWYSVLDLKDAFFCLKLHPNSQPLFAFEWRDPEKGNTGQLTWTRLPQGFKNSPTLFNEALHRDLAPFRALNPQVVLLQYVDDLLVAAPTYRDCKEGTQKLLQELSKLGYRVSAKKAQLCQKEVTYLGYLLKEGKRWLTPARKATVMKIPPPTTPRQVREFLGKAGFCRLFIPGFASLAAPLYPLTKPSIPFIWTEEHQKAFDRIKEALLSAPALALPDLTKPFTLYVDERAGVARGVLTQTLGPWRRPVAYLSKKLDPVASGWPTCLKAVAAVALLLKDADKLTLGQNVTVIASHSLESIVRQPPDRWMTNARMTHYQSLLLNERVSFAPPAVLNPATLLPVESEATPVHRCSEILAEETGTRRDLKDQPLPGVPAWYTDGSSFIAEGKRRAGAAIVDGKRTVWASSLPEGTSAQKAELVALTQALRLAEGKDINIYTDSRYAFATAHIHGAIYKQRGWLTSAGKDIKNKEEILALLEAIHLPKRVAIIHCPGHQKGNDPVATGNRRADEAAKQAALSTRVLAETTKPAGKRTADGSEFEKRTADGSEFESPKKKAKVE

SEQ ID NO: 899 - protein, 2101 aa, synthetic construct
MPAAKRVKLDGGDKKYSIGLDIGTNSVGWAVITDEYKVPSKKFKVLGNTDRHSIKKNLIGALLFDSGETAEATRLKRTARRRYTRRKNRICYLQEIFSNEMAKVDDSFFHRLEESFLVEEDKKHERHPIFGNIVDEVAYHEKYPTIYHLRKKLVDSTDKADLRLIYLALAHMIKFRGHFLIEGDLNPDNSDVDKLFIQLVQTYNQLFEENPINASGVDAKAILSARLSKSRRLENLIAQLPGEKKNGLFGNLIALSLGLTPNFKSNFDLAEDAKLQLSKDTYDDDLDNLLAQIGDQYADLFLAAKNLSDAILLSDILRVNTEITKAPLSASMIKRYDEHHQDLTLLKALVRQQLPEKYKEIFFDQSKNGYAGYIDGGASQEEFYKFIKPILEKMDGTEELLVKLNREDLLRKQRTFDNGSIPHQIHLGELHAILRRQEDFYPFLKDNREKIEKILTFRIPYYVGPLARGNSRFAWMTRKSEETITPWNFEEVVDKGASAQSFIERMTNFDKNLPNEKVLPKHSLLYEYFTVYNELTKVKYVTEGMRKPAFLSGEQKKAIVDLLFKTNRKVTVKQLKEDYFKKIECFDSVEISGVEDRFNASLGTYHDLLKIIKDKDFLDNEENEDILEDIVLTLTLFEDREMIEERLKTYAHLFDDKVMKQLKRRRYTGWGRLSRKLINGIRDKQSGKTILDFLKSDGFANRNFMQLIHDDSLTFKEDIQKAQVSGQGDSLHEHIANLAGSPAIKKGILQTVKVVDELVKVMGRHKPENIVIEMARENQTTQKGQKNSRERMKRIEEGIKELGSQILKEHPVENTQLQNEKLYLYYLQNGRDMYVDQELDINRLSDYDVDHIVPQSFLKDDSIDNKVLTRSDKARGKSDNVPSEEVVKKMKNYWRQLLNAKLITQRKFDNLTKAERGGLSELDKAGFIKRQLVETRQITKHVAQILDSRMNTKYDENDKLIREVKVITLKSKLVSDFRKDFQFYKVREINNYHHAHDAYLNAVVGTALIKKYPKLESEFVYGDYKVYDVRKMIAKSEQEIGKATAKYFFYSNIMNFFKTEITLANGEIRKRPLIETNGETGEIVWDKGRDFATVRKVLSMPQVNIVKKTEVQTGGFSKESILPKRNSDKLIARKKDWDPKKYGGFDSPTVAYSVLVVAKVEKGKSKKLKSVKELLGITIMERSSFEKNPIDFLEAKGYKEVKKDLIIKLPKYSLFELENGRKRMLASAGELQKGNELALPSKYVNFLYLASHYEKLKGSPEDNEQKQLFVEQHKHYLDEIIEQISEFSKRVILADANLDKVLSAYNKHRDKPIREQAENIIHLFTLTNLGAPAAFKYFDTTIDRKRYTSTKEVLDATLIHQSITGLYETRIDLSQLGGDGGGGSGGSGGSGGSGGSGGSGGVLNLEEEYRLHEKPVPSSIDPSWLQLFPTVWAERAGMGLANQVPPVVVELRSGASPVAVRQYPMSKEAREGIRPHIQRFLDLGVLVPCQSPWNTPLLPVKKPGTNDYRPVQDLREINKRVQDIHPTVPNPYNLLSSLPPSHTWYSVLDLKDAFFCLKLHPNSQPLFAFEWRDPEKGNTGQLTWTRLPQGFKNSPTLFNEALHRDLAPFRALNPQVVLLQYVDDLLVAAPTYRDCKEGTQKLLQELSKLGYRVSAKKAQLCQKEVTYLGYLLKEGKRWLTPARKATVMKIPPPTTPRQVREFLGKAGFCRLFIPGFASLAAPLYPLTKPSIPFIWTEEHQKAFDRIKEALLSAPALALPDLTKPFTLYVDERAGVARGVLTQTLGPWRRPVAYLSKKLDPVASGWPTCLKAVAAVALLLKDADKLTLGQNVTVIASHSLESIVRQPPDRWMTNARMTHYQSLLLNERVSFAPPAVLNPATLLPVESEATPVHRCSEILAEETGTRRDLKDQPLPGVPAWYTDGSSFIAEGKRRAGAAIVDGKRTVWASSLPEGTSAQKAELVALTQALRLAEGKDINIYTDSRYAFATAHIHGAIYKQRGWLTSAGKDIKNKEEILALLEAIHLPKRVAIIHCPGHQKGNDPVATGNRRADEAAKQAALSTRVLAETTKPAGKRTADGSEFEKRTADGSEFESPKKKAKVE

SEQ ID NO: 900 - protein, 2098 aa, synthetic construct
MPAAKRVKLDGGDKKYSIGLDIGTNSVGWAVITDEYKVPSKKFKVLGNTDRHSIKKNLIGALLFDSGETAEATRLKRTARRRYTRRKNRICYLQEIFSNEMAKVDDSFFHRLEESFLVEEDKKHERHPIFGNIVDEVAYHEKYPTIYHLRKKLVDSTDKADLRLIYLALAHMIKFRGHFLIEGDLNPDNSDVDKLFIQLVQTYNQLFEENPINASGVDAKAILSARLSKSRRLENLIAQLPGEKKNGLFGNLIALSLGLTPNFKSNFDLAEDAKLQLSKDTYDDDLDNLLAQIGDQYADLFLAAKNLSDAILLSDILRVNTEITKAPLSASMIKRYDEHHQDLTLLKALVRQQLPEKYKEIFFDQSKNGYAGYIDGGASQEEFYKFIKPILEKMDGTEELLVKLNREDLLRKQRTFDNGSIPHQIHLGELHAILRRQEDFYPFLKDNREKIEKILTFRIPYYVGPLARGNSRFAWMTRKSEETITPWNFEEVVDKGASAQSFIERMTNFDKNLPNEKVLPKHSLLYEYFTVYNELTKVKYVTEGMRKPAFLSGEQKKAIVDLLFKTNRKVTVKQLKEDYFKKIECFDSVEISGVEDRFNASLGTYHDLLKIIKDKDFLDNEENEDILEDIVLTLTLFEDREMIEERLKTYAHLFDDKVMKQLKRRRYTGWGRLSRKLINGIRDKQSGKTILDFLKSDGFANRNFMQLIHDDSLTFKEDIQKAQVSGQGDSLHEHIANLAGSPAIKKGILQTVKVVDELVKVMGRHKPENIVIEMARENQTTQKGQKNSRERMKRIEEGIKELGSQILKEHPVENTQLQNEKLYLYYLQNGRDMYVDQELDINRLSDYDVDHIVPQSFLKDDSIDNKVLTRSDKARGKSDNVPSEEVVKKMKNYWRQLLNAKLITQRKFDNLTKAERGGLSELDKAGFIKRQLVETRQITKHVAQILDSRMNTKYDENDKLIREVKVITLKSKLVSDFRKDFQFYKVREINNYHHAHDAYLNAVVGTALIKKYPKLESEFVYGDYKVYDVRKMIAKSEQEIGKATAKYFFYSNIMNFFKTEITLANGEIRKRPLIETNGETGEIVWDKGRDFATVRKVLSMPQVNIVKKTEVQTGGFSKESILPKRNSDKLIARKKDWDPKKYGGFDSPTVAYSVLVVAKVEKGKSKKLKSVKELLGITIMERSSFEKNPIDFLEAKGYKEVKKDLIIKLPKYSLFELENGRKRMLASAGELQKGNELALPSKYVNFLYLASHYEKLKGSPEDNEQKQLFVEQHKHYLDEIIEQISEFSKRVILADANLDKVLSAYNKHRDKPIREQAENIIHLFTLTNLGAPAAFKYFDTTIDRKRYTSTKEVLDATLIHQSITGLYETRIDLSQLGGDGGEAAAKGGGGSEAAAKGGVLNLEEEYRLHEKPVPSSIDPSWLQLFPTVWAERAGMGLANQVPPVVVELRSGASPVAVRQYPMSKEAREGIRPHIQRFLDLGVLVPCQSPWNTPLLPVKKPGTNDYRPVQDLREINKRVQDIHPTVPNPYNLLSSLPPSHTWYSVLDLKDAFFCLKLHPNSQPLFAFEWRDPEKGNTGQLTWTRLPQGFKNSPTLFNEALHRDLAPFRALNPQVVLLQYVDDLLVAAPTYRDCKEGTQKLLQELSKLGYRVSAKKAQLCQKEVTYLGYLLKEGKRWLTPARKATVMKIPPPTTPRQVREFLGKAGFCRLFIPGFASLAAPLYPLTKPSIPFIWTEEHQKAFDRIKEALLSAPALALPDLTKPFTLYVDERAGVARGVLTQTLGPWRRPVAYLSKKLDPVASGWPTCLKAVAAVALLLKDADKLTLGQNVTVIASHSLESIVRQPPDRWMTNARMTHYQSLLLNERVSFAPPAVLNPATLLPVESEATPVHRCSEILAEETGTRRDLKDQPLPGVPAWYTDGSSFIAEGKRRAGAAIVDGKRTVWASSLPEGTSAQKAELVALTQALRLAEGKDINIYTDSRYAFATAHIHGAIYKQRGWLTSAGKDIKNKEEILALLEAIHLPKRVAIIHCPGHQKGNDPVATGNRRADEAAKQAALSTRVLAETTKPAGKRTADGSEFEKRTADGSEFESPKKKAKVE

SEQ ID NO: 901 - protein, 2094 aa, synthetic construct
MPAAKRVKLDGGDKKYSIGLDIGTNSVGWAVITDEYKVPSKKFKVLGNTDRHSIKKNLIGALLFDSGETAEATRLKRTARRRYTRRKNRICYLQEIFSNEMAKVDDSFFHRLEESFLVEEDKKHERHPIFGNIVDEVAYHEKYPTIYHLRKKLVDSTDKADLRLIYLALAHMIKFRGHFLIEGDLNPDNSDVDKLFIQLVQTYNQLFEENPINASGVDAKAILSARLSKSRRLENLIAQLPGEKKNGLFGNLIALSLGLTPNFKSNFDLAEDAKLQLSKDTYDDDLDNLLAQIGDQYADLFLAAKNLSDAILLSDILRVNTEITKAPLSASMIKRYDEHHQDLTLLKALVRQQLPEKYKEIFFDQSKNGYAGYIDGGASQEEFYKFIKPILEKMDGTEELLVKLNREDLLRKQRTFDNGSIPHQIHLGELHAILRRQEDFYPFLKDNREKIEKILTFRIPYYVGPLARGNSRFAWMTRKSEETITPWNFEEVVDKGASAQSFIERMTNFDKNLPNEKVLPKHSLLYEYFTVYNELTKVKYVTEGMRKPAFLSGEQKKAIVDLLFKTNRKVTVKQLKEDYFKKIECFDSVEISGVEDRFNASLGTYHDLLKIIKDKDFLDNEENEDILEDIVLTLTLFEDREMIEERLKTYAHLFDDKVMKQLKRRRYTGWGRLSRKLINGIRDKQSGKTILDFLKSDGFANRNFMQLIHDDSLTFKEDIQKAQVSGQGDSLHEHIANLAGSPAIKKGILQTVKVVDELVKVMGRHKPENIVIEMARENQTTQKGQKNSRERMKRIEEGIKELGSQILKEHPVENTQLQNEKLYLYYLQNGRDMYVDQELDINRLSDYDVDHIVPQSFLKDDSIDNKVLTRSDKARGKSDNVPSEEVVKKMKNYWRQLLNAKLITQRKFDNLTKAERGGLSELDKAGFIKRQLVETRQITKHVAQILDSRMNTKYDENDKLIREVKVITLKSKLVSDFRKDFQFYKVREINNYHHAHDAYLNAVVGTALIKKYPKLESEFVYGDYKVYDVRKMIAKSEQEIGKATAKYFFYSNIMNFFKTEITLANGEIRKRPLIETNGETGEIVWDKGRDFATVRKVLSMPQVNIVKKTEVQTGGFSKESILPKRNSDKLIARKKDWDPKKYGGFDSPTVAYSVLVVAKVEKGKSKKLKSVKELLGITIMERSSFEKNPIDFLEAKGYKEVKKDLIIKLPKYSLFELENGRKRMLASAGELQKGNELALPSKYVNFLYLASHYEKLKGSPEDNEQKQLFVEQHKHYLDEIIEQISEFSKRVILADANLDKVLSAYNKHRDKPIREQAENIIHLFTLTNLGAPAAFKYFDTTIDRKRYTSTKEVLDATLIHQSITGLYETRIDLSQLGGDGGGGGEAAAKGGSGGVLNLEEEYRLHEKPVPSSIDPSWLQLFPTVWAERAGMGLANQVPPVVVELRSGASPVAVRQYPMSKEAREGIRPHIQRFLDLGVLVPCQSPWNTPLLPVKKPGTNDYRPVQDLREINKRVQDIHPTVPNPYNLLSSLPPSHTWYSVLDLKDAFFCLKLHPNSQPLFAFEWRDPEKGNTGQLTWTRLPQGFKNSPTLFNEALHRDLAPFRALNPQVVLLQYVDDLLVAAPTYRDCKEGTQKLLQELSKLGYRVSAKKAQLCQKEVTYLGYLLKEGKRWLTPARKATVMKIPPPTTPRQVREFLGKAGFCRLFIPGFASLAAPLYPLTKPSIPFIWTEEHQKAFDRIKEALLSAPALALPDLTKPFTLYVDERAGVARGVLTQTLGPWRRPVAYLSKKLDPVASGWPTCLKAVAAVALLLKDADKLTLGQNVTVIASHSLESIVRQPPDRWMTNARMTHYQSLLLNERVSFAPPAVLNPATLLPVESEATPVHRCSEILAEETGTRRDLKDQPLPGVPAWYTDGSSFIAEGKRRAGAAIVDGKRTVWASSLPEGTSAQKAELVALTQALRLAEGKDINIYTDSRYAFATAHIHGAIYKQRGWLTSAGKDIKNKEEILALLEAIHLPKRVAIIHCPGHQKGNDPVATGNRRADEAAKQAALSTRVLAETTKPAGKRTADGSEFEKRTADGSEFESPKKKAKVE

SEQ ID NO: 902 - protein, 2094 aa, synthetic construct
MPAAKRVKLDGGDKKYSIGLDIGTNSVGWAVITDEYKVPSKKFKVLGNTDRHSIKKNLIGALLFDSGETAEATRLKRTARRRYTRRKNRICYLQEIFSNEMAKVDDSFFHRLEESFLVEEDKKHERHPIFGNIVDEVAYHEKYPTIYHLRKKLVDSTDKADLRLIYLALAHMIKFRGHFLIEGDLNPDNSDVDKLFIQLVQTYNQLFEENPINASGVDAKAILSARLSKSRRLENLIAQLPGEKKNGLFGNLIALSLGLTPNFKSNFDLAEDAKLQLSKDTYDDDLDNLLAQIGDQYADLFLAAKNLSDAILLSDILRVNTEITKAPLSASMIKRYDEHHQDLTLLKALVRQQLPEKYKEIFFDQSKNGYAGYIDGGASQEEFYKFIKPILEKMDGTEELLVKLNREDLLRKQRTFDNGSIPHQIHLGELHAILRRQEDFYPFLKDNREKIEKILTFRIPYYVGPLARGNSRFAWMTRKSEETITPWNFEEVVDKGASAQSFIERMTNFDKNLPNEKVLPKHSLLYEYFTVYNELTKVKYVTEGMRKPAFLSGEQKKAIVDLLFKTNRKVTVKQLKEDYFKKIECFDSVEISGVEDRFNASLGTYHDLLKIIKDKDFLDNEENEDILEDIVLTLTLFEDREMIEERLKTYAHLFDDKVMKQLKRRRYTGWGRLSRKLINGIRDKQSGKTILDFLKSDGFANRNFMQLIHDDSLTFKEDIQKAQVSGQGDSLHEHIANLAGSPAIKKGILQTVKVVDELVKVMGRHKPENIVIEMARENQTTQKGQKNSRERMKRIEEGIKELGSQILKEHPVENTQLQNEKLYLYYLQNGRDMYVDQELDINRLSDYDVDHIVPQSFLKDDSIDNKVLTRSDKARGKSDNVPSEEVVKKMKNYWRQLLNAKLITQRKFDNLTKAERGGLSELDKAGFIKRQLVETRQITKHVAQILDSRMNTKYDENDKLIREVKVITLKSKLVSDFRKDFQFYKVREINNYHHAHDAYLNAVVGTALIKKYPKLESEFVYGDYKVYDVRKMIAKSEQEIGKATAKYFFYSNIMNFFKTEITLANGEIRKRPLIETNGETGEIVWDKGRDFATVRKVLSMPQVNIVKKTEVQTGGFSKESILPKRNSDKLIARKKDWDPKKYGGFDSPTVAYSVLVVAKVEKGKSKKLKSVKELLGITIMERSSFEKNPIDFLEAKGYKEVKKDLIIKLPKYSLFELENGRKRMLASAGELQKGNELALPSKYVNFLYLASHYEKLKGSPEDNEQKQLFVEQHKHYLDEIIEQISEFSKRVILADANLDKVLSAYNKHRDKPIREQAENIIHLFTLTNLGAPAAFKYFDTTIDRKRYTSTKEVLDATLIHQSITGLYETRIDLSQLGGDGGGGSEAAAKGGGGGVLNLEEEYRLHEKPVPSSIDPSWLQLFPTVWAERAGMGLANQVPPVVVELRSGASPVAVRQYPMSKEAREGIRPHIQRFLDLGVLVPCQSPWNTPLLPVKKPGTNDYRPVQDLREINKRVQDIHPTVPNPYNLLSSLPPSHTWYSVLDLKDAFFCLKLHPNSQPLFAFEWRDPEKGNTGQLTWTRLPQGFKNSPTLFNEALHRDLAPFRALNPQVVLLQYVDDLLVAAPTYRDCKEGTQKLLQELSKLGYRVSAKKAQLCQKEVTYLGYLLKEGKRWLTPARKATVMKIPPPTTPRQVREFLGKAGFCRLFIPGFASLAAPLYPLTKPSIPFIWTEEHQKAFDRIKEALLSAPALALPDLTKPFTLYVDERAGVARGVLTQTLGPWRRPVAYLSKKLDPVASGWPTCLKAVAAVALLLKDADKLTLGQNVTVIASHSLESIVRQPPDRWMTNARMTHYQSLLLNERVSFAPPAVLNPATLLPVESEATPVHRCSEILAEETGTRRDLKDQPLPGVPAWYTDGSSFIAEGKRRAGAAIVDGKRTVWASSLPEGTSAQKAELVALTQALRLAEGKDINIYTDSRYAFATAHIHGAIYKQRGWLTSAGKDIKNKEEILALLEAIHLPKRVAIIHCPGHQKGNDPVATGNRRADEAAKQAALSTRVLAETTKPAGKRTADGSEFEKRTADGSEFESPKKKAKVE

SEQ ID NO: 903 - protein, 2092 aa, synthetic construct
MPAAKRVKLDGGDKKYSIGLDIGTNSVGWAVITDEYKVPSKKFKVLGNTDRHSIKKNLIGALLFDSGETAEATRLKRTARRRYTRRKNRICYLQEIFSNEMAKVDDSFFHRLEESFLVEEDKKHERHPIFGNIVDEVAYHEKYPTIYHLRKKLVDSTDKADLRLIYLALAHMIKFRGHFLIEGDLNPDNSDVDKLFIQLVQTYNQLFEENPINASGVDAKAILSARLSKSRRLENLIAQLPGEKKNGLFGNLIALSLGLTPNFKSNFDLAEDAKLQLSKDTYDDDLDNLLAQIGDQYADLFLAAKNLSDAILLSDILRVNTEITKAPLSASMIKRYDEHHQDLTLLKALVRQQLPEKYKEIFFDQSKNGYAGYIDGGASQEEFYKFIKPILEKMDGTEELLVKLNREDLLRKQRTFDNGSIPHQIHLGELHAILRRQEDFYPFLKDNREKIEKILTFRIPYYVGPLARGNSRFAWMTRKSEETITPWNFEEVVDKGASAQSFIERMTNFDKNLPNEKVLPKHSLLYEYFTVYNELTKVKYVTEGMRKPAFLSGEQKKAIVDLLFKTNRKVTVKQLKEDYFKKIECFDSVEISGVEDRFNASLGTYHDLLKIIKDKDFLDNEENEDILEDIVLTLTLFEDREMIEERLKTYAHLFDDKVMKQLKRRRYTGWGRLSRKLINGIRDKQSGKTILDFLKSDGFANRNFMQLIHDDSLTFKEDIQKAQVSGQGDSLHEHIANLAGSPAIKKGILQTVKVVDELVKVMGRHKPENIVIEMARENQTTQKGQKNSRERMKRIEEGIKELGSQILKEHPVENTQLQNEKLYLYYLQNGRDMYVDQELDINRLSDYDVDHIVPQSFLKDDSIDNKVLTRSDKARGKSDNVPSEEVVKKMKNYWRQLLNAKLITQRKFDNLTKAERGGLSELDKAGFIKRQLVETRQITKHVAQILDSRMNTKYDENDKLIREVKVITLKSKLVSDFRKDFQFYKVREINNYHHAHDAYLNAVVGTALIKKYPKLESEFVYGDYKVYDVRKMIAKSEQEIGKATAKYFFYSNIMNFFKTEITLANGEIRKRPLIETNGETGEIVWDKGRDFATVRKVLSMPQVNIVKKTEVQTGGFSKESILPKRNSDKLIARKKDWDPKKYGGFDSPTVAYSVLVVAKVEKGKSKKLKSVKELLGITIMERSSFEKNPIDFLEAKGYKEVKKDLIIKLPKYSLFELENGRKRMLASAGELQKGNELALPSKYVNFLYLASHYEKLKGSPEDNEQKQLFVEQHKHYLDEIIEQISEFSKRVILADANLDKVLSAYNKHRDKPIREQAENIIHLFTLTNLGAPAAFKYFDTTIDRKRYTSTKEVLDATLIHQSITGLYETRIDLSQLGGDGGGGSGGGGSSGGVLNLEEEYRLHEKPVPSSIDPSWLQLFPTVWAERAGMGLANQVPPVVVELRSGASPVAVRQYPMSKEAREGIRPHIQRFLDLGVLVPCQSPWNTPLLPVKKPGTNDYRPVQDLREINKRVQDIHPTVPNPYNLLSSLPPSHTWYSVLDLKDAFFCLKLHPNSQPLFAFEWRDPEKGNTGQLTWTRLPQGFKNSPTLFNEALHRDLAPFRALNPQVVLLQYVDDLLVAAPTYRDCKEGTQKLLQELSKLGYRVSAKKAQLCQKEVTYLGYLLKEGKRWLTPARKATVMKIPPPTTPRQVREFLGKAGFCRLFIPGFASLAAPLYPLTKPSIPFIWTEEHQKAFDRIKEALLSAPALALPDLTKPFTLYVDERAGVARGVLTQTLGPWRRPVAYLSKKLDPVASGWPTCLKAVAAVALLLKDADKLTLGQNVTVIASHSLESIVRQPPDRWMTNARMTHYQSLLLNERVSFAPPAVLNPATLLPVESEATPVHRCSEILAEETGTRRDLKDQPLPGVPAWYTDGSSFIAEGKRRAGAAIVDGKRTVWASSLPEGTSAQKAELVALTQALRLAEGKDINIYTDSRYAFATAHIHGAIYKQRGWLTSAGKDIKNKEEILALLEAIHLPKRVAIIHCPGHQKGNDPVATGNRRADEAAKQAALSTRVLAETTKPAGKRTADGSEFEKRTADGSEFESPKKKAKVE

SEQ ID NO: 904 - protein, 2088 aa, synthetic construct
MPAAKRVKLDGGDKKYSIGLDIGTNSVGWAVITDEYKVPSKKFKVLGNTDRHSIKKNLIGALLFDSGETAEATRLKRTARRRYTRRKNRICYLQEIFSNEMAKVDDSFFHRLEESFLVEEDKKHERHPIFGNIVDEVAYHEKYPTIYHLRKKLVDSTDKADLRLIYLALAHMIKFRGHFLIEGDLNPDNSDVDKLFIQLVQTYNQLFEENPINASGVDAKAILSARLSKSRRLENLIAQLPGEKKNGLFGNLIALSLGLTPNFKSNFDLAEDAKLQLSKDTYDDDLDNLLAQIGDQYADLFLAAKNLSDAILLSDILRVNTEITKAPLSASMIKRYDEHHQDLTLLKALVRQQLPEKYKEIFFDQSKNGYAGYIDGGASQEEFYKFIKPILEKMDGTEELLVKLNREDLLRKQRTFDNGSIPHQIHLGELHAILRRQEDFYPFLKDNREKIEKILTFRIPYYVGPLARGNSRFAWMTRKSEETITPWNFEEVVDKGASAQSFIERMTNFDKNLPNEKVLPKHSLLYEYFTVYNELTKVKYVTEGMRKPAFLSGEQKKAIVDLLFKTNRKVTVKQLKEDYFKKIECFDSVEISGVEDRFNASLGTYHDLLKIIKDKDFLDNEENEDILEDIVLTLTLFEDREMIEERLKTYAHLFDDKVMKQLKRRRYTGWGRLSRKLINGIRDKQSGKTILDFLKSDGFANRNFMQLIHDDSLTFKEDIQKAQVSGQGDSLHEHIANLAGSPAIKKGILQTVKVVDELVKVMGRHKPENIVIEMARENQTTQKGQKNSRERMKRIEEGIKELGSQILKEHPVENTQLQNEKLYLYYLQNGRDMYVDQELDINRLSDYDVDHIVPQSFLKDDSIDNKVLTRSDKARGKSDNVPSEEVVKKMKNYWRQLLNAKLITQRKFDNLTKAERGGLSELDKAGFIKRQLVETRQITKHVAQILDSRMNTKYDENDKLIREVKVITLKSKLVSDFRKDFQFYKVREINNYHHAHDAYLNAVVGTALIKKYPKLESEFVYGDYKVYDVRKMIAKSEQEIGKATAKYFFYSNIMNFFKTEITLANGEIRKRPLIETNGETGEIVWDKGRDFATVRKVLSMPQVNIVKKTEVQTGGFSKESILPKRNSDKLIARKKDWDPKKYGGFDSPTVAYSVLVVAKVEKGKSKKLKSVKELLGITIMERSSFEKNPIDFLEAKGYKEVKKDLIIKLPKYSLFELENGRKRMLASAGELQKGNELALPSKYVNFLYLASHYEKLKGSPEDNEQKQLFVEQHKHYLDEIIEQISEFSKRVILADANLDKVLSAYNKHRDKPIREQAENIIHLFTLTNLGAPAAFKYFDTTIDRKRYTSTKEVLDATLIHQSITGLYETRIDLSQLGGDGGPAPAPGGVLNLEEEYRLHEKPVPSSIDPSWLQLFPTVWAERAGMGLANQVPPVVVELRSGASPVAVRQYPMSKEAREGIRPHIQRFLDLGVLVPCQSPWNTPLLPVKKPGTNDYRPVQDLREINKRVQDIHPTVPNPYNLLSSLPPSHTWYSVLDLKDAFFCLKLHPNSQPLFAFEWRDPEKGNTGQLTWTRLPQGFKNSPTLFNEALHRDLAPFRALNPQVVLLQYVDDLLVAAPTYRDCKEGTQKLLQELSKLGYRVSAKKAQLCQKEVTYLGYLLKEGKRWLTPARKATVMKIPPPTTPRQVREFLGKAGFCRLFIPGFASLAAPLYPLTKPSIPFIWTEEHQKAFDRIKEALLSAPALALPDLTKPFTLYVDERAGVARGVLTQTLGPWRRPVAYLSKKLDPVASGWPTCLKAVAAVALLLKDADKLTLGQNVTVIASHSLESIVRQPPDRWMTNARMTHYQSLLLNERVSFAPPAVLNPATLLPVESEATPVHRCSEILAEETGTRRDLKDQPLPGVPAWYTDGSSFIAEGKRRAGAAIVDGKRTVWASSLPEGTSAQKAELVALTQALRLAEGKDINIYTDSRYAFATAHIHGAIYKQRGWLTSAGKDIKNKEEILALLEAIHLPKRVAIIHCPGHQKGNDPVATGNRRADEAAKQAALSTRVLAETTKPAGKRTADGSEFEKRTADGSEFESPKKKAKVE

SEQ ID NO: 905 - protein, 2094 aa, synthetic construct
MPAAKRVKLDGGDKKYSIGLDIGTNSVGWAVITDEYKVPSKKFKVLGNTDRHSIKKNLIGALLFDSGETAEATRLKRTARRRYTRRKNRICYLQEIFSNEMAKVDDSFFHRLEESFLVEEDKKHERHPIFGNIVDEVAYHEKYPTIYHLRKKLVDSTDKADLRLIYLALAHMIKFRGHFLIEGDLNPDNSDVDKLFIQLVQTYNQLFEENPINASGVDAKAILSARLSKSRRLENLIAQLPGEKKNGLFGNLIALSLGLTPNFKSNFDLAEDAKLQLSKDTYDDDLDNLLAQIGDQYADLFLAAKNLSDAILLSDILRVNTEITKAPLSASMIKRYDEHHQDLTLLKALVRQQLPEKYKEIFFDQSKNGYAGYIDGGASQEEFYKFIKPILEKMDGTEELLVKLNREDLLRKQRTFDNGSIPHQIHLGELHAILRRQEDFYPFLKDNREKIEKILTFRIPYYVGPLARGNSRFAWMTRKSEETITPWNFEEVVDKGASAQSFIERMTNFDKNLPNEKVLPKHSLLYEYFTVYNELTKVKYVTEGMRKPAFLSGEQKKAIVDLLFKTNRKVTVKQLKEDYFKKIECFDSVEISGVEDRFNASLGTYHDLLKIIKDKDFLDNEENEDILEDIVLTLTLFEDREMIEERLKTYAHLFDDKVMKQLKRRRYTGWGRLSRKLINGIRDKQSGKTILDFLKSDGFANRNFMQLIHDDSLTFKEDIQKAQVSGQGDSLHEHIANLAGSPAIKKGILQTVKVVDELVKVMGRHKPENIVIEMARENQTTQKGQKNSRERMKRIEEGIKELGSQILKEHPVENTQLQNEKLYLYYLQNGRDMYVDQELDINRLSDYDVDHIVPQSFLKDDSIDNKVLTRSDKARGKSDNVPSEEVVKKMKNYWRQLLNAKLITQRKFDNLTKAERGGLSELDKAGFIKRQLVETRQITKHVAQILDSRMNTKYDENDKLIREVKVITLKSKLVSDFRKDFQFYKVREINNYHHAHDAYLNAVVGTALIKKYPKLESEFVYGDYKVYDVRKMIAKSEQEIGKATAKYFFYSNIMNFFKTEITLANGEIRKRPLIETNGETGEIVWDKGRDFATVRKVLSMPQVNIVKKTEVQTGGFSKESILPKRNSDKLIARKKDWDPKKYGGFDSPTVAYSVLVVAKVEKGKSKKLKSVKELLGITIMERSSFEKNPIDFLEAKGYKEVKKDLIIKLPKYSLFELENGRKRMLASAGELQKGNELALPSKYVNFLYLASHYEKLKGSPEDNEQKQLFVEQHKHYLDEIIEQISEFSKRVILADANLDKVLSAYNKHRDKPIREQAENIIHLFTLTNLGAPAAFKYFDTTIDRKRYTSTKEVLDATLIHQSITGLYETRIDLSQLGGDGGEAAAKGGSGSSGGVLNLEEEYRLHEKPVPSSIDPSWLQLFPTVWAERAGMGLANQVPPVVVELRSGASPVAVRQYPMSKEAREGIRPHIQRFLDLGVLVPCQSPWNTPLLPVKKPGTNDYRPVQDLREINKRVQDIHPTVPNPYNLLSSLPPSHTWYSVLDLKDAFFCLKLHPNSQPLFAFEWRDPEKGNTGQLTWTRLPQGFKNSPTLFNEALHRDLAPFRALNPQVVLLQYVDDLLVAAPTYRDCKEGTQKLLQELSKLGYRVSAKKAQLCQKEVTYLGYLLKEGKRWLTPARKATVMKIPPPTTPRQVREFLGKAGFCRLFIPGFASLAAPLYPLTKPSIPFIWTEEHQKAFDRIKEALLSAPALALPDLTKPFTLYVDERAGVARGVLTQTLGPWRRPVAYLSKKLDPVASGWPTCLKAVAAVALLLKDADKLTLGQNVTVIASHSLESIVRQPPDRWMTNARMTHYQSLLLNERVSFAPPAVLNPATLLPVESEATPVHRCSEILAEETGTRRDLKDQPLPGVPAWYTDGSSFIAEGKRRAGAAIVDGKRTVWASSLPEGTSAQKAELVALTQALRLAEGKDINIYTDSRYAFATAHIHGAIYKQRGWLTSAGKDIKNKEEILALLEAIHLPKRVAIIHCPGHQKGNDPVATGNRRADEAAKQAALSTRVLAETTKPAGKRTADGSEFEKRTADGSEFESPKKKAKVE

SEQ ID NO: 906 - protein, 2089 aa, synthetic construct
MPAAKRVKLDGGDKKYSIGLDIGTNSVGWAVITDEYKVPSKKFKVLGNTDRHSIKKNLIGALLFDSGETAEATRLKRTARRRYTRRKNRICYLQEIFSNEMAKVDDSFFHRLEESFLVEEDKKHERHPIFGNIVDEVAYHEKYPTIYHLRKKLVDSTDKADLRLIYLALAHMIKFRGHFLIEGDLNPDNSDVDKLFIQLVQTYNQLFEENPINASGVDAKAILSARLSKSRRLENLIAQLPGEKKNGLFGNLIALSLGLTPNFKSNFDLAEDAKLQLSKDTYDDDLDNLLAQIGDQYADLFLAAKNLSDAILLSDILRVNTEITKAPLSASMIKRYDEHHQDLTLLKALVRQQLPEKYKEIFFDQSKNGYAGYIDGGASQEEFYKFIKPILEKMDGTEELLVKLNREDLLRKQRTFDNGSIPHQIHLGELHAILRRQEDFYPFLKDNREKIEKILTFRIPYYVGPLARGNSRFAWMTRKSEETITPWNFEEVVDKGASAQSFIERMTNFDKNLPNEKVLPKHSLLYEYFTVYNELTKVKYVTEGMRKPAFLSGEQKKAIVDLLFKTNRKVTVKQLKEDYFKKIECFDSVEISGVEDRFNASLGTYHDLLKIIKDKDFLDNEENEDILEDIVLTLTLFEDREMIEERLKTYAHLFDDKVMKQLKRRRYTGWGRLSRKLINGIRDKQSGKTILDFLKSDGFANRNFMQLIHDDSLTFKEDIQKAQVSGQGDSLHEHIANLAGSPAIKKGILQTVKVVDELVKVMGRHKPENIVIEMARENQTTQKGQKNSRERMKRIEEGIKELGSQILKEHPVENTQLQNEKLYLYYLQNGRDMYVDQELDINRLSDYDVDHIVPQSFLKDDSIDNKVLTRSDKARGKSDNVPSEEVVKKMKNYWRQLLNAKLITQRKFDNLTKAERGGLSELDKAGFIKRQLVETRQITKHVAQILDSRMNTKYDENDKLIREVKVITLKSKLVSDFRKDFQFYKVREINNYHHAHDAYLNAVVGTALIKKYPKLESEFVYGDYKVYDVRKMIAKSEQEIGKATAKYFFYSNIMNFFKTEITLANGEIRKRPLIETNGETGEIVWDKGRDFATVRKVLSMPQVNIVKKTEVQTGGFSKESILPKRNSDKLIARKKDWDPKKYGGFDSPTVAYSVLVVAKVEKGKSKKLKSVKELLGITIMERSSFEKNPIDFLEAKGYKEVKKDLIIKLPKYSLFELENGRKRMLASAGELQKGNELALPSKYVNFLYLASHYEKLKGSPEDNEQKQLFVEQHKHYLDEIIEQISEFSKRVILADANLDKVLSAYNKHRDKPIREQAENIIHLFTLTNLGAPAAFKYFDTTIDRKRYTSTKEVLDATLIHQSITGLYETRIDLSQLGGDGGGGSGGSGGVLNLEEEYRLHEKPVPSSIDPSWLQLFPTVWAERAGMGLANQVPPVVVELRSGASPVAVRQYPMSKEAREGIRPHIQRFLDLGVLVPCQSPWNTPLLPVKKPGTNDYRPVQDLREINKRVQDIHPTVPNPYNLLSSLPPSHTWYSVLDLKDAFFCLKLHPNSQPLFAFEWRDPEKGNTGQLTWTRLPQGFKNSPTLFNEALHRDLAPFRALNPQVVLLQYVDDLLVAAPTYRDCKEGTQKLLQELSKLGYRVSAKKAQLCQKEVTYLGYLLKEGKRWLTPARKATVMKIPPPTTPRQVREFLGKAGFCRLFIPGFASLAAPLYPLTKPSIPFIWTEEHQKAFDRIKEALLSAPALALPDLTKPFTLYVDERAGVARGVLTQTLGPWRRPVAYLSKKLDPVASGWPTCLKAVAAVALLLKDADKLTLGQNVTVIASHSLESIVRQPPDRWMTNARMTHYQSLLLNERVSFAPPAVLNPATLLPVESEATPVHRCSEILAEETGTRRDLKDQPLPGVPAWYTDGSSFIAEGKRRAGAAIVDGKRTVWASSLPEGTSAQKAELVALTQALRLAEGKDINIYTDSRYAFATAHIHGAIYKQRGWLTSAGKDIKNKEEILALLEAIHLPKRVAIIHCPGHQKGNDPVATGNRRADEAAKQAALSTRVLAETTKPAGKRTADGSEFEKRTADGSEFESPKKKAKVE

SEQ ID NO: 907 - protein, 2095 aa, synthetic construct
MPAAKRVKLDGGDKKYSIGLDIGTNSVGWAVITDEYKVPSKKFKVLGNTDRHSIKKNLIGALLFDSGETAEATRLKRTARRRYTRRKNRICYLQEIFSNEMAKVDDSFFHRLEESFLVEEDKKHERHPIFGNIVDEVAYHEKYPTIYHLRKKLVDSTDKADLRLIYLALAHMIKFRGHFLIEGDLNPDNSDVDKLFIQLVQTYNQLFEENPINASGVDAKAILSARLSKSRRLENLIAQLPGEKKNGLFGNLIALSLGLTPNFKSNFDLAEDAKLQLSKDTYDDDLDNLLAQIGDQYADLFLAAKNLSDAILLSDILRVNTEITKAPLSASMIKRYDEHHQDLTLLKALVRQQLPEKYKEIFFDQSKNGYAGYIDGGASQEEFYKFIKPILEKMDGTEELLVKLNREDLLRKQRTFDNGSIPHQIHLGELHAILRRQEDFYPFLKDNREKIEKILTFRIPYYVGPLARGNSRFAWMTRKSEETITPWNFEEVVDKGASAQSFIERMTNFDKNLPNEKVLPKHSLLYEYFTVYNELTKVKYVTEGMRKPAFLSGEQKKAIVDLLFKTNRKVTVKQLKEDYFKKIECFDSVEISGVEDRFNASLGTYHDLLKIIKDKDFLDNEENEDILEDIVLTLTLFEDREMIEERLKTYAHLFDDKVMKQLKRRRYTGWGRLSRKLINGIRDKQSGKTILDFLKSDGFANRNFMQLIHDDSLTFKEDIQKAQVSGQGDSLHEHIANLAGSPAIKKGILQTVKVVDELVKVMGRHKPENIVIEMARENQTTQKGQKNSRERMKRIEEGIKELGSQILKEHPVENTQLQNEKLYLYYLQNGRDMYVDQELDINRLSDYDVDHIVPQSFLKDDSIDNKVLTRSDKARGKSDNVPSEEVVKKMKNYWRQLLNAKLITQRKFDNLTKAERGGLSELDKAGFIKRQLVETRQITKHVAQILDSRMNTKYDENDKLIREVKVITLKSKLVSDFRKDFQFYKVREINNYHHAHDAYLNAVVGTALIKKYPKLESEFVYGDYKVYDVRKMIAKSEQEIGKATAKYFFYSNIMNFFKTEITLANGEIRKRPLIETNGETGEIVWDKGRDFATVRKVLSMPQVNIVKKTEVQTGGFSKESILPKRNSDKLIARKKDWDPKKYGGFDSPTVAYSVLVVAKVEKGKSKKLKSVKELLGITIMERSSFEKNPIDFLEAKGYKEVKKDLIIKLPKYSLFELENGRKRMLASAGELQKGNELALPSKYVNFLYLASHYEKLKGSPEDNEQKQLFVEQHKHYLDEIIEQISEFSKRVILADANLDKVLSAYNKHRDKPIREQAENIIHLFTLTNLGAPAAFKYFDTTIDRKRYTSTKEVLDATLIHQSITGLYETRIDLSQLGGDGGGSAGSAAGSGEFGGVLNLEEEYRLHEKPVPSSIDPSWLQLFPTVWAERAGMGLANQVPPVVVELRSGASPVAVRQYPMSKEAREGIRPHIQRFLDLGVLVPCQSPWNTPLLPVKKPGTNDYRPVQDLREINKRVQDIHPTVPNPYNLLSSLPPSHTWYSVLDLKDAFFCLKLHPNSQPLFAFEWRDPEKGNTGQLTWTRLPQGFKNSPTLFNEALHRDLAPFRALNPQVVLLQYVDDLLVAAPTYRDCKEGTQKLLQELSKLGYRVSAKKAQLCQKEVTYLGYLLKEGKRWLTPARKATVMKIPPPTTPRQVREFLGKAGFCRLFIPGFASLAAPLYPLTKPSIPFIWTEEHQKAFDRIKEALLSAPALALPDLTKPFTLYVDERAGVARGVLTQTLGPWRRPVAYLSKKLDPVASGWPTCLKAVAAVALLLKDADKLTLGQNVTVIASHSLESIVRQPPDRWMTNARMTHYQSLLLNERVSFAPPAVLNPATLLPVESEATPVHRCSEILAEETGTRRDLKDQPLPGVPAWYTDGSSFIAEGKRRAGAAIVDGKRTVWASSLPEGTSAQKAELVALTQALRLAEGKDINIYTDSRYAFATAHIHGAIYKQRGWLTSAGKDIKNKEEILALLEAIHLPKRVAIIHCPGHQKGNDPVATGNRRADEAAKQAALSTRVLAETTKPAGKRTADGSEFEKRTADGSEFESPKKKAKVE

SEQ ID NO: 908 - protein, 2092 aa, synthetic construct
MPAAKRVKLDGGDKKYSIGLDIGTNSVGWAVITDEYKVPSKKFKVLGNTDRHSIKKNLIGALLFDSGETAEATRLKRTARRRYTRRKNRICYLQEIFSNEMAKVDDSFFHRLEESFLVEEDKKHERHPIFGNIVDEVAYHEKYPTIYHLRKKLVDSTDKADLRLIYLALAHMIKFRGHFLIEGDLNPDNSDVDKLFIQLVQTYNQLFEENPINASGVDAKAILSARLSKSRRLENLIAQLPGEKKNGLFGNLIALSLGLTPNFKSNFDLAEDAKLQLSKDTYDDDLDNLLAQIGDQYADLFLAAKNLSDAILLSDILRVNTEITKAPLSASMIKRYDEHHQDLTLLKALVRQQLPEKYKEIFFDQSKNGYAGYIDGGASQEEFYKFIKPILEKMDGTEELLVKLNREDLLRKQRTFDNGSIPHQIHLGELHAILRRQEDFYPFLKDNREKIEKILTFRIPYYVGPLARGNSRFAWMTRKSEETITPWNFEEVVDKGASAQSFIERMTNFDKNLPNEKVLPKHSLLYEYFTVYNELTKVKYVTEGMRKPAFLSGEQKKAIVDLLFKTNRKVTVKQLKEDYFKKIECFDSVEISGVEDRFNASLGTYHDLLKIIKDKDFLDNEENEDILEDIVLTLTLFEDREMIEERLKTYAHLFDDKVMKQLKRRRYTGWGRLSRKLINGIRDKQSGKTILDFLKSDGFANRNFMQLIHDDSLTFKEDIQKAQVSGQGDSLHEHIANLAGSPAIKKGILQTVKVVDELVKVMGRHKPENIVIEMARENQTTQKGQKNSRERMKRIEEGIKELGSQILKEHPVENTQLQNEKLYLYYLQNGRDMYVDQELDINRLSDYDVDHIVPQSFLKDDSIDNKVLTRSDKARGKSDNVPSEEVVKKMKNYWRQLLNAKLITQRKFDNLTKAERGGLSELDKAGFIKRQLVETRQITKHVAQILDSRMNTKYDENDKLIREVKVITLKSKLVSDFRKDFQFYKVREINNYHHAHDAYLNAVVGTALIKKYPKLESEFVYGDYKVYDVRKMIAKSEQEIGKATAKYFFYSNIMNFFKTEITLANGEIRKRPLIETNGETGEIVWDKGRDFATVRKVLSMPQVNIVKKTEVQTGGFSKESILPKRNSDKLIARKKDWDPKKYGGFDSPTVAYSVLVVAKVEKGKSKKLKSVKELLGITIMERSSFEKNPIDFLEAKGYKEVKKDLIIKLPKYSLFELENGRKRMLASAGELQKGNELALPSKYVNFLYLASHYEKLKGSPEDNEQKQLFVEQHKHYLDEIIEQISEFSKRVILADANLDKVLSAYNKHRDKPIREQAENIIHLFTLTNLGAPAAFKYFDTTIDRKRYTSTKEVLDATLIHQSITGLYETRIDLSQLGGDGGGGSGGGPAPGGVLNLEEEYRLHEKPVPSSIDPSWLQLFPTVWAERAGMGLANQVPPVVVELRSGASPVAVRQYPMSKEAREGIRPHIQRFLDLGVLVPCQSPWNTPLLPVKKPGTNDYRPVQDLREINKRVQDIHPTVPNPYNLLSSLPPSHTWYSVLDLKDAFFCLKLHPNSQPLFAFEWRDPEKGNTGQLTWTRLPQGFKNSPTLFNEALHRDLAPFRALNPQVVLLQYVDDLLVAAPTYRDCKEGTQKLLQELSKLGYRVSAKKAQLCQKEVTYLGYLLKEGKRWLTPARKATVMKIPPPTTPRQVREFLGKAGFCRLFIPGFASLAAPLYPLTKPSIPFIWTEEHQKAFDRIKEALLSAPALALPDLTKPFTLYVDERAGVARGVLTQTLGPWRRPVAYLSKKLDPVASGWPTCLKAVAAVALLLKDADKLTLGQNVTVIASHSLESIVRQPPDRWMTNARMTHYQSLLLNERVSFAPPAVLNPATLLPVESEATPVHRCSEILAEETGTRRDLKDQPLPGVPAWYTDGSSFIAEGKRRAGAAIVDGKRTVWASSLPEGTSAQKAELVALTQALRLAEGKDINIYTDSRYAFATAHIHGAIYKQRGWLTSAGKDIKNKEEILALLEAIHLPKRVAIIHCPGHQKGNDPVATGNRRADEAAKQAALSTRVLAETTKPAGKRTADGSEFEKRTADGSEFESPKKKAKVE

SEQ ID NO: 909 - protein, 2092 aa, synthetic construct
MPAAKRVKLDGGDKKYSIGLDIGTNSVGWAVITDEYKVPSKKFKVLGNTDRHSIKKNLIGALLFDSGETAEATRLKRTARRRYTRRKNRICYLQEIFSNEMAKVDDSFFHRLEESFLVEEDKKHERHPIFGNIVDEVAYHEKYPTIYHLRKKLVDSTDKADLRLIYLALAHMIKFRGHFLIEGDLNPDNSDVDKLFIQLVQTYNQLFEENPINASGVDAKAILSARLSKSRRLENLIAQLPGEKKNGLFGNLIALSLGLTPNFKSNFDLAEDAKLQLSKDTYDDDLDNLLAQIGDQYADLFLAAKNLSDAILLSDILRVNTEITKAPLSASMIKRYDEHHQDLTLLKALVRQQLPEKYKEIFFDQSKNGYAGYIDGGASQEEFYKFIKPILEKMDGTEELLVKLNREDLLRKQRTFDNGSIPHQIHLGELHAILRRQEDFYPFLKDNREKIEKILTFRIPYYVGPLARGNSRFAWMTRKSEETITPWNFEEVVDKGASAQSFIERMTNFDKNLPNEKVLPKHSLLYEYFTVYNELTKVKYVTEGMRKPAFLSGEQKKAIVDLLFKTNRKVTVKQLKEDYFKKIECFDSVEISGVEDRFNASLGTYHDLLKIIKDKDFLDNEENEDILEDIVLTLTLFEDREMIEERLKTYAHLFDDKVMKQLKRRRYTGWGRLSRKLINGIRDKQSGKTILDFLKSDGFANRNFMQLIHDDSLTFKEDIQKAQVSGQGDSLHEHIANLAGSPAIKKGILQTVKVVDELVKVMGRHKPENIVIEMARENQTTQKGQKNSRERMKRIEEGIKELGSQILKEHPVENTQLQNEKLYLYYLQNGRDMYVDQELDINRLSDYDVDHIVPQSFLKDDSIDNKVLTRSDKARGKSDNVPSEEVVKKMKNYWRQLLNAKLITQRKFDNLTKAERGGLSELDKAGFIKRQLVETRQITKHVAQILDSRMNTKYDENDKLIREVKVITLKSKLVSDFRKDFQFYKVREINNYHHAHDAYLNAVVGTALIKKYPKLESEFVYGDYKVYDVRKMIAKSEQEIGKATAKYFFYSNIMNFFKTEITLANGEIRKRPLIETNGETGEIVWDKGRDFATVRKVLSMPQVNIVKKTEVQTGGFSKESILPKRNSDKLIARKKDWDPKKYGGFDSPTVAYSVLVVAKVEKGKSKKLKSVKELLGITIMERSSFEKNPIDFLEAKGYKEVKKDLIIKLPKYSLFELENGRKRMLASAGELQKGNELALPSKYVNFLYLASHYEKLKGSPEDNEQKQLFVEQHKHYLDEIIEQISEFSKRVILADANLDKVLSAYNKHRDKPIREQAENIIHLFTLTNLGAPAAFKYFDTTIDRKRYTSTKEVLDATLIHQSITGLYETRIDLSQLGGDGGGGSGSSGGGGGVLNLEEEYRLHEKPVPSSIDPSWLQLFPTVWAERAGMGLANQVPPVVVELRSGASPVAVRQYPMSKEAREGIRPHIQRFLDLGVLVPCQSPWNTPLLPVKKPGTNDYRPVQDLREINKRVQDIHPTVPNPYNLLSSLPPSHTWYSVLDLKDAFFCLKLHPNSQPLFAFEWRDPEKGNTGQLTWTRLPQGFKNSPTLFNEALHRDLAPFRALNPQVVLLQYVDDLLVAAPTYRDCKEGTQKLLQELSKLGYRVSAKKAQLCQKEVTYLGYLLKEGKRWLTPARKATVMKIPPPTTPRQVREFLGKAGFCRLFIPGFASLAAPLYPLTKPSIPFIWTEEHQKAFDRIKEALLSAPALALPDLTKPFTLYVDERAGVARGVLTQTLGPWRRPVAYLSKKLDPVASGWPTCLKAVAAVALLLKDADKLTLGQNVTVIASHSLESIVRQPPDRWMTNARMTHYQSLLLNERVSFAPPAVLNPATLLPVESEATPVHRCSEILAEETGTRRDLKDQPLPGVPAWYTDGSSFIAEGKRRAGAAIVDGKRTVWASSLPEGTSAQKAELVALTQALRLAEGKDINIYTDSRYAFATAHIHGAIYKQRGWLTSAGKDIKNKEEILALLEAIHLPKRVAIIHCPGHQKGNDPVATGNRRADEAAKQAALSTRVLAETTKPAGKRTADGSEFEKRTADGSEFESPKKKAKVE

SEQ ID NO: 910 - protein, 2094 aa, synthetic construct
MPAAKRVKLDGGDKKYSIGLDIGTNSVGWAVITDEYKVPSKKFKVLGNTDRHSIKKNLIGALLFDSGETAEATRLKRTARRRYTRRKNRICYLQEIFSNEMAKVDDSFFHRLEESFLVEEDKKHERHPIFGNIVDEVAYHEKYPTIYHLRKKLVDSTDKADLRLIYLALAHMIKFRGHFLIEGDLNPDNSDVDKLFIQLVQTYNQLFEENPINASGVDAKAILSARLSKSRRLENLIAQLPGEKKNGLFGNLIALSLGLTPNFKSNFDLAEDAKLQLSKDTYDDDLDNLLAQIGDQYADLFLAAKNLSDAILLSDILRVNTEITKAPLSASMIKRYDEHHQDLTLLKALVRQQLPEKYKEIFFDQSKNGYAGYIDGGASQEEFYKFIKPILEKMDGTEELLVKLNREDLLRKQRTFDNGSIPHQIHLGELHAILRRQEDFYPFLKDNREKIEKILTFRIPYYVGPLARGNSRFAWMTRKSEETITPWNFEEVVDKGASAQSFIERMTNFDKNLPNEKVLPKHSLLYEYFTVYNELTKVKYVTEGMRKPAFLSGEQKKAIVDLLFKTNRKVTVKQLKEDYFKKIECFDSVEISGVEDRFNASLGTYHDLLKIIKDKDFLDNEENEDILEDIVLTLTLFEDREMIEERLKTYAHLFDDKVMKQLKRRRYTGWGRLSRKLINGIRDKQSGKTILDFLKSDGFANRNFMQLIHDDSLTFKEDIQKAQVSGQGDSLHEHIANLAGSPAIKKGILQTVKVVDELVKVMGRHKPENIVIEMARENQTTQKGQKNSRERMKRIEEGIKELGSQILKEHPVENTQLQNEKLYLYYLQNGRDMYVDQELDINRLSDYDVDHIVPQSFLKDDSIDNKVLTRSDKARGKSDNVPSEEVVKKMKNYWRQLLNAKLITQRKFDNLTKAERGGLSELDKAGFIKRQLVETRQITKHVAQILDSRMNTKYDENDKLIREVKVITLKSKLVSDFRKDFQFYKVREINNYHHAHDAYLNAVVGTALIKKYPKLESEFVYGDYKVYDVRKMIAKSEQEIGKATAKYFFYSNIMNFFKTEITLANGEIRKRPLIETNGETGEIVWDKGRDFATVRKVLSMPQVNIVKKTEVQTGGFSKESILPKRNSDKLIARKKDWDPKKYGGFDSPTVAYSVLVVAKVEKGKSKKLKSVKELLGITIMERSSFEKNPIDFLEAKGYKEVKKDLIIKLPKYSLFELENGRKRMLASAGELQKGNELALPSKYVNFLYLASHYEKLKGSPEDNEQKQLFVEQHKHYLDEIIEQISEFSKRVILADANLDKVLSAYNKHRDKPIREQAENIIHLFTLTNLGAPAAFKYFDTTIDRKRYTSTKEVLDATLIHQSITGLYETRIDLSQLGGDGGGSSEAAAKGGGGGVLNLEEEYRLHEKPVPSSIDPSWLQLFPTVWAERAGMGLANQVPPVVVELRSGASPVAVRQYPMSKEAREGIRPHIQRFLDLGVLVPCQSPWNTPLLPVKKPGTNDYRPVQDLREINKRVQDIHPTVPNPYNLLSSLPPSHTWYSVLDLKDAFFCLKLHPNSQPLFAFEWRDPEKGNTGQLTWTRLPQGFKNSPTLFNEALHRDLAPFRALNPQVVLLQYVDDLLVAAPTYRDCKEGTQKLLQELSKLGYRVSAKKAQLCQKEVTYLGYLLKEGKRWLTPARKATVMKIPPPTTPRQVREFLGKAGFCRLFIPGFASLAAPLYPLTKPSIPFIWTEEHQKAFDRIKEALLSAPALALPDLTKPFTLYVDERAGVARGVLTQTLGPWRRPVAYLSKKLDPVASGWPTCLKAVAAVALLLKDADKLTLGQNVTVIASHSLESIVRQPPDRWMTNARMTHYQSLLLNERVSFAPPAVLNPATLLPVESEATPVHRCSEILAEETGTRRDLKDQPLPGVPAWYTDGSSFIAEGKRRAGAAIVDGKRTVWASSLPEGTSAQKAELVALTQALRLAEGKDINIYTDSRYAFATAHIHGAIYKQRGWLTSAGKDIKNKEEILALLEAIHLPKRVAIIHCPGHQKGNDPVATGNRRADEAAKQAALSTRVLAETTKPAGKRTADGSEFEKRTADGSEFESPKKKAKVE

SEQ ID NO: 911 - protein, 2098 aa, synthetic construct
MPAAKRVKLDGGDKKYSIGLDIGTNSVGWAVITDEYKVPSKKFKVLGNTDRHSIKKNLIGALLFDSGETAEATRLKRTARRRYTRRKNRICYLQEIFSNEMAKVDDSFFHRLEESFLVEEDKKHERHPIFGNIVDEVAYHEKYPTIYHLRKKLVDSTDKADLRLIYLALAHMIKFRGHFLIEGDLNPDNSDVDKLFIQLVQTYNQLFEENPINASGVDAKAILSARLSKSRRLENLIAQLPGEKKNGLFGNLIALSLGLTPNFKSNFDLAEDAKLQLSKDTYDDDLDNLLAQIGDQYADLFLAAKNLSDAILLSDILRVNTEITKAPLSASMIKRYDEHHQDLTLLKALVRQQLPEKYKEIFFDQSKNGYAGYIDGGASQEEFYKFIKPILEKMDGTEELLVKLNREDLLRKQRTFDNGSIPHQIHLGELHAILRRQEDFYPFLKDNREKIEKILTFRIPYYVGPLARGNSRFAWMTRKSEETITPWNFEEVVDKGASAQSFIERMTNFDKNLPNEKVLPKHSLLYEYFTVYNELTKVKYVTEGMRKPAFLSGEQKKAIVDLLFKTNRKVTVKQLKEDYFKKIECFDSVEISGVEDRFNASLGTYHDLLKIIKDKDFLDNEENEDILEDIVLTLTLFEDREMIEERLKTYAHLFDDKVMKQLKRRRYTGWGRLSRKLINGIRDKQSGKTILDFLKSDGFANRNFMQLIHDDSLTFKEDIQKAQVSGQGDSLHEHIANLAGSPAIKKGILQTVKVVDELVKVMGRHKPENIVIEMARENQTTQKGQKNSRERMKRIEEGIKELGSQILKEHPVENTQLQNEKLYLYYLQNGRDMYVDQELDINRLSDYDVDHIVPQSFLKDDSIDNKVLTRSDKARGKSDNVPSEEVVKKMKNYWRQLLNAKLITQRKFDNLTKAERGGLSELDKAGFIKRQLVETRQITKHVAQILDSRMNTKYDENDKLIREVKVITLKSKLVSDFRKDFQFYKVREINNYHHAHDAYLNAVVGTALIKKYPKLESEFVYGDYKVYDVRKMIAKSEQEIGKATAKYFFYSNIMNFFKTEITLANGEIRKRPLIETNGETGEIVWDKGRDFATVRKVLSMPQVNIVKKTEVQTGGFSKESILPKRNSDKLIARKKDWDPKKYGGFDSPTVAYSVLVVAKVEKGKSKKLKSVKELLGITIMERSSFEKNPIDFLEAKGYKEVKKDLIIKLPKYSLFELENGRKRMLASAGELQKGNELALPSKYVNFLYLASHYEKLKGSPEDNEQKQLFVEQHKHYLDEIIEQISEFSKRVILADANLDKVLSAYNKHRDKPIREQAENIIHLFTLTNLGAPAAFKYFDTTIDRKRYTSTKEVLDATLIHQSITGLYETRIDLSQLGGDGGGGGGSEAAAKGGGGSGGVLNLEEEYRLHEKPVPSSIDPSWLQLFPTVWAERAGMGLANQVPPVVVELRSGASPVAVRQYPMSKEAREGIRPHIQRFLDLGVLVPCQSPWNTPLLPVKKPGTNDYRPVQDLREINKRVQDIHPTVPNPYNLLSSLPPSHTWYSVLDLKDAFFCLKLHPNSQPLFAFEWRDPEKGNTGQLTWTRLPQGFKNSPTLFNEALHRDLAPFRALNPQVVLLQYVDDLLVAAPTYRDCKEGTQKLLQELSKLGYRVSAKKAQLCQKEVTYLGYLLKEGKRWLTPARKATVMKIPPPTTPRQVREFLGKAGFCRLFIPGFASLAAPLYPLTKPSIPFIWTEEHQKAFDRIKEALLSAPALALPDLTKPFTLYVDERAGVARGVLTQTLGPWRRPVAYLSKKLDPVASGWPTCLKAVAAVALLLKDADKLTLGQNVTVIASHSLESIVRQPPDRWMTNARMTHYQSLLLNERVSFAPPAVLNPATLLPVESEATPVHRCSEILAEETGTRRDLKDQPLPGVPAWYTDGSSFIAEGKRRAGAAIVDGKRTVWASSLPEGTSAQKAELVALTQALRLAEGKDINIYTDSRYAFATAHIHGAIYKQRGWLTSAGKDIKNKEEILALLEAIHLPKRVAIIHCPGHQKGNDPVATGNRRADEAAKQAALSTRVLAETTKPAGKRTADGSEFEKRTADGSEFESPKKKAKVE

SEQ ID NO: 912 - protein, 2094 aa, synthetic construct
MPAAKRVKLDGGDKKYSIGLDIGTNSVGWAVITDEYKVPSKKFKVLGNTDRHSIKKNLIGALLFDSGETAEATRLKRTARRRYTRRKNRICYLQEIFSNEMAKVDDSFFHRLEESFLVEEDKKHERHPIFGNIVDEVAYHEKYPTIYHLRKKLVDSTDKADLRLIYLALAHMIKFRGHFLIEGDLNPDNSDVDKLFIQLVQTYNQLFEENPINASGVDAKAILSARLSKSRRLENLIAQLPGEKKNGLFGNLIALSLGLTPNFKSNFDLAEDAKLQLSKDTYDDDLDNLLAQIGDQYADLFLAAKNLSDAILLSDILRVNTEITKAPLSASMIKRYDEHHQDLTLLKALVRQQLPEKYKEIFFDQSKNGYAGYIDGGASQEEFYKFIKPILEKMDGTEELLVKLNREDLLRKQRTFDNGSIPHQIHLGELHAILRRQEDFYPFLKDNREKIEKILTFRIPYYVGPLARGNSRFAWMTRKSEETITPWNFEEVVDKGASAQSFIERMTNFDKNLPNEKVLPKHSLLYEYFTVYNELTKVKYVTEGMRKPAFLSGEQKKAIVDLLFKTNRKVTVKQLKEDYFKKIECFDSVEISGVEDRFNASLGTYHDLLKIIKDKDFLDNEENEDILEDIVLTLTLFEDREMIEERLKTYAHLFDDKVMKQLKRRRYTGWGRLSRKLINGIRDKQSGKTILDFLKSDGFANRNFMQLIHDDSLTFKEDIQKAQVSGQGDSLHEHIANLAGSPAIKKGILQTVKVVDELVKVMGRHKPENIVIEMARENQTTQKGQKNSRERMKRIEEGIKELGSQILKEHPVENTQLQNEKLYLYYLQNGRDMYVDQELDINRLSDYDVDHIVPQSFLKDDSIDNKVLTRSDKARGKSDNVPSEEVVKKMKNYWRQLLNAKLITQRKFDNLTKAERGGLSELDKAGFIKRQLVETRQITKHVAQILDSRMNTKYDENDKLIREVKVITLKSKLVSDFRKDFQFYKVREINNYHHAHDAYLNAVVGTALIKKYPKLESEFVYGDYKVYDVRKMIAKSEQEIGKATAKYFFYSNIMNFFKTEITLANGEIRKRPLIETNGETGEIVWDKGRDFATVRKVLSMPQVNIVKKTEVQTGGFSKESILPKRNSDKLIARKKDWDPKKYGGFDSPTVAYSVLVVAKVEKGKSKKLKSVKELLGITIMERSSFEKNPIDFLEAKGYKEVKKDLIIKLPKYSLFELENGRKRMLASAGELQKGNELALPSKYVNFLYLASHYEKLKGSPEDNEQKQLFVEQHKHYLDEIIEQISEFSKRVILADANLDKVLSAYNKHRDKPIREQAENIIHLFTLTNLGAPAAFKYFDTTIDRKRYTSTKEVLDATLIHQSITGLYETRIDLSQLGGDGGGGSEAAAKPAPGGVLNLEEEYRLHEKPVPSSIDPSWLQLFPTVWAERAGMGLANQVPPVVVELRSGASPVAVRQYPMSKEAREGIRPHIQRFLDLGVLVPCQSPWNTPLLPVKKPGTNDYRPVQDLREINKRVQDIHPTVPNPYNLLSSLPPSHTWYSVLDLKDAFFCLKLHPNSQPLFAFEWRDPEKGNTGQLTWTRLPQGFKNSPTLFNEALHRDLAPFRALNPQVVLLQYVDDLLVAAPTYRDCKEGTQKLLQELSKLGYRVSAKKAQLCQKEVTYLGYLLKEGKRWLTPARKATVMKIPPPTTPRQVREFLGKAGFCRLFIPGFASLAAPLYPLTKPSIPFIWTEEHQKAFDRIKEALLSAPALALPDLTKPFTLYVDERAGVARGVLTQTLGPWRRPVAYLSKKLDPVASGWPTCLKAVAAVALLLKDADKLTLGQNVTVIASHSLESIVRQPPDRWMTNARMTHYQSLLLNERVSFAPPAVLNPATLLPVESEATPVHRCSEILAEETGTRRDLKDQPLPGVPAWYTDGSSFIAEGKRRAGAAIVDGKRTVWASSLPEGTSAQKAELVALTQALRLAEGKDINIYTDSRYAFATAHIHGAIYKQRGWLTSAGKDIKNKEEILALLEAIHLPKRVAIIHCPGHQKGNDPVATGNRRADEAAKQAALSTRVLAETTKPAGKRTADGSEFEKRTADGSEFESPKKKAKVE

SEQ ID NO: 913 - protein, 2092 aa, synthetic construct
MPAAKRVKLDGGDKKYSIGLDIGTNSVGWAVITDEYKVPSKKFKVLGNTDRHSIKKNLIGALLFDSGETAEATRLKRTARRRYTRRKNRICYLQEIFSNEMAKVDDSFFHRLEESFLVEEDKKHERHPIFGNIVDEVAYHEKYPTIYHLRKKLVDSTDKADLRLIYLALAHMIKFRGHFLIEGDLNPDNSDVDKLFIQLVQTYNQLFEENPINASGVDAKAILSARLSKSRRLENLIAQLPGEKKNGLFGNLIALSLGLTPNFKSNFDLAEDAKLQLSKDTYDDDLDNLLAQIGDQYADLFLAAKNLSDAILLSDILRVNTEITKAPLSASMIKRYDEHHQDLTLLKALVRQQLPEKYKEIFFDQSKNGYAGYIDGGASQEEFYKFIKPILEKMDGTEELLVKLNREDLLRKQRTFDNGSIPHQIHLGELHAILRRQEDFYPFLKDNREKIEKILTFRIPYYVGPLARGNSRFAWMTRKSEETITPWNFEEVVDKGASAQSFIERMTNFDKNLPNEKVLPKHSLLYEYFTVYNELTKVKYVTEGMRKPAFLSGEQKKAIVDLLFKTNRKVTVKQLKEDYFKKIECFDSVEISGVEDRFNASLGTYHDLLKIIKDKDFLDNEENEDILEDIVLTLTLFEDREMIEERLKTYAHLFDDKVMKQLKRRRYTGWGRLSRKLINGIRDKQSGKTILDFLKSDGFANRNFMQLIHDDSLTFKEDIQKAQVSGQGDSLHEHIANLAGSPAIKKGILQTVKVVDELVKVMGRHKPENIVIEMARENQTTQKGQKNSRERMKRIEEGIKELGSQILKEHPVENTQLQNEKLYLYYLQNGRDMYVDQELDINRLSDYDVDHIVPQSFLKDDSIDNKVLTRSDKARGKSDNVPSEEVVKKMKNYWRQLLNAKLITQRKFDNLTKAERGGLSELDKAGFIKRQLVETRQITKHVAQILDSRMNTKYDENDKLIREVKVITLKSKLVSDFRKDFQFYKVREINNYHHAHDAYLNAVVGTALIKKYPKLESEFVYGDYKVYDVRKMIAKSEQEIGKATAKYFFYSNIMNFFKTEITLANGEIRKRPLIETNGETGEIVWDKGRDFATVRKVLSMPQVNIVKKTEVQTGGFSKESILPKRNSDKLIARKKDWDPKKYGGFDSPTVAYSVLVVAKVEKGKSKKLKSVKELLGITIMERSSFEKNPIDFLEAKGYKEVKKDLIIKLPKYSLFELENGRKRMLASAGELQKGNELALPSKYVNFLYLASHYEKLKGSPEDNEQKQLFVEQHKHYLDEIIEQISEFSKRVILADANLDKVLSAYNKHRDKPIREQAENIIHLFTLTNLGAPAAFKYFDTTIDRKRYTSTKEVLDATLIHQSITGLYETRIDLSQLGGDGGGGGPAPGSSGGVLNLEEEYRLHEKPVPSSIDPSWLQLFPTVWAERAGMGLANQVPPVVVELRSGASPVAVRQYPMSKEAREGIRPHIQRFLDLGVLVPCQSPWNTPLLPVKKPGTNDYRPVQDLREINKRVQDIHPTVPNPYNLLSSLPPSHTWYSVLDLKDAFFCLKLHPNSQPLFAFEWRDPEKGNTGQLTWTRLPQGFKNSPTLFNEALHRDLAPFRALNPQVVLLQYVDDLLVAAPTYRDCKEGTQKLLQELSKLGYRVSAKKAQLCQKEVTYLGYLLKEGKRWLTPARKATVMKIPPPTTPRQVREFLGKAGFCRLFIPGFASLAAPLYPLTKPSIPFIWTEEHQKAFDRIKEALLSAPALALPDLTKPFTLYVDERAGVARGVLTQTLGPWRRPVAYLSKKLDPVASGWPTCLKAVAAVALLLKDADKLTLGQNVTVIASHSLESIVRQPPDRWMTNARMTHYQSLLLNERVSFAPPAVLNPATLLPVESEATPVHRCSEILAEETGTRRDLKDQPLPGVPAWYTDGSSFIAEGKRRAGAAIVDGKRTVWASSLPEGTSAQKAELVALTQALRLAEGKDINIYTDSRYAFATAHIHGAIYKQRGWLTSAGKDIKNKEEILALLEAIHLPKRVAIIHCPGHQKGNDPVATGNRRADEAAKQAALSTRVLAETTKPAGKRTADGSEFEKRTADGSEFESPKKKAKVE

SEQ ID NO: 914 - protein, 2089 aa, synthetic construct
MPAAKRVKLDGGDKKYSIGLDIGTNSVGWAVITDEYKVPSKKFKVLGNTDRHSIKKNLIGALLFDSGETAEATRLKRTARRRYTRRKNRICYLQEIFSNEMAKVDDSFFHRLEESFLVEEDKKHERHPIFGNIVDEVAYHEKYPTIYHLRKKLVDSTDKADLRLIYLALAHMIKFRGHFLIEGDLNPDNSDVDKLFIQLVQTYNQLFEENPINASGVDAKAILSARLSKSRRLENLIAQLPGEKKNGLFGNLIALSLGLTPNFKSNFDLAEDAKLQLSKDTYDDDLDNLLAQIGDQYADLFLAAKNLSDAILLSDILRVNTEITKAPLSASMIKRYDEHHQDLTLLKALVRQQLPEKYKEIFFDQSKNGYAGYIDGGASQEEFYKFIKPILEKMDGTEELLVKLNREDLLRKQRTFDNGSIPHQIHLGELHAILRRQEDFYPFLKDNREKIEKILTFRIPYYVGPLARGNSRFAWMTRKSEETITPWNFEEVVDKGASAQSFIERMTNFDKNLPNEKVLPKHSLLYEYFTVYNELTKVKYVTEGMRKPAFLSGEQKKAIVDLLFKTNRKVTVKQLKEDYFKKIECFDSVEISGVEDRFNASLGTYHDLLKIIKDKDFLDNEENEDILEDIVLTLTLFEDREMIEERLKTYAHLFDDKVMKQLKRRRYTGWGRLSRKLINGIRDKQSGKTILDFLKSDGFANRNFMQLIHDDSLTFKEDIQKAQVSGQGDSLHEHIANLAGSPAIKKGILQTVKVVDELVKVMGRHKPENIVIEMARENQTTQKGQKNSRERMKRIEEGIKELGSQILKEHPVENTQLQNEKLYLYYLQNGRDMYVDQELDINRLSDYDVDHIVPQSFLKDDSIDNKVLTRSDKARGKSDNVPSEEVVKKMKNYWRQLLNAKLITQRKFDNLTKAERGGLSELDKAGFIKRQLVETRQITKHVAQILDSRMNTKYDENDKLIREVKVITLKSKLVSDFRKDFQFYKVREINNYHHAHDAYLNAVVGTALIKKYPKLESEFVYGDYKVYDVRKMIAKSEQEIGKATAKYFFYSNIMNFFKTEITLANGEIRKRPLIETNGETGEIVWDKGRDFATVRKVLSMPQVNIVKKTEVQTGGFSKESILPKRNSDKLIARKKDWDPKKYGGFDSPTVAYSVLVVAKVEKGKSKKLKSVKELLGITIMERSSFEKNPIDFLEAKGYKEVKKDLIIKLPKYSLFELENGRKRMLASAGELQKGNELALPSKYVNFLYLASHYEKLKGSPEDNEQKQLFVEQHKHYLDEIIEQISEFSKRVILADANLDKVLSAYNKHRDKPIREQAENIIHLFTLTNLGAPAAFKYFDTTIDRKRYTSTKEVLDATLIHQSITGLYETRIDLSQLGGDGGPAPGGGGGVLNLEEEYRLHEKPVPSSIDPSWLQLFPTVWAERAGMGLANQVPPVVVELRSGASPVAVRQYPMSKEAREGIRPHIQRFLDLGVLVPCQSPWNTPLLPVKKPGTNDYRPVQDLREINKRVQDIHPTVPNPYNLLSSLPPSHTWYSVLDLKDAFFCLKLHPNSQPLFAFEWRDPEKGNTGQLTWTRLPQGFKNSPTLFNEALHRDLAPFRALNPQVVLLQYVDDLLVAAPTYRDCKEGTQKLLQELSKLGYRVSAKKAQLCQKEVTYLGYLLKEGKRWLTPARKATVMKIPPPTTPRQVREFLGKAGFCRLFIPGFASLAAPLYPLTKPSIPFIWTEEHQKAFDRIKEALLSAPALALPDLTKPFTLYVDERAGVARGVLTQTLGPWRRPVAYLSKKLDPVASGWPTCLKAVAAVALLLKDADKLTLGQNVTVIASHSLESIVRQPPDRWMTNARMTHYQSLLLNERVSFAPPAVLNPATLLPVESEATPVHRCSEILAEETGTRRDLKDQPLPGVPAWYTDGSSFIAEGKRRAGAAIVDGKRTVWASSLPEGTSAQKAELVALTQALRLAEGKDINIYTDSRYAFATAHIHGAIYKQRGWLTSAGKDIKNKEEILALLEAIHLPKRVAIIHCPGHQKGNDPVATGNRRADEAAKQAALSTRVLAETTKPAGKRTADGSEFEKRTADGSEFESPKKKAKVE

SEQ ID NO: 915 - protein, 2094 aa, synthetic construct
MPAAKRVKLDGGDKKYSIGLDIGTNSVGWAVITDEYKVPSKKFKVLGNTDRHSIKKNLIGALLFDSGETAEATRLKRTARRRYTRRKNRICYLQEIFSNEMAKVDDSFFHRLEESFLVEEDKKHERHPIFGNIVDEVAYHEKYPTIYHLRKKLVDSTDKADLRLIYLALAHMIKFRGHFLIEGDLNPDNSDVDKLFIQLVQTYNQLFEENPINASGVDAKAILSARLSKSRRLENLIAQLPGEKKNGLFGNLIALSLGLTPNFKSNFDLAEDAKLQLSKDTYDDDLDNLLAQIGDQYADLFLAAKNLSDAILLSDILRVNTEITKAPLSASMIKRYDEHHQDLTLLKALVRQQLPEKYKEIFFDQSKNGYAGYIDGGASQEEFYKFIKPILEKMDGTEELLVKLNREDLLRKQRTFDNGSIPHQIHLGELHAILRRQEDFYPFLKDNREKIEKILTFRIPYYVGPLARGNSRFAWMTRKSEETITPWNFEEVVDKGASAQSFIERMTNFDKNLPNEKVLPKHSLLYEYFTVYNELTKVKYVTEGMRKPAFLSGEQKKAIVDLLFKTNRKVTVKQLKEDYFKKIECFDSVEISGVEDRFNASLGTYHDLLKIIKDKDFLDNEENEDILEDIVLTLTLFEDREMIEERLKTYAHLFDDKVMKQLKRRRYTGWGRLSRKLINGIRDKQSGKTILDFLKSDGFANRNFMQLIHDDSLTFKEDIQKAQVSGQGDSLHEHIANLAGSPAIKKGILQTVKVVDELVKVMGRHKPENIVIEMARENQTTQKGQKNSRERMKRIEEGIKELGSQILKEHPVENTQLQNEKLYLYYLQNGRDMYVDQELDINRLSDYDVDHIVPQSFLKDDSIDNKVLTRSDKARGKSDNVPSEEVVKKMKNYWRQLLNAKLITQRKFDNLTKAERGGLSELDKAGFIKRQLVETRQITKHVAQILDSRMNTKYDENDKLIREVKVITLKSKLVSDFRKDFQFYKVREINNYHHAHDAYLNAVVGTALIKKYPKLESEFVYGDYKVYDVRKMIAKSEQEIGKATAKYFFYSNIMNFFKTEITLANGEIRKRPLIETNGETGEIVWDKGRDFATVRKVLSMPQVNIVKKTEVQTGGFSKESILPKRNSDKLIARKKDWDPKKYGGFDSPTVAYSVLVVAKVEKGKSKKLKSVKELLGITIMERSSFEKNPIDFLEAKGYKEVKKDLIIKLPKYSLFELENGRKRMLASAGELQKGNELALPSKYVNFLYLASHYEKLKGSPEDNEQKQLFVEQHKHYLDEIIEQISEFSKRVILADANLDKVLSAYNKHRDKPIREQAENIIHLFTLTNLGAPAAFKYFDTTIDRKRYTSTKEVLDATLIHQSITGLYETRIDLSQLGGDGGGSSGGSEAAAKGGVLNLEEEYRLHEKPVPSSIDPSWLQLFPTVWAERAGMGLANQVPPVVVELRSGASPVAVRQYPMSKEAREGIRPHIQRFLDLGVLVPCQSPWNTPLLPVKKPGTNDYRPVQDLREINKRVQDIHPTVPNPYNLLSSLPPSHTWYSVLDLKDAFFCLKLHPNSQPLFAFEWRDPEKGNTGQLTWTRLPQGFKNSPTLFNEALHRDLAPFRALNPQVVLLQYVDDLLVAAPTYRDCKEGTQKLLQELSKLGYRVSAKKAQLCQKEVTYLGYLLKEGKRWLTPARKATVMKIPPPTTPRQVREFLGKAGFCRLFIPGFASLAAPLYPLTKPSIPFIWTEEHQKAFDRIKEALLSAPALALPDLTKPFTLYVDERAGVARGVLTQTLGPWRRPVAYLSKKLDPVASGWPTCLKAVAAVALLLKDADKLTLGQNVTVIASHSLESIVRQPPDRWMTNARMTHYQSLLLNERVSFAPPAVLNPATLLPVESEATPVHRCSEILAEETGTRRDLKDQPLPGVPAWYTDGSSFIAEGKRRAGAAIVDGKRTVWASSLPEGTSAQKAELVALTQALRLAEGKDINIYTDSRYAFATAHIHGAIYKQRGWLTSAGKDIKNKEEILALLEAIHLPKRVAIIHCPGHQKGNDPVATGNRRADEAAKQAALSTRVLAETTKPAGKRTADGSEFEKRTADGSEFESPKKKAKVE

SEQ ID NO: 916 - protein, 2092 aa, synthetic construct
MPAAKRVKLDGGDKKYSIGLDIGTNSVGWAVITDEYKVPSKKFKVLGNTDRHSIKKNLIGALLFDSGETAEATRLKRTARRRYTRRKNRICYLQEIFSNEMAKVDDSFFHRLEESFLVEEDKKHERHPIFGNIVDEVAYHEKYPTIYHLRKKLVDSTDKADLRLIYLALAHMIKFRGHFLIEGDLNPDNSDVDKLFIQLVQTYNQLFEENPINASGVDAKAILSARLSKSRRLENLIAQLPGEKKNGLFGNLIALSLGLTPNFKSNFDLAEDAKLQLSKDTYDDDLDNLLAQIGDQYADLFLAAKNLSDAILLSDILRVNTEITKAPLSASMIKRYDEHHQDLTLLKALVRQQLPEKYKEIFFDQSKNGYAGYIDGGASQEEFYKFIKPILEKMDGTEELLVKLNREDLLRKQRTFDNGSIPHQIHLGELHAILRRQEDFYPFLKDNREKIEKILTFRIPYYVGPLARGNSRFAWMTRKSEETITPWNFEEVVDKGASAQSFIERMTNFDKNLPNEKVLPKHSLLYEYFTVYNELTKVKYVTEGMRKPAFLSGEQKKAIVDLLFKTNRKVTVKQLKEDYFKKIECFDSVEISGVEDRFNASLGTYHDLLKIIKDKDFLDNEENEDILEDIVLTLTLFEDREMIEERLKTYAHLFDDKVMKQLKRRRYTGWGRLSRKLINGIRDKQSGKTILDFLKSDGFANRNFMQLIHDDSLTFKEDIQKAQVSGQGDSLHEHIANLAGSPAIKKGILQTVKVVDELVKVMGRHKPENIVIEMARENQTTQKGQKNSRERMKRIEEGIKELGSQILKEHPVENTQLQNEKLYLYYLQNGRDMYVDQELDINRLSDYDVDHIVPQSFLKDDSIDNKVLTRSDKARGKSDNVPSEEVVKKMKNYWRQLLNAKLITQRKFDNLTKAERGGLSELDKAGFIKRQLVETRQITKHVAQILDSRMNTKYDENDKLIREVKVITLKSKLVSDFRKDFQFYKVREINNYHHAHDAYLNAVVGTALIKKYPKLESEFVYGDYKVYDVRKMIAKSEQEIGKATAKYFFYSNIMNFFKTEITLANGEIRKRPLIETNGETGEIVWDKGRDFATVRKVLSMPQVNIVKKTEVQTGGFSKESILPKRNSDKLIARKKDWDPKKYGGFDSPTVAYSVLVVAKVEKGKSKKLKSVKELLGITIMERSSFEKNPIDFLEAKGYKEVKKDLIIKLPKYSLFELENGRKRMLASAGELQKGNELALPSKYVNFLYLASHYEKLKGSPEDNEQKQLFVEQHKHYLDEIIEQISEFSKRVILADANLDKVLSAYNKHRDKPIREQAENIIHLFTLTNLGAPAAFKYFDTTIDRKRYTSTKEVLDATLIHQSITGLYETRIDLSQLGGDGGPAPAPAPAPGGVLNLEEEYRLHEKPVPSSIDPSWLQLFPTVWAERAGMGLANQVPPVVVELRSGASPVAVRQYPMSKEAREGIRPHIQRFLDLGVLVPCQSPWNTPLLPVKKPGTNDYRPVQDLREINKRVQDIHPTVPNPYNLLSSLPPSHTWYSVLDLKDAFFCLKLHPNSQPLFAFEWRDPEKGNTGQLTWTRLPQGFKNSPTLFNEALHRDLAPFRALNPQVVLLQYVDDLLVAAPTYRDCKEGTQKLLQELSKLGYRVSAKKAQLCQKEVTYLGYLLKEGKRWLTPARKATVMKIPPPTTPRQVREFLGKAGFCRLFIPGFASLAAPLYPLTKPSIPFIWTEEHQKAFDRIKEALLSAPALALPDLTKPFTLYVDERAGVARGVLTQTLGPWRRPVAYLSKKLDPVASGWPTCLKAVAAVALLLKDADKLTLGQNVTVIASHSLESIVRQPPDRWMTNARMTHYQSLLLNERVSFAPPAVLNPATLLPVESEATPVHRCSEILAEETGTRRDLKDQPLPGVPAWYTDGSSFIAEGKRRAGAAIVDGKRTVWASSLPEGTSAQKAELVALTQALRLAEGKDINIYTDSRYAFATAHIHGAIYKQRGWLTSAGKDIKNKEEILALLEAIHLPKRVAIIHCPGHQKGNDPVATGNRRADEAAKQAALSTRVLAETTKPAGKRTADGSEFEKRTADGSEFESPKKKAKVE

SEQ ID NO: 917 - protein, 2093 aa, synthetic construct
MPAAKRVKLDGGDKKYSIGLDIGTNSVGWAVITDEYKVPSKKFKVLGNTDRHSIKKNLIGALLFDSGETAEATRLKRTARRRYTRRKNRICYLQEIFSNEMAKVDDSFFHRLEESFLVEEDKKHERHPIFGNIVDEVAYHEKYPTIYHLRKKLVDSTDKADLRLIYLALAHMIKFRGHFLIEGDLNPDNSDVDKLFIQLVQTYNQLFEENPINASGVDAKAILSARLSKSRRLENLIAQLPGEKKNGLFGNLIALSLGLTPNFKSNFDLAEDAKLQLSKDTYDDDLDNLLAQIGDQYADLFLAAKNLSDAILLSDILRVNTEITKAPLSASMIKRYDEHHQDLTLLKALVRQQLPEKYKEIFFDQSKNGYAGYIDGGASQEEFYKFIKPILEKMDGTEELLVKLNREDLLRKQRTFDNGSIPHQIHLGELHAILRRQEDFYPFLKDNREKIEKILTFRIPYYVGPLARGNSRFAWMTRKSEETITPWNFEEVVDKGASAQSFIERMTNFDKNLPNEKVLPKHSLLYEYFTVYNELTKVKYVTEGMRKPAFLSGEQKKAIVDLLFKTNRKVTVKQLKEDYFKKIECFDSVEISGVEDRFNASLGTYHDLLKIIKDKDFLDNEENEDILEDIVLTLTLFEDREMIEERLKTYAHLFDDKVMKQLKRRRYTGWGRLSRKLINGIRDKQSGKTILDFLKSDGFANRNFMQLIHDDSLTFKEDIQKAQVSGQGDSLHEHIANLAGSPAIKKGILQTVKVVDELVKVMGRHKPENIVIEMARENQTTQKGQKNSRERMKRIEEGIKELGSQILKEHPVENTQLQNEKLYLYYLQNGRDMYVDQELDINRLSDYDVDHIVPQSFLKDDSIDNKVLTRSDKARGKSDNVPSEEVVKKMKNYWRQLLNAKLITQRKFDNLTKAERGGLSELDKAGFIKRQLVETRQITKHVAQILDSRMNTKYDENDKLIREVKVITLKSKLVSDFRKDFQFYKVREINNYHHAHDAYLNAVVGTALIKKYPKLESEFVYGDYKVYDVRKMIAKSEQEIGKATAKYFFYSNIMNFFKTEITLANGEIRKRPLIETNGETGEIVWDKGRDFATVRKVLSMPQVNIVKKTEVQTGGFSKESILPKRNSDKLIARKKDWDPKKYGGFDSPTVAYSVLVVAKVEKGKSKKLKSVKELLGITIMERSSFEKNPIDFLEAKGYKEVKKDLIIKLPKYSLFELENGRKRMLASAGELQKGNELALPSKYVNFLYLASHYEKLKGSPEDNEQKQLFVEQHKHYLDEIIEQISEFSKRVILADANLDKVLSAYNKHRDKPIREQAENIIHLFTLTNLGAPAAFKYFDTTIDRKRYTSTKEVLDATLIHQSITGLYETRIDLSQLGGDGGEAAAKEAAAKGGVLNLEEEYRLHEKPVPSSIDPSWLQLFPTVWAERAGMGLANQVPPVVVELRSGASPVAVRQYPMSKEAREGIRPHIQRFLDLGVLVPCQSPWNTPLLPVKKPGTNDYRPVQDLREINKRVQDIHPTVPNPYNLLSSLPPSHTWYSVLDLKDAFFCLKLHPNSQPLFAFEWRDPEKGNTGQLTWTRLPQGFKNSPTLFNEALHRDLAPFRALNPQVVLLQYVDDLLVAAPTYRDCKEGTQKLLQELSKLGYRVSAKKAQLCQKEVTYLGYLLKEGKRWLTPARKATVMKIPPPTTPRQVREFLGKAGFCRLFIPGFASLAAPLYPLTKPSIPFIWTEEHQKAFDRIKEALLSAPALALPDLTKPFTLYVDERAGVARGVLTQTLGPWRRPVAYLSKKLDPVASGWPTCLKAVAAVALLLKDADKLTLGQNVTVIASHSLESIVRQPPDRWMTNARMTHYQSLLLNERVSFAPPAVLNPATLLPVESEATPVHRCSEILAEETGTRRDLKDQPLPGVPAWYTDGSSFIAEGKRRAGAAIVDGKRTVWASSLPEGTSAQKAELVALTQALRLAEGKDINIYTDSRYAFATAHIHGAIYKQRGWLTSAGKDIKNKEEILALLEAIHLPKRVAIIHCPGHQKGNDPVATGNRRADEAAKQAALSTRVLAETTKPAGKRTADGSEFEKRTADGSEFESPKKKAKVE

SEQ ID NO: 918 - protein, 2092 aa, synthetic construct
MPAAKRVKLDGGDKKYSIGLDIGTNSVGWAVITDEYKVPSKKFKVLGNTDRHSIKKNLIGALLFDSGETAEATRLKRTARRRYTRRKNRICYLQEIFSNEMAKVDDSFFHRLEESFLVEEDKKHERHPIFGNIVDEVAYHEKYPTIYHLRKKLVDSTDKADLRLIYLALAHMIKFRGHFLIEGDLNPDNSDVDKLFIQLVQTYNQLFEENPINASGVDAKAILSARLSKSRRLENLIAQLPGEKKNGLFGNLIALSLGLTPNFKSNFDLAEDAKLQLSKDTYDDDLDNLLAQIGDQYADLFLAAKNLSDAILLSDILRVNTEITKAPLSASMIKRYDEHHQDLTLLKALVRQQLPEKYKEIFFDQSKNGYAGYIDGGASQEEFYKFIKPILEKMDGTEELLVKLNREDLLRKQRTFDNGSIPHQIHLGELHAILRRQEDFYPFLKDNREKIEKILTFRIPYYVGPLARGNSRFAWMTRKSEETITPWNFEEVVDKGASAQSFIERMTNFDKNLPNEKVLPKHSLLYEYFTVYNELTKVKYVTEGMRKPAFLSGEQKKAIVDLLFKTNRKVTVKQLKEDYFKKIECFDSVEISGVEDRFNASLGTYHDLLKIIKDKDFLDNEENEDILEDIVLTLTLFEDREMIEERLKTYAHLFDDKVMKQLKRRRYTGWGRLSRKLINGIRDKQSGKTILDFLKSDGFANRNFMQLIHDDSLTFKEDIQKAQVSGQGDSLHEHIANLAGSPAIKKGILQTVKVVDELVKVMGRHKPENIVIEMARENQTTQKGQKNSRERMKRIEEGIKELGSQILKEHPVENTQLQNEKLYLYYLQNGRDMYVDQELDINRLSDYDVDHIVPQSFLKDDSIDNKVLTRSDKARGKSDNVPSEEVVKKMKNYWRQLLNAKLITQRKFDNLTKAERGGLSELDKAGFIKRQLVETRQITKHVAQILDSRMNTKYDENDKLIREVKVITLKSKLVSDFRKDFQFYKVREINNYHHAHDAYLNAVVGTALIKKYPKLESEFVYGDYKVYDVRKMIAKSEQEIGKATAKYFFYSNIMNFFKTEITLANGEIRKRPLIETNGETGEIVWDKGRDFATVRKVLSMPQVNIVKKTEVQTGGFSKESILPKRNSDKLIARKKDWDPKKYGGFDSPTVAYSVLVVAKVEKGKSKKLKSVKELLGITIMERSSFEKNPIDFLEAKGYKEVKKDLIIKLPKYSLFELENGRKRMLASAGELQKGNELALPSKYVNFLYLASHYEKLKGSPEDNEQKQLFVEQHKHYLDEIIEQISEFSKRVILADANLDKVLSAYNKHRDKPIREQAENIIHLFTLTNLGAPAAFKYFDTTIDRKRYTSTKEVLDATLIHQSITGLYETRIDLSQLGGDGGGSSGGGGGSGGVLNLEEEYRLHEKPVPSSIDPSWLQLFPTVWAERAGMGLANQVPPVVVELRSGASPVAVRQYPMSKEAREGIRPHIQRFLDLGVLVPCQSPWNTPLLPVKKPGTNDYRPVQDLREINKRVQDIHPTVPNPYNLLSSLPPSHTWYSVLDLKDAFFCLKLHPNSQPLFAFEWRDPEKGNTGQLTWTRLPQGFKNSPTLFNEALHRDLAPFRALNPQVVLLQYVDDLLVAAPTYRDCKEGTQKLLQELSKLGYRVSAKKAQLCQKEVTYLGYLLKEGKRWLTPARKATVMKIPPPTTPRQVREFLGKAGFCRLFIPGFASLAAPLYPLTKPSIPFIWTEEHQKAFDRIKEALLSAPALALPDLTKPFTLYVDERAGVARGVLTQTLGPWRRPVAYLSKKLDPVASGWPTCLKAVAAVALLLKDADKLTLGQNVTVIASHSLESIVRQPPDRWMTNARMTHYQSLLLNERVSFAPPAVLNPATLLPVESEATPVHRCSEILAEETGTRRDLKDQPLPGVPAWYTDGSSFIAEGKRRAGAAIVDGKRTVWASSLPEGTSAQKAELVALTQALRLAEGKDINIYTDSRYAFATAHIHGAIYKQRGWLTSAGKDIKNKEEILALLEAIHLPKRVAIIHCPGHQKGNDPVATGNRRADEAAKQAALSTRVLAETTKPAGKRTADGSEFEKRTADGSEFESPKKKAKVE

SEQ ID NO: 919 - protein, 2094 aa, synthetic construct
MPAAKRVKLDGGDKKYSIGLDIGTNSVGWAVITDEYKVPSKKFKVLGNTDRHSIKKNLIGALLFDSGETAEATRLKRTARRRYTRRKNRICYLQEIFSNEMAKVDDSFFHRLEESFLVEEDKKHERHPIFGNIVDEVAYHEKYPTIYHLRKKLVDSTDKADLRLIYLALAHMIKFRGHFLIEGDLNPDNSDVDKLFIQLVQTYNQLFEENPINASGVDAKAILSARLSKSRRLENLIAQLPGEKKNGLFGNLIALSLGLTPNFKSNFDLAEDAKLQLSKDTYDDDLDNLLAQIGDQYADLFLAAKNLSDAILLSDILRVNTEITKAPLSASMIKRYDEHHQDLTLLKALVRQQLPEKYKEIFFDQSKNGYAGYIDGGASQEEFYKFIKPILEKMDGTEELLVKLNREDLLRKQRTFDNGSIPHQIHLGELHAILRRQEDFYPFLKDNREKIEKILTFRIPYYVGPLARGNSRFAWMTRKSEETITPWNFEEVVDKGASAQSFIERMTNFDKNLPNEKVLPKHSLLYEYFTVYNELTKVKYVTEGMRKPAFLSGEQKKAIVDLLFKTNRKVTVKQLKEDYFKKIECFDSVEISGVEDRFNASLGTYHDLLKIIKDKDFLDNEENEDILEDIVLTLTLFEDREMIEERLKTYAHLFDDKVMKQLKRRRYTGWGRLSRKLINGIRDKQSGKTILDFLKSDGFANRNFMQLIHDDSLTFKEDIQKAQVSGQGDSLHEHIANLAGSPAIKKGILQTVKVVDELVKVMGRHKPENIVIEMARENQTTQKGQKNSRERMKRIEEGIKELGSQILKEHPVENTQLQNEKLYLYYLQNGRDMYVDQELDINRLSDYDVDHIVPQSFLKDDSIDNKVLTRSDKARGKSDNVPSEEVVKKMKNYWRQLLNAKLITQRKFDNLTKAERGGLSELDKAGFIKRQLVETRQITKHVAQILDSRMNTKYDENDKLIREVKVITLKSKLVSDFRKDFQFYKVREINNYHHAHDAYLNAVVGTALIKKYPKLESEFVYGDYKVYDVRKMIAKSEQEIGKATAKYFFYSNIMNFFKTEITLANGEIRKRPLIETNGETGEIVWDKGRDFATVRKVLSMPQVNIVKKTEVQTGGFSKESILPKRNSDKLIARKKDWDPKKYGGFDSPTVAYSVLVVAKVEKGKSKKLKSVKELLGITIMERSSFEKNPIDFLEAKGYKEVKKDLIIKLPKYSLFELENGRKRMLASAGELQKGNELALPSKYVNFLYLASHYEKLKGSPEDNEQKQLFVEQHKHYLDEIIEQISEFSKRVILADANLDKVLSAYNKHRDKPIREQAENIIHLFTLTNLGAPAAFKYFDTTIDRKRYTSTKEVLDATLIHQSITGLYETRIDLSQLGGDGGEAAAKGSSPAPGGVLNLEEEYRLHEKPVPSSIDPSWLQLFPTVWAERAGMGLANQVPPVVVELRSGASPVAVRQYPMSKEAREGIRPHIQRFLDLGVLVPCQSPWNTPLLPVKKPGTNDYRPVQDLREINKRVQDIHPTVPNPYNLLSSLPPSHTWYSVLDLKDAFFCLKLHPNSQPLFAFEWRDPEKGNTGQLTWTRLPQGFKNSPTLFNEALHRDLAPFRALNPQVVLLQYVDDLLVAAPTYRDCKEGTQKLLQELSKLGYRVSAKKAQLCQKEVTYLGYLLKEGKRWLTPARKATVMKIPPPTTPRQVREFLGKAGFCRLFIPGFASLAAPLYPLTKPSIPFIWTEEHQKAFDRIKEALLSAPALALPDLTKPFTLYVDERAGVARGVLTQTLGPWRRPVAYLSKKLDPVASGWPTCLKAVAAVALLLKDADKLTLGQNVTVIASHSLESIVRQPPDRWMTNARMTHYQSLLLNERVSFAPPAVLNPATLLPVESEATPVHRCSEILAEETGTRRDLKDQPLPGVPAWYTDGSSFIAEGKRRAGAAIVDGKRTVWASSLPEGTSAQKAELVALTQALRLAEGKDINIYTDSRYAFATAHIHGAIYKQRGWLTSAGKDIKNKEEILALLEAIHLPKRVAIIHCPGHQKGNDPVATGNRRADEAAKQAALSTRVLAETTKPAGKRTADGSEFEKRTADGSEFESPKKKAKVE

SEQ ID NO: 920 - protein, 2094 aa, synthetic construct
MPAAKRVKLDGGDKKYSIGLDIGTNSVGWAVITDEYKVPSKKFKVLGNTDRHSIKKNLIGALLFDSGETAEATRLKRTARRRYTRRKNRICYLQEIFSNEMAKVDDSFFHRLEESFLVEEDKKHERHPIFGNIVDEVAYHEKYPTIYHLRKKLVDSTDKADLRLIYLALAHMIKFRGHFLIEGDLNPDNSDVDKLFIQLVQTYNQLFEENPINASGVDAKAILSARLSKSRRLENLIAQLPGEKKNGLFGNLIALSLGLTPNFKSNFDLAEDAKLQLSKDTYDDDLDNLLAQIGDQYADLFLAAKNLSDAILLSDILRVNTEITKAPLSASMIKRYDEHHQDLTLLKALVRQQLPEKYKEIFFDQSKNGYAGYIDGGASQEEFYKFIKPILEKMDGTEELLVKLNREDLLRKQRTFDNGSIPHQIHLGELHAILRRQEDFYPFLKDNREKIEKILTFRIPYYVGPLARGNSRFAWMTRKSEETITPWNFEEVVDKGASAQSFIERMTNFDKNLPNEKVLPKHSLLYEYFTVYNELTKVKYVTEGMRKPAFLSGEQKKAIVDLLFKTNRKVTVKQLKEDYFKKIECFDSVEISGVEDRFNASLGTYHDLLKIIKDKDFLDNEENEDILEDIVLTLTLFEDREMIEERLKTYAHLFDDKVMKQLKRRRYTGWGRLSRKLINGIRDKQSGKTILDFLKSDGFANRNFMQLIHDDSLTFKEDIQKAQVSGQGDSLHEHIANLAGSPAIKKGILQTVKVVDELVKVMGRHKPENIVIEMARENQTTQKGQKNSRERMKRIEEGIKELGSQILKEHPVENTQLQNEKLYLYYLQNGRDMYVDQELDINRLSDYDVDHIVPQSFLKDDSIDNKVLTRSDKARGKSDNVPSEEVVKKMKNYWRQLLNAKLITQRKFDNLTKAERGGLSELDKAGFIKRQLVETRQITKHVAQILDSRMNTKYDENDKLIREVKVITLKSKLVSDFRKDFQFYKVREINNYHHAHDAYLNAVVGTALIKKYPKLESEFVYGDYKVYDVRKMIAKSEQEIGKATAKYFFYSNIMNFFKTEITLANGEIRKRPLIETNGETGEIVWDKGRDFATVRKVLSMPQVNIVKKTEVQTGGFSKESILPKRNSDKLIARKKDWDPKKYGGFDSPTVAYSVLVVAKVEKGKSKKLKSVKELLGITIMERSSFEKNPIDFLEAKGYKEVKKDLIIKLPKYSLFELENGRKRMLASAGELQKGNELALPSKYVNFLYLASHYEKLKGSPEDNEQKQLFVEQHKHYLDEIIEQISEFSKRVILADANLDKVLSAYNKHRDKPIREQAENIIHLFTLTNLGAPAAFKYFDTTIDRKRYTSTKEVLDATLIHQSITGLYETRIDLSQLGGDGGGSSGGGEAAAKGGVLNLEEEYRLHEKPVPSSIDPSWLQLFPTVWAERAGMGLANQVPPVVVELRSGASPVAVRQYPMSKEAREGIRPHIQRFLDLGVLVPCQSPWNTPLLPVKKPGTNDYRPVQDLREINKRVQDIHPTVPNPYNLLSSLPPSHTWYSVLDLKDAFFCLKLHPNSQPLFAFEWRDPEKGNTGQLTWTRLPQGFKNSPTLFNEALHRDLAPFRALNPQVVLLQYVDDLLVAAPTYRDCKEGTQKLLQELSKLGYRVSAKKAQLCQKEVTYLGYLLKEGKRWLTPARKATVMKIPPPTTPRQVREFLGKAGFCRLFIPGFASLAAPLYPLTKPSIPFIWTEEHQKAFDRIKEALLSAPALALPDLTKPFTLYVDERAGVARGVLTQTLGPWRRPVAYLSKKLDPVASGWPTCLKAVAAVALLLKDADKLTLGQNVTVIASHSLESIVRQPPDRWMTNARMTHYQSLLLNERVSFAPPAVLNPATLLPVESEATPVHRCSEILAEETGTRRDLKDQPLPGVPAWYTDGSSFIAEGKRRAGAAIVDGKRTVWASSLPEGTSAQKAELVALTQALRLAEGKDINIYTDSRYAFATAHIHGAIYKQRGWLTSAGKDIKNKEEILALLEAIHLPKRVAIIHCPGHQKGNDPVATGNRRADEAAKQAALSTRVLAETTKPAGKRTADGSEFEKRTADGSEFESPKKKAKVE

SEQ ID NO: 921 - protein, 2094 aa, synthetic construct
MPAAKRVKLDGGDKKYSIGLDIGTNSVGWAVITDEYKVPSKKFKVLGNTDRHSIKKNLIGALLFDSGETAEATRLKRTARRRYTRRKNRICYLQEIFSNEMAKVDDSFFHRLEESFLVEEDKKHERHPIFGNIVDEVAYHEKYPTIYHLRKKLVDSTDKADLRLIYLALAHMIKFRGHFLIEGDLNPDNSDVDKLFIQLVQTYNQLFEENPINASGVDAKAILSARLSKSRRLENLIAQLPGEKKNGLFGNLIALSLGLTPNFKSNFDLAEDAKLQLSKDTYDDDLDNLLAQIGDQYADLFLAAKNLSDAILLSDILRVNTEITKAPLSASMIKRYDEHHQDLTLLKALVRQQLPEKYKEIFFDQSKNGYAGYIDGGASQEEFYKFIKPILEKMDGTEELLVKLNREDLLRKQRTFDNGSIPHQIHLGELHAILRRQEDFYPFLKDNREKIEKILTFRIPYYVGPLARGNSRFAWMTRKSEETITPWNFEEVVDKGASAQSFIERMTNFDKNLPNEKVLPKHSLLYEYFTVYNELTKVKYVTEGMRKPAFLSGEQKKAIVDLLFKTNRKVTVKQLKEDYFKKIECFDSVEISGVEDRFNASLGTYHDLLKIIKDKDFLDNEENEDILEDIVLTLTLFEDREMIEERLKTYAHLFDDKVMKQLKRRRYTGWGRLSRKLINGIRDKQSGKTILDFLKSDGFANRNFMQLIHDDSLTFKEDIQKAQVSGQGDSLHEHIANLAGSPAIKKGILQTVKVVDELVKVMGRHKPENIVIEMARENQTTQKGQKNSRERMKRIEEGIKELGSQILKEHPVENTQLQNEKLYLYYLQNGRDMYVDQELDINRLSDYDVDHIVPQSFLKDDSIDNKVLTRSDKARGKSDNVPSEEVVKKMKNYWRQLLNAKLITQRKFDNLTKAERGGLSELDKAGFIKRQLVETRQITKHVAQILDSRMNTKYDENDKLIREVKVITLKSKLVSDFRKDFQFYKVREINNYHHAHDAYLNAVVGTALIKKYPKLESEFVYGDYKVYDVRKMIAKSEQEIGKATAKYFFYSNIMNFFKTEITLANGEIRKRPLIETNGETGEIVWDKGRDFATVRKVLSMPQVNIVKKTEVQTGGFSKESILPKRNSDKLIARKKDWDPKKYGGFDSPTVAYSVLVVAKVEKGKSKKLKSVKELLGITIMERSSFEKNPIDFLEAKGYKEVKKDLIIKLPKYSLFELENGRKRMLASAGELQKGNELALPSKYVNFLYLASHYEKLKGSPEDNEQKQLFVEQHKHYLDEIIEQISEFSKRVILADANLDKVLSAYNKHRDKPIREQAENIIHLFTLTNLGAPAAFKYFDTTIDRKRYTSTKEVLDATLIHQSITGLYETRIDLSQLGGDGGEAAAKPAPGGSGGVLNLEEEYRLHEKPVPSSIDPSWLQLFPTVWAERAGMGLANQVPPVVVELRSGASPVAVRQYPMSKEAREGIRPHIQRFLDLGVLVPCQSPWNTPLLPVKKPGTNDYRPVQDLREINKRVQDIHPTVPNPYNLLSSLPPSHTWYSVLDLKDAFFCLKLHPNSQPLFAFEWRDPEKGNTGQLTWTRLPQGFKNSPTLFNEALHRDLAPFRALNPQVVLLQYVDDLLVAAPTYRDCKEGTQKLLQELSKLGYRVSAKKAQLCQKEVTYLGYLLKEGKRWLTPARKATVMKIPPPTTPRQVREFLGKAGFCRLFIPGFASLAAPLYPLTKPSIPFIWTEEHQKAFDRIKEALLSAPALALPDLTKPFTLYVDERAGVARGVLTQTLGPWRRPVAYLSKKLDPVASGWPTCLKAVAAVALLLKDADKLTLGQNVTVIASHSLESIVRQPPDRWMTNARMTHYQSLLLNERVSFAPPAVLNPATLLPVESEATPVHRCSEILAEETGTRRDLKDQPLPGVPAWYTDGSSFIAEGKRRAGAAIVDGKRTVWASSLPEGTSAQKAELVALTQALRLAEGKDINIYTDSRYAFATAHIHGAIYKQRGWLTSAGKDIKNKEEILALLEAIHLPKRVAIIHCPGHQKGNDPVATGNRRADEAAKQAALSTRVLAETTKPAGKRTADGSEFEKRTADGSEFESPKKKAKVE

SEQ ID NO: 922 - protein, 2092 aa, synthetic construct
MPAAKRVKLDGGDKKYSIGLDIGTNSVGWAVITDEYKVPSKKFKVLGNTDRHSIKKNLIGALLFDSGETAEATRLKRTARRRYTRRKNRICYLQEIFSNEMAKVDDSFFHRLEESFLVEEDKKHERHPIFGNIVDEVAYHEKYPTIYHLRKKLVDSTDKADLRLIYLALAHMIKFRGHFLIEGDLNPDNSDVDKLFIQLVQTYNQLFEENPINASGVDAKAILSARLSKSRRLENLIAQLPGEKKNGLFGNLIALSLGLTPNFKSNFDLAEDAKLQLSKDTYDDDLDNLLAQIGDQYADLFLAAKNLSDAILLSDILRVNTEITKAPLSASMIKRYDEHHQDLTLLKALVRQQLPEKYKEIFFDQSKNGYAGYIDGGASQEEFYKFIKPILEKMDGTEELLVKLNREDLLRKQRTFDNGSIPHQIHLGELHAILRRQEDFYPFLKDNREKIEKILTFRIPYYVGPLARGNSRFAWMTRKSEETITPWNFEEVVDKGASAQSFIERMTNFDKNLPNEKVLPKHSLLYEYFTVYNELTKVKYVTEGMRKPAFLSGEQKKAIVDLLFKTNRKVTVKQLKEDYFKKIECFDSVEISGVEDRFNASLGTYHDLLKIIKDKDFLDNEENEDILEDIVLTLTLFEDREMIEERLKTYAHLFDDKVMKQLKRRRYTGWGRLSRKLINGIRDKQSGKTILDFLKSDGFANRNFMQLIHDDSLTFKEDIQKAQVSGQGDSLHEHIANLAGSPAIKKGILQTVKVVDELVKVMGRHKPENIVIEMARENQTTQKGQKNSRERMKRIEEGIKELGSQILKEHPVENTQLQNEKLYLYYLQNGRDMYVDQELDINRLSDYDVDHIVPQSFLKDDSIDNKVLTRSDKARGKSDNVPSEEVVKKMKNYWRQLLNAKLITQRKFDNLTKAERGGLSELDKAGFIKRQLVETRQITKHVAQILDSRMNTKYDENDKLIREVKVITLKSKLVSDFRKDFQFYKVREINNYHHAHDAYLNAVVGTALIKKYPKLESEFVYGDYKVYDVRKMIAKSEQEIGKATAKYFFYSNIMNFFKTEITLANGEIRKRPLIETNGETGEIVWDKGRDFATVRKVLSMPQVNIVKKTEVQTGGFSKESILPKRNSDKLIARKKDWDPKKYGGFDSPTVAYSVLVVAKVEKGKSKKLKSVKELLGITIMERSSFEKNPIDFLEAKGYKEVKKDLIIKLPKYSLFELENGRKRMLASAGELQKGNELALPSKYVNFLYLASHYEKLKGSPEDNEQKQLFVEQHKHYLDEIIEQISEFSKRVILADANLDKVLSAYNKHRDKPIREQAENIIHLFTLTNLGAPAAFKYFDTTIDRKRYTSTKEVLDATLIHQSITGLYETRIDLSQLGGDGGGSSPAPGGGGGVLNLEEEYRLHEKPVPSSIDPSWLQLFPTVWAERAGMGLANQVPPVVVELRSGASPVAVRQYPMSKEAREGIRPHIQRFLDLGVLVPCQSPWNTPLLPVKKPGTNDYRPVQDLREINKRVQDIHPTVPNPYNLLSSLPPSHTWYSVLDLKDAFFCLKLHPNSQPLFAFEWRDPEKGNTGQLTWTRLPQGFKNSPTLFNEALHRDLAPFRALNPQVVLLQYVDDLLVAAPTYRDCKEGTQKLLQELSKLGYRVSAKKAQLCQKEVTYLGYLLKEGKRWLTPARKATVMKIPPPTTPRQVREFLGKAGFCRLFIPGFASLAAPLYPLTKPSIPFIWTEEHQKAFDRIKEALLSAPALALPDLTKPFTLYVDERAGVARGVLTQTLGPWRRPVAYLSKKLDPVASGWPTCLKAVAAVALLLKDADKLTLGQNVTVIASHSLESIVRQPPDRWMTNARMTHYQSLLLNERVSFAPPAVLNPATLLPVESEATPVHRCSEILAEETGTRRDLKDQPLPGVPAWYTDGSSFIAEGKRRAGAAIVDGKRTVWASSLPEGTSAQKAELVALTQALRLAEGKDINIYTDSRYAFATAHIHGAIYKQRGWLTSAGKDIKNKEEILALLEAIHLPKRVAIIHCPGHQKGNDPVATGNRRADEAAKQAALSTRVLAETTKPAGKRTADGSEFEKRTADGSEFESPKKKAKVE

SEQ ID NO: 923 - protein, 2101 aa, synthetic construct
MPAAKRVKLDGGDKKYSIGLDIGTNSVGWAVITDEYKVPSKKFKVLGNTDRHSIKKNLIGALLFDSGETAEATRLKRTARRRYTRRKNRICYLQEIFSNEMAKVDDSFFHRLEESFLVEEDKKHERHPIFGNIVDEVAYHEKYPTIYHLRKKLVDSTDKADLRLIYLALAHMIKFRGHFLIEGDLNPDNSDVDKLFIQLVQTYNQLFEENPINASGVDAKAILSARLSKSRRLENLIAQLPGEKKNGLFGNLIALSLGLTPNFKSNFDLAEDAKLQLSKDTYDDDLDNLLAQIGDQYADLFLAAKNLSDAILLSDILRVNTEITKAPLSASMIKRYDEHHQDLTLLKALVRQQLPEKYKEIFFDQSKNGYAGYIDGGASQEEFYKFIKPILEKMDGTEELLVKLNREDLLRKQRTFDNGSIPHQIHLGELHAILRRQEDFYPFLKDNREKIEKILTFRIPYYVGPLARGNSRFAWMTRKSEETITPWNFEEVVDKGASAQSFIERMTNFDKNLPNEKVLPKHSLLYEYFTVYNELTKVKYVTEGMRKPAFLSGEQKKAIVDLLFKTNRKVTVKQLKEDYFKKIECFDSVEISGVEDRFNASLGTYHDLLKIIKDKDFLDNEENEDILEDIVLTLTLFEDREMIEERLKTYAHLFDDKVMKQLKRRRYTGWGRLSRKLINGIRDKQSGKTILDFLKSDGFANRNFMQLIHDDSLTFKEDIQKAQVSGQGDSLHEHIANLAGSPAIKKGILQTVKVVDELVKVMGRHKPENIVIEMARENQTTQKGQKNSRERMKRIEEGIKELGSQILKEHPVENTQLQNEKLYLYYLQNGRDMYVDQELDINRLSDYDVDHIVPQSFLKDDSIDNKVLTRSDKARGKSDNVPSEEVVKKMKNYWRQLLNAKLITQRKFDNLTKAERGGLSELDKAGFIKRQLVETRQITKHVAQILDSRMNTKYDENDKLIREVKVITLKSKLVSDFRKDFQFYKVREINNYHHAHDAYLNAVVGTALIKKYPKLESEFVYGDYKVYDVRKMIAKSEQEIGKATAKYFFYSNIMNFFKTEITLANGEIRKRPLIETNGETGEIVWDKGRDFATVRKVLSMPQVNIVKKTEVQTGGFSKESILPKRNSDKLIARKKDWDPKKYGGFDSPTVAYSVLVVAKVEKGKSKKLKSVKELLGITIMERSSFEKNPIDFLEAKGYKEVKKDLIIKLPKYSLFELENGRKRMLASAGELQKGNELALPSKYVNFLYLASHYEKLKGSPEDNEQKQLFVEQHKHYLDEIIEQISEFSKRVILADANLDKVLSAYNKHRDKPIREQAENIIHLFTLTNLGAPAAFKYFDTTIDRKRYTSTKEVLDATLIHQSITGLYETRIDLSQLGGDGGGSSGSSGSSGSSGSSGSSGGVLNLEEEYRLHEKPVPSSIDPSWLQLFPTVWAERAGMGLANQVPPVVVELRSGASPVAVRQYPMSKEAREGIRPHIQRFLDLGVLVPCQSPWNTPLLPVKKPGTNDYRPVQDLREINKRVQDIHPTVPNPYNLLSSLPPSHTWYSVLDLKDAFFCLKLHPNSQPLFAFEWRDPEKGNTGQLTWTRLPQGFKNSPTLFNEALHRDLAPFRALNPQVVLLQYVDDLLVAAPTYRDCKEGTQKLLQELSKLGYRVSAKKAQLCQKEVTYLGYLLKEGKRWLTPARKATVMKIPPPTTPRQVREFLGKAGFCRLFIPGFASLAAPLYPLTKPSIPFIWTEEHQKAFDRIKEALLSAPALALPDLTKPFTLYVDERAGVARGVLTQTLGPWRRPVAYLSKKLDPVASGWPTCLKAVAAVALLLKDADKLTLGQNVTVIASHSLESIVRQPPDRWMTNARMTHYQSLLLNERVSFAPPAVLNPATLLPVESEATPVHRCSEILAEETGTRRDLKDQPLPGVPAWYTDGSSFIAEGKRRAGAAIVDGKRTVWASSLPEGTSAQKAELVALTQALRLAEGKDINIYTDSRYAFATAHIHGAIYKQRGWLTSAGKDIKNKEEILALLEAIHLPKRVAIIHCPGHQKGNDPVATGNRRADEAAKQAALSTRVLAETTKPAGKRTADGSEFEKRTADGSEFESPKKKAKVE

SEQ ID NO: 924 - protein, 2092 aa, synthetic construct
MPAAKRVKLDGGDKKYSIGLDIGTNSVGWAVITDEYKVPSKKFKVLGNTDRHSIKKNLIGALLFDSGETAEATRLKRTARRRYTRRKNRICYLQEIFSNEMAKVDDSFFHRLEESFLVEEDKKHERHPIFGNIVDEVAYHEKYPTIYHLRKKLVDSTDKADLRLIYLALAHMIKFRGHFLIEGDLNPDNSDVDKLFIQLVQTYNQLFEENPINASGVDAKAILSARLSKSRRLENLIAQLPGEKKNGLFGNLIALSLGLTPNFKSNFDLAEDAKLQLSKDTYDDDLDNLLAQIGDQYADLFLAAKNLSDAILLSDILRVNTEITKAPLSASMIKRYDEHHQDLTLLKALVRQQLPEKYKEIFFDQSKNGYAGYIDGGASQEEFYKFIKPILEKMDGTEELLVKLNREDLLRKQRTFDNGSIPHQIHLGELHAILRRQEDFYPFLKDNREKIEKILTFRIPYYVGPLARGNSRFAWMTRKSEETITPWNFEEVVDKGASAQSFIERMTNFDKNLPNEKVLPKHSLLYEYFTVYNELTKVKYVTEGMRKPAFLSGEQKKAIVDLLFKTNRKVTVKQLKEDYFKKIECFDSVEISGVEDRFNASLGTYHDLLKIIKDKDFLDNEENEDILEDIVLTLTLFEDREMIEERLKTYAHLFDDKVMKQLKRRRYTGWGRLSRKLINGIRDKQSGKTILDFLKSDGFANRNFMQLIHDDSLTFKEDIQKAQVSGQGDSLHEHIANLAGSPAIKKGILQTVKVVDELVKVMGRHKPENIVIEMARENQTTQKGQKNSRERMKRIEEGIKELGSQILKEHPVENTQLQNEKLYLYYLQNGRDMYVDQELDINRLSDYDVDHIVPQSFLKDDSIDNKVLTRSDKARGKSDNVPSEEVVKKMKNYWRQLLNAKLITQRKFDNLTKAERGGLSELDKAGFIKRQLVETRQITKHVAQILDSRMNTKYDENDKLIREVKVITLKSKLVSDFRKDFQFYKVREINNYHHAHDAYLNAVVGTALIKKYPKLESEFVYGDYKVYDVRKMIAKSEQEIGKATAKYFFYSNIMNFFKTEITLANGEIRKRPLIETNGETGEIVWDKGRDFATVRKVLSMPQVNIVKKTEVQTGGFSKESILPKRNSDKLIARKKDWDPKKYGGFDSPTVAYSVLVVAKVEKGKSKKLKSVKELLGITIMERSSFEKNPIDFLEAKGYKEVKKDLIIKLPKYSLFELENGRKRMLASAGELQKGNELALPSKYVNFLYLASHYEKLKGSPEDNEQKQLFVEQHKHYLDEIIEQISEFSKRVILADANLDKVLSAYNKHRDKPIREQAENIIHLFTLTNLGAPAAFKYFDTTIDRKRYTSTKEVLDATLIHQSITGLYETRIDLSQLGGDGGGGSGSSPAPGGVLNLEEEYRLHEKPVPSSIDPSWLQLFPTVWAERAGMGLANQVPPVVVELRSGASPVAVRQYPMSKEAREGIRPHIQRFLDLGVLVPCQSPWNTPLLPVKKPGTNDYRPVQDLREINKRVQDIHPTVPNPYNLLSSLPPSHTWYSVLDLKDAFFCLKLHPNSQPLFAFEWRDPEKGNTGQLTWTRLPQGFKNSPTLFNEALHRDLAPFRALNPQVVLLQYVDDLLVAAPTYRDCKEGTQKLLQELSKLGYRVSAKKAQLCQKEVTYLGYLLKEGKRWLTPARKATVMKIPPPTTPRQVREFLGKAGFCRLFIPGFASLAAPLYPLTKPSIPFIWTEEHQKAFDRIKEALLSAPALALPDLTKPFTLYVDERAGVARGVLTQTLGPWRRPVAYLSKKLDPVASGWPTCLKAVAAVALLLKDADKLTLGQNVTVIASHSLESIVRQPPDRWMTNARMTHYQSLLLNERVSFAPPAVLNPATLLPVESEATPVHRCSEILAEETGTRRDLKDQPLPGVPAWYTDGSSFIAEGKRRAGAAIVDGKRTVWASSLPEGTSAQKAELVALTQALRLAEGKDINIYTDSRYAFATAHIHGAIYKQRGWLTSAGKDIKNKEEILALLEAIHLPKRVAIIHCPGHQKGNDPVATGNRRADEAAKQAALSTRVLAETTKPAGKRTADGSEFEKRTADGSEFESPKKKAKVE

SEQ ID NO: 925 - protein, 2094 aa, synthetic construct
MPAAKRVKLDGGDKKYSIGLDIGTNSVGWAVITDEYKVPSKKFKVLGNTDRHSIKKNLIGALLFDSGETAEATRLKRTARRRYTRRKNRICYLQEIFSNEMAKVDDSFFHRLEESFLVEEDKKHERHPIFGNIVDEVAYHEKYPTIYHLRKKLVDSTDKADLRLIYLALAHMIKFRGHFLIEGDLNPDNSDVDKLFIQLVQTYNQLFEENPINASGVDAKAILSARLSKSRRLENLIAQLPGEKKNGLFGNLIALSLGLTPNFKSNFDLAEDAKLQLSKDTYDDDLDNLLAQIGDQYADLFLAAKNLSDAILLSDILRVNTEITKAPLSASMIKRYDEHHQDLTLLKALVRQQLPEKYKEIFFDQSKNGYAGYIDGGASQEEFYKFIKPILEKMDGTEELLVKLNREDLLRKQRTFDNGSIPHQIHLGELHAILRRQEDFYPFLKDNREKIEKILTFRIPYYVGPLARGNSRFAWMTRKSEETITPWNFEEVVDKGASAQSFIERMTNFDKNLPNEKVLPKHSLLYEYFTVYNELTKVKYVTEGMRKPAFLSGEQKKAIVDLLFKTNRKVTVKQLKEDYFKKIECFDSVEISGVEDRFNASLGTYHDLLKIIKDKDFLDNEENEDILEDIVLTLTLFEDREMIEERLKTYAHLFDDKVMKQLKRRRYTGWGRLSRKLINGIRDKQSGKTILDFLKSDGFANRNFMQLIHDDSLTFKEDIQKAQVSGQGDSLHEHIANLAGSPAIKKGILQTVKVVDELVKVMGRHKPENIVIEMARENQTTQKGQKNSRERMKRIEEGIKELGSQILKEHPVENTQLQNEKLYLYYLQNGRDMYVDQELDINRLSDYDVDHIVPQSFLKDDSIDNKVLTRSDKARGKSDNVPSEEVVKKMKNYWRQLLNAKLITQRKFDNLTKAERGGLSELDKAGFIKRQLVETRQITKHVAQILDSRMNTKYDENDKLIREVKVITLKSKLVSDFRKDFQFYKVREINNYHHAHDAYLNAVVGTALIKKYPKLESEFVYGDYKVYDVRKMIAKSEQEIGKATAKYFFYSNIMNFFKTEITLANGEIRKRPLIETNGETGEIVWDKGRDFATVRKVLSMPQVNIVKKTEVQTGGFSKESILPKRNSDKLIARKKDWDPKKYGGFDSPTVAYSVLVVAKVEKGKSKKLKSVKELLGITIMERSSFEKNPIDFLEAKGYKEVKKDLIIKLPKYSLFELENGRKRMLASAGELQKGNELALPSKYVNFLYLASHYEKLKGSPEDNEQKQLFVEQHKHYLDEIIEQISEFSKRVILADANLDKVLSAYNKHRDKPIREQAENIIHLFTLTNLGAPAAFKYFDTTIDRKRYTSTKEVLDATLIHQSITGLYETRIDLSQLGGDGGGGGEAAAKGSSGGVLNLEEEYRLHEKPVPSSIDPSWLQLFPTVWAERAGMGLANQVPPVVVELRSGASPVAVRQYPMSKEAREGIRPHIQRFLDLGVLVPCQSPWNTPLLPVKKPGTNDYRPVQDLREINKRVQDIHPTVPNPYNLLSSLPPSHTWYSVLDLKDAFFCLKLHPNSQPLFAFEWRDPEKGNTGQLTWTRLPQGFKNSPTLFNEALHRDLAPFRALNPQVVLLQYVDDLLVAAPTYRDCKEGTQKLLQELSKLGYRVSAKKAQLCQKEVTYLGYLLKEGKRWLTPARKATVMKIPPPTTPRQVREFLGKAGFCRLFIPGFASLAAPLYPLTKPSIPFIWTEEHQKAFDRIKEALLSAPALALPDLTKPFTLYVDERAGVARGVLTQTLGPWRRPVAYLSKKLDPVASGWPTCLKAVAAVALLLKDADKLTLGQNVTVIASHSLESIVRQPPDRWMTNARMTHYQSLLLNERVSFAPPAVLNPATLLPVESEATPVHRCSEILAEETGTRRDLKDQPLPGVPAWYTDGSSFIAEGKRRAGAAIVDGKRTVWASSLPEGTSAQKAELVALTQALRLAEGKDINIYTDSRYAFATAHIHGAIYKQRGWLTSAGKDIKNKEEILALLEAIHLPKRVAIIHCPGHQKGNDPVATGNRRADEAAKQAALSTRVLAETTKPAGKRTADGSEFEKRTADGSEFESPKKKAKVE

SEQ ID NO: 926 - protein, 2087 aa, synthetic construct
MPAAKRVKLDGGDKKYSIGLDIGTNSVGWAVITDEYKVPSKKFKVLGNTDRHSIKKNLIGALLFDSGETAEATRLKRTARRRYTRRKNRICYLQEIFSNEMAKVDDSFFHRLEESFLVEEDKKHERHPIFGNIVDEVAYHEKYPTIYHLRKKLVDSTDKADLRLIYLALAHMIKFRGHFLIEGDLNPDNSDVDKLFIQLVQTYNQLFEENPINASGVDAKAILSARLSKSRRLENLIAQLPGEKKNGLFGNLIALSLGLTPNFKSNFDLAEDAKLQLSKDTYDDDLDNLLAQIGDQYADLFLAAKNLSDAILLSDILRVNTEITKAPLSASMIKRYDEHHQDLTLLKALVRQQLPEKYKEIFFDQSKNGYAGYIDGGASQEEFYKFIKPILEKMDGTEELLVKLNREDLLRKQRTFDNGSIPHQIHLGELHAILRRQEDFYPFLKDNREKIEKILTFRIPYYVGPLARGNSRFAWMTRKSEETITPWNFEEVVDKGASAQSFIERMTNFDKNLPNEKVLPKHSLLYEYFTVYNELTKVKYVTEGMRKPAFLSGEQKKAIVDLLFKTNRKVTVKQLKEDYFKKIECFDSVEISGVEDRFNASLGTYHDLLKIIKDKDFLDNEENEDILEDIVLTLTLFEDREMIEERLKTYAHLFDDKVMKQLKRRRYTGWGRLSRKLINGIRDKQSGKTILDFLKSDGFANRNFMQLIHDDSLTFKEDIQKAQVSGQGDSLHEHIANLAGSPAIKKGILQTVKVVDELVKVMGRHKPENIVIEMARENQTTQKGQKNSRERMKRIEEGIKELGSQILKEHPVENTQLQNEKLYLYYLQNGRDMYVDQELDINRLSDYDVDHIVPQSFLKDDSIDNKVLTRSDKARGKSDNVPSEEVVKKMKNYWRQLLNAKLITQRKFDNLTKAERGGLSELDKAGFIKRQLVETRQITKHVAQILDSRMNTKYDENDKLIREVKVITLKSKLVSDFRKDFQFYKVREINNYHHAHDAYLNAVVGTALIKKYPKLESEFVYGDYKVYDVRKMIAKSEQEIGKATAKYFFYSNIMNFFKTEITLANGEIRKRPLIETNGETGEIVWDKGRDFATVRKVLSMPQVNIVKKTEVQTGGFSKESILPKRNSDKLIARKKDWDPKKYGGFDSPTVAYSVLVVAKVEKGKSKKLKSVKELLGITIMERSSFEKNPIDFLEAKGYKEVKKDLIIKLPKYSLFELENGRKRMLASAGELQKGNELALPSKYVNFLYLASHYEKLKGSPEDNEQKQLFVEQHKHYLDEIIEQISEFSKRVILADANLDKVLSAYNKHRDKPIREQAENIIHLFTLTNLGAPAAFKYFDTTIDRKRYTSTKEVLDATLIHQSITGLYETRIDLSQLGGDGGGGGGGGVLNLEEEYRLHEKPVPSSIDPSWLQLFPTVWAERAGMGLANQVPPVVVELRSGASPVAVRQYPMSKEAREGIRPHIQRFLDLGVLVPCQSPWNTPLLPVKKPGTNDYRPVQDLREINKRVQDIHPTVPNPYNLLSSLPPSHTWYSVLDLKDAFFCLKLHPNSQPLFAFEWRDPEKGNTGQLTWTRLPQGFKNSPTLFNEALHRDLAPFRALNPQVVLLQYVDDLLVAAPTYRDCKEGTQKLLQELSKLGYRVSAKKAQLCQKEVTYLGYLLKEGKRWLTPARKATVMKIPPPTTPRQVREFLGKAGFCRLFIPGFASLAAPLYPLTKPSIPFIWTEEHQKAFDRIKEALLSAPALALPDLTKPFTLYVDERAGVARGVLTQTLGPWRRPVAYLSKKLDPVASGWPTCLKAVAAVALLLKDADKLTLGQNVTVIASHSLESIVRQPPDRWMTNARMTHYQSLLLNERVSFAPPAVLNPATLLPVESEATPVHRCSEILAEETGTRRDLKDQPLPGVPAWYTDGSSFIAEGKRRAGAAIVDGKRTVWASSLPEGTSAQKAELVALTQALRLAEGKDINIYTDSRYAFATAHIHGAIYKQRGWLTSAGKDIKNKEEILALLEAIHLPKRVAIIHCPGHQKGNDPVATGNRRADEAAKQAALSTRVLAETTKPAGKRTADGSEFEKRTADGSEFESPKKKAKVE

SEQ ID NO: 927 - protein, 2092 aa, synthetic construct
MPAAKRVKLDGGDKKYSIGLDIGTNSVGWAVITDEYKVPSKKFKVLGNTDRHSIKKNLIGALLFDSGETAEATRLKRTARRRYTRRKNRICYLQEIFSNEMAKVDDSFFHRLEESFLVEEDKKHERHPIFGNIVDEVAYHEKYPTIYHLRKKLVDSTDKADLRLIYLALAHMIKFRGHFLIEGDLNPDNSDVDKLFIQLVQTYNQLFEENPINASGVDAKAILSARLSKSRRLENLIAQLPGEKKNGLFGNLIALSLGLTPNFKSNFDLAEDAKLQLSKDTYDDDLDNLLAQIGDQYADLFLAAKNLSDAILLSDILRVNTEITKAPLSASMIKRYDEHHQDLTLLKALVRQQLPEKYKEIFFDQSKNGYAGYIDGGASQEEFYKFIKPILEKMDGTEELLVKLNREDLLRKQRTFDNGSIPHQIHLGELHAILRRQEDFYPFLKDNREKIEKILTFRIPYYVGPLARGNSRFAWMTRKSEETITPWNFEEVVDKGASAQSFIERMTNFDKNLPNEKVLPKHSLLYEYFTVYNELTKVKYVTEGMRKPAFLSGEQKKAIVDLLFKTNRKVTVKQLKEDYFKKIECFDSVEISGVEDRFNASLGTYHDLLKIIKDKDFLDNEENEDILEDIVLTLTLFEDREMIEERLKTYAHLFDDKVMKQLKRRRYTGWGRLSRKLINGIRDKQSGKTILDFLKSDGFANRNFMQLIHDDSLTFKEDIQKAQVSGQGDSLHEHIANLAGSPAIKKGILQTVKVVDELVKVMGRHKPENIVIEMARENQTTQKGQKNSRERMKRIEEGIKELGSQILKEHPVENTQLQNEKLYLYYLQNGRDMYVDQELDINRLSDYDVDHIVPQSFLKDDSIDNKVLTRSDKARGKSDNVPSEEVVKKMKNYWRQLLNAKLITQRKFDNLTKAERGGLSELDKAGFIKRQLVETRQITKHVAQILDSRMNTKYDENDKLIREVKVITLKSKLVSDFRKDFQFYKVREINNYHHAHDAYLNAVVGTALIKKYPKLESEFVYGDYKVYDVRKMIAKSEQEIGKATAKYFFYSNIMNFFKTEITLANGEIRKRPLIETNGETGEIVWDKGRDFATVRKVLSMPQVNIVKKTEVQTGGFSKESILPKRNSDKLIARKKDWDPKKYGGFDSPTVAYSVLVVAKVEKGKSKKLKSVKELLGITIMERSSFEKNPIDFLEAKGYKEVKKDLIIKLPKYSLFELENGRKRMLASAGELQKGNELALPSKYVNFLYLASHYEKLKGSPEDNEQKQLFVEQHKHYLDEIIEQISEFSKRVILADANLDKVLSAYNKHRDKPIREQAENIIHLFTLTNLGAPAAFKYFDTTIDRKRYTSTKEVLDATLIHQSITGLYETRIDLSQLGGDGGPAPGSSGGGGGVLNLEEEYRLHEKPVPSSIDPSWLQLFPTVWAERAGMGLANQVPPVVVELRSGASPVAVRQYPMSKEAREGIRPHIQRFLDLGVLVPCQSPWNTPLLPVKKPGTNDYRPVQDLREINKRVQDIHPTVPNPYNLLSSLPPSHTWYSVLDLKDAFFCLKLHPNSQPLFAFEWRDPEKGNTGQLTWTRLPQGFKNSPTLFNEALHRDLAPFRALNPQVVLLQYVDDLLVAAPTYRDCKEGTQKLLQELSKLGYRVSAKKAQLCQKEVTYLGYLLKEGKRWLTPARKATVMKIPPPTTPRQVREFLGKAGFCRLFIPGFASLAAPLYPLTKPSIPFIWTEEHQKAFDRIKEALLSAPALALPDLTKPFTLYVDERAGVARGVLTQTLGPWRRPVAYLSKKLDPVASGWPTCLKAVAAVALLLKDADKLTLGQNVTVIASHSLESIVRQPPDRWMTNARMTHYQSLLLNERVSFAPPAVLNPATLLPVESEATPVHRCSEILAEETGTRRDLKDQPLPGVPAWYTDGSSFIAEGKRRAGAAIVDGKRTVWASSLPEGTSAQKAELVALTQALRLAEGKDINIYTDSRYAFATAHIHGAIYKQRGWLTSAGKDIKNKEEILALLEAIHLPKRVAIIHCPGHQKGNDPVATGNRRADEAAKQAALSTRVLAETTKPAGKRTADGSEFEKRTADGSEFESPKKKAKVE

SEQ ID NO: 928 - protein, 2094 aa, synthetic construct
MPAAKRVKLDGGDKKYSIGLDIGTNSVGWAVITDEYKVPSKKFKVLGNTDRHSIKKNLIGALLFDSGETAEATRLKRTARRRYTRRKNRICYLQEIFSNEMAKVDDSFFHRLEESFLVEEDKKHERHPIFGNIVDEVAYHEKYPTIYHLRKKLVDSTDKADLRLIYLALAHMIKFRGHFLIEGDLNPDNSDVDKLFIQLVQTYNQLFEENPINASGVDAKAILSARLSKSRRLENLIAQLPGEKKNGLFGNLIALSLGLTPNFKSNFDLAEDAKLQLSKDTYDDDLDNLLAQIGDQYADLFLAAKNLSDAILLSDILRVNTEITKAPLSASMIKRYDEHHQDLTLLKALVRQQLPEKYKEIFFDQSKNGYAGYIDGGASQEEFYKFIKPILEKMDGTEELLVKLNREDLLRKQRTFDNGSIPHQIHLGELHAILRRQEDFYPFLKDNREKIEKILTFRIPYYVGPLARGNSRFAWMTRKSEETITPWNFEEVVDKGASAQSFIERMTNFDKNLPNEKVLPKHSLLYEYFTVYNELTKVKYVTEGMRKPAFLSGEQKKAIVDLLFKTNRKVTVKQLKEDYFKKIECFDSVEISGVEDRFNASLGTYHDLLKIIKDKDFLDNEENEDILEDIVLTLTLFEDREMIEERLKTYAHLFDDKVMKQLKRRRYTGWGRLSRKLINGIRDKQSGKTILDFLKSDGFANRNFMQLIHDDSLTFKEDIQKAQVSGQGDSLHEHIANLAGSPAIKKGILQTVKVVDELVKVMGRHKPENIVIEMARENQTTQKGQKNSRERMKRIEEGIKELGSQILKEHPVENTQLQNEKLYLYYLQNGRDMYVDQELDINRLSDYDVDHIVPQSFLKDDSIDNKVLTRSDKARGKSDNVPSEEVVKKMKNYWRQLLNAKLITQRKFDNLTKAERGGLSELDKAGFIKRQLVETRQITKHVAQILDSRMNTKYDENDKLIREVKVITLKSKLVSDFRKDFQFYKVREINNYHHAHDAYLNAVVGTALIKKYPKLESEFVYGDYKVYDVRKMIAKSEQEIGKATAKYFFYSNIMNFFKTEITLANGEIRKRPLIETNGETGEIVWDKGRDFATVRKVLSMPQVNIVKKTEVQTGGFSKESILPKRNSDKLIARKKDWDPKKYGGFDSPTVAYSVLVVAKVEKGKSKKLKSVKELLGITIMERSSFEKNPIDFLEAKGYKEVKKDLIIKLPKYSLFELENGRKRMLASAGELQKGNELALPSKYVNFLYLASHYEKLKGSPEDNEQKQLFVEQHKHYLDEIIEQISEFSKRVILADANLDKVLSAYNKHRDKPIREQAENIIHLFTLTNLGAPAAFKYFDTTIDRKRYTSTKEVLDATLIHQSITGLYETRIDLSQLGGDGGGGGEAAAKPAPGGVLNLEEEYRLHEKPVPSSIDPSWLQLFPTVWAERAGMGLANQVPPVVVELRSGASPVAVRQYPMSKEAREGIRPHIQRFLDLGVLVPCQSPWNTPLLPVKKPGTNDYRPVQDLREINKRVQDIHPTVPNPYNLLSSLPPSHTWYSVLDLKDAFFCLKLHPNSQPLFAFEWRDPEKGNTGQLTWTRLPQGFKNSPTLFNEALHRDLAPFRALNPQVVLLQYVDDLLVAAPTYRDCKEGTQKLLQELSKLGYRVSAKKAQLCQKEVTYLGYLLKEGKRWLTPARKATVMKIPPPTTPRQVREFLGKAGFCRLFIPGFASLAAPLYPLTKPSIPFIWTEEHQKAFDRIKEALLSAPALALPDLTKPFTLYVDERAGVARGVLTQTLGPWRRPVAYLSKKLDPVASGWPTCLKAVAAVALLLKDADKLTLGQNVTVIASHSLESIVRQPPDRWMTNARMTHYQSLLLNERVSFAPPAVLNPATLLPVESEATPVHRCSEILAEETGTRRDLKDQPLPGVPAWYTDGSSFIAEGKRRAGAAIVDGKRTVWASSLPEGTSAQKAELVALTQALRLAEGKDINIYTDSRYAFATAHIHGAIYKQRGWLTSAGKDIKNKEEILALLEAIHLPKRVAIIHCPGHQKGNDPVATGNRRADEAAKQAALSTRVLAETTKPAGKRTADGSEFEKRTADGSEFESPKKKAKVE

SEQ ID NO: 929 - protein, 2092 aa, synthetic construct
MPAAKRVKLDGGDKKYSIGLDIGTNSVGWAVITDEYKVPSKKFKVLGNTDRHSIKKNLIGALLFDSGETAEATRLKRTARRRYTRRKNRICYLQEIFSNEMAKVDDSFFHRLEESFLVEEDKKHERHPIFGNIVDEVAYHEKYPTIYHLRKKLVDSTDKADLRLIYLALAHMIKFRGHFLIEGDLNPDNSDVDKLFIQLVQTYNQLFEENPINASGVDAKAILSARLSKSRRLENLIAQLPGEKKNGLFGNLIALSLGLTPNFKSNFDLAEDAKLQLSKDTYDDDLDNLLAQIGDQYADLFLAAKNLSDAILLSDILRVNTEITKAPLSASMIKRYDEHHQDLTLLKALVRQQLPEKYKEIFFDQSKNGYAGYIDGGASQEEFYKFIKPILEKMDGTEELLVKLNREDLLRKQRTFDNGSIPHQIHLGELHAILRRQEDFYPFLKDNREKIEKILTFRIPYYVGPLARGNSRFAWMTRKSEETITPWNFEEVVDKGASAQSFIERMTNFDKNLPNEKVLPKHSLLYEYFTVYNELTKVKYVTEGMRKPAFLSGEQKKAIVDLLFKTNRKVTVKQLKEDYFKKIECFDSVEISGVEDRFNASLGTYHDLLKIIKDKDFLDNEENEDILEDIVLTLTLFEDREMIEERLKTYAHLFDDKVMKQLKRRRYTGWGRLSRKLINGIRDKQSGKTILDFLKSDGFANRNFMQLIHDDSLTFKEDIQKAQVSGQGDSLHEHIANLAGSPAIKKGILQTVKVVDELVKVMGRHKPENIVIEMARENQTTQKGQKNSRERMKRIEEGIKELGSQILKEHPVENTQLQNEKLYLYYLQNGRDMYVDQELDINRLSDYDVDHIVPQSFLKDDSIDNKVLTRSDKARGKSDNVPSEEVVKKMKNYWRQLLNAKLITQRKFDNLTKAERGGLSELDKAGFIKRQLVETRQITKHVAQILDSRMNTKYDENDKLIREVKVITLKSKLVSDFRKDFQFYKVREINNYHHAHDAYLNAVVGTALIKKYPKLESEFVYGDYKVYDVRKMIAKSEQEIGKATAKYFFYSNIMNFFKTEITLANGEIRKRPLIETNGETGEIVWDKGRDFATVRKVLSMPQVNIVKKTEVQTGGFSKESILPKRNSDKLIARKKDWDPKKYGGFDSPTVAYSVLVVAKVEKGKSKKLKSVKELLGITIMERSSFEKNPIDFLEAKGYKEVKKDLIIKLPKYSLFELENGRKRMLASAGELQKGNELALPSKYVNFLYLASHYEKLKGSPEDNEQKQLFVEQHKHYLDEIIEQISEFSKRVILADANLDKVLSAYNKHRDKPIREQAENIIHLFTLTNLGAPAAFKYFDTTIDRKRYTSTKEVLDATLIHQSITGLYETRIDLSQLGGDGGGSSGSSGSSGGVLNLEEEYRLHEKPVPSSIDPSWLQLFPTVWAERAGMGLANQVPPVVVELRSGASPVAVRQYPMSKEAREGIRPHIQRFLDLGVLVPCQSPWNTPLLPVKKPGTNDYRPVQDLREINKRVQDIHPTVPNPYNLLSSLPPSHTWYSVLDLKDAFFCLKLHPNSQPLFAFEWRDPEKGNTGQLTWTRLPQGFKNSPTLFNEALHRDLAPFRALNPQVVLLQYVDDLLVAAPTYRDCKEGTQKLLQELSKLGYRVSAKKAQLCQKEVTYLGYLLKEGKRWLTPARKATVMKIPPPTTPRQVREFLGKAGFCRLFIPGFASLAAPLYPLTKPSIPFIWTEEHQKAFDRIKEALLSAPALALPDLTKPFTLYVDERAGVARGVLTQTLGPWRRPVAYLSKKLDPVASGWPTCLKAVAAVALLLKDADKLTLGQNVTVIASHSLESIVRQPPDRWMTNARMTHYQSLLLNERVSFAPPAVLNPATLLPVESEATPVHRCSEILAEETGTRRDLKDQPLPGVPAWYTDGSSFIAEGKRRAGAAIVDGKRTVWASSLPEGTSAQKAELVALTQALRLAEGKDINIYTDSRYAFATAHIHGAIYKQRGWLTSAGKDIKNKEEILALLEAIHLPKRVAIIHCPGHQKGNDPVATGNRRADEAAKQAALSTRVLAETTKPAGKRTADGSEFEKRTADGSEFESPKKKAKVE

SEQ ID NO: 930 - protein, 2092 aa, synthetic construct
MPAAKRVKLDGGDKKYSIGLDIGTNSVGWAVITDEYKVPSKKFKVLGNTDRHSIKKNLIGALLFDSGETAEATRLKRTARRRYTRRKNRICYLQEIFSNEMAKVDDSFFHRLEESFLVEEDKKHERHPIFGNIVDEVAYHEKYPTIYHLRKKLVDSTDKADLRLIYLALAHMIKFRGHFLIEGDLNPDNSDVDKLFIQLVQTYNQLFEENPINASGVDAKAILSARLSKSRRLENLIAQLPGEKKNGLFGNLIALSLGLTPNFKSNFDLAEDAKLQLSKDTYDDDLDNLLAQIGDQYADLFLAAKNLSDAILLSDILRVNTEITKAPLSASMIKRYDEHHQDLTLLKALVRQQLPEKYKEIFFDQSKNGYAGYIDGGASQEEFYKFIKPILEKMDGTEELLVKLNREDLLRKQRTFDNGSIPHQIHLGELHAILRRQEDFYPFLKDNREKIEKILTFRIPYYVGPLARGNSRFAWMTRKSEETITPWNFEEVVDKGASAQSFIERMTNFDKNLPNEKVLPKHSLLYEYFTVYNELTKVKYVTEGMRKPAFLSGEQKKAIVDLLFKTNRKVTVKQLKEDYFKKIECFDSVEISGVEDRFNASLGTYHDLLKIIKDKDFLDNEENEDILEDIVLTLTLFEDREMIEERLKTYAHLFDDKVMKQLKRRRYTGWGRLSRKLINGIRDKQSGKTILDFLKSDGFANRNFMQLIHDDSLTFKEDIQKAQVSGQGDSLHEHIANLAGSPAIKKGILQTVKVVDELVKVMGRHKPENIVIEMARENQTTQKGQKNSRERMKRIEEGIKELGSQILKEHPVENTQLQNEKLYLYYLQNGRDMYVDQELDINRLSDYDVDHIVPQSFLKDDSIDNKVLTRSDKARGKSDNVPSEEVVKKMKNYWRQLLNAKLITQRKFDNLTKAERGGLSELDKAGFIKRQLVETRQITKHVAQILDSRMNTKYDENDKLIREVKVITLKSKLVSDFRKDFQFYKVREINNYHHAHDAYLNAVVGTALIKKYPKLESEFVYGDYKVYDVRKMIAKSEQEIGKATAKYFFYSNIMNFFKTEITLANGEIRKRPLIETNGETGEIVWDKGRDFATVRKVLSMPQVNIVKKTEVQTGGFSKESILPKRNSDKLIARKKDWDPKKYGGFDSPTVAYSVLVVAKVEKGKSKKLKSVKELLGITIMERSSFEKNPIDFLEAKGYKEVKKDLIIKLPKYSLFELENGRKRMLASAGELQKGNELALPSKYVNFLYLASHYEKLKGSPEDNEQKQLFVEQHKHYLDEIIEQISEFSKRVILADANLDKVLSAYNKHRDKPIREQAENIIHLFTLTNLGAPAAFKYFDTTIDRKRYTSTKEVLDATLIHQSITGLYETRIDLSQLGGDGGGGSPAPGGGGGVLNLEEEYRLHEKPVPSSIDPSWLQLFPTVWAERAGMGLANQVPPVVVELRSGASPVAVRQYPMSKEAREGIRPHIQRFLDLGVLVPCQSPWNTPLLPVKKPGTNDYRPVQDLREINKRVQDIHPTVPNPYNLLSSLPPSHTWYSVLDLKDAFFCLKLHPNSQPLFAFEWRDPEKGNTGQLTWTRLPQGFKNSPTLFNEALHRDLAPFRALNPQVVLLQYVDDLLVAAPTYRDCKEGTQKLLQELSKLGYRVSAKKAQLCQKEVTYLGYLLKEGKRWLTPARKATVMKIPPPTTPRQVREFLGKAGFCRLFIPGFASLAAPLYPLTKPSIPFIWTEEHQKAFDRIKEALLSAPALALPDLTKPFTLYVDERAGVARGVLTQTLGPWRRPVAYLSKKLDPVASGWPTCLKAVAAVALLLKDADKLTLGQNVTVIASHSLESIVRQPPDRWMTNARMTHYQSLLLNERVSFAPPAVLNPATLLPVESEATPVHRCSEILAEETGTRRDLKDQPLPGVPAWYTDGSSFIAEGKRRAGAAIVDGKRTVWASSLPEGTSAQKAELVALTQALRLAEGKDINIYTDSRYAFATAHIHGAIYKQRGWLTSAGKDIKNKEEILALLEAIHLPKRVAIIHCPGHQKGNDPVATGNRRADEAAKQAALSTRVLAETTKPAGKRTADGSEFEKRTADGSEFESPKKKAKVE

SEQ ID NO: 931 - protein, 2091 aa, synthetic construct
MPAAKRVKLDGGDKKYSIGLDIGTNSVGWAVITDEYKVPSKKFKVLGNTDRHSIKKNLIGALLFDSGETAEATRLKRTARRRYTRRKNRICYLQEIFSNEMAKVDDSFFHRLEESFLVEEDKKHERHPIFGNIVDEVAYHEKYPTIYHLRKKLVDSTDKADLRLIYLALAHMIKFRGHFLIEGDLNPDNSDVDKLFIQLVQTYNQLFEENPINASGVDAKAILSARLSKSRRLENLIAQLPGEKKNGLFGNLIALSLGLTPNFKSNFDLAEDAKLQLSKDTYDDDLDNLLAQIGDQYADLFLAAKNLSDAILLSDILRVNTEITKAPLSASMIKRYDEHHQDLTLLKALVRQQLPEKYKEIFFDQSKNGYAGYIDGGASQEEFYKFIKPILEKMDGTEELLVKLNREDLLRKQRTFDNGSIPHQIHLGELHAILRRQEDFYPFLKDNREKIEKILTFRIPYYVGPLARGNSRFAWMTRKSEETITPWNFEEVVDKGASAQSFIERMTNFDKNLPNEKVLPKHSLLYEYFTVYNELTKVKYVTEGMRKPAFLSGEQKKAIVDLLFKTNRKVTVKQLKEDYFKKIECFDSVEISGVEDRFNASLGTYHDLLKIIKDKDFLDNEENEDILEDIVLTLTLFEDREMIEERLKTYAHLFDDKVMKQLKRRRYTGWGRLSRKLINGIRDKQSGKTILDFLKSDGFANRNFMQLIHDDSLTFKEDIQKAQVSGQGDSLHEHIANLAGSPAIKKGILQTVKVVDELVKVMGRHKPENIVIEMARENQTTQKGQKNSRERMKRIEEGIKELGSQILKEHPVENTQLQNEKLYLYYLQNGRDMYVDQELDINRLSDYDVDHIVPQSFLKDDSIDNKVLTRSDKARGKSDNVPSEEVVKKMKNYWRQLLNAKLITQRKFDNLTKAERGGLSELDKAGFIKRQLVETRQITKHVAQILDSRMNTKYDENDKLIREVKVITLKSKLVSDFRKDFQFYKVREINNYHHAHDAYLNAVVGTALIKKYPKLESEFVYGDYKVYDVRKMIAKSEQEIGKATAKYFFYSNIMNFFKTEITLANGEIRKRPLIETNGETGEIVWDKGRDFATVRKVLSMPQVNIVKKTEVQTGGFSKESILPKRNSDKLIARKKDWDPKKYGGFDSPTVAYSVLVVAKVEKGKSKKLKSVKELLGITIMERSSFEKNPIDFLEAKGYKEVKKDLIIKLPKYSLFELENGRKRMLASAGELQKGNELALPSKYVNFLYLASHYEKLKGSPEDNEQKQLFVEQHKHYLDEIIEQISEFSKRVILADANLDKVLSAYNKHRDKPIREQAENIIHLFTLTNLGAPAAFKYFDTTIDRKRYTSTKEVLDATLIHQSITGLYETRIDLSQLGGDGGEAAAKGGGGGVLNLEEEYRLHEKPVPSSIDPSWLQLFPTVWAERAGMGLANQVPPVVVELRSGASPVAVRQYPMSKEAREGIRPHIQRFLDLGVLVPCQSPWNTPLLPVKKPGTNDYRPVQDLREINKRVQDIHPTVPNPYNLLSSLPPSHTWYSVLDLKDAFFCLKLHPNSQPLFAFEWRDPEKGNTGQLTWTRLPQGFKNSPTLFNEALHRDLAPFRALNPQVVLLQYVDDLLVAAPTYRDCKEGTQKLLQELSKLGYRVSAKKAQLCQKEVTYLGYLLKEGKRWLTPARKATVMKIPPPTTPRQVREFLGKAGFCRLFIPGFASLAAPLYPLTKPSIPFIWTEEHQKAFDRIKEALLSAPALALPDLTKPFTLYVDERAGVARGVLTQTLGPWRRPVAYLSKKLDPVASGWPTCLKAVAAVALLLKDADKLTLGQNVTVIASHSLESIVRQPPDRWMTNARMTHYQSLLLNERVSFAPPAVLNPATLLPVESEATPVHRCSEILAEETGTRRDLKDQPLPGVPAWYTDGSSFIAEGKRRAGAAIVDGKRTVWASSLPEGTSAQKAELVALTQALRLAEGKDINIYTDSRYAFATAHIHGAIYKQRGWLTSAGKDIKNKEEILALLEAIHLPKRVAIIHCPGHQKGNDPVATGNRRADEAAKQAALSTRVLAETTKPAGKRTADGSEFEKRTADGSEFESPKKKAKVE

SEQ ID NO: 932 - protein, 2089 aa, synthetic construct
MPAAKRVKLDGGDKKYSIGLDIGTNSVGWAVITDEYKVPSKKFKVLGNTDRHSIKKNLIGALLFDSGETAEATRLKRTARRRYTRRKNRICYLQEIFSNEMAKVDDSFFHRLEESFLVEEDKKHERHPIFGNIVDEVAYHEKYPTIYHLRKKLVDSTDKADLRLIYLALAHMIKFRGHFLIEGDLNPDNSDVDKLFIQLVQTYNQLFEENPINASGVDAKAILSARLSKSRRLENLIAQLPGEKKNGLFGNLIALSLGLTPNFKSNFDLAEDAKLQLSKDTYDDDLDNLLAQIGDQYADLFLAAKNLSDAILLSDILRVNTEITKAPLSASMIKRYDEHHQDLTLLKALVRQQLPEKYKEIFFDQSKNGYAGYIDGGASQEEFYKFIKPILEKMDGTEELLVKLNREDLLRKQRTFDNGSIPHQIHLGELHAILRRQEDFYPFLKDNREKIEKILTFRIPYYVGPLARGNSRFAWMTRKSEETITPWNFEEVVDKGASAQSFIERMTNFDKNLPNEKVLPKHSLLYEYFTVYNELTKVKYVTEGMRKPAFLSGEQKKAIVDLLFKTNRKVTVKQLKEDYFKKIECFDSVEISGVEDRFNASLGTYHDLLKIIKDKDFLDNEENEDILEDIVLTLTLFEDREMIEERLKTYAHLFDDKVMKQLKRRRYTGWGRLSRKLINGIRDKQSGKTILDFLKSDGFANRNFMQLIHDDSLTFKEDIQKAQVSGQGDSLHEHIANLAGSPAIKKGILQTVKVVDELVKVMGRHKPENIVIEMARENQTTQKGQKNSRERMKRIEEGIKELGSQILKEHPVENTQLQNEKLYLYYLQNGRDMYVDQELDINRLSDYDVDHIVPQSFLKDDSIDNKVLTRSDKARGKSDNVPSEEVVKKMKNYWRQLLNAKLITQRKFDNLTKAERGGLSELDKAGFIKRQLVETRQITKHVAQILDSRMNTKYDENDKLIREVKVITLKSKLVSDFRKDFQFYKVREINNYHHAHDAYLNAVVGTALIKKYPKLESEFVYGDYKVYDVRKMIAKSEQEIGKATAKYFFYSNIMNFFKTEITLANGEIRKRPLIETNGETGEIVWDKGRDFATVRKVLSMPQVNIVKKTEVQTGGFSKESILPKRNSDKLIARKKDWDPKKYGGFDSPTVAYSVLVVAKVEKGKSKKLKSVKELLGITIMERSSFEKNPIDFLEAKGYKEVKKDLIIKLPKYSLFELENGRKRMLASAGELQKGNELALPSKYVNFLYLASHYEKLKGSPEDNEQKQLFVEQHKHYLDEIIEQISEFSKRVILADANLDKVLSAYNKHRDKPIREQAENIIHLFTLTNLGAPAAFKYFDTTIDRKRYTSTKEVLDATLIHQSITGLYETRIDLSQLGGDGGGSSGSSGGVLNLEEEYRLHEKPVPSSIDPSWLQLFPTVWAERAGMGLANQVPPVVVELRSGASPVAVRQYPMSKEAREGIRPHIQRFLDLGVLVPCQSPWNTPLLPVKKPGTNDYRPVQDLREINKRVQDIHPTVPNPYNLLSSLPPSHTWYSVLDLKDAFFCLKLHPNSQPLFAFEWRDPEKGNTGQLTWTRLPQGFKNSPTLFNEALHRDLAPFRALNPQVVLLQYVDDLLVAAPTYRDCKEGTQKLLQELSKLGYRVSAKKAQLCQKEVTYLGYLLKEGKRWLTPARKATVMKIPPPTTPRQVREFLGKAGFCRLFIPGFASLAAPLYPLTKPSIPFIWTEEHQKAFDRIKEALLSAPALALPDLTKPFTLYVDERAGVARGVLTQTLGPWRRPVAYLSKKLDPVASGWPTCLKAVAAVALLLKDADKLTLGQNVTVIASHSLESIVRQPPDRWMTNARMTHYQSLLLNERVSFAPPAVLNPATLLPVESEATPVHRCSEILAEETGTRRDLKDQPLPGVPAWYTDGSSFIAEGKRRAGAAIVDGKRTVWASSLPEGTSAQKAELVALTQALRLAEGKDINIYTDSRYAFATAHIHGAIYKQRGWLTSAGKDIKNKEEILALLEAIHLPKRVAIIHCPGHQKGNDPVATGNRRADEAAKQAALSTRVLAETTKPAGKRTADGSEFEKRTADGSEFESPKKKAKVE

SEQ ID NO: 933 - protein, 2098 aa, synthetic construct
MPAAKRVKLDGGDKKYSIGLDIGTNSVGWAVITDEYKVPSKKFKVLGNTDRHSIKKNLIGALLFDSGETAEATRLKRTARRRYTRRKNRICYLQEIFSNEMAKVDDSFFHRLEESFLVEEDKKHERHPIFGNIVDEVAYHEKYPTIYHLRKKLVDSTDKADLRLIYLALAHMIKFRGHFLIEGDLNPDNSDVDKLFIQLVQTYNQLFEENPINASGVDAKAILSARLSKSRRLENLIAQLPGEKKNGLFGNLIALSLGLTPNFKSNFDLAEDAKLQLSKDTYDDDLDNLLAQIGDQYADLFLAAKNLSDAILLSDILRVNTEITKAPLSASMIKRYDEHHQDLTLLKALVRQQLPEKYKEIFFDQSKNGYAGYIDGGASQEEFYKFIKPILEKMDGTEELLVKLNREDLLRKQRTFDNGSIPHQIHLGELHAILRRQEDFYPFLKDNREKIEKILTFRIPYYVGPLARGNSRFAWMTRKSEETITPWNFEEVVDKGASAQSFIERMTNFDKNLPNEKVLPKHSLLYEYFTVYNELTKVKYVTEGMRKPAFLSGEQKKAIVDLLFKTNRKVTVKQLKEDYFKKIECFDSVEISGVEDRFNASLGTYHDLLKIIKDKDFLDNEENEDILEDIVLTLTLFEDREMIEERLKTYAHLFDDKVMKQLKRRRYTGWGRLSRKLINGIRDKQSGKTILDFLKSDGFANRNFMQLIHDDSLTFKEDIQKAQVSGQGDSLHEHIANLAGSPAIKKGILQTVKVVDELVKVMGRHKPENIVIEMARENQTTQKGQKNSRERMKRIEEGIKELGSQILKEHPVENTQLQNEKLYLYYLQNGRDMYVDQELDINRLSDYDVDHIVPQSFLKDDSIDNKVLTRSDKARGKSDNVPSEEVVKKMKNYWRQLLNAKLITQRKFDNLTKAERGGLSELDKAGFIKRQLVETRQITKHVAQILDSRMNTKYDENDKLIREVKVITLKSKLVSDFRKDFQFYKVREINNYHHAHDAYLNAVVGTALIKKYPKLESEFVYGDYKVYDVRKMIAKSEQEIGKATAKYFFYSNIMNFFKTEITLANGEIRKRPLIETNGETGEIVWDKGRDFATVRKVLSMPQVNIVKKTEVQTGGFSKESILPKRNSDKLIARKKDWDPKKYGGFDSPTVAYSVLVVAKVEKGKSKKLKSVKELLGITIMERSSFEKNPIDFLEAKGYKEVKKDLIIKLPKYSLFELENGRKRMLASAGELQKGNELALPSKYVNFLYLASHYEKLKGSPEDNEQKQLFVEQHKHYLDEIIEQISEFSKRVILADANLDKVLSAYNKHRDKPIREQAENIIHLFTLTNLGAPAAFKYFDTTIDRKRYTSTKEVLDATLIHQSITGLYETRIDLSQLGGDGGEAAAKEAAAKEAAAKGGVLNLEEEYRLHEKPVPSSIDPSWLQLFPTVWAERAGMGLANQVPPVVVELRSGASPVAVRQYPMSKEAREGIRPHIQRFLDLGVLVPCQSPWNTPLLPVKKPGTNDYRPVQDLREINKRVQDIHPTVPNPYNLLSSLPPSHTWYSVLDLKDAFFCLKLHPNSQPLFAFEWRDPEKGNTGQLTWTRLPQGFKNSPTLFNEALHRDLAPFRALNPQVVLLQYVDDLLVAAPTYRDCKEGTQKLLQELSKLGYRVSAKKAQLCQKEVTYLGYLLKEGKRWLTPARKATVMKIPPPTTPRQVREFLGKAGFCRLFIPGFASLAAPLYPLTKPSIPFIWTEEHQKAFDRIKEALLSAPALALPDLTKPFTLYVDERAGVARGVLTQTLGPWRRPVAYLSKKLDPVASGWPTCLKAVAAVALLLKDADKLTLGQNVTVIASHSLESIVRQPPDRWMTNARMTHYQSLLLNERVSFAPPAVLNPATLLPVESEATPVHRCSEILAEETGTRRDLKDQPLPGVPAWYTDGSSFIAEGKRRAGAAIVDGKRTVWASSLPEGTSAQKAELVALTQALRLAEGKDINIYTDSRYAFATAHIHGAIYKQRGWLTSAGKDIKNKEEILALLEAIHLPKRVAIIHCPGHQKGNDPVATGNRRADEAAKQAALSTRVLAETTKPAGKRTADGSEFEKRTADGSEFESPKKKAKVE

SEQ ID NO: 934 - protein, 2091 aa, synthetic construct
MPAAKRVKLDGGDKKYSIGLDIGTNSVGWAVITDEYKVPSKKFKVLGNTDRHSIKKNLIGALLFDSGETAEATRLKRTARRRYTRRKNRICYLQEIFSNEMAKVDDSFFHRLEESFLVEEDKKHERHPIFGNIVDEVAYHEKYPTIYHLRKKLVDSTDKADLRLIYLALAHMIKFRGHFLIEGDLNPDNSDVDKLFIQLVQTYNQLFEENPINASGVDAKAILSARLSKSRRLENLIAQLPGEKKNGLFGNLIALSLGLTPNFKSNFDLAEDAKLQLSKDTYDDDLDNLLAQIGDQYADLFLAAKNLSDAILLSDILRVNTEITKAPLSASMIKRYDEHHQDLTLLKALVRQQLPEKYKEIFFDQSKNGYAGYIDGGASQEEFYKFIKPILEKMDGTEELLVKLNREDLLRKQRTFDNGSIPHQIHLGELHAILRRQEDFYPFLKDNREKIEKILTFRIPYYVGPLARGNSRFAWMTRKSEETITPWNFEEVVDKGASAQSFIERMTNFDKNLPNEKVLPKHSLLYEYFTVYNELTKVKYVTEGMRKPAFLSGEQKKAIVDLLFKTNRKVTVKQLKEDYFKKIECFDSVEISGVEDRFNASLGTYHDLLKIIKDKDFLDNEENEDILEDIVLTLTLFEDREMIEERLKTYAHLFDDKVMKQLKRRRYTGWGRLSRKLINGIRDKQSGKTILDFLKSDGFANRNFMQLIHDDSLTFKEDIQKAQVSGQGDSLHEHIANLAGSPAIKKGILQTVKVVDELVKVMGRHKPENIVIEMARENQTTQKGQKNSRERMKRIEEGIKELGSQILKEHPVENTQLQNEKLYLYYLQNGRDMYVDQELDINRLSDYDVDHIVPQSFLKDDSIDNKVLTRSDKARGKSDNVPSEEVVKKMKNYWRQLLNAKLITQRKFDNLTKAERGGLSELDKAGFIKRQLVETRQITKHVAQILDSRMNTKYDENDKLIREVKVITLKSKLVSDFRKDFQFYKVREINNYHHAHDAYLNAVVGTALIKKYPKLESEFVYGDYKVYDVRKMIAKSEQEIGKATAKYFFYSNIMNFFKTEITLANGEIRKRPLIETNGETGEIVWDKGRDFATVRKVLSMPQVNIVKKTEVQTGGFSKESILPKRNSDKLIARKKDWDPKKYGGFDSPTVAYSVLVVAKVEKGKSKKLKSVKELLGITIMERSSFEKNPIDFLEAKGYKEVKKDLIIKLPKYSLFELENGRKRMLASAGELQKGNELALPSKYVNFLYLASHYEKLKGSPEDNEQKQLFVEQHKHYLDEIIEQISEFSKRVILADANLDKVLSAYNKHRDKPIREQAENIIHLFTLTNLGAPAAFKYFDTTIDRKRYTSTKEVLDATLIHQSITGLYETRIDLSQLGGDGGGGGEAAAKGGVLNLEEEYRLHEKPVPSSIDPSWLQLFPTVWAERAGMGLANQVPPVVVELRSGASPVAVRQYPMSKEAREGIRPHIQRFLDLGVLVPCQSPWNTPLLPVKKPGTNDYRPVQDLREINKRVQDIHPTVPNPYNLLSSLPPSHTWYSVLDLKDAFFCLKLHPNSQPLFAFEWRDPEKGNTGQLTWTRLPQGFKNSPTLFNEALHRDLAPFRALNPQVVLLQYVDDLLVAAPTYRDCKEGTQKLLQELSKLGYRVSAKKAQLCQKEVTYLGYLLKEGKRWLTPARKATVMKIPPPTTPRQVREFLGKAGFCRLFIPGFASLAAPLYPLTKPSIPFIWTEEHQKAFDRIKEALLSAPALALPDLTKPFTLYVDERAGVARGVLTQTLGPWRRPVAYLSKKLDPVASGWPTCLKAVAAVALLLKDADKLTLGQNVTVIASHSLESIVRQPPDRWMTNARMTHYQSLLLNERVSFAPPAVLNPATLLPVESEATPVHRCSEILAEETGTRRDLKDQPLPGVPAWYTDGSSFIAEGKRRAGAAIVDGKRTVWASSLPEGTSAQKAELVALTQALRLAEGKDINIYTDSRYAFATAHIHGAIYKQRGWLTSAGKDIKNKEEILALLEAIHLPKRVAIIHCPGHQKGNDPVATGNRRADEAAKQAALSTRVLAETTKPAGKRTADGSEFEKRTADGSEFESPKKKAKVE

SEQ ID NO: 935 - protein, 2103 aa, synthetic construct
MPAAKRVKLDGGDKKYSIGLDIGTNSVGWAVITDEYKVPSKKFKVLGNTDRHSIKKNLIGALLFDSGETAEATRLKRTARRRYTRRKNRICYLQEIFSNEMAKVDDSFFHRLEESFLVEEDKKHERHPIFGNIVDEVAYHEKYPTIYHLRKKLVDSTDKADLRLIYLALAHMIKFRGHFLIEGDLNPDNSDVDKLFIQLVQTYNQLFEENPINASGVDAKAILSARLSKSRRLENLIAQLPGEKKNGLFGNLIALSLGLTPNFKSNFDLAEDAKLQLSKDTYDDDLDNLLAQIGDQYADLFLAAKNLSDAILLSDILRVNTEITKAPLSASMIKRYDEHHQDLTLLKALVRQQLPEKYKEIFFDQSKNGYAGYIDGGASQEEFYKFIKPILEKMDGTEELLVKLNREDLLRKQRTFDNGSIPHQIHLGELHAILRRQEDFYPFLKDNREKIEKILTFRIPYYVGPLARGNSRFAWMTRKSEETITPWNFEEVVDKGASAQSFIERMTNFDKNLPNEKVLPKHSLLYEYFTVYNELTKVKYVTEGMRKPAFLSGEQKKAIVDLLFKTNRKVTVKQLKEDYFKKIECFDSVEISGVEDRFNASLGTYHDLLKIIKDKDFLDNEENEDILEDIVLTLTLFEDREMIEERLKTYAHLFDDKVMKQLKRRRYTGWGRLSRKLINGIRDKQSGKTILDFLKSDGFANRNFMQLIHDDSLTFKEDIQKAQVSGQGDSLHEHIANLAGSPAIKKGILQTVKVVDELVKVMGRHKPENIVIEMARENQTTQKGQKNSRERMKRIEEGIKELGSQILKEHPVENTQLQNEKLYLYYLQNGRDMYVDQELDINRLSDYDVDHIVPQSFLKDDSIDNKVLTRSDKARGKSDNVPSEEVVKKMKNYWRQLLNAKLITQRKFDNLTKAERGGLSELDKAGFIKRQLVETRQITKHVAQILDSRMNTKYDENDKLIREVKVITLKSKLVSDFRKDFQFYKVREINNYHHAHDAYLNAVVGTALIKKYPKLESEFVYGDYKVYDVRKMIAKSEQEIGKATAKYFFYSNIMNFFKTEITLANGEIRKRPLIETNGETGEIVWDKGRDFATVRKVLSMPQVNIVKKTEVQTGGFSKESILPKRNSDKLIARKKDWDPKKYGGFDSPTVAYSVLVVAKVEKGKSKKLKSVKELLGITIMERSSFEKNPIDFLEAKGYKEVKKDLIIKLPKYSLFELENGRKRMLASAGELQKGNELALPSKYVNFLYLASHYEKLKGSPEDNEQKQLFVEQHKHYLDEIIEQISEFSKRVILADANLDKVLSAYNKHRDKPIREQAENIIHLFTLTNLGAPAAFKYFDTTIDRKRYTSTKEVLDATLIHQSITGLYETRIDLSQLGGDGGEAAAKEAAAKEAAAKEAAAKGGVLNLEEEYRLHEKPVPSSIDPSWLQLFPTVWAERAGMGLANQVPPVVVELRSGASPVAVRQYPMSKEAREGIRPHIQRFLDLGVLVPCQSPWNTPLLPVKKPGTNDYRPVQDLREINKRVQDIHPTVPNPYNLLSSLPPSHTWYSVLDLKDAFFCLKLHPNSQPLFAFEWRDPEKGNTGQLTWTRLPQGFKNSPTLFNEALHRDLAPFRALNPQVVLLQYVDDLLVAAPTYRDCKEGTQKLLQELSKLGYRVSAKKAQLCQKEVTYLGYLLKEGKRWLTPARKATVMKIPPPTTPRQVREFLGKAGFCRLFIPGFASLAAPLYPLTKPSIPFIWTEEHQKAFDRIKEALLSAPALALPDLTKPFTLYVDERAGVARGVLTQTLGPWRRPVAYLSKKLDPVASGWPTCLKAVAAVALLLKDADKLTLGQNVTVIASHSLESIVRQPPDRWMTNARMTHYQSLLLNERVSFAPPAVLNPATLLPVESEATPVHRCSEILAEETGTRRDLKDQPLPGVPAWYTDGSSFIAEGKRRAGAAIVDGKRTVWASSLPEGTSAQKAELVALTQALRLAEGKDINIYTDSRYAFATAHIHGAIYKQRGWLTSAGKDIKNKEEILALLEAIHLPKRVAIIHCPGHQKGNDPVATGNRRADEAAKQAALSTRVLAETTKPAGKRTADGSEFEKRTADGSEFESPKKKAKVE

SEQ ID NO: 936 - protein, 2094 aa, synthetic construct
MPAAKRVKLDGGDKKYSIGLDIGTNSVGWAVITDEYKVPSKKFKVLGNTDRHSIKKNLIGALLFDSGETAEATRLKRTARRRYTRRKNRICYLQEIFSNEMAKVDDSFFHRLEESFLVEEDKKHERHPIFGNIVDEVAYHEKYPTIYHLRKKLVDSTDKADLRLIYLALAHMIKFRGHFLIEGDLNPDNSDVDKLFIQLVQTYNQLFEENPINASGVDAKAILSARLSKSRRLENLIAQLPGEKKNGLFGNLIALSLGLTPNFKSNFDLAEDAKLQLSKDTYDDDLDNLLAQIGDQYADLFLAAKNLSDAILLSDILRVNTEITKAPLSASMIKRYDEHHQDLTLLKALVRQQLPEKYKEIFFDQSKNGYAGYIDGGASQEEFYKFIKPILEKMDGTEELLVKLNREDLLRKQRTFDNGSIPHQIHLGELHAILRRQEDFYPFLKDNREKIEKILTFRIPYYVGPLARGNSRFAWMTRKSEETITPWNFEEVVDKGASAQSFIERMTNFDKNLPNEKVLPKHSLLYEYFTVYNELTKVKYVTEGMRKPAFLSGEQKKAIVDLLFKTNRKVTVKQLKEDYFKKIECFDSVEISGVEDRFNASLGTYHDLLKIIKDKDFLDNEENEDILEDIVLTLTLFEDREMIEERLKTYAHLFDDKVMKQLKRRRYTGWGRLSRKLINGIRDKQSGKTILDFLKSDGFANRNFMQLIHDDSLTFKEDIQKAQVSGQGDSLHEHIANLAGSPAIKKGILQTVKVVDELVKVMGRHKPENIVIEMARENQTTQKGQKNSRERMKRIEEGIKELGSQILKEHPVENTQLQNEKLYLYYLQNGRDMYVDQELDINRLSDYDVDHIVPQSFLKDDSIDNKVLTRSDKARGKSDNVPSEEVVKKMKNYWRQLLNAKLITQRKFDNLTKAERGGLSELDKAGFIKRQLVETRQITKHVAQILDSRMNTKYDENDKLIREVKVITLKSKLVSDFRKDFQFYKVREINNYHHAHDAYLNAVVGTALIKKYPKLESEFVYGDYKVYDVRKMIAKSEQEIGKATAKYFFYSNIMNFFKTEITLANGEIRKRPLIETNGETGEIVWDKGRDFATVRKVLSMPQVNIVKKTEVQTGGFSKESILPKRNSDKLIARKKDWDPKKYGGFDSPTVAYSVLVVAKVEKGKSKKLKSVKELLGITIMERSSFEKNPIDFLEAKGYKEVKKDLIIKLPKYSLFELENGRKRMLASAGELQKGNELALPSKYVNFLYLASHYEKLKGSPEDNEQKQLFVEQHKHYLDEIIEQISEFSKRVILADANLDKVLSAYNKHRDKPIREQAENIIHLFTLTNLGAPAAFKYFDTTIDRKRYTSTKEVLDATLIHQSITGLYETRIDLSQLGGDGGGGSGSSEAAAKGGVLNLEEEYRLHEKPVPSSIDPSWLQLFPTVWAERAGMGLANQVPPVVVELRSGASPVAVRQYPMSKEAREGIRPHIQRFLDLGVLVPCQSPWNTPLLPVKKPGTNDYRPVQDLREINKRVQDIHPTVPNPYNLLSSLPPSHTWYSVLDLKDAFFCLKLHPNSQPLFAFEWRDPEKGNTGQLTWTRLPQGFKNSPTLFNEALHRDLAPFRALNPQVVLLQYVDDLLVAAPTYRDCKEGTQKLLQELSKLGYRVSAKKAQLCQKEVTYLGYLLKEGKRWLTPARKATVMKIPPPTTPRQVREFLGKAGFCRLFIPGFASLAAPLYPLTKPSIPFIWTEEHQKAFDRIKEALLSAPALALPDLTKPFTLYVDERAGVARGVLTQTLGPWRRPVAYLSKKLDPVASGWPTCLKAVAAVALLLKDADKLTLGQNVTVIASHSLESIVRQPPDRWMTNARMTHYQSLLLNERVSFAPPAVLNPATLLPVESEATPVHRCSEILAEETGTRRDLKDQPLPGVPAWYTDGSSFIAEGKRRAGAAIVDGKRTVWASSLPEGTSAQKAELVALTQALRLAEGKDINIYTDSRYAFATAHIHGAIYKQRGWLTSAGKDIKNKEEILALLEAIHLPKRVAIIHCPGHQKGNDPVATGNRRADEAAKQAALSTRVLAETTKPAGKRTADGSEFEKRTADGSEFESPKKKAKVE

SEQ ID NO: 937 - protein, 2092 aa, synthetic construct
MPAAKRVKLDGGDKKYSIGLDIGTNSVGWAVITDEYKVPSKKFKVLGNTDRHSIKKNLIGALLFDSGETAEATRLKRTARRRYTRRKNRICYLQEIFSNEMAKVDDSFFHRLEESFLVEEDKKHERHPIFGNIVDEVAYHEKYPTIYHLRKKLVDSTDKADLRLIYLALAHMIKFRGHFLIEGDLNPDNSDVDKLFIQLVQTYNQLFEENPINASGVDAKAILSARLSKSRRLENLIAQLPGEKKNGLFGNLIALSLGLTPNFKSNFDLAEDAKLQLSKDTYDDDLDNLLAQIGDQYADLFLAAKNLSDAILLSDILRVNTEITKAPLSASMIKRYDEHHQDLTLLKALVRQQLPEKYKEIFFDQSKNGYAGYIDGGASQEEFYKFIKPILEKMDGTEELLVKLNREDLLRKQRTFDNGSIPHQIHLGELHAILRRQEDFYPFLKDNREKIEKILTFRIPYYVGPLARGNSRFAWMTRKSEETITPWNFEEVVDKGASAQSFIERMTNFDKNLPNEKVLPKHSLLYEYFTVYNELTKVKYVTEGMRKPAFLSGEQKKAIVDLLFKTNRKVTVKQLKEDYFKKIECFDSVEISGVEDRFNASLGTYHDLLKIIKDKDFLDNEENEDILEDIVLTLTLFEDREMIEERLKTYAHLFDDKVMKQLKRRRYTGWGRLSRKLINGIRDKQSGKTILDFLKSDGFANRNFMQLIHDDSLTFKEDIQKAQVSGQGDSLHEHIANLAGSPAIKKGILQTVKVVDELVKVMGRHKPENIVIEMARENQTTQKGQKNSRERMKRIEEGIKELGSQILKEHPVENTQLQNEKLYLYYLQNGRDMYVDQELDINRLSDYDVDHIVPQSFLKDDSIDNKVLTRSDKARGKSDNVPSEEVVKKMKNYWRQLLNAKLITQRKFDNLTKAERGGLSELDKAGFIKRQLVETRQITKHVAQILDSRMNTKYDENDKLIREVKVITLKSKLVSDFRKDFQFYKVREINNYHHAHDAYLNAVVGTALIKKYPKLESEFVYGDYKVYDVRKMIAKSEQEIGKATAKYFFYSNIMNFFKTEITLANGEIRKRPLIETNGETGEIVWDKGRDFATVRKVLSMPQVNIVKKTEVQTGGFSKESILPKRNSDKLIARKKDWDPKKYGGFDSPTVAYSVLVVAKVEKGKSKKLKSVKELLGITIMERSSFEKNPIDFLEAKGYKEVKKDLIIKLPKYSLFELENGRKRMLASAGELQKGNELALPSKYVNFLYLASHYEKLKGSPEDNEQKQLFVEQHKHYLDEIIEQISEFSKRVILADANLDKVLSAYNKHRDKPIREQAENIIHLFTLTNLGAPAAFKYFDTTIDRKRYTSTKEVLDATLIHQSITGLYETRIDLSQLGGDGGGGGGGSGSSGGVLNLEEEYRLHEKPVPSSIDPSWLQLFPTVWAERAGMGLANQVPPVVVELRSGASPVAVRQYPMSKEAREGIRPHIQRFLDLGVLVPCQSPWNTPLLPVKKPGTNDYRPVQDLREINKRVQDIHPTVPNPYNLLSSLPPSHTWYSVLDLKDAFFCLKLHPNSQPLFAFEWRDPEKGNTGQLTWTRLPQGFKNSPTLFNEALHRDLAPFRALNPQVVLLQYVDDLLVAAPTYRDCKEGTQKLLQELSKLGYRVSAKKAQLCQKEVTYLGYLLKEGKRWLTPARKATVMKIPPPTTPRQVREFLGKAGFCRLFIPGFASLAAPLYPLTKPSIPFIWTEEHQKAFDRIKEALLSAPALALPDLTKPFTLYVDERAGVARGVLTQTLGPWRRPVAYLSKKLDPVASGWPTCLKAVAAVALLLKDADKLTLGQNVTVIASHSLESIVRQPPDRWMTNARMTHYQSLLLNERVSFAPPAVLNPATLLPVESEATPVHRCSEILAEETGTRRDLKDQPLPGVPAWYTDGSSFIAEGKRRAGAAIVDGKRTVWASSLPEGTSAQKAELVALTQALRLAEGKDINIYTDSRYAFATAHIHGAIYKQRGWLTSAGKDIKNKEEILALLEAIHLPKRVAIIHCPGHQKGNDPVATGNRRADEAAKQAALSTRVLAETTKPAGKRTADGSEFEKRTADGSEFESPKKKAKVE

SEQ ID NO: 938 - protein, 2098 aa, synthetic construct
MPAAKRVKLDGGDKKYSIGLDIGTNSVGWAVITDEYKVPSKKFKVLGNTDRHSIKKNLIGALLFDSGETAEATRLKRTARRRYTRRKNRICYLQEIFSNEMAKVDDSFFHRLEESFLVEEDKKHERHPIFGNIVDEVAYHEKYPTIYHLRKKLVDSTDKADLRLIYLALAHMIKFRGHFLIEGDLNPDNSDVDKLFIQLVQTYNQLFEENPINASGVDAKAILSARLSKSRRLENLIAQLPGEKKNGLFGNLIALSLGLTPNFKSNFDLAEDAKLQLSKDTYDDDLDNLLAQIGDQYADLFLAAKNLSDAILLSDILRVNTEITKAPLSASMIKRYDEHHQDLTLLKALVRQQLPEKYKEIFFDQSKNGYAGYIDGGASQEEFYKFIKPILEKMDGTEELLVKLNREDLLRKQRTFDNGSIPHQIHLGELHAILRRQEDFYPFLKDNREKIEKILTFRIPYYVGPLARGNSRFAWMTRKSEETITPWNFEEVVDKGASAQSFIERMTNFDKNLPNEKVLPKHSLLYEYFTVYNELTKVKYVTEGMRKPAFLSGEQKKAIVDLLFKTNRKVTVKQLKEDYFKKIECFDSVEISGVEDRFNASLGTYHDLLKIIKDKDFLDNEENEDILEDIVLTLTLFEDREMIEERLKTYAHLFDDKVMKQLKRRRYTGWGRLSRKLINGIRDKQSGKTILDFLKSDGFANRNFMQLIHDDSLTFKEDIQKAQVSGQGDSLHEHIANLAGSPAIKKGILQTVKVVDELVKVMGRHKPENIVIEMARENQTTQKGQKNSRERMKRIEEGIKELGSQILKEHPVENTQLQNEKLYLYYLQNGRDMYVDQELDINRLSDYDVDHIVPQSFLKDDSIDNKVLTRSDKARGKSDNVPSEEVVKKMKNYWRQLLNAKLITQRKFDNLTKAERGGLSELDKAGFIKRQLVETRQITKHVAQILDSRMNTKYDENDKLIREVKVITLKSKLVSDFRKDFQFYKVREINNYHHAHDAYLNAVVGTALIKKYPKLESEFVYGDYKVYDVRKMIAKSEQEIGKATAKYFFYSNIMNFFKTEITLANGEIRKRPLIETNGETGEIVWDKGRDFATVRKVLSMPQVNIVKKTEVQTGGFSKESILPKRNSDKLIARKKDWDPKKYGGFDSPTVAYSVLVVAKVEKGKSKKLKSVKELLGITIMERSSFEKNPIDFLEAKGYKEVKKDLIIKLPKYSLFELENGRKRMLASAGELQKGNELALPSKYVNFLYLASHYEKLKGSPEDNEQKQLFVEQHKHYLDEIIEQISEFSKRVILADANLDKVLSAYNKHRDKPIREQAENIIHLFTLTNLGAPAAFKYFDTTIDRKRYTSTKEVLDATLIHQSITGLYETRIDLSQLGGDGGGSSGSSGSSGSSGSSGGVLNLEEEYRLHEKPVPSSIDPSWLQLFPTVWAERAGMGLANQVPPVVVELRSGASPVAVRQYPMSKEAREGIRPHIQRFLDLGVLVPCQSPWNTPLLPVKKPGTNDYRPVQDLREINKRVQDIHPTVPNPYNLLSSLPPSHTWYSVLDLKDAFFCLKLHPNSQPLFAFEWRDPEKGNTGQLTWTRLPQGFKNSPTLFNEALHRDLAPFRALNPQVVLLQYVDDLLVAAPTYRDCKEGTQKLLQELSKLGYRVSAKKAQLCQKEVTYLGYLLKEGKRWLTPARKATVMKIPPPTTPRQVREFLGKAGFCRLFIPGFASLAAPLYPLTKPSIPFIWTEEHQKAFDRIKEALLSAPALALPDLTKPFTLYVDERAGVARGVLTQTLGPWRRPVAYLSKKLDPVASGWPTCLKAVAAVALLLKDADKLTLGQNVTVIASHSLESIVRQPPDRWMTNARMTHYQSLLLNERVSFAPPAVLNPATLLPVESEATPVHRCSEILAEETGTRRDLKDQPLPGVPAWYTDGSSFIAEGKRRAGAAIVDGKRTVWASSLPEGTSAQKAELVALTQALRLAEGKDINIYTDSRYAFATAHIHGAIYKQRGWLTSAGKDIKNKEEILALLEAIHLPKRVAIIHCPGHQKGNDPVATGNRRADEAAKQAALSTRVLAETTKPAGKRTADGSEFEKRTADGSEFESPKKKAKVE

SEQ ID NO: 939 - protein, 2094 aa, synthetic construct
MPAAKRVKLDGGDKKYSIGLDIGTNSVGWAVITDEYKVPSKKFKVLGNTDRHSIKKNLIGALLFDSGETAEATRLKRTARRRYTRRKNRICYLQEIFSNEMAKVDDSFFHRLEESFLVEEDKKHERHPIFGNIVDEVAYHEKYPTIYHLRKKLVDSTDKADLRLIYLALAHMIKFRGHFLIEGDLNPDNSDVDKLFIQLVQTYNQLFEENPINASGVDAKAILSARLSKSRRLENLIAQLPGEKKNGLFGNLIALSLGLTPNFKSNFDLAEDAKLQLSKDTYDDDLDNLLAQIGDQYADLFLAAKNLSDAILLSDILRVNTEITKAPLSASMIKRYDEHHQDLTLLKALVRQQLPEKYKEIFFDQSKNGYAGYIDGGASQEEFYKFIKPILEKMDGTEELLVKLNREDLLRKQRTFDNGSIPHQIHLGELHAILRRQEDFYPFLKDNREKIEKILTFRIPYYVGPLARGNSRFAWMTRKSEETITPWNFEEVVDKGASAQSFIERMTNFDKNLPNEKVLPKHSLLYEYFTVYNELTKVKYVTEGMRKPAFLSGEQKKAIVDLLFKTNRKVTVKQLKEDYFKKIECFDSVEISGVEDRFNASLGTYHDLLKIIKDKDFLDNEENEDILEDIVLTLTLFEDREMIEERLKTYAHLFDDKVMKQLKRRRYTGWGRLSRKLINGIRDKQSGKTILDFLKSDGFANRNFMQLIHDDSLTFKEDIQKAQVSGQGDSLHEHIANLAGSPAIKKGILQTVKVVDELVKVMGRHKPENIVIEMARENQTTQKGQKNSRERMKRIEEGIKELGSQILKEHPVENTQLQNEKLYLYYLQNGRDMYVDQELDINRLSDYDVDHIVPQSFLKDDSIDNKVLTRSDKARGKSDNVPSEEVVKKMKNYWRQLLNAKLITQRKFDNLTKAERGGLSELDKAGFIKRQLVETRQITKHVAQILDSRMNTKYDENDKLIREVKVITLKSKLVSDFRKDFQFYKVREINNYHHAHDAYLNAVVGTALIKKYPKLESEFVYGDYKVYDVRKMIAKSEQEIGKATAKYFFYSNIMNFFKTEITLANGEIRKRPLIETNGETGEIVWDKGRDFATVRKVLSMPQVNIVKKTEVQTGGFSKESILPKRNSDKLIARKKDWDPKKYGGFDSPTVAYSVLVVAKVEKGKSKKLKSVKELLGITIMERSSFEKNPIDFLEAKGYKEVKKDLIIKLPKYSLFELENGRKRMLASAGELQKGNELALPSKYVNFLYLASHYEKLKGSPEDNEQKQLFVEQHKHYLDEIIEQISEFSKRVILADANLDKVLSAYNKHRDKPIREQAENIIHLFTLTNLGAPAAFKYFDTTIDRKRYTSTKEVLDATLIHQSITGLYETRIDLSQLGGDGGPAPEAAAKGGSGGVLNLEEEYRLHEKPVPSSIDPSWLQLFPTVWAERAGMGLANQVPPVVVELRSGASPVAVRQYPMSKEAREGIRPHIQRFLDLGVLVPCQSPWNTPLLPVKKPGTNDYRPVQDLREINKRVQDIHPTVPNPYNLLSSLPPSHTWYSVLDLKDAFFCLKLHPNSQPLFAFEWRDPEKGNTGQLTWTRLPQGFKNSPTLFNEALHRDLAPFRALNPQVVLLQYVDDLLVAAPTYRDCKEGTQKLLQELSKLGYRVSAKKAQLCQKEVTYLGYLLKEGKRWLTPARKATVMKIPPPTTPRQVREFLGKAGFCRLFIPGFASLAAPLYPLTKPSIPFIWTEEHQKAFDRIKEALLSAPALALPDLTKPFTLYVDERAGVARGVLTQTLGPWRRPVAYLSKKLDPVASGWPTCLKAVAAVALLLKDADKLTLGQNVTVIASHSLESIVRQPPDRWMTNARMTHYQSLLLNERVSFAPPAVLNPATLLPVESEATPVHRCSEILAEETGTRRDLKDQPLPGVPAWYTDGSSFIAEGKRRAGAAIVDGKRTVWASSLPEGTSAQKAELVALTQALRLAEGKDINIYTDSRYAFATAHIHGAIYKQRGWLTSAGKDIKNKEEILALLEAIHLPKRVAIIHCPGHQKGNDPVATGNRRADEAAKQAALSTRVLAETTKPAGKRTADGSEFEKRTADGSEFESPKKKAKVE

SEQ ID NO: 940 - protein, 2089 aa, synthetic construct
MPAAKRVKLDGGDKKYSIGLDIGTNSVGWAVITDEYKVPSKKFKVLGNTDRHSIKKNLIGALLFDSGETAEATRLKRTARRRYTRRKNRICYLQEIFSNEMAKVDDSFFHRLEESFLVEEDKKHERHPIFGNIVDEVAYHEKYPTIYHLRKKLVDSTDKADLRLIYLALAHMIKFRGHFLIEGDLNPDNSDVDKLFIQLVQTYNQLFEENPINASGVDAKAILSARLSKSRRLENLIAQLPGEKKNGLFGNLIALSLGLTPNFKSNFDLAEDAKLQLSKDTYDDDLDNLLAQIGDQYADLFLAAKNLSDAILLSDILRVNTEITKAPLSASMIKRYDEHHQDLTLLKALVRQQLPEKYKEIFFDQSKNGYAGYIDGGASQEEFYKFIKPILEKMDGTEELLVKLNREDLLRKQRTFDNGSIPHQIHLGELHAILRRQEDFYPFLKDNREKIEKILTFRIPYYVGPLARGNSRFAWMTRKSEETITPWNFEEVVDKGASAQSFIERMTNFDKNLPNEKVLPKHSLLYEYFTVYNELTKVKYVTEGMRKPAFLSGEQKKAIVDLLFKTNRKVTVKQLKEDYFKKIECFDSVEISGVEDRFNASLGTYHDLLKIIKDKDFLDNEENEDILEDIVLTLTLFEDREMIEERLKTYAHLFDDKVMKQLKRRRYTGWGRLSRKLINGIRDKQSGKTILDFLKSDGFANRNFMQLIHDDSLTFKEDIQKAQVSGQGDSLHEHIANLAGSPAIKKGILQTVKVVDELVKVMGRHKPENIVIEMARENQTTQKGQKNSRERMKRIEEGIKELGSQILKEHPVENTQLQNEKLYLYYLQNGRDMYVDQELDINRLSDYDVDHIVPQSFLKDDSIDNKVLTRSDKARGKSDNVPSEEVVKKMKNYWRQLLNAKLITQRKFDNLTKAERGGLSELDKAGFIKRQLVETRQITKHVAQILDSRMNTKYDENDKLIREVKVITLKSKLVSDFRKDFQFYKVREINNYHHAHDAYLNAVVGTALIKKYPKLESEFVYGDYKVYDVRKMIAKSEQEIGKATAKYFFYSNIMNFFKTEITLANGEIRKRPLIETNGETGEIVWDKGRDFATVRKVLSMPQVNIVKKTEVQTGGFSKESILPKRNSDKLIARKKDWDPKKYGGFDSPTVAYSVLVVAKVEKGKSKKLKSVKELLGITIMERSSFEKNPIDFLEAKGYKEVKKDLIIKLPKYSLFELENGRKRMLASAGELQKGNELALPSKYVNFLYLASHYEKLKGSPEDNEQKQLFVEQHKHYLDEIIEQISEFSKRVILADANLDKVLSAYNKHRDKPIREQAENIIHLFTLTNLGAPAAFKYFDTTIDRKRYTSTKEVLDATLIHQSITGLYETRIDLSQLGGDGGGGGPAPGGVLNLEEEYRLHEKPVPSSIDPSWLQLFPTVWAERAGMGLANQVPPVVVELRSGASPVAVRQYPMSKEAREGIRPHIQRFLDLGVLVPCQSPWNTPLLPVKKPGTNDYRPVQDLREINKRVQDIHPTVPNPYNLLSSLPPSHTWYSVLDLKDAFFCLKLHPNSQPLFAFEWRDPEKGNTGQLTWTRLPQGFKNSPTLFNEALHRDLAPFRALNPQVVLLQYVDDLLVAAPTYRDCKEGTQKLLQELSKLGYRVSAKKAQLCQKEVTYLGYLLKEGKRWLTPARKATVMKIPPPTTPRQVREFLGKAGFCRLFIPGFASLAAPLYPLTKPSIPFIWTEEHQKAFDRIKEALLSAPALALPDLTKPFTLYVDERAGVARGVLTQTLGPWRRPVAYLSKKLDPVASGWPTCLKAVAAVALLLKDADKLTLGQNVTVIASHSLESIVRQPPDRWMTNARMTHYQSLLLNERVSFAPPAVLNPATLLPVESEATPVHRCSEILAEETGTRRDLKDQPLPGVPAWYTDGSSFIAEGKRRAGAAIVDGKRTVWASSLPEGTSAQKAELVALTQALRLAEGKDINIYTDSRYAFATAHIHGAIYKQRGWLTSAGKDIKNKEEILALLEAIHLPKRVAIIHCPGHQKGNDPVATGNRRADEAAKQAALSTRVLAETTKPAGKRTADGSEFEKRTADGSEFESPKKKAKVE

SEQ ID NO: 941 - protein, 2089 aa, synthetic construct
MPAAKRVKLDGGDKKYSIGLDIGTNSVGWAVITDEYKVPSKKFKVLGNTDRHSIKKNLIGALLFDSGETAEATRLKRTARRRYTRRKNRICYLQEIFSNEMAKVDDSFFHRLEESFLVEEDKKHERHPIFGNIVDEVAYHEKYPTIYHLRKKLVDSTDKADLRLIYLALAHMIKFRGHFLIEGDLNPDNSDVDKLFIQLVQTYNQLFEENPINASGVDAKAILSARLSKSRRLENLIAQLPGEKKNGLFGNLIALSLGLTPNFKSNFDLAEDAKLQLSKDTYDDDLDNLLAQIGDQYADLFLAAKNLSDAILLSDILRVNTEITKAPLSASMIKRYDEHHQDLTLLKALVRQQLPEKYKEIFFDQSKNGYAGYIDGGASQEEFYKFIKPILEKMDGTEELLVKLNREDLLRKQRTFDNGSIPHQIHLGELHAILRRQEDFYPFLKDNREKIEKILTFRIPYYVGPLARGNSRFAWMTRKSEETITPWNFEEVVDKGASAQSFIERMTNFDKNLPNEKVLPKHSLLYEYFTVYNELTKVKYVTEGMRKPAFLSGEQKKAIVDLLFKTNRKVTVKQLKEDYFKKIECFDSVEISGVEDRFNASLGTYHDLLKIIKDKDFLDNEENEDILEDIVLTLTLFEDREMIEERLKTYAHLFDDKVMKQLKRRRYTGWGRLSRKLINGIRDKQSGKTILDFLKSDGFANRNFMQLIHDDSLTFKEDIQKAQVSGQGDSLHEHIANLAGSPAIKKGILQTVKVVDELVKVMGRHKPENIVIEMARENQTTQKGQKNSRERMKRIEEGIKELGSQILKEHPVENTQLQNEKLYLYYLQNGRDMYVDQELDINRLSDYDVDHIVPQSFLKDDSIDNKVLTRSDKARGKSDNVPSEEVVKKMKNYWRQLLNAKLITQRKFDNLTKAERGGLSELDKAGFIKRQLVETRQITKHVAQILDSRMNTKYDENDKLIREVKVITLKSKLVSDFRKDFQFYKVREINNYHHAHDAYLNAVVGTALIKKYPKLESEFVYGDYKVYDVRKMIAKSEQEIGKATAKYFFYSNIMNFFKTEITLANGEIRKRPLIETNGETGEIVWDKGRDFATVRKVLSMPQVNIVKKTEVQTGGFSKESILPKRNSDKLIARKKDWDPKKYGGFDSPTVAYSVLVVAKVEKGKSKKLKSVKELLGITIMERSSFEKNPIDFLEAKGYKEVKKDLIIKLPKYSLFELENGRKRMLASAGELQKGNELALPSKYVNFLYLASHYEKLKGSPEDNEQKQLFVEQHKHYLDEIIEQISEFSKRVILADANLDKVLSAYNKHRDKPIREQAENIIHLFTLTNLGAPAAFKYFDTTIDRKRYTSTKEVLDATLIHQSITGLYETRIDLSQLGGDGGPAPGSSGGVLNLEEEYRLHEKPVPSSIDPSWLQLFPTVWAERAGMGLANQVPPVVVELRSGASPVAVRQYPMSKEAREGIRPHIQRFLDLGVLVPCQSPWNTPLLPVKKPGTNDYRPVQDLREINKRVQDIHPTVPNPYNLLSSLPPSHTWYSVLDLKDAFFCLKLHPNSQPLFAFEWRDPEKGNTGQLTWTRLPQGFKNSPTLFNEALHRDLAPFRALNPQVVLLQYVDDLLVAAPTYRDCKEGTQKLLQELSKLGYRVSAKKAQLCQKEVTYLGYLLKEGKRWLTPARKATVMKIPPPTTPRQVREFLGKAGFCRLFIPGFASLAAPLYPLTKPSIPFIWTEEHQKAFDRIKEALLSAPALALPDLTKPFTLYVDERAGVARGVLTQTLGPWRRPVAYLSKKLDPVASGWPTCLKAVAAVALLLKDADKLTLGQNVTVIASHSLESIVRQPPDRWMTNARMTHYQSLLLNERVSFAPPAVLNPATLLPVESEATPVHRCSEILAEETGTRRDLKDQPLPGVPAWYTDGSSFIAEGKRRAGAAIVDGKRTVWASSLPEGTSAQKAELVALTQALRLAEGKDINIYTDSRYAFATAHIHGAIYKQRGWLTSAGKDIKNKEEILALLEAIHLPKRVAIIHCPGHQKGNDPVATGNRRADEAAKQAALSTRVLAETTKPAGKRTADGSEFEKRTADGSEFESPKKKAKVE

SEQ ID NO: 942 - protein, 2091 aa, synthetic construct
MPAAKRVKLDGGDKKYSIGLDIGTNSVGWAVITDEYKVPSKKFKVLGNTDRHSIKKNLIGALLFDSGETAEATRLKRTARRRYTRRKNRICYLQEIFSNEMAKVDDSFFHRLEESFLVEEDKKHERHPIFGNIVDEVAYHEKYPTIYHLRKKLVDSTDKADLRLIYLALAHMIKFRGHFLIEGDLNPDNSDVDKLFIQLVQTYNQLFEENPINASGVDAKAILSARLSKSRRLENLIAQLPGEKKNGLFGNLIALSLGLTPNFKSNFDLAEDAKLQLSKDTYDDDLDNLLAQIGDQYADLFLAAKNLSDAILLSDILRVNTEITKAPLSASMIKRYDEHHQDLTLLKALVRQQLPEKYKEIFFDQSKNGYAGYIDGGASQEEFYKFIKPILEKMDGTEELLVKLNREDLLRKQRTFDNGSIPHQIHLGELHAILRRQEDFYPFLKDNREKIEKILTFRIPYYVGPLARGNSRFAWMTRKSEETITPWNFEEVVDKGASAQSFIERMTNFDKNLPNEKVLPKHSLLYEYFTVYNELTKVKYVTEGMRKPAFLSGEQKKAIVDLLFKTNRKVTVKQLKEDYFKKIECFDSVEISGVEDRFNASLGTYHDLLKIIKDKDFLDNEENEDILEDIVLTLTLFEDREMIEERLKTYAHLFDDKVMKQLKRRRYTGWGRLSRKLINGIRDKQSGKTILDFLKSDGFANRNFMQLIHDDSLTFKEDIQKAQVSGQGDSLHEHIANLAGSPAIKKGILQTVKVVDELVKVMGRHKPENIVIEMARENQTTQKGQKNSRERMKRIEEGIKELGSQILKEHPVENTQLQNEKLYLYYLQNGRDMYVDQELDINRLSDYDVDHIVPQSFLKDDSIDNKVLTRSDKARGKSDNVPSEEVVKKMKNYWRQLLNAKLITQRKFDNLTKAERGGLSELDKAGFIKRQLVETRQITKHVAQILDSRMNTKYDENDKLIREVKVITLKSKLVSDFRKDFQFYKVREINNYHHAHDAYLNAVVGTALIKKYPKLESEFVYGDYKVYDVRKMIAKSEQEIGKATAKYFFYSNIMNFFKTEITLANGEIRKRPLIETNGETGEIVWDKGRDFATVRKVLSMPQVNIVKKTEVQTGGFSKESILPKRNSDKLIARKKDWDPKKYGGFDSPTVAYSVLVVAKVEKGKSKKLKSVKELLGITIMERSSFEKNPIDFLEAKGYKEVKKDLIIKLPKYSLFELENGRKRMLASAGELQKGNELALPSKYVNFLYLASHYEKLKGSPEDNEQKQLFVEQHKHYLDEIIEQISEFSKRVILADANLDKVLSAYNKHRDKPIREQAENIIHLFTLTNLGAPAAFKYFDTTIDRKRYTSTKEVLDATLIHQSITGLYETRIDLSQLGGDGGEAAAKGSSGGVLNLEEEYRLHEKPVPSSIDPSWLQLFPTVWAERAGMGLANQVPPVVVELRSGASPVAVRQYPMSKEAREGIRPHIQRFLDLGVLVPCQSPWNTPLLPVKKPGTNDYRPVQDLREINKRVQDIHPTVPNPYNLLSSLPPSHTWYSVLDLKDAFFCLKLHPNSQPLFAFEWRDPEKGNTGQLTWTRLPQGFKNSPTLFNEALHRDLAPFRALNPQVVLLQYVDDLLVAAPTYRDCKEGTQKLLQELSKLGYRVSAKKAQLCQKEVTYLGYLLKEGKRWLTPARKATVMKIPPPTTPRQVREFLGKAGFCRLFIPGFASLAAPLYPLTKPSIPFIWTEEHQKAFDRIKEALLSAPALALPDLTKPFTLYVDERAGVARGVLTQTLGPWRRPVAYLSKKLDPVASGWPTCLKAVAAVALLLKDADKLTLGQNVTVIASHSLESIVRQPPDRWMTNARMTHYQSLLLNERVSFAPPAVLNPATLLPVESEATPVHRCSEILAEETGTRRDLKDQPLPGVPAWYTDGSSFIAEGKRRAGAAIVDGKRTVWASSLPEGTSAQKAELVALTQALRLAEGKDINIYTDSRYAFATAHIHGAIYKQRGWLTSAGKDIKNKEEILALLEAIHLPKRVAIIHCPGHQKGNDPVATGNRRADEAAKQAALSTRVLAETTKPAGKRTADGSEFEKRTADGSEFESPKKKAKVE

SEQ ID NO: 943 - protein, 2089 aa, synthetic construct
MPAAKRVKLDGGDKKYSIGLDIGTNSVGWAVITDEYKVPSKKFKVLGNTDRHSIKKNLIGALLFDSGETAEATRLKRTARRRYTRRKNRICYLQEIFSNEMAKVDDSFFHRLEESFLVEEDKKHERHPIFGNIVDEVAYHEKYPTIYHLRKKLVDSTDKADLRLIYLALAHMIKFRGHFLIEGDLNPDNSDVDKLFIQLVQTYNQLFEENPINASGVDAKAILSARLSKSRRLENLIAQLPGEKKNGLFGNLIALSLGLTPNFKSNFDLAEDAKLQLSKDTYDDDLDNLLAQIGDQYADLFLAAKNLSDAILLSDILRVNTEITKAPLSASMIKRYDEHHQDLTLLKALVRQQLPEKYKEIFFDQSKNGYAGYIDGGASQEEFYKFIKPILEKMDGTEELLVKLNREDLLRKQRTFDNGSIPHQIHLGELHAILRRQEDFYPFLKDNREKIEKILTFRIPYYVGPLARGNSRFAWMTRKSEETITPWNFEEVVDKGASAQSFIERMTNFDKNLPNEKVLPKHSLLYEYFTVYNELTKVKYVTEGMRKPAFLSGEQKKAIVDLLFKTNRKVTVKQLKEDYFKKIECFDSVEISGVEDRFNASLGTYHDLLKIIKDKDFLDNEENEDILEDIVLTLTLFEDREMIEERLKTYAHLFDDKVMKQLKRRRYTGWGRLSRKLINGIRDKQSGKTILDFLKSDGFANRNFMQLIHDDSLTFKEDIQKAQVSGQGDSLHEHIANLAGSPAIKKGILQTVKVVDELVKVMGRHKPENIVIEMARENQTTQKGQKNSRERMKRIEEGIKELGSQILKEHPVENTQLQNEKLYLYYLQNGRDMYVDQELDINRLSDYDVDHIVPQSFLKDDSIDNKVLTRSDKARGKSDNVPSEEVVKKMKNYWRQLLNAKLITQRKFDNLTKAERGGLSELDKAGFIKRQLVETRQITKHVAQILDSRMNTKYDENDKLIREVKVITLKSKLVSDFRKDFQFYKVREINNYHHAHDAYLNAVVGTALIKKYPKLESEFVYGDYKVYDVRKMIAKSEQEIGKATAKYFFYSNIMNFFKTEITLANGEIRKRPLIETNGETGEIVWDKGRDFATVRKVLSMPQVNIVKKTEVQTGGFSKESILPKRNSDKLIARKKDWDPKKYGGFDSPTVAYSVLVVAKVEKGKSKKLKSVKELLGITIMERSSFEKNPIDFLEAKGYKEVKKDLIIKLPKYSLFELENGRKRMLASAGELQKGNELALPSKYVNFLYLASHYEKLKGSPEDNEQKQLFVEQHKHYLDEIIEQISEFSKRVILADANLDKVLSAYNKHRDKPIREQAENIIHLFTLTNLGAPAAFKYFDTTIDRKRYTSTKEVLDATLIHQSITGLYETRIDLSQLGGDGGPAPGGSGGVLNLEEEYRLHEKPVPSSIDPSWLQLFPTVWAERAGMGLANQVPPVVVELRSGASPVAVRQYPMSKEAREGIRPHIQRFLDLGVLVPCQSPWNTPLLPVKKPGTNDYRPVQDLREINKRVQDIHPTVPNPYNLLSSLPPSHTWYSVLDLKDAFFCLKLHPNSQPLFAFEWRDPEKGNTGQLTWTRLPQGFKNSPTLFNEALHRDLAPFRALNPQVVLLQYVDDLLVAAPTYRDCKEGTQKLLQELSKLGYRVSAKKAQLCQKEVTYLGYLLKEGKRWLTPARKATVMKIPPPTTPRQVREFLGKAGFCRLFIPGFASLAAPLYPLTKPSIPFIWTEEHQKAFDRIKEALLSAPALALPDLTKPFTLYVDERAGVARGVLTQTLGPWRRPVAYLSKKLDPVASGWPTCLKAVAAVALLLKDADKLTLGQNVTVIASHSLESIVRQPPDRWMTNARMTHYQSLLLNERVSFAPPAVLNPATLLPVESEATPVHRCSEILAEETGTRRDLKDQPLPGVPAWYTDGSSFIAEGKRRAGAAIVDGKRTVWASSLPEGTSAQKAELVALTQALRLAEGKDINIYTDSRYAFATAHIHGAIYKQRGWLTSAGKDIKNKEEILALLEAIHLPKRVAIIHCPGHQKGNDPVATGNRRADEAAKQAALSTRVLAETTKPAGKRTADGSEFEKRTADGSEFESPKKKAKVE

SEQ ID NO: 944 - protein, 2094 aa, synthetic construct
MPAAKRVKLDGGDKKYSIGLDIGTNSVGWAVITDEYKVPSKKFKVLGNTDRHSIKKNLIGALLFDSGETAEATRLKRTARRRYTRRKNRICYLQEIFSNEMAKVDDSFFHRLEESFLVEEDKKHERHPIFGNIVDEVAYHEKYPTIYHLRKKLVDSTDKADLRLIYLALAHMIKFRGHFLIEGDLNPDNSDVDKLFIQLVQTYNQLFEENPINASGVDAKAILSARLSKSRRLENLIAQLPGEKKNGLFGNLIALSLGLTPNFKSNFDLAEDAKLQLSKDTYDDDLDNLLAQIGDQYADLFLAAKNLSDAILLSDILRVNTEITKAPLSASMIKRYDEHHQDLTLLKALVRQQLPEKYKEIFFDQSKNGYAGYIDGGASQEEFYKFIKPILEKMDGTEELLVKLNREDLLRKQRTFDNGSIPHQIHLGELHAILRRQEDFYPFLKDNREKIEKILTFRIPYYVGPLARGNSRFAWMTRKSEETITPWNFEEVVDKGASAQSFIERMTNFDKNLPNEKVLPKHSLLYEYFTVYNELTKVKYVTEGMRKPAFLSGEQKKAIVDLLFKTNRKVTVKQLKEDYFKKIECFDSVEISGVEDRFNASLGTYHDLLKIIKDKDFLDNEENEDILEDIVLTLTLFEDREMIEERLKTYAHLFDDKVMKQLKRRRYTGWGRLSRKLINGIRDKQSGKTILDFLKSDGFANRNFMQLIHDDSLTFKEDIQKAQVSGQGDSLHEHIANLAGSPAIKKGILQTVKVVDELVKVMGRHKPENIVIEMARENQTTQKGQKNSRERMKRIEEGIKELGSQILKEHPVENTQLQNEKLYLYYLQNGRDMYVDQELDINRLSDYDVDHIVPQSFLKDDSIDNKVLTRSDKARGKSDNVPSEEVVKKMKNYWRQLLNAKLITQRKFDNLTKAERGGLSELDKAGFIKRQLVETRQITKHVAQILDSRMNTKYDENDKLIREVKVITLKSKLVSDFRKDFQFYKVREINNYHHAHDAYLNAVVGTALIKKYPKLESEFVYGDYKVYDVRKMIAKSEQEIGKATAKYFFYSNIMNFFKTEITLANGEIRKRPLIETNGETGEIVWDKGRDFATVRKVLSMPQVNIVKKTEVQTGGFSKESILPKRNSDKLIARKKDWDPKKYGGFDSPTVAYSVLVVAKVEKGKSKKLKSVKELLGITIMERSSFEKNPIDFLEAKGYKEVKKDLIIKLPKYSLFELENGRKRMLASAGELQKGNELALPSKYVNFLYLASHYEKLKGSPEDNEQKQLFVEQHKHYLDEIIEQISEFSKRVILADANLDKVLSAYNKHRDKPIREQAENIIHLFTLTNLGAPAAFKYFDTTIDRKRYTSTKEVLDATLIHQSITGLYETRIDLSQLGGDGGGSSPAPEAAAKGGVLNLEEEYRLHEKPVPSSIDPSWLQLFPTVWAERAGMGLANQVPPVVVELRSGASPVAVRQYPMSKEAREGIRPHIQRFLDLGVLVPCQSPWNTPLLPVKKPGTNDYRPVQDLREINKRVQDIHPTVPNPYNLLSSLPPSHTWYSVLDLKDAFFCLKLHPNSQPLFAFEWRDPEKGNTGQLTWTRLPQGFKNSPTLFNEALHRDLAPFRALNPQVVLLQYVDDLLVAAPTYRDCKEGTQKLLQELSKLGYRVSAKKAQLCQKEVTYLGYLLKEGKRWLTPARKATVMKIPPPTTPRQVREFLGKAGFCRLFIPGFASLAAPLYPLTKPSIPFIWTEEHQKAFDRIKEALLSAPALALPDLTKPFTLYVDERAGVARGVLTQTLGPWRRPVAYLSKKLDPVASGWPTCLKAVAAVALLLKDADKLTLGQNVTVIASHSLESIVRQPPDRWMTNARMTHYQSLLLNERVSFAPPAVLNPATLLPVESEATPVHRCSEILAEETGTRRDLKDQPLPGVPAWYTDGSSFIAEGKRRAGAAIVDGKRTVWASSLPEGTSAQKAELVALTQALRLAEGKDINIYTDSRYAFATAHIHGAIYKQRGWLTSAGKDIKNKEEILALLEAIHLPKRVAIIHCPGHQKGNDPVATGNRRADEAAKQAALSTRVLAETTKPAGKRTADGSEFEKRTADGSEFESPKKKAKVE

SEQ ID NO: 945 - protein, 2093 aa, synthetic construct
MPAAKRVKLDGGDKKYSIGLDIGTNSVGWAVITDEYKVPSKKFKVLGNTDRHSIKKNLIGALLFDSGETAEATRLKRTARRRYTRRKNRICYLQEIFSNEMAKVDDSFFHRLEESFLVEEDKKHERHPIFGNIVDEVAYHEKYPTIYHLRKKLVDSTDKADLRLIYLALAHMIKFRGHFLIEGDLNPDNSDVDKLFIQLVQTYNQLFEENPINASGVDAKAILSARLSKSRRLENLIAQLPGEKKNGLFGNLIALSLGLTPNFKSNFDLAEDAKLQLSKDTYDDDLDNLLAQIGDQYADLFLAAKNLSDAILLSDILRVNTEITKAPLSASMIKRYDEHHQDLTLLKALVRQQLPEKYKEIFFDQSKNGYAGYIDGGASQEEFYKFIKPILEKMDGTEELLVKLNREDLLRKQRTFDNGSIPHQIHLGELHAILRRQEDFYPFLKDNREKIEKILTFRIPYYVGPLARGNSRFAWMTRKSEETITPWNFEEVVDKGASAQSFIERMTNFDKNLPNEKVLPKHSLLYEYFTVYNELTKVKYVTEGMRKPAFLSGEQKKAIVDLLFKTNRKVTVKQLKEDYFKKIECFDSVEISGVEDRFNASLGTYHDLLKIIKDKDFLDNEENEDILEDIVLTLTLFEDREMIEERLKTYAHLFDDKVMKQLKRRRYTGWGRLSRKLINGIRDKQSGKTILDFLKSDGFANRNFMQLIHDDSLTFKEDIQKAQVSGQGDSLHEHIANLAGSPAIKKGILQTVKVVDELVKVMGRHKPENIVIEMARENQTTQKGQKNSRERMKRIEEGIKELGSQILKEHPVENTQLQNEKLYLYYLQNGRDMYVDQELDINRLSDYDVDHIVPQSFLKDDSIDNKVLTRSDKARGKSDNVPSEEVVKKMKNYWRQLLNAKLITQRKFDNLTKAERGGLSELDKAGFIKRQLVETRQITKHVAQILDSRMNTKYDENDKLIREVKVITLKSKLVSDFRKDFQFYKVREINNYHHAHDAYLNAVVGTALIKKYPKLESEFVYGDYKVYDVRKMIAKSEQEIGKATAKYFFYSNIMNFFKTEITLANGEIRKRPLIETNGETGEIVWDKGRDFATVRKVLSMPQVNIVKKTEVQTGGFSKESILPKRNSDKLIARKKDWDPKKYGGFDSPTVAYSVLVVAKVEKGKSKKLKSVKELLGITIMERSSFEKNPIDFLEAKGYKEVKKDLIIKLPKYSLFELENGRKRMLASAGELQKGNELALPSKYVNFLYLASHYEKLKGSPEDNEQKQLFVEQHKHYLDEIIEQISEFSKRVILADANLDKVLSAYNKHRDKPIREQAENIIHLFTLTNLGAPAAFKYFDTTIDRKRYTSTKEVLDATLIHQSITGLYETRIDLSQLGGDGGGGGGSGGGGSGGVLNLEEEYRLHEKPVPSSIDPSWLQLFPTVWAERAGMGLANQVPPVVVELRSGASPVAVRQYPMSKEAREGIRPHIQRFLDLGVLVPCQSPWNTPLLPVKKPGTNDYRPVQDLREINKRVQDIHPTVPNPYNLLSSLPPSHTWYSVLDLKDAFFCLKLHPNSQPLFAFEWRDPEKGNTGQLTWTRLPQGFKNSPTLFNEALHRDLAPFRALNPQVVLLQYVDDLLVAAPTYRDCKEGTQKLLQELSKLGYRVSAKKAQLCQKEVTYLGYLLKEGKRWLTPARKATVMKIPPPTTPRQVREFLGKAGFCRLFIPGFASLAAPLYPLTKPSIPFIWTEEHQKAFDRIKEALLSAPALALPDLTKPFTLYVDERAGVARGVLTQTLGPWRRPVAYLSKKLDPVASGWPTCLKAVAAVALLLKDADKLTLGQNVTVIASHSLESIVRQPPDRWMTNARMTHYQSLLLNERVSFAPPAVLNPATLLPVESEATPVHRCSEILAEETGTRRDLKDQPLPGVPAWYTDGSSFIAEGKRRAGAAIVDGKRTVWASSLPEGTSAQKAELVALTQALRLAEGKDINIYTDSRYAFATAHIHGAIYKQRGWLTSAGKDIKNKEEILALLEAIHLPKRVAIIHCPGHQKGNDPVATGNRRADEAAKQAALSTRVLAETTKPAGKRTADGSEFEKRTADGSEFESPKKKAKVE

SEQ ID NO: 946 - protein, 2092 aa, synthetic construct
MPAAKRVKLDGGDKKYSIGLDIGTNSVGWAVITDEYKVPSKKFKVLGNTDRHSIKKNLIGALLFDSGETAEATRLKRTARRRYTRRKNRICYLQEIFSNEMAKVDDSFFHRLEESFLVEEDKKHERHPIFGNIVDEVAYHEKYPTIYHLRKKLVDSTDKADLRLIYLALAHMIKFRGHFLIEGDLNPDNSDVDKLFIQLVQTYNQLFEENPINASGVDAKAILSARLSKSRRLENLIAQLPGEKKNGLFGNLIALSLGLTPNFKSNFDLAEDAKLQLSKDTYDDDLDNLLAQIGDQYADLFLAAKNLSDAILLSDILRVNTEITKAPLSASMIKRYDEHHQDLTLLKALVRQQLPEKYKEIFFDQSKNGYAGYIDGGASQEEFYKFIKPILEKMDGTEELLVKLNREDLLRKQRTFDNGSIPHQIHLGELHAILRRQEDFYPFLKDNREKIEKILTFRIPYYVGPLARGNSRFAWMTRKSEETITPWNFEEVVDKGASAQSFIERMTNFDKNLPNEKVLPKHSLLYEYFTVYNELTKVKYVTEGMRKPAFLSGEQKKAIVDLLFKTNRKVTVKQLKEDYFKKIECFDSVEISGVEDRFNASLGTYHDLLKIIKDKDFLDNEENEDILEDIVLTLTLFEDREMIEERLKTYAHLFDDKVMKQLKRRRYTGWGRLSRKLINGIRDKQSGKTILDFLKSDGFANRNFMQLIHDDSLTFKEDIQKAQVSGQGDSLHEHIANLAGSPAIKKGILQTVKVVDELVKVMGRHKPENIVIEMARENQTTQKGQKNSRERMKRIEEGIKELGSQILKEHPVENTQLQNEKLYLYYLQNGRDMYVDQELDINRLSDYDVDHIVPQSFLKDDSIDNKVLTRSDKARGKSDNVPSEEVVKKMKNYWRQLLNAKLITQRKFDNLTKAERGGLSELDKAGFIKRQLVETRQITKHVAQILDSRMNTKYDENDKLIREVKVITLKSKLVSDFRKDFQFYKVREINNYHHAHDAYLNAVVGTALIKKYPKLESEFVYGDYKVYDVRKMIAKSEQEIGKATAKYFFYSNIMNFFKTEITLANGEIRKRPLIETNGETGEIVWDKGRDFATVRKVLSMPQVNIVKKTEVQTGGFSKESILPKRNSDKLIARKKDWDPKKYGGFDSPTVAYSVLVVAKVEKGKSKKLKSVKELLGITIMERSSFEKNPIDFLEAKGYKEVKKDLIIKLPKYSLFELENGRKRMLASAGELQKGNELALPSKYVNFLYLASHYEKLKGSPEDNEQKQLFVEQHKHYLDEIIEQISEFSKRVILADANLDKVLSAYNKHRDKPIREQAENIIHLFTLTNLGAPAAFKYFDTTIDRKRYTSTKEVLDATLIHQSITGLYETRIDLSQLGGDGGGGGGSSGGSGGVLNLEEEYRLHEKPVPSSIDPSWLQLFPTVWAERAGMGLANQVPPVVVELRSGASPVAVRQYPMSKEAREGIRPHIQRFLDLGVLVPCQSPWNTPLLPVKKPGTNDYRPVQDLREINKRVQDIHPTVPNPYNLLSSLPPSHTWYSVLDLKDAFFCLKLHPNSQPLFAFEWRDPEKGNTGQLTWTRLPQGFKNSPTLFNEALHRDLAPFRALNPQVVLLQYVDDLLVAAPTYRDCKEGTQKLLQELSKLGYRVSAKKAQLCQKEVTYLGYLLKEGKRWLTPARKATVMKIPPPTTPRQVREFLGKAGFCRLFIPGFASLAAPLYPLTKPSIPFIWTEEHQKAFDRIKEALLSAPALALPDLTKPFTLYVDERAGVARGVLTQTLGPWRRPVAYLSKKLDPVASGWPTCLKAVAAVALLLKDADKLTLGQNVTVIASHSLESIVRQPPDRWMTNARMTHYQSLLLNERVSFAPPAVLNPATLLPVESEATPVHRCSEILAEETGTRRDLKDQPLPGVPAWYTDGSSFIAEGKRRAGAAIVDGKRTVWASSLPEGTSAQKAELVALTQALRLAEGKDINIYTDSRYAFATAHIHGAIYKQRGWLTSAGKDIKNKEEILALLEAIHLPKRVAIIHCPGHQKGNDPVATGNRRADEAAKQAALSTRVLAETTKPAGKRTADGSEFEKRTADGSEFESPKKKAKVE

SEQ ID NO: 947 - protein, 2091 aa, synthetic construct
MPAAKRVKLDGGDKKYSIGLDIGTNSVGWAVITDEYKVPSKKFKVLGNTDRHSIKKNLIGALLFDSGETAEATRLKRTARRRYTRRKNRICYLQEIFSNEMAKVDDSFFHRLEESFLVEEDKKHERHPIFGNIVDEVAYHEKYPTIYHLRKKLVDSTDKADLRLIYLALAHMIKFRGHFLIEGDLNPDNSDVDKLFIQLVQTYNQLFEENPINASGVDAKAILSARLSKSRRLENLIAQLPGEKKNGLFGNLIALSLGLTPNFKSNFDLAEDAKLQLSKDTYDDDLDNLLAQIGDQYADLFLAAKNLSDAILLSDILRVNTEITKAPLSASMIKRYDEHHQDLTLLKALVRQQLPEKYKEIFFDQSKNGYAGYIDGGASQEEFYKFIKPILEKMDGTEELLVKLNREDLLRKQRTFDNGSIPHQIHLGELHAILRRQEDFYPFLKDNREKIEKILTFRIPYYVGPLARGNSRFAWMTRKSEETITPWNFEEVVDKGASAQSFIERMTNFDKNLPNEKVLPKHSLLYEYFTVYNELTKVKYVTEGMRKPAFLSGEQKKAIVDLLFKTNRKVTVKQLKEDYFKKIECFDSVEISGVEDRFNASLGTYHDLLKIIKDKDFLDNEENEDILEDIVLTLTLFEDREMIEERLKTYAHLFDDKVMKQLKRRRYTGWGRLSRKLINGIRDKQSGKTILDFLKSDGFANRNFMQLIHDDSLTFKEDIQKAQVSGQGDSLHEHIANLAGSPAIKKGILQTVKVVDELVKVMGRHKPENIVIEMARENQTTQKGQKNSRERMKRIEEGIKELGSQILKEHPVENTQLQNEKLYLYYLQNGRDMYVDQELDINRLSDYDVDHIVPQSFLKDDSIDNKVLTRSDKARGKSDNVPSEEVVKKMKNYWRQLLNAKLITQRKFDNLTKAERGGLSELDKAGFIKRQLVETRQITKHVAQILDSRMNTKYDENDKLIREVKVITLKSKLVSDFRKDFQFYKVREINNYHHAHDAYLNAVVGTALIKKYPKLESEFVYGDYKVYDVRKMIAKSEQEIGKATAKYFFYSNIMNFFKTEITLANGEIRKRPLIETNGETGEIVWDKGRDFATVRKVLSMPQVNIVKKTEVQTGGFSKESILPKRNSDKLIARKKDWDPKKYGGFDSPTVAYSVLVVAKVEKGKSKKLKSVKELLGITIMERSSFEKNPIDFLEAKGYKEVKKDLIIKLPKYSLFELENGRKRMLASAGELQKGNELALPSKYVNFLYLASHYEKLKGSPEDNEQKQLFVEQHKHYLDEIIEQISEFSKRVILADANLDKVLSAYNKHRDKPIREQAENIIHLFTLTNLGAPAAFKYFDTTIDRKRYTSTKEVLDATLIHQSITGLYETRIDLSQLGGDGGPAPEAAAKGGVLNLEEEYRLHEKPVPSSIDPSWLQLFPTVWAERAGMGLANQVPPVVVELRSGASPVAVRQYPMSKEAREGIRPHIQRFLDLGVLVPCQSPWNTPLLPVKKPGTNDYRPVQDLREINKRVQDIHPTVPNPYNLLSSLPPSHTWYSVLDLKDAFFCLKLHPNSQPLFAFEWRDPEKGNTGQLTWTRLPQGFKNSPTLFNEALHRDLAPFRALNPQVVLLQYVDDLLVAAPTYRDCKEGTQKLLQELSKLGYRVSAKKAQLCQKEVTYLGYLLKEGKRWLTPARKATVMKIPPPTTPRQVREFLGKAGFCRLFIPGFASLAAPLYPLTKPSIPFIWTEEHQKAFDRIKEALLSAPALALPDLTKPFTLYVDERAGVARGVLTQTLGPWRRPVAYLSKKLDPVASGWPTCLKAVAAVALLLKDADKLTLGQNVTVIASHSLESIVRQPPDRWMTNARMTHYQSLLLNERVSFAPPAVLNPATLLPVESEATPVHRCSEILAEETGTRRDLKDQPLPGVPAWYTDGSSFIAEGKRRAGAAIVDGKRTVWASSLPEGTSAQKAELVALTQALRLAEGKDINIYTDSRYAFATAHIHGAIYKQRGWLTSAGKDIKNKEEILALLEAIHLPKRVAIIHCPGHQKGNDPVATGNRRADEAAKQAALSTRVLAETTKPAGKRTADGSEFEKRTADGSEFESPKKKAKVE

SEQ ID NO: 948 - protein, 2094 aa, synthetic construct
MPAAKRVKLDGGDKKYSIGLDIGTNSVGWAVITDEYKVPSKKFKVLGNTDRHSIKKNLIGALLFDSGETAEATRLKRTARRRYTRRKNRICYLQEIFSNEMAKVDDSFFHRLEESFLVEEDKKHERHPIFGNIVDEVAYHEKYPTIYHLRKKLVDSTDKADLRLIYLALAHMIKFRGHFLIEGDLNPDNSDVDKLFIQLVQTYNQLFEENPINASGVDAKAILSARLSKSRRLENLIAQLPGEKKNGLFGNLIALSLGLTPNFKSNFDLAEDAKLQLSKDTYDDDLDNLLAQIGDQYADLFLAAKNLSDAILLSDILRVNTEITKAPLSASMIKRYDEHHQDLTLLKALVRQQLPEKYKEIFFDQSKNGYAGYIDGGASQEEFYKFIKPILEKMDGTEELLVKLNREDLLRKQRTFDNGSIPHQIHLGELHAILRRQEDFYPFLKDNREKIEKILTFRIPYYVGPLARGNSRFAWMTRKSEETITPWNFEEVVDKGASAQSFIERMTNFDKNLPNEKVLPKHSLLYEYFTVYNELTKVKYVTEGMRKPAFLSGEQKKAIVDLLFKTNRKVTVKQLKEDYFKKIECFDSVEISGVEDRFNASLGTYHDLLKIIKDKDFLDNEENEDILEDIVLTLTLFEDREMIEERLKTYAHLFDDKVMKQLKRRRYTGWGRLSRKLINGIRDKQSGKTILDFLKSDGFANRNFMQLIHDDSLTFKEDIQKAQVSGQGDSLHEHIANLAGSPAIKKGILQTVKVVDELVKVMGRHKPENIVIEMARENQTTQKGQKNSRERMKRIEEGIKELGSQILKEHPVENTQLQNEKLYLYYLQNGRDMYVDQELDINRLSDYDVDHIVPQSFLKDDSIDNKVLTRSDKARGKSDNVPSEEVVKKMKNYWRQLLNAKLITQRKFDNLTKAERGGLSELDKAGFIKRQLVETRQITKHVAQILDSRMNTKYDENDKLIREVKVITLKSKLVSDFRKDFQFYKVREINNYHHAHDAYLNAVVGTALIKKYPKLESEFVYGDYKVYDVRKMIAKSEQEIGKATAKYFFYSNIMNFFKTEITLANGEIRKRPLIETNGETGEIVWDKGRDFATVRKVLSMPQVNIVKKTEVQTGGFSKESILPKRNSDKLIARKKDWDPKKYGGFDSPTVAYSVLVVAKVEKGKSKKLKSVKELLGITIMERSSFEKNPIDFLEAKGYKEVKKDLIIKLPKYSLFELENGRKRMLASAGELQKGNELALPSKYVNFLYLASHYEKLKGSPEDNEQKQLFVEQHKHYLDEIIEQISEFSKRVILADANLDKVLSAYNKHRDKPIREQAENIIHLFTLTNLGAPAAFKYFDTTIDRKRYTSTKEVLDATLIHQSITGLYETRIDLSQLGGDGGEAAAKGSSGGSGGVLNLEEEYRLHEKPVPSSIDPSWLQLFPTVWAERAGMGLANQVPPVVVELRSGASPVAVRQYPMSKEAREGIRPHIQRFLDLGVLVPCQSPWNTPLLPVKKPGTNDYRPVQDLREINKRVQDIHPTVPNPYNLLSSLPPSHTWYSVLDLKDAFFCLKLHPNSQPLFAFEWRDPEKGNTGQLTWTRLPQGFKNSPTLFNEALHRDLAPFRALNPQVVLLQYVDDLLVAAPTYRDCKEGTQKLLQELSKLGYRVSAKKAQLCQKEVTYLGYLLKEGKRWLTPARKATVMKIPPPTTPRQVREFLGKAGFCRLFIPGFASLAAPLYPLTKPSIPFIWTEEHQKAFDRIKEALLSAPALALPDLTKPFTLYVDERAGVARGVLTQTLGPWRRPVAYLSKKLDPVASGWPTCLKAVAAVALLLKDADKLTLGQNVTVIASHSLESIVRQPPDRWMTNARMTHYQSLLLNERVSFAPPAVLNPATLLPVESEATPVHRCSEILAEETGTRRDLKDQPLPGVPAWYTDGSSFIAEGKRRAGAAIVDGKRTVWASSLPEGTSAQKAELVALTQALRLAEGKDINIYTDSRYAFATAHIHGAIYKQRGWLTSAGKDIKNKEEILALLEAIHLPKRVAIIHCPGHQKGNDPVATGNRRADEAAKQAALSTRVLAETTKPAGKRTADGSEFEKRTADGSEFESPKKKAKVE

SEQ ID NO: 949 - protein, 2090 aa, synthetic construct
MPAAKRVKLDGGDKKYSIGLDIGTNSVGWAVITDEYKVPSKKFKVLGNTDRHSIKKNLIGALLFDSGETAEATRLKRTARRRYTRRKNRICYLQEIFSNEMAKVDDSFFHRLEESFLVEEDKKHERHPIFGNIVDEVAYHEKYPTIYHLRKKLVDSTDKADLRLIYLALAHMIKFRGHFLIEGDLNPDNSDVDKLFIQLVQTYNQLFEENPINASGVDAKAILSARLSKSRRLENLIAQLPGEKKNGLFGNLIALSLGLTPNFKSNFDLAEDAKLQLSKDTYDDDLDNLLAQIGDQYADLFLAAKNLSDAILLSDILRVNTEITKAPLSASMIKRYDEHHQDLTLLKALVRQQLPEKYKEIFFDQSKNGYAGYIDGGASQEEFYKFIKPILEKMDGTEELLVKLNREDLLRKQRTFDNGSIPHQIHLGELHAILRRQEDFYPFLKDNREKIEKILTFRIPYYVGPLARGNSRFAWMTRKSEETITPWNFEEVVDKGASAQSFIERMTNFDKNLPNEKVLPKHSLLYEYFTVYNELTKVKYVTEGMRKPAFLSGEQKKAIVDLLFKTNRKVTVKQLKEDYFKKIECFDSVEISGVEDRFNASLGTYHDLLKIIKDKDFLDNEENEDILEDIVLTLTLFEDREMIEERLKTYAHLFDDKVMKQLKRRRYTGWGRLSRKLINGIRDKQSGKTILDFLKSDGFANRNFMQLIHDDSLTFKEDIQKAQVSGQGDSLHEHIANLAGSPAIKKGILQTVKVVDELVKVMGRHKPENIVIEMARENQTTQKGQKNSRERMKRIEEGIKELGSQILKEHPVENTQLQNEKLYLYYLQNGRDMYVDQELDINRLSDYDVDHIVPQSFLKDDSIDNKVLTRSDKARGKSDNVPSEEVVKKMKNYWRQLLNAKLITQRKFDNLTKAERGGLSELDKAGFIKRQLVETRQITKHVAQILDSRMNTKYDENDKLIREVKVITLKSKLVSDFRKDFQFYKVREINNYHHAHDAYLNAVVGTALIKKYPKLESEFVYGDYKVYDVRKMIAKSEQEIGKATAKYFFYSNIMNFFKTEITLANGEIRKRPLIETNGETGEIVWDKGRDFATVRKVLSMPQVNIVKKTEVQTGGFSKESILPKRNSDKLIARKKDWDPKKYGGFDSPTVAYSVLVVAKVEKGKSKKLKSVKELLGITIMERSSFEKNPIDFLEAKGYKEVKKDLIIKLPKYSLFELENGRKRMLASAGELQKGNELALPSKYVNFLYLASHYEKLKGSPEDNEQKQLFVEQHKHYLDEIIEQISEFSKRVILADANLDKVLSAYNKHRDKPIREQAENIIHLFTLTNLGAPAAFKYFDTTIDRKRYTSTKEVLDATLIHQSITGLYETRIDLSQLGGDGGPAPAPAPGGVLNLEEEYRLHEKPVPSSIDPSWLQLFPTVWAERAGMGLANQVPPVVVELRSGASPVAVRQYPMSKEAREGIRPHIQRFLDLGVLVPCQSPWNTPLLPVKKPGTNDYRPVQDLREINKRVQDIHPTVPNPYNLLSSLPPSHTWYSVLDLKDAFFCLKLHPNSQPLFAFEWRDPEKGNTGQLTWTRLPQGFKNSPTLFNEALHRDLAPFRALNPQVVLLQYVDDLLVAAPTYRDCKEGTQKLLQELSKLGYRVSAKKAQLCQKEVTYLGYLLKEGKRWLTPARKATVMKIPPPTTPRQVREFLGKAGFCRLFIPGFASLAAPLYPLTKPSIPFIWTEEHQKAFDRIKEALLSAPALALPDLTKPFTLYVDERAGVARGVLTQTLGPWRRPVAYLSKKLDPVASGWPTCLKAVAAVALLLKDADKLTLGQNVTVIASHSLESIVRQPPDRWMTNARMTHYQSLLLNERVSFAPPAVLNPATLLPVESEATPVHRCSEILAEETGTRRDLKDQPLPGVPAWYTDGSSFIAEGKRRAGAAIVDGKRTVWASSLPEGTSAQKAELVALTQALRLAEGKDINIYTDSRYAFATAHIHGAIYKQRGWLTSAGKDIKNKEEILALLEAIHLPKRVAIIHCPGHQKGNDPVATGNRRADEAAKQAALSTRVLAETTKPAGKRTADGSEFEKRTADGSEFESPKKKAKVE

SEQ ID NO: 950 - protein, 2089 aa, synthetic construct
MPAAKRVKLDGGDKKYSIGLDIGTNSVGWAVITDEYKVPSKKFKVLGNTDRHSIKKNLIGALLFDSGETAEATRLKRTARRRYTRRKNRICYLQEIFSNEMAKVDDSFFHRLEESFLVEEDKKHERHPIFGNIVDEVAYHEKYPTIYHLRKKLVDSTDKADLRLIYLALAHMIKFRGHFLIEGDLNPDNSDVDKLFIQLVQTYNQLFEENPINASGVDAKAILSARLSKSRRLENLIAQLPGEKKNGLFGNLIALSLGLTPNFKSNFDLAEDAKLQLSKDTYDDDLDNLLAQIGDQYADLFLAAKNLSDAILLSDILRVNTEITKAPLSASMIKRYDEHHQDLTLLKALVRQQLPEKYKEIFFDQSKNGYAGYIDGGASQEEFYKFIKPILEKMDGTEELLVKLNREDLLRKQRTFDNGSIPHQIHLGELHAILRRQEDFYPFLKDNREKIEKILTFRIPYYVGPLARGNSRFAWMTRKSEETITPWNFEEVVDKGASAQSFIERMTNFDKNLPNEKVLPKHSLLYEYFTVYNELTKVKYVTEGMRKPAFLSGEQKKAIVDLLFKTNRKVTVKQLKEDYFKKIECFDSVEISGVEDRFNASLGTYHDLLKIIKDKDFLDNEENEDILEDIVLTLTLFEDREMIEERLKTYAHLFDDKVMKQLKRRRYTGWGRLSRKLINGIRDKQSGKTILDFLKSDGFANRNFMQLIHDDSLTFKEDIQKAQVSGQGDSLHEHIANLAGSPAIKKGILQTVKVVDELVKVMGRHKPENIVIEMARENQTTQKGQKNSRERMKRIEEGIKELGSQILKEHPVENTQLQNEKLYLYYLQNGRDMYVDQELDINRLSDYDVDHIVPQSFLKDDSIDNKVLTRSDKARGKSDNVPSEEVVKKMKNYWRQLLNAKLITQRKFDNLTKAERGGLSELDKAGFIKRQLVETRQITKHVAQILDSRMNTKYDENDKLIREVKVITLKSKLVSDFRKDFQFYKVREINNYHHAHDAYLNAVVGTALIKKYPKLESEFVYGDYKVYDVRKMIAKSEQEIGKATAKYFFYSNIMNFFKTEITLANGEIRKRPLIETNGETGEIVWDKGRDFATVRKVLSMPQVNIVKKTEVQTGGFSKESILPKRNSDKLIARKKDWDPKKYGGFDSPTVAYSVLVVAKVEKGKSKKLKSVKELLGITIMERSSFEKNPIDFLEAKGYKEVKKDLIIKLPKYSLFELENGRKRMLASAGELQKGNELALPSKYVNFLYLASHYEKLKGSPEDNEQKQLFVEQHKHYLDEIIEQISEFSKRVILADANLDKVLSAYNKHRDKPIREQAENIIHLFTLTNLGAPAAFKYFDTTIDRKRYTSTKEVLDATLIHQSITGLYETRIDLSQLGGDGGGSSGGSGGVLNLEEEYRLHEKPVPSSIDPSWLQLFPTVWAERAGMGLANQVPPVVVELRSGASPVAVRQYPMSKEAREGIRPHIQRFLDLGVLVPCQSPWNTPLLPVKKPGTNDYRPVQDLREINKRVQDIHPTVPNPYNLLSSLPPSHTWYSVLDLKDAFFCLKLHPNSQPLFAFEWRDPEKGNTGQLTWTRLPQGFKNSPTLFNEALHRDLAPFRALNPQVVLLQYVDDLLVAAPTYRDCKEGTQKLLQELSKLGYRVSAKKAQLCQKEVTYLGYLLKEGKRWLTPARKATVMKIPPPTTPRQVREFLGKAGFCRLFIPGFASLAAPLYPLTKPSIPFIWTEEHQKAFDRIKEALLSAPALALPDLTKPFTLYVDERAGVARGVLTQTLGPWRRPVAYLSKKLDPVASGWPTCLKAVAAVALLLKDADKLTLGQNVTVIASHSLESIVRQPPDRWMTNARMTHYQSLLLNERVSFAPPAVLNPATLLPVESEATPVHRCSEILAEETGTRRDLKDQPLPGVPAWYTDGSSFIAEGKRRAGAAIVDGKRTVWASSLPEGTSAQKAELVALTQALRLAEGKDINIYTDSRYAFATAHIHGAIYKQRGWLTSAGKDIKNKEEILALLEAIHLPKRVAIIHCPGHQKGNDPVATGNRRADEAAKQAALSTRVLAETTKPAGKRTADGSEFEKRTADGSEFESPKKKAKVE

SEQ ID NO: 951 - protein, 2131 aa, synthetic construct
MPAAKRVKLDGGDKKYSIGLDIGTNSVGWAVITDEYKVPSKKFKVLGNTDRHSIKKNLIGALLFDSGETAEATRLKRTARRRYTRRKNRICYLQEIFSNEMAKVDDSFFHRLEESFLVEEDKKHERHPIFGNIVDEVAYHEKYPTIYHLRKKLVDSTDKADLRLIYLALAHMIKFRGHFLIEGDLNPDNSDVDKLFIQLVQTYNQLFEENPINASGVDAKAILSARLSKSRRLENLIAQLPGEKKNGLFGNLIALSLGLTPNFKSNFDLAEDAKLQLSKDTYDDDLDNLLAQIGDQYADLFLAAKNLSDAILLSDILRVNTEITKAPLSASMIKRYDEHHQDLTLLKALVRQQLPEKYKEIFFDQSKNGYAGYIDGGASQEEFYKFIKPILEKMDGTEELLVKLNREDLLRKQRTFDNGSIPHQIHLGELHAILRRQEDFYPFLKDNREKIEKILTFRIPYYVGPLARGNSRFAWMTRKSEETITPWNFEEVVDKGASAQSFIERMTNFDKNLPNEKVLPKHSLLYEYFTVYNELTKVKYVTEGMRKPAFLSGEQKKAIVDLLFKTNRKVTVKQLKEDYFKKIECFDSVEISGVEDRFNASLGTYHDLLKIIKDKDFLDNEENEDILEDIVLTLTLFEDREMIEERLKTYAHLFDDKVMKQLKRRRYTGWGRLSRKLINGIRDKQSGKTILDFLKSDGFANRNFMQLIHDDSLTFKEDIQKAQVSGQGDSLHEHIANLAGSPAIKKGILQTVKVVDELVKVMGRHKPENIVIEMARENQTTQKGQKNSRERMKRIEEGIKELGSQILKEHPVENTQLQNEKLYLYYLQNGRDMYVDQELDINRLSDYDVDHIVPQSFLKDDSIDNKVLTRSDKARGKSDNVPSEEVVKKMKNYWRQLLNAKLITQRKFDNLTKAERGGLSELDKAGFIKRQLVETRQITKHVAQILDSRMNTKYDENDKLIREVKVITLKSKLVSDFRKDFQFYKVREINNYHHAHDAYLNAVVGTALIKKYPKLESEFVYGDYKVYDVRKMIAKSEQEIGKATAKYFFYSNIMNFFKTEITLANGEIRKRPLIETNGETGEIVWDKGRDFATVRKVLSMPQVNIVKKTEVQTGGFSKESILPKRNSDKLIARKKDWDPKKYGGFDSPTVAYSVLVVAKVEKGKSKKLKSVKELLGITIMERSSFEKNPIDFLEAKGYKEVKKDLIIKLPKYSLFELENGRKRMLASAGELQKGNELALPSKYVNFLYLASHYEKLKGSPEDNEQKQLFVEQHKHYLDEIIEQISEFSKRVILADANLDKVLSAYNKHRDKPIREQAENIIHLFTLTNLGAPAAFKYFDTTIDRKRYTSTKEVLDATLIHQSITGLYETRIDLSQLGGDGGAEAAAKEAAAKEAAAKEAAAKALEAEAAAKEAAAKEAAAKEAAAKAGGTLNIEDEYRLHETSKEPDVPLGSTWLSDFPQAWAETGGMGLAVRQAPLIIPLKATSTPVSIKQYPMSQEARLGIKPHIQRLLDQGILVPCQSPWNTPLLPVKKPGTNDYRPVQDLREVNKRVEDIHPTVPNPYNLLSGLPPSHQWYTVLDLKDAFFCLRLHPTSQPLFAFEWRDPEMGISGQLTWTRLPQGFKNSPTLFDEALHRDLADFRIQHPDLILLQYVDDLLLAATSEQDCQRGTRALLQTLGNLGYRASAKKAQICQKQVKYLGYLLKEGQRWLTEARKETVMGQPTPKTPRQLREFLGTAGFCRLWIPGFAEMAAPLYPLTKTGTLFNWGPDQQKAYQEIKQALLTAPALGLPDLTKPFELFVDEKQGYAKGVLTQKLGPWRRPVAYLSKKLDPVAAGWPPCLRMVAAIAVLTKDAGKLTMGQPLVILAPHAVEALVKQPPDRWLSNARMTHYQAMLLDTDRVQFGPVVALNPATLLPLPEKEAPHDCLEILAETHGTRPDLTDQPIPDADYTWYTDGSSFLQEGQRRAGAAVTTETEVIWARALPAGTSAQRAELIALTQALKMAEGKKLNVYTDSRYAFATAHVHGEIYRRRGLLTSEGREIKNKNEILALLKALFLPKRLSIIHCPGHQKGNSAEARGNRMADQAAREAAMKAVLETSTLLAGKRTADGSEFEKRTADGSEFESPKKKAKVE

SEQ ID NO: 952 - protein, 2118 aa, synthetic construct
MPAAKRVKLDGGDKKYSIGLDIGTNSVGWAVITDEYKVPSKKFKVLGNTDRHSIKKNLIGALLFDSGETAEATRLKRTARRRYTRRKNRICYLQEIFSNEMAKVDDSFFHRLEESFLVEEDKKHERHPIFGNIVDEVAYHEKYPTIYHLRKKLVDSTDKADLRLIYLALAHMIKFRGHFLIEGDLNPDNSDVDKLFIQLVQTYNQLFEENPINASGVDAKAILSARLSKSRRLENLIAQLPGEKKNGLFGNLIALSLGLTPNFKSNFDLAEDAKLQLSKDTYDDDLDNLLAQIGDQYADLFLAAKNLSDAILLSDILRVNTEITKAPLSASMIKRYDEHHQDLTLLKALVRQQLPEKYKEIFFDQSKNGYAGYIDGGASQEEFYKFIKPILEKMDGTEELLVKLNREDLLRKQRTFDNGSIPHQIHLGELHAILRRQEDFYPFLKDNREKIEKILTFRIPYYVGPLARGNSRFAWMTRKSEETITPWNFEEVVDKGASAQSFIERMTNFDKNLPNEKVLPKHSLLYEYFTVYNELTKVKYVTEGMRKPAFLSGEQKKAIVDLLFKTNRKVTVKQLKEDYFKKIECFDSVEISGVEDRFNASLGTYHDLLKIIKDKDFLDNEENEDILEDIVLTLTLFEDREMIEERLKTYAHLFDDKVMKQLKRRRYTGWGRLSRKLINGIRDKQSGKTILDFLKSDGFANRNFMQLIHDDSLTFKEDIQKAQVSGQGDSLHEHIANLAGSPAIKKGILQTVKVVDELVKVMGRHKPENIVIEMARENQTTQKGQKNSRERMKRIEEGIKELGSQILKEHPVENTQLQNEKLYLYYLQNGRDMYVDQELDINRLSDYDVDHIVPQSFLKDDSIDNKVLTRSDKARGKSDNVPSEEVVKKMKNYWRQLLNAKLITQRKFDNLTKAERGGLSELDKAGFIKRQLVETRQITKHVAQILDSRMNTKYDENDKLIREVKVITLKSKLVSDFRKDFQFYKVREINNYHHAHDAYLNAVVGTALIKKYPKLESEFVYGDYKVYDVRKMIAKSEQEIGKATAKYFFYSNIMNFFKTEITLANGEIRKRPLIETNGETGEIVWDKGRDFATVRKVLSMPQVNIVKKTEVQTGGFSKESILPKRNSDKLIARKKDWDPKKYGGFDSPTVAYSVLVVAKVEKGKSKKLKSVKELLGITIMERSSFEKNPIDFLEAKGYKEVKKDLIIKLPKYSLFELENGRKRMLASAGELQKGNELALPSKYVNFLYLASHYEKLKGSPEDNEQKQLFVEQHKHYLDEIIEQISEFSKRVILADANLDKVLSAYNKHRDKPIREQAENIIHLFTLTNLGAPAAFKYFDTTIDRKRYTSTKEVLDATLIHQSITGLYETRIDLSQLGGDGGSGGSSGGSSGSETPGTSESATPESSGGSSGGSSGGTLNIEDEYRLHETSKEPDVPLGSTWLSDFPQAWAETGGMGLAVRQAPLIIPLKATSTPVSIKQYPMSQEARLGIKPHIQRLLDQGILVPCQSPWNTPLLPVKKPGTNDYRPVQDLREVNKRVEDIHPTVPNPYNLLSGLPPSHQWYTVLDLKDAFFCLRLHPTSQPLFAFEWRDPEMGISGQLTWTRLPQGFKNSPTLFDEALHRDLADFRIQHPDLILLQYVDDLLLAATSEQDCQRGTRALLQTLGNLGYRASAKKAQICQKQVKYLGYLLKEGQRWLTEARKETVMGQPTPKTPRQLREFLGTAGFCRLWIPGFAEMAAPLYPLTKTGTLFNWGPDQQKAYQEIKQALLTAPALGLPDLTKPFELFVDEKQGYAKGVLTQKLGPWRRPVAYLSKKLDPVAAGWPPCLRMVAAIAVLTKDAGKLTMGQPLVILAPHAVEALVKQPPDRWLSNARMTHYQAMLLDTDRVQFGPVVALNPATLLPLPEKEAPHDCLEILAETHGTRPDLTDQPIPDADYTWYTDGSSFLQEGQRRAGAAVTTETEVIWARALPAGTSAQRAELIALTQALKMAEGKKLNVYTDSRYAFATAHVHGEIYRRRGLLTSEGREIKNKNEILALLKALFLPKRLSIIHCPGHQKGNSAEARGNRMADQAAREAAMKAVLETSTLLAGKRTADGSEFEKRTADGSEFESPKKKAKVE

SEQ ID NO: 953 - protein, 2105 aa, synthetic construct
MPAAKRVKLDGGDKKYSIGLDIGTNSVGWAVITDEYKVPSKKFKVLGNTDRHSIKKNLIGALLFDSGETAEATRLKRTARRRYTRRKNRICYLQEIFSNEMAKVDDSFFHRLEESFLVEEDKKHERHPIFGNIVDEVAYHEKYPTIYHLRKKLVDSTDKADLRLIYLALAHMIKFRGHFLIEGDLNPDNSDVDKLFIQLVQTYNQLFEENPINASGVDAKAILSARLSKSRRLENLIAQLPGEKKNGLFGNLIALSLGLTPNFKSNFDLAEDAKLQLSKDTYDDDLDNLLAQIGDQYADLFLAAKNLSDAILLSDILRVNTEITKAPLSASMIKRYDEHHQDLTLLKALVRQQLPEKYKEIFFDQSKNGYAGYIDGGASQEEFYKFIKPILEKMDGTEELLVKLNREDLLRKQRTFDNGSIPHQIHLGELHAILRRQEDFYPFLKDNREKIEKILTFRIPYYVGPLARGNSRFAWMTRKSEETITPWNFEEVVDKGASAQSFIERMTNFDKNLPNEKVLPKHSLLYEYFTVYNELTKVKYVTEGMRKPAFLSGEQKKAIVDLLFKTNRKVTVKQLKEDYFKKIECFDSVEISGVEDRFNASLGTYHDLLKIIKDKDFLDNEENEDILEDIVLTLTLFEDREMIEERLKTYAHLFDDKVMKQLKRRRYTGWGRLSRKLINGIRDKQSGKTILDFLKSDGFANRNFMQLIHDDSLTFKEDIQKAQVSGQGDSLHEHIANLAGSPAIKKGILQTVKVVDELVKVMGRHKPENIVIEMARENQTTQKGQKNSRERMKRIEEGIKELGSQILKEHPVENTQLQNEKLYLYYLQNGRDMYVDQELDINRLSDYDVDHIVPQSFLKDDSIDNKVLTRSDKARGKSDNVPSEEVVKKMKNYWRQLLNAKLITQRKFDNLTKAERGGLSELDKAGFIKRQLVETRQITKHVAQILDSRMNTKYDENDKLIREVKVITLKSKLVSDFRKDFQFYKVREINNYHHAHDAYLNAVVGTALIKKYPKLESEFVYGDYKVYDVRKMIAKSEQEIGKATAKYFFYSNIMNFFKTEITLANGEIRKRPLIETNGETGEIVWDKGRDFATVRKVLSMPQVNIVKKTEVQTGGFSKESILPKRNSDKLIARKKDWDPKKYGGFDSPTVAYSVLVVAKVEKGKSKKLKSVKELLGITIMERSSFEKNPIDFLEAKGYKEVKKDLIIKLPKYSLFELENGRKRMLASAGELQKGNELALPSKYVNFLYLASHYEKLKGSPEDNEQKQLFVEQHKHYLDEIIEQISEFSKRVILADANLDKVLSAYNKHRDKPIREQAENIIHLFTLTNLGAPAAFKYFDTTIDRKRYTSTKEVLDATLIHQSITGLYETRIDLSQLGGDGGGGGGSGGGGSGGGGSGGGGSGGTLNIEDEYRLHETSKEPDVPLGSTWLSDFPQAWAETGGMGLAVRQAPLIIPLKATSTPVSIKQYPMSQEARLGIKPHIQRLLDQGILVPCQSPWNTPLLPVKKPGTNDYRPVQDLREVNKRVEDIHPTVPNPYNLLSGLPPSHQWYTVLDLKDAFFCLRLHPTSQPLFAFEWRDPEMGISGQLTWTRLPQGFKNSPTLFDEALHRDLADFRIQHPDLILLQYVDDLLLAATSEQDCQRGTRALLQTLGNLGYRASAKKAQICQKQVKYLGYLLKEGQRWLTEARKETVMGQPTPKTPRQLREFLGTAGFCRLWIPGFAEMAAPLYPLTKTGTLFNWGPDQQKAYQEIKQALLTAPALGLPDLTKPFELFVDEKQGYAKGVLTQKLGPWRRPVAYLSKKLDPVAAGWPPCLRMVAAIAVLTKDAGKLTMGQPLVILAPHAVEALVKQPPDRWLSNARMTHYQAMLLDTDRVQFGPVVALNPATLLPLPEKEAPHDCLEILAETHGTRPDLTDQPIPDADYTWYTDGSSFLQEGQRRAGAAVTTETEVIWARALPAGTSAQRAELIALTQALKMAEGKKLNVYTDSRYAFATAHVHGEIYRRRGLLTSEGREIKNKNEILALLKALFLPKRLSIIHCPGHQKGNSAEARGNRMADQAAREAAMKAVLETSTLLAGKRTADGSEFEKRTADGSEFESPKKKAKVE

SEQ ID NO: 954 - protein, 2093 aa, synthetic construct
MPAAKRVKLDGGDKKYSIGLDIGTNSVGWAVITDEYKVPSKKFKVLGNTDRHSIKKNLIGALLFDSGETAEATRLKRTARRRYTRRKNRICYLQEIFSNEMAKVDDSFFHRLEESFLVEEDKKHERHPIFGNIVDEVAYHEKYPTIYHLRKKLVDSTDKADLRLIYLALAHMIKFRGHFLIEGDLNPDNSDVDKLFIQLVQTYNQLFEENPINASGVDAKAILSARLSKSRRLENLIAQLPGEKKNGLFGNLIALSLGLTPNFKSNFDLAEDAKLQLSKDTYDDDLDNLLAQIGDQYADLFLAAKNLSDAILLSDILRVNTEITKAPLSASMIKRYDEHHQDLTLLKALVRQQLPEKYKEIFFDQSKNGYAGYIDGGASQEEFYKFIKPILEKMDGTEELLVKLNREDLLRKQRTFDNGSIPHQIHLGELHAILRRQEDFYPFLKDNREKIEKILTFRIPYYVGPLARGNSRFAWMTRKSEETITPWNFEEVVDKGASAQSFIERMTNFDKNLPNEKVLPKHSLLYEYFTVYNELTKVKYVTEGMRKPAFLSGEQKKAIVDLLFKTNRKVTVKQLKEDYFKKIECFDSVEISGVEDRFNASLGTYHDLLKIIKDKDFLDNEENEDILEDIVLTLTLFEDREMIEERLKTYAHLFDDKVMKQLKRRRYTGWGRLSRKLINGIRDKQSGKTILDFLKSDGFANRNFMQLIHDDSLTFKEDIQKAQVSGQGDSLHEHIANLAGSPAIKKGILQTVKVVDELVKVMGRHKPENIVIEMARENQTTQKGQKNSRERMKRIEEGIKELGSQILKEHPVENTQLQNEKLYLYYLQNGRDMYVDQELDINRLSDYDVDHIVPQSFLKDDSIDNKVLTRSDKARGKSDNVPSEEVVKKMKNYWRQLLNAKLITQRKFDNLTKAERGGLSELDKAGFIKRQLVETRQITKHVAQILDSRMNTKYDENDKLIREVKVITLKSKLVSDFRKDFQFYKVREINNYHHAHDAYLNAVVGTALIKKYPKLESEFVYGDYKVYDVRKMIAKSEQEIGKATAKYFFYSNIMNFFKTEITLANGEIRKRPLIETNGETGEIVWDKGRDFATVRKVLSMPQVNIVKKTEVQTGGFSKESILPKRNSDKLIARKKDWDPKKYGGFDSPTVAYSVLVVAKVEKGKSKKLKSVKELLGITIMERSSFEKNPIDFLEAKGYKEVKKDLIIKLPKYSLFELENGRKRMLASAGELQKGNELALPSKYVNFLYLASHYEKLKGSPEDNEQKQLFVEQHKHYLDEIIEQISEFSKRVILADANLDKVLSAYNKHRDKPIREQAENIIHLFTLTNLGAPAAFKYFDTTIDRKRYTSTKEVLDATLIHQSITGLYETRIDLSQLGGDGGGSSEAAAKGGTLNIEDEYRLHETSKEPDVPLGSTWLSDFPQAWAETGGMGLAVRQAPLIIPLKATSTPVSIKQYPMSQEARLGIKPHIQRLLDQGILVPCQSPWNTPLLPVKKPGTNDYRPVQDLREVNKRVEDIHPTVPNPYNLLSGLPPSHQWYTVLDLKDAFFCLRLHPTSQPLFAFEWRDPEMGISGQLTWTRLPQGFKNSPTLFDEALHRDLADFRIQHPDLILLQYVDDLLLAATSEQDCQRGTRALLQTLGNLGYRASAKKAQICQKQVKYLGYLLKEGQRWLTEARKETVMGQPTPKTPRQLREFLGTAGFCRLWIPGFAEMAAPLYPLTKTGTLFNWGPDQQKAYQEIKQALLTAPALGLPDLTKPFELFVDEKQGYAKGVLTQKLGPWRRPVAYLSKKLDPVAAGWPPCLRMVAAIAVLTKDAGKLTMGQPLVILAPHAVEALVKQPPDRWLSNARMTHYQAMLLDTDRVQFGPVVALNPATLLPLPEKEAPHDCLEILAETHGTRPDLTDQPIPDADYTWYTDGSSFLQEGQRRAGAAVTTETEVIWARALPAGTSAQRAELIALTQALKMAEGKKLNVYTDSRYAFATAHVHGEIYRRRGLLTSEGREIKNKNEILALLKALFLPKRLSIIHCPGHQKGNSAEARGNRMADQAAREAAMKAVLETSTLLAGKRTADGSEFEKRTADGSEFESPKKKAKVE

SEQ ID NO: 955 - protein, 2096 aa, synthetic construct
MPAAKRVKLDGGDKKYSIGLDIGTNSVGWAVITDEYKVPSKKFKVLGNTDRHSIKKNLIGALLFDSGETAEATRLKRTARRRYTRRKNRICYLQEIFSNEMAKVDDSFFHRLEESFLVEEDKKHERHPIFGNIVDEVAYHEKYPTIYHLRKKLVDSTDKADLRLIYLALAHMIKFRGHFLIEGDLNPDNSDVDKLFIQLVQTYNQLFEENPINASGVDAKAILSARLSKSRRLENLIAQLPGEKKNGLFGNLIALSLGLTPNFKSNFDLAEDAKLQLSKDTYDDDLDNLLAQIGDQYADLFLAAKNLSDAILLSDILRVNTEITKAPLSASMIKRYDEHHQDLTLLKALVRQQLPEKYKEIFFDQSKNGYAGYIDGGASQEEFYKFIKPILEKMDGTEELLVKLNREDLLRKQRTFDNGSIPHQIHLGELHAILRRQEDFYPFLKDNREKIEKILTFRIPYYVGPLARGNSRFAWMTRKSEETITPWNFEEVVDKGASAQSFIERMTNFDKNLPNEKVLPKHSLLYEYFTVYNELTKVKYVTEGMRKPAFLSGEQKKAIVDLLFKTNRKVTVKQLKEDYFKKIECFDSVEISGVEDRFNASLGTYHDLLKIIKDKDFLDNEENEDILEDIVLTLTLFEDREMIEERLKTYAHLFDDKVMKQLKRRRYTGWGRLSRKLINGIRDKQSGKTILDFLKSDGFANRNFMQLIHDDSLTFKEDIQKAQVSGQGDSLHEHIANLAGSPAIKKGILQTVKVVDELVKVMGRHKPENIVIEMARENQTTQKGQKNSRERMKRIEEGIKELGSQILKEHPVENTQLQNEKLYLYYLQNGRDMYVDQELDINRLSDYDVDHIVPQSFLKDDSIDNKVLTRSDKARGKSDNVPSEEVVKKMKNYWRQLLNAKLITQRKFDNLTKAERGGLSELDKAGFIKRQLVETRQITKHVAQILDSRMNTKYDENDKLIREVKVITLKSKLVSDFRKDFQFYKVREINNYHHAHDAYLNAVVGTALIKKYPKLESEFVYGDYKVYDVRKMIAKSEQEIGKATAKYFFYSNIMNFFKTEITLANGEIRKRPLIETNGETGEIVWDKGRDFATVRKVLSMPQVNIVKKTEVQTGGFSKESILPKRNSDKLIARKKDWDPKKYGGFDSPTVAYSVLVVAKVEKGKSKKLKSVKELLGITIMERSSFEKNPIDFLEAKGYKEVKKDLIIKLPKYSLFELENGRKRMLASAGELQKGNELALPSKYVNFLYLASHYEKLKGSPEDNEQKQLFVEQHKHYLDEIIEQISEFSKRVILADANLDKVLSAYNKHRDKPIREQAENIIHLFTLTNLGAPAAFKYFDTTIDRKRYTSTKEVLDATLIHQSITGLYETRIDLSQLGGDGGEAAAKGGGGSSGGTLNIEDEYRLHETSKEPDVPLGSTWLSDFPQAWAETGGMGLAVRQAPLIIPLKATSTPVSIKQYPMSQEARLGIKPHIQRLLDQGILVPCQSPWNTPLLPVKKPGTNDYRPVQDLREVNKRVEDIHPTVPNPYNLLSGLPPSHQWYTVLDLKDAFFCLRLHPTSQPLFAFEWRDPEMGISGQLTWTRLPQGFKNSPTLFDEALHRDLADFRIQHPDLILLQYVDDLLLAATSEQDCQRGTRALLQTLGNLGYRASAKKAQICQKQVKYLGYLLKEGQRWLTEARKETVMGQPTPKTPRQLREFLGTAGFCRLWIPGFAEMAAPLYPLTKTGTLFNWGPDQQKAYQEIKQALLTAPALGLPDLTKPFELFVDEKQGYAKGVLTQKLGPWRRPVAYLSKKLDPVAAGWPPCLRMVAAIAVLTKDAGKLTMGQPLVILAPHAVEALVKQPPDRWLSNARMTHYQAMLLDTDRVQFGPVVALNPATLLPLPEKEAPHDCLEILAETHGTRPDLTDQPIPDADYTWYTDGSSFLQEGQRRAGAAVTTETEVIWARALPAGTSAQRAELIALTQALKMAEGKKLNVYTDSRYAFATAHVHGEIYRRRGLLTSEGREIKNKNEILALLKALFLPKRLSIIHCPGHQKGNSAEARGNRMADQAAREAAMKAVLETSTLLAGKRTADGSEFEKRTADGSEFESPKKKAKVE

SEQ ID NO: 956 - protein, 2092 aa, synthetic construct
MPAAKRVKLDGGDKKYSIGLDIGTNSVGWAVITDEYKVPSKKFKVLGNTDRHSIKKNLIGALLFDSGETAEATRLKRTARRRYTRRKNRICYLQEIFSNEMAKVDDSFFHRLEESFLVEEDKKHERHPIFGNIVDEVAYHEKYPTIYHLRKKLVDSTDKADLRLIYLALAHMIKFRGHFLIEGDLNPDNSDVDKLFIQLVQTYNQLFEENPINASGVDAKAILSARLSKSRRLENLIAQLPGEKKNGLFGNLIALSLGLTPNFKSNFDLAEDAKLQLSKDTYDDDLDNLLAQIGDQYADLFLAAKNLSDAILLSDILRVNTEITKAPLSASMIKRYDEHHQDLTLLKALVRQQLPEKYKEIFFDQSKNGYAGYIDGGASQEEFYKFIKPILEKMDGTEELLVKLNREDLLRKQRTFDNGSIPHQIHLGELHAILRRQEDFYPFLKDNREKIEKILTFRIPYYVGPLARGNSRFAWMTRKSEETITPWNFEEVVDKGASAQSFIERMTNFDKNLPNEKVLPKHSLLYEYFTVYNELTKVKYVTEGMRKPAFLSGEQKKAIVDLLFKTNRKVTVKQLKEDYFKKIECFDSVEISGVEDRFNASLGTYHDLLKIIKDKDFLDNEENEDILEDIVLTLTLFEDREMIEERLKTYAHLFDDKVMKQLKRRRYTGWGRLSRKLINGIRDKQSGKTILDFLKSDGFANRNFMQLIHDDSLTFKEDIQKAQVSGQGDSLHEHIANLAGSPAIKKGILQTVKVVDELVKVMGRHKPENIVIEMARENQTTQKGQKNSRERMKRIEEGIKELGSQILKEHPVENTQLQNEKLYLYYLQNGRDMYVDQELDINRLSDYDVDHIVPQSFLKDDSIDNKVLTRSDKARGKSDNVPSEEVVKKMKNYWRQLLNAKLITQRKFDNLTKAERGGLSELDKAGFIKRQLVETRQITKHVAQILDSRMNTKYDENDKLIREVKVITLKSKLVSDFRKDFQFYKVREINNYHHAHDAYLNAVVGTALIKKYPKLESEFVYGDYKVYDVRKMIAKSEQEIGKATAKYFFYSNIMNFFKTEITLANGEIRKRPLIETNGETGEIVWDKGRDFATVRKVLSMPQVNIVKKTEVQTGGFSKESILPKRNSDKLIARKKDWDPKKYGGFDSPTVAYSVLVVAKVEKGKSKKLKSVKELLGITIMERSSFEKNPIDFLEAKGYKEVKKDLIIKLPKYSLFELENGRKRMLASAGELQKGNELALPSKYVNFLYLASHYEKLKGSPEDNEQKQLFVEQHKHYLDEIIEQISEFSKRVILADANLDKVLSAYNKHRDKPIREQAENIIHLFTLTNLGAPAAFKYFDTTIDRKRYTSTKEVLDATLIHQSITGLYETRIDLSQLGGDGGGGGGGGGGGTLNIEDEYRLHETSKEPDVPLGSTWLSDFPQAWAETGGMGLAVRQAPLIIPLKATSTPVSIKQYPMSQEARLGIKPHIQRLLDQGILVPCQSPWNTPLLPVKKPGTNDYRPVQDLREVNKRVEDIHPTVPNPYNLLSGLPPSHQWYTVLDLKDAFFCLRLHPTSQPLFAFEWRDPEMGISGQLTWTRLPQGFKNSPTLFDEALHRDLADFRIQHPDLILLQYVDDLLLAATSEQDCQRGTRALLQTLGNLGYRASAKKAQICQKQVKYLGYLLKEGQRWLTEARKETVMGQPTPKTPRQLREFLGTAGFCRLWIPGFAEMAAPLYPLTKTGTLFNWGPDQQKAYQEIKQALLTAPALGLPDLTKPFELFVDEKQGYAKGVLTQKLGPWRRPVAYLSKKLDPVAAGWPPCLRMVAAIAVLTKDAGKLTMGQPLVILAPHAVEALVKQPPDRWLSNARMTHYQAMLLDTDRVQFGPVVALNPATLLPLPEKEAPHDCLEILAETHGTRPDLTDQPIPDADYTWYTDGSSFLQEGQRRAGAAVTTETEVIWARALPAGTSAQRAELIALTQALKMAEGKKLNVYTDSRYAFATAHVHGEIYRRRGLLTSEGREIKNKNEILALLKALFLPKRLSIIHCPGHQKGNSAEARGNRMADQAAREAAMKAVLETSTLLAGKRTADGSEFEKRTADGSEFESPKKKAKVE

SEQ ID NO: 957 - protein, 2094 aa, synthetic construct
MPAAKRVKLDGGDKKYSIGLDIGTNSVGWAVITDEYKVPSKKFKVLGNTDRHSIKKNLIGALLFDSGETAEATRLKRTARRRYTRRKNRICYLQEIFSNEMAKVDDSFFHRLEESFLVEEDKKHERHPIFGNIVDEVAYHEKYPTIYHLRKKLVDSTDKADLRLIYLALAHMIKFRGHFLIEGDLNPDNSDVDKLFIQLVQTYNQLFEENPINASGVDAKAILSARLSKSRRLENLIAQLPGEKKNGLFGNLIALSLGLTPNFKSNFDLAEDAKLQLSKDTYDDDLDNLLAQIGDQYADLFLAAKNLSDAILLSDILRVNTEITKAPLSASMIKRYDEHHQDLTLLKALVRQQLPEKYKEIFFDQSKNGYAGYIDGGASQEEFYKFIKPILEKMDGTEELLVKLNREDLLRKQRTFDNGSIPHQIHLGELHAILRRQEDFYPFLKDNREKIEKILTFRIPYYVGPLARGNSRFAWMTRKSEETITPWNFEEVVDKGASAQSFIERMTNFDKNLPNEKVLPKHSLLYEYFTVYNELTKVKYVTEGMRKPAFLSGEQKKAIVDLLFKTNRKVTVKQLKEDYFKKIECFDSVEISGVEDRFNASLGTYHDLLKIIKDKDFLDNEENEDILEDIVLTLTLFEDREMIEERLKTYAHLFDDKVMKQLKRRRYTGWGRLSRKLINGIRDKQSGKTILDFLKSDGFANRNFMQLIHDDSLTFKEDIQKAQVSGQGDSLHEHIANLAGSPAIKKGILQTVKVVDELVKVMGRHKPENIVIEMARENQTTQKGQKNSRERMKRIEEGIKELGSQILKEHPVENTQLQNEKLYLYYLQNGRDMYVDQELDINRLSDYDVDHIVPQSFLKDDSIDNKVLTRSDKARGKSDNVPSEEVVKKMKNYWRQLLNAKLITQRKFDNLTKAERGGLSELDKAGFIKRQLVETRQITKHVAQILDSRMNTKYDENDKLIREVKVITLKSKLVSDFRKDFQFYKVREINNYHHAHDAYLNAVVGTALIKKYPKLESEFVYGDYKVYDVRKMIAKSEQEIGKATAKYFFYSNIMNFFKTEITLANGEIRKRPLIETNGETGEIVWDKGRDFATVRKVLSMPQVNIVKKTEVQTGGFSKESILPKRNSDKLIARKKDWDPKKYGGFDSPTVAYSVLVVAKVEKGKSKKLKSVKELLGITIMERSSFEKNPIDFLEAKGYKEVKKDLIIKLPKYSLFELENGRKRMLASAGELQKGNELALPSKYVNFLYLASHYEKLKGSPEDNEQKQLFVEQHKHYLDEIIEQISEFSKRVILADANLDKVLSAYNKHRDKPIREQAENIIHLFTLTNLGAPAAFKYFDTTIDRKRYTSTKEVLDATLIHQSITGLYETRIDLSQLGGDGGGSSGGSGGGGGTLNIEDEYRLHETSKEPDVPLGSTWLSDFPQAWAETGGMGLAVRQAPLIIPLKATSTPVSIKQYPMSQEARLGIKPHIQRLLDQGILVPCQSPWNTPLLPVKKPGTNDYRPVQDLREVNKRVEDIHPTVPNPYNLLSGLPPSHQWYTVLDLKDAFFCLRLHPTSQPLFAFEWRDPEMGISGQLTWTRLPQGFKNSPTLFDEALHRDLADFRIQHPDLILLQYVDDLLLAATSEQDCQRGTRALLQTLGNLGYRASAKKAQICQKQVKYLGYLLKEGQRWLTEARKETVMGQPTPKTPRQLREFLGTAGFCRLWIPGFAEMAAPLYPLTKTGTLFNWGPDQQKAYQEIKQALLTAPALGLPDLTKPFELFVDEKQGYAKGVLTQKLGPWRRPVAYLSKKLDPVAAGWPPCLRMVAAIAVLTKDAGKLTMGQPLVILAPHAVEALVKQPPDRWLSNARMTHYQAMLLDTDRVQFGPVVALNPATLLPLPEKEAPHDCLEILAETHGTRPDLTDQPIPDADYTWYTDGSSFLQEGQRRAGAAVTTETEVIWARALPAGTSAQRAELIALTQALKMAEGKKLNVYTDSRYAFATAHVHGEIYRRRGLLTSEGREIKNKNEILALLKALFLPKRLSIIHCPGHQKGNSAEARGNRMADQAAREAAMKAVLETSTLLAGKRTADGSEFEKRTADGSEFESPKKKAKVE

SEQ ID NO: 958 - protein, 2103 aa, synthetic construct
MPAAKRVKLDGGDKKYSIGLDIGTNSVGWAVITDEYKVPSKKFKVLGNTDRHSIKKNLIGALLFDSGETAEATRLKRTARRRYTRRKNRICYLQEIFSNEMAKVDDSFFHRLEESFLVEEDKKHERHPIFGNIVDEVAYHEKYPTIYHLRKKLVDSTDKADLRLIYLALAHMIKFRGHFLIEGDLNPDNSDVDKLFIQLVQTYNQLFEENPINASGVDAKAILSARLSKSRRLENLIAQLPGEKKNGLFGNLIALSLGLTPNFKSNFDLAEDAKLQLSKDTYDDDLDNLLAQIGDQYADLFLAAKNLSDAILLSDILRVNTEITKAPLSASMIKRYDEHHQDLTLLKALVRQQLPEKYKEIFFDQSKNGYAGYIDGGASQEEFYKFIKPILEKMDGTEELLVKLNREDLLRKQRTFDNGSIPHQIHLGELHAILRRQEDFYPFLKDNREKIEKILTFRIPYYVGPLARGNSRFAWMTRKSEETITPWNFEEVVDKGASAQSFIERMTNFDKNLPNEKVLPKHSLLYEYFTVYNELTKVKYVTEGMRKPAFLSGEQKKAIVDLLFKTNRKVTVKQLKEDYFKKIECFDSVEISGVEDRFNASLGTYHDLLKIIKDKDFLDNEENEDILEDIVLTLTLFEDREMIEERLKTYAHLFDDKVMKQLKRRRYTGWGRLSRKLINGIRDKQSGKTILDFLKSDGFANRNFMQLIHDDSLTFKEDIQKAQVSGQGDSLHEHIANLAGSPAIKKGILQTVKVVDELVKVMGRHKPENIVIEMARENQTTQKGQKNSRERMKRIEEGIKELGSQILKEHPVENTQLQNEKLYLYYLQNGRDMYVDQELDINRLSDYDVDHIVPQSFLKDDSIDNKVLTRSDKARGKSDNVPSEEVVKKMKNYWRQLLNAKLITQRKFDNLTKAERGGLSELDKAGFIKRQLVETRQITKHVAQILDSRMNTKYDENDKLIREVKVITLKSKLVSDFRKDFQFYKVREINNYHHAHDAYLNAVVGTALIKKYPKLESEFVYGDYKVYDVRKMIAKSEQEIGKATAKYFFYSNIMNFFKTEITLANGEIRKRPLIETNGETGEIVWDKGRDFATVRKVLSMPQVNIVKKTEVQTGGFSKESILPKRNSDKLIARKKDWDPKKYGGFDSPTVAYSVLVVAKVEKGKSKKLKSVKELLGITIMERSSFEKNPIDFLEAKGYKEVKKDLIIKLPKYSLFELENGRKRMLASAGELQKGNELALPSKYVNFLYLASHYEKLKGSPEDNEQKQLFVEQHKHYLDEIIEQISEFSKRVILADANLDKVLSAYNKHRDKPIREQAENIIHLFTLTNLGAPAAFKYFDTTIDRKRYTSTKEVLDATLIHQSITGLYETRIDLSQLGGDGGGGSGGSGGSGGSGGSGGSGGTLNIEDEYRLHETSKEPDVPLGSTWLSDFPQAWAETGGMGLAVRQAPLIIPLKATSTPVSIKQYPMSQEARLGIKPHIQRLLDQGILVPCQSPWNTPLLPVKKPGTNDYRPVQDLREVNKRVEDIHPTVPNPYNLLSGLPPSHQWYTVLDLKDAFFCLRLHPTSQPLFAFEWRDPEMGISGQLTWTRLPQGFKNSPTLFNEALHRDLADFRIQHPDLILLQYVDDLLLAATSEQDCQRGTRALLQTLGNLGYRASAKKAQICQKQVKYLGYLLKEGQRWLTEARKETVMGQPTPKTPRQLREFLGTAGFCRLWIPGFAEMAAPLYPLTKPGTLFNWGPDQQKAYQEIKQALLTAPALGLPDLTKPFELFVDEKQGYAKGVLTQKLGPWRRPVAYLSKKLDPVAAGWPPCLRMVAAIAVLTKDAGKLTMGQPLVILAPHAVEALVKQPPDRWLSNARMTHYQAMLLDTDRVQFGPVVALNPATLLPLPEKEAPHDCLEILAETHGTRPDLTDQPIPDADYTWYTDGSSFLQEGQRRAGAAVTTETEVIWARALPAGTSAQRAELIALTQALKMAEGKKLNVYTDSRYAFATAHVHGEIYRRRGWLTSEGREIKNKNEILALLKALFLPKRLSIIHCPGHQKGNSAEARGNRMADQAAREAAMKAVLETSTLLAGKRTADGSEFEKRTADGSEFESPKKKAKVE

SEQ ID NO: 959 - protein, 2094 aa, synthetic construct
MPAAKRVKLDGGDKKYSIGLDIGTNSVGWAVITDEYKVPSKKFKVLGNTDRHSIKKNLIGALLFDSGETAEATRLKRTARRRYTRRKNRICYLQEIFSNEMAKVDDSFFHRLEESFLVEEDKKHERHPIFGNIVDEVAYHEKYPTIYHLRKKLVDSTDKADLRLIYLALAHMIKFRGHFLIEGDLNPDNSDVDKLFIQLVQTYNQLFEENPINASGVDAKAILSARLSKSRRLENLIAQLPGEKKNGLFGNLIALSLGLTPNFKSNFDLAEDAKLQLSKDTYDDDLDNLLAQIGDQYADLFLAAKNLSDAILLSDILRVNTEITKAPLSASMIKRYDEHHQDLTLLKALVRQQLPEKYKEIFFDQSKNGYAGYIDGGASQEEFYKFIKPILEKMDGTEELLVKLNREDLLRKQRTFDNGSIPHQIHLGELHAILRRQEDFYPFLKDNREKIEKILTFRIPYYVGPLARGNSRFAWMTRKSEETITPWNFEEVVDKGASAQSFIERMTNFDKNLPNEKVLPKHSLLYEYFTVYNELTKVKYVTEGMRKPAFLSGEQKKAIVDLLFKTNRKVTVKQLKEDYFKKIECFDSVEISGVEDRFNASLGTYHDLLKIIKDKDFLDNEENEDILEDIVLTLTLFEDREMIEERLKTYAHLFDDKVMKQLKRRRYTGWGRLSRKLINGIRDKQSGKTILDFLKSDGFANRNFMQLIHDDSLTFKEDIQKAQVSGQGDSLHEHIANLAGSPAIKKGILQTVKVVDELVKVMGRHKPENIVIEMARENQTTQKGQKNSRERMKRIEEGIKELGSQILKEHPVENTQLQNEKLYLYYLQNGRDMYVDQELDINRLSDYDVDHIVPQSFLKDDSIDNKVLTRSDKARGKSDNVPSEEVVKKMKNYWRQLLNAKLITQRKFDNLTKAERGGLSELDKAGFIKRQLVETRQITKHVAQILDSRMNTKYDENDKLIREVKVITLKSKLVSDFRKDFQFYKVREINNYHHAHDAYLNAVVGTALIKKYPKLESEFVYGDYKVYDVRKMIAKSEQEIGKATAKYFFYSNIMNFFKTEITLANGEIRKRPLIETNGETGEIVWDKGRDFATVRKVLSMPQVNIVKKTEVQTGGFSKESILPKRNSDKLIARKKDWDPKKYGGFDSPTVAYSVLVVAKVEKGKSKKLKSVKELLGITIMERSSFEKNPIDFLEAKGYKEVKKDLIIKLPKYSLFELENGRKRMLASAGELQKGNELALPSKYVNFLYLASHYEKLKGSPEDNEQKQLFVEQHKHYLDEIIEQISEFSKRVILADANLDKVLSAYNKHRDKPIREQAENIIHLFTLTNLGAPAAFKYFDTTIDRKRYTSTKEVLDATLIHQSITGLYETRIDLSQLGGDGGGSSGSSGSSGGTLNIEDEYRLHETSKEPDVPLGSTWLSDFPQAWAETGGMGLAVRQAPLIIPLKATSTPVSIKQYPMSQEARLGIKPHIQRLLDQGILVPCQSPWNTPLLPVKKPGTNDYRPVQDLREVNKRVEDIHPTVPNPYNLLSGLPPSHQWYTVLDLKDAFFCLRLHPTSQPLFAFEWRDPEMGISGQLTWTRLPQGFKNSPTLFNEALHRDLADFRIQHPDLILLQYVDDLLLAATSEQDCQRGTRALLQTLGNLGYRASAKKAQICQKQVKYLGYLLKEGQRWLTEARKETVMGQPTPKTPRQLREFLGTAGFCRLWIPGFAEMAAPLYPLTKPGTLFNWGPDQQKAYQEIKQALLTAPALGLPDLTKPFELFVDEKQGYAKGVLTQKLGPWRRPVAYLSKKLDPVAAGWPPCLRMVAAIAVLTKDAGKLTMGQPLVILAPHAVEALVKQPPDRWLSNARMTHYQAMLLDTDRVQFGPVVALNPATLLPLPEKEAPHDCLEILAETHGTRPDLTDQPIPDADYTWYTDGSSFLQEGQRRAGAAVTTETEVIWARALPAGTSAQRAELIALTQALKMAEGKKLNVYTDSRYAFATAHVHGEIYRRRGWLTSEGREIKNKNEILALLKALFLPKRLSIIHCPGHQKGNSAEARGNRMADQAAREAAMKAVLETSTLLAGKRTADGSEFEKRTADGSEFESPKKKAKVE

SEQ ID NO: 960 - protein, 2096 aa, synthetic construct
MPAAKRVKLDGGDKKYSIGLDIGTNSVGWAVITDEYKVPSKKFKVLGNTDRHSIKKNLIGALLFDSGETAEATRLKRTARRRYTRRKNRICYLQEIFSNEMAKVDDSFFHRLEESFLVEEDKKHERHPIFGNIVDEVAYHEKYPTIYHLRKKLVDSTDKADLRLIYLALAHMIKFRGHFLIEGDLNPDNSDVDKLFIQLVQTYNQLFEENPINASGVDAKAILSARLSKSRRLENLIAQLPGEKKNGLFGNLIALSLGLTPNFKSNFDLAEDAKLQLSKDTYDDDLDNLLAQIGDQYADLFLAAKNLSDAILLSDILRVNTEITKAPLSASMIKRYDEHHQDLTLLKALVRQQLPEKYKEIFFDQSKNGYAGYIDGGASQEEFYKFIKPILEKMDGTEELLVKLNREDLLRKQRTFDNGSIPHQIHLGELHAILRRQEDFYPFLKDNREKIEKILTFRIPYYVGPLARGNSRFAWMTRKSEETITPWNFEEVVDKGASAQSFIERMTNFDKNLPNEKVLPKHSLLYEYFTVYNELTKVKYVTEGMRKPAFLSGEQKKAIVDLLFKTNRKVTVKQLKEDYFKKIECFDSVEISGVEDRFNASLGTYHDLLKIIKDKDFLDNEENEDILEDIVLTLTLFEDREMIEERLKTYAHLFDDKVMKQLKRRRYTGWGRLSRKLINGIRDKQSGKTILDFLKSDGFANRNFMQLIHDDSLTFKEDIQKAQVSGQGDSLHEHIANLAGSPAIKKGILQTVKVVDELVKVMGRHKPENIVIEMARENQTTQKGQKNSRERMKRIEEGIKELGSQILKEHPVENTQLQNEKLYLYYLQNGRDMYVDQELDINRLSDYDVDHIVPQSFLKDDSIDNKVLTRSDKARGKSDNVPSEEVVKKMKNYWRQLLNAKLITQRKFDNLTKAERGGLSELDKAGFIKRQLVETRQITKHVAQILDSRMNTKYDENDKLIREVKVITLKSKLVSDFRKDFQFYKVREINNYHHAHDAYLNAVVGTALIKKYPKLESEFVYGDYKVYDVRKMIAKSEQEIGKATAKYFFYSNIMNFFKTEITLANGEIRKRPLIETNGETGEIVWDKGRDFATVRKVLSMPQVNIVKKTEVQTGGFSKESILPKRNSDKLIARKKDWDPKKYGGFDSPTVAYSVLVVAKVEKGKSKKLKSVKELLGITIMERSSFEKNPIDFLEAKGYKEVKKDLIIKLPKYSLFELENGRKRMLASAGELQKGNELALPSKYVNFLYLASHYEKLKGSPEDNEQKQLFVEQHKHYLDEIIEQISEFSKRVILADANLDKVLSAYNKHRDKPIREQAENIIHLFTLTNLGAPAAFKYFDTTIDRKRYTSTKEVLDATLIHQSITGLYETRIDLSQLGGDGGEAAAKGSSPAPGGTLNIEDEYRLHETSKEPDVPLGSTWLSDFPQAWAETGGMGLAVRQAPLIIPLKATSTPVSIKQYPMSQEARLGIKPHIQRLLDQGILVPCQSPWNTPLLPVKKPGTNDYRPVQDLREVNKRVEDIHPTVPNPYNLLSGLPPSHQWYTVLDLKDAFFCLRLHPTSQPLFAFEWRDPEMGISGQLTWTRLPQGFKNSPTLFNEALHRDLADFRIQHPDLILLQYVDDLLLAATSEQDCQRGTRALLQTLGNLGYRASAKKAQICQKQVKYLGYLLKEGQRWLTEARKETVMGQPTPKTPRQLREFLGTAGFCRLWIPGFAEMAAPLYPLTKPGTLFNWGPDQQKAYQEIKQALLTAPALGLPDLTKPFELFVDEKQGYAKGVLTQKLGPWRRPVAYLSKKLDPVAAGWPPCLRMVAAIAVLTKDAGKLTMGQPLVILAPHAVEALVKQPPDRWLSNARMTHYQAMLLDTDRVQFGPVVALNPATLLPLPEKEAPHDCLEILAETHGTRPDLTDQPIPDADYTWYTDGSSFLQEGQRRAGAAVTTETEVIWARALPAGTSAQRAELIALTQALKMAEGKKLNVYTDSRYAFATAHVHGEIYRRRGWLTSEGREIKNKNEILALLKALFLPKRLSIIHCPGHQKGNSAEARGNRMADQAAREAAMKAVLETSTLLAGKRTADGSEFEKRTADGSEFESPKKKAKVE

SEQ ID NO: 961 - protein, 2096 aa, synthetic construct
MPAAKRVKLDGGDKKYSIGLDIGTNSVGWAVITDEYKVPSKKFKVLGNTDRHSIKKNLIGALLFDSGETAEATRLKRTARRRYTRRKNRICYLQEIFSNEMAKVDDSFFHRLEESFLVEEDKKHERHPIFGNIVDEVAYHEKYPTIYHLRKKLVDSTDKADLRLIYLALAHMIKFRGHFLIEGDLNPDNSDVDKLFIQLVQTYNQLFEENPINASGVDAKAILSARLSKSRRLENLIAQLPGEKKNGLFGNLIALSLGLTPNFKSNFDLAEDAKLQLSKDTYDDDLDNLLAQIGDQYADLFLAAKNLSDAILLSDILRVNTEITKAPLSASMIKRYDEHHQDLTLLKALVRQQLPEKYKEIFFDQSKNGYAGYIDGGASQEEFYKFIKPILEKMDGTEELLVKLNREDLLRKQRTFDNGSIPHQIHLGELHAILRRQEDFYPFLKDNREKIEKILTFRIPYYVGPLARGNSRFAWMTRKSEETITPWNFEEVVDKGASAQSFIERMTNFDKNLPNEKVLPKHSLLYEYFTVYNELTKVKYVTEGMRKPAFLSGEQKKAIVDLLFKTNRKVTVKQLKEDYFKKIECFDSVEISGVEDRFNASLGTYHDLLKIIKDKDFLDNEENEDILEDIVLTLTLFEDREMIEERLKTYAHLFDDKVMKQLKRRRYTGWGRLSRKLINGIRDKQSGKTILDFLKSDGFANRNFMQLIHDDSLTFKEDIQKAQVSGQGDSLHEHIANLAGSPAIKKGILQTVKVVDELVKVMGRHKPENIVIEMARENQTTQKGQKNSRERMKRIEEGIKELGSQILKEHPVENTQLQNEKLYLYYLQNGRDMYVDQELDINRLSDYDVDHIVPQSFLKDDSIDNKVLTRSDKARGKSDNVPSEEVVKKMKNYWRQLLNAKLITQRKFDNLTKAERGGLSELDKAGFIKRQLVETRQITKHVAQILDSRMNTKYDENDKLIREVKVITLKSKLVSDFRKDFQFYKVREINNYHHAHDAYLNAVVGTALIKKYPKLESEFVYGDYKVYDVRKMIAKSEQEIGKATAKYFFYSNIMNFFKTEITLANGEIRKRPLIETNGETGEIVWDKGRDFATVRKVLSMPQVNIVKKTEVQTGGFSKESILPKRNSDKLIARKKDWDPKKYGGFDSPTVAYSVLVVAKVEKGKSKKLKSVKELLGITIMERSSFEKNPIDFLEAKGYKEVKKDLIIKLPKYSLFELENGRKRMLASAGELQKGNELALPSKYVNFLYLASHYEKLKGSPEDNEQKQLFVEQHKHYLDEIIEQISEFSKRVILADANLDKVLSAYNKHRDKPIREQAENIIHLFTLTNLGAPAAFKYFDTTIDRKRYTSTKEVLDATLIHQSITGLYETRIDLSQLGGDGGEAAAKPAPGGSGGTLNIEDEYRLHETSKEPDVPLGSTWLSDFPQAWAETGGMGLAVRQAPLIIPLKATSTPVSIKQYPMSQEARLGIKPHIQRLLDQGILVPCQSPWNTPLLPVKKPGTNDYRPVQDLREVNKRVEDIHPTVPNPYNLLSGLPPSHQWYTVLDLKDAFFCLRLHPTSQPLFAFEWRDPEMGISGQLTWTRLPQGFKNSPTLFNEALHRDLADFRIQHPDLILLQYVDDLLLAATSEQDCQRGTRALLQTLGNLGYRASAKKAQICQKQVKYLGYLLKEGQRWLTEARKETVMGQPTPKTPRQLREFLGTAGFCRLWIPGFAEMAAPLYPLTKPGTLFNWGPDQQKAYQEIKQALLTAPALGLPDLTKPFELFVDEKQGYAKGVLTQKLGPWRRPVAYLSKKLDPVAAGWPPCLRMVAAIAVLTKDAGKLTMGQPLVILAPHAVEALVKQPPDRWLSNARMTHYQAMLLDTDRVQFGPVVALNPATLLPLPEKEAPHDCLEILAETHGTRPDLTDQPIPDADYTWYTDGSSFLQEGQRRAGAAVTTETEVIWARALPAGTSAQRAELIALTQALKMAEGKKLNVYTDSRYAFATAHVHGEIYRRRGWLTSEGREIKNKNEILALLKALFLPKRLSIIHCPGHQKGNSAEARGNRMADQAAREAAMKAVLETSTLLAGKRTADGSEFEKRTADGSEFESPKKKAKVE

SEQ ID NO: 962 - protein, 2131 aa, synthetic construct
MPAAKRVKLDGGDKKYSIGLDIGTNSVGWAVITDEYKVPSKKFKVLGNTDRHSIKKNLIGALLFDSGETAEATRLKRTARRRYTRRKNRICYLQEIFSNEMAKVDDSFFHRLEESFLVEEDKKHERHPIFGNIVDEVAYHEKYPTIYHLRKKLVDSTDKADLRLIYLALAHMIKFRGHFLIEGDLNPDNSDVDKLFIQLVQTYNQLFEENPINASGVDAKAILSARLSKSRRLENLIAQLPGEKKNGLFGNLIALSLGLTPNFKSNFDLAEDAKLQLSKDTYDDDLDNLLAQIGDQYADLFLAAKNLSDAILLSDILRVNTEITKAPLSASMIKRYDEHHQDLTLLKALVRQQLPEKYKEIFFDQSKNGYAGYIDGGASQEEFYKFIKPILEKMDGTEELLVKLNREDLLRKQRTFDNGSIPHQIHLGELHAILRRQEDFYPFLKDNREKIEKILTFRIPYYVGPLARGNSRFAWMTRKSEETITPWNFEEVVDKGASAQSFIERMTNFDKNLPNEKVLPKHSLLYEYFTVYNELTKVKYVTEGMRKPAFLSGEQKKAIVDLLFKTNRKVTVKQLKEDYFKKIECFDSVEISGVEDRFNASLGTYHDLLKIIKDKDFLDNEENEDILEDIVLTLTLFEDREMIEERLKTYAHLFDDKVMKQLKRRRYTGWGRLSRKLINGIRDKQSGKTILDFLKSDGFANRNFMQLIHDDSLTFKEDIQKAQVSGQGDSLHEHIANLAGSPAIKKGILQTVKVVDELVKVMGRHKPENIVIEMARENQTTQKGQKNSRERMKRIEEGIKELGSQILKEHPVENTQLQNEKLYLYYLQNGRDMYVDQELDINRLSDYDVDHIVPQSFLKDDSIDNKVLTRSDKARGKSDNVPSEEVVKKMKNYWRQLLNAKLITQRKFDNLTKAERGGLSELDKAGFIKRQLVETRQITKHVAQILDSRMNTKYDENDKLIREVKVITLKSKLVSDFRKDFQFYKVREINNYHHAHDAYLNAVVGTALIKKYPKLESEFVYGDYKVYDVRKMIAKSEQEIGKATAKYFFYSNIMNFFKTEITLANGEIRKRPLIETNGETGEIVWDKGRDFATVRKVLSMPQVNIVKKTEVQTGGFSKESILPKRNSDKLIARKKDWDPKKYGGFDSPTVAYSVLVVAKVEKGKSKKLKSVKELLGITIMERSSFEKNPIDFLEAKGYKEVKKDLIIKLPKYSLFELENGRKRMLASAGELQKGNELALPSKYVNFLYLASHYEKLKGSPEDNEQKQLFVEQHKHYLDEIIEQISEFSKRVILADANLDKVLSAYNKHRDKPIREQAENIIHLFTLTNLGAPAAFKYFDTTIDRKRYTSTKEVLDATLIHQSITGLYETRIDLSQLGGDGGAEAAAKEAAAKEAAAKEAAAKALEAEAAAKEAAAKEAAAKEAAAKAGGTLNIEDEYRLHETSKEPDVPLGSTWLSDFPQAWAETGGMGLAVRQAPLIIPLKATSTPVSIKQYPMSQEARLGIKPHIQRLLDQGILVPCQSPWNTPLLPVKKPGTNDYRPVQDLREVNKRVEDIHPTVPNPYNLLSGLPPSHQWYTVLDLKDAFFCLRLHPTSQPLFAFEWRDPEMGISGQLTWTRLPQGFKNSPTLFNEALHRDLADFRIQHPDLILLQYVDDLLLAATSEQDCQRGTRALLQTLGNLGYRASAKKAQICQKQVKYLGYLLKEGQRWLTEARKETVMGQPTPKTPRQLREFLGTAGFCRLWIPGFAEMAAPLYPLTKPGTLFNWGPDQQKAYQEIKQALLTAPALGLPDLTKPFELFVDEKQGYAKGVLTQKLGPWRRPVAYLSKKLDPVAAGWPPCLRMVAAIAVLTKDAGKLTMGQPLVILAPHAVEALVKQPPDRWLSNARMTHYQAMLLDTDRVQFGPVVALNPATLLPLPEKEAPHDCLEILAETHGTRPDLTDQPIPDADYTWYTDGSSFLQEGQRRAGAAVTTETEVIWARALPAGTSAQRAELIALTQALKMAEGKKLNVYTDSRYAFATAHVHGEIYRRRGWLTSEGREIKNKNEILALLKALFLPKRLSIIHCPGHQKGNSAEARGNRMADQAAREAAMKAVLETSTLLAGKRTADGSEFEKRTADGSEFESPKKKAKVE

SEQ ID NO: 963 - protein, 2096 aa, synthetic construct
MPAAKRVKLDGGDKKYSIGLDIGTNSVGWAVITDEYKVPSKKFKVLGNTDRHSIKKNLIGALLFDSGETAEATRLKRTARRRYTRRKNRICYLQEIFSNEMAKVDDSFFHRLEESFLVEEDKKHERHPIFGNIVDEVAYHEKYPTIYHLRKKLVDSTDKADLRLIYLALAHMIKFRGHFLIEGDLNPDNSDVDKLFIQLVQTYNQLFEENPINASGVDAKAILSARLSKSRRLENLIAQLPGEKKNGLFGNLIALSLGLTPNFKSNFDLAEDAKLQLSKDTYDDDLDNLLAQIGDQYADLFLAAKNLSDAILLSDILRVNTEITKAPLSASMIKRYDEHHQDLTLLKALVRQQLPEKYKEIFFDQSKNGYAGYIDGGASQEEFYKFIKPILEKMDGTEELLVKLNREDLLRKQRTFDNGSIPHQIHLGELHAILRRQEDFYPFLKDNREKIEKILTFRIPYYVGPLARGNSRFAWMTRKSEETITPWNFEEVVDKGASAQSFIERMTNFDKNLPNEKVLPKHSLLYEYFTVYNELTKVKYVTEGMRKPAFLSGEQKKAIVDLLFKTNRKVTVKQLKEDYFKKIECFDSVEISGVEDRFNASLGTYHDLLKIIKDKDFLDNEENEDILEDIVLTLTLFEDREMIEERLKTYAHLFDDKVMKQLKRRRYTGWGRLSRKLINGIRDKQSGKTILDFLKSDGFANRNFMQLIHDDSLTFKEDIQKAQVSGQGDSLHEHIANLAGSPAIKKGILQTVKVVDELVKVMGRHKPENIVIEMARENQTTQKGQKNSRERMKRIEEGIKELGSQILKEHPVENTQLQNEKLYLYYLQNGRDMYVDQELDINRLSDYDVDHIVPQSFLKDDSIDNKVLTRSDKARGKSDNVPSEEVVKKMKNYWRQLLNAKLITQRKFDNLTKAERGGLSELDKAGFIKRQLVETRQITKHVAQILDSRMNTKYDENDKLIREVKVITLKSKLVSDFRKDFQFYKVREINNYHHAHDAYLNAVVGTALIKKYPKLESEFVYGDYKVYDVRKMIAKSEQEIGKATAKYFFYSNIMNFFKTEITLANGEIRKRPLIETNGETGEIVWDKGRDFATVRKVLSMPQVNIVKKTEVQTGGFSKESILPKRNSDKLIARKKDWDPKKYGGFDSPTVAYSVLVVAKVEKGKSKKLKSVKELLGITIMERSSFEKNPIDFLEAKGYKEVKKDLIIKLPKYSLFELENGRKRMLASAGELQKGNELALPSKYVNFLYLASHYEKLKGSPEDNEQKQLFVEQHKHYLDEIIEQISEFSKRVILADANLDKVLSAYNKHRDKPIREQAENIIHLFTLTNLGAPAAFKYFDTTIDRKRYTSTKEVLDATLIHQSITGLYETRIDLSQLGGDGGEAAAKGGGPAPGGTLNIEDEYRLHETSKEPDVPLGSTWLSDFPQAWAETGGMGLAVRQAPLIIPLKATSTPVSIKQYPMSQEARLGIKPHIQRLLDQGILVPCQSPWNTPLLPVKKPGTNDYRPVQDLREVNKRVEDIHPTVPNPYNLLSGLPPSHQWYTVLDLKDAFFCLRLHPTSQPLFAFEWRDPEMGISGQLTWTRLPQGFKNSPTLFNEALHRDLADFRIQHPDLILLQYVDDLLLAATSEQDCQRGTRALLQTLGNLGYRASAKKAQICQKQVKYLGYLLKEGQRWLTEARKETVMGQPTPKTPRQLREFLGTAGFCRLWIPGFAEMAAPLYPLTKPGTLFNWGPDQQKAYQEIKQALLTAPALGLPDLTKPFELFVDEKQGYAKGVLTQKLGPWRRPVAYLSKKLDPVAAGWPPCLRMVAAIAVLTKDAGKLTMGQPLVILAPHAVEALVKQPPDRWLSNARMTHYQAMLLDTDRVQFGPVVALNPATLLPLPEKEAPHDCLEILAETHGTRPDLTDQPIPDADYTWYTDGSSFLQEGQRRAGAAVTTETEVIWARALPAGTSAQRAELIALTQALKMAEGKKLNVYTDSRYAFATAHVHGEIYRRRGWLTSEGREIKNKNEILALLKALFLPKRLSIIHCPGHQKGNSAEARGNRMADQAAREAAMKAVLETSTLLAGKRTADGSEFEKRTADGSEFESPKKKAKVE

SEQ ID NO: 964 - protein, 2100 aa, synthetic construct
MPAAKRVKLDGGDKKYSIGLDIGTNSVGWAVITDEYKVPSKKFKVLGNTDRHSIKKNLIGALLFDSGETAEATRLKRTARRRYTRRKNRICYLQEIFSNEMAKVDDSFFHRLEESFLVEEDKKHERHPIFGNIVDEVAYHEKYPTIYHLRKKLVDSTDKADLRLIYLALAHMIKFRGHFLIEGDLNPDNSDVDKLFIQLVQTYNQLFEENPINASGVDAKAILSARLSKSRRLENLIAQLPGEKKNGLFGNLIALSLGLTPNFKSNFDLAEDAKLQLSKDTYDDDLDNLLAQIGDQYADLFLAAKNLSDAILLSDILRVNTEITKAPLSASMIKRYDEHHQDLTLLKALVRQQLPEKYKEIFFDQSKNGYAGYIDGGASQEEFYKFIKPILEKMDGTEELLVKLNREDLLRKQRTFDNGSIPHQIHLGELHAILRRQEDFYPFLKDNREKIEKILTFRIPYYVGPLARGNSRFAWMTRKSEETITPWNFEEVVDKGASAQSFIERMTNFDKNLPNEKVLPKHSLLYEYFTVYNELTKVKYVTEGMRKPAFLSGEQKKAIVDLLFKTNRKVTVKQLKEDYFKKIECFDSVEISGVEDRFNASLGTYHDLLKIIKDKDFLDNEENEDILEDIVLTLTLFEDREMIEERLKTYAHLFDDKVMKQLKRRRYTGWGRLSRKLINGIRDKQSGKTILDFLKSDGFANRNFMQLIHDDSLTFKEDIQKAQVSGQGDSLHEHIANLAGSPAIKKGILQTVKVVDELVKVMGRHKPENIVIEMARENQTTQKGQKNSRERMKRIEEGIKELGSQILKEHPVENTQLQNEKLYLYYLQNGRDMYVDQELDINRLSDYDVDHIVPQSFLKDDSIDNKVLTRSDKARGKSDNVPSEEVVKKMKNYWRQLLNAKLITQRKFDNLTKAERGGLSELDKAGFIKRQLVETRQITKHVAQILDSRMNTKYDENDKLIREVKVITLKSKLVSDFRKDFQFYKVREINNYHHAHDAYLNAVVGTALIKKYPKLESEFVYGDYKVYDVRKMIAKSEQEIGKATAKYFFYSNIMNFFKTEITLANGEIRKRPLIETNGETGEIVWDKGRDFATVRKVLSMPQVNIVKKTEVQTGGFSKESILPKRNSDKLIARKKDWDPKKYGGFDSPTVAYSVLVVAKVEKGKSKKLKSVKELLGITIMERSSFEKNPIDFLEAKGYKEVKKDLIIKLPKYSLFELENGRKRMLASAGELQKGNELALPSKYVNFLYLASHYEKLKGSPEDNEQKQLFVEQHKHYLDEIIEQISEFSKRVILADANLDKVLSAYNKHRDKPIREQAENIIHLFTLTNLGAPAAFKYFDTTIDRKRYTSTKEVLDATLIHQSITGLYETRIDLSQLGGDGGGSSGSSGSSGSSGSSGGTLNIEDEYRLHETSKEPDVPLGSTWLSDFPQAWAETGGMGLAVRQAPLIIPLKATSTPVSIKQYPMSQEARLGIKPHIQRLLDQGILVPCQSPWNTPLLPVKKPGTNDYRPVQDLREVNKRVEDIHPTVPNPYNLLSGLPPSHQWYTVLDLKDAFFCLRLHPTSQPLFAFEWRDPEMGISGQLTWTRLPQGFKNSPTLFNEALHRDLADFRIQHPDLILLQYVDDLLLAATSEQDCQRGTRALLQTLGNLGYRASAKKAQICQKQVKYLGYLLKEGQRWLTEARKETVMGQPTPKTPRQLREFLGTAGFCRLWIPGFAEMAAPLYPLTKPGTLFNWGPDQQKAYQEIKQALLTAPALGLPDLTKPFELFVDEKQGYAKGVLTQKLGPWRRPVAYLSKKLDPVAAGWPPCLRMVAAIAVLTKDAGKLTMGQPLVILAPHAVEALVKQPPDRWLSNARMTHYQAMLLDTDRVQFGPVVALNPATLLPLPEKEAPHDCLEILAETHGTRPDLTDQPIPDADYTWYTDGSSFLQEGQRRAGAAVTTETEVIWARALPAGTSAQRAELIALTQALKMAEGKKLNVYTDSRYAFATAHVHGEIYRRRGWLTSEGREIKNKNEILALLKALFLPKRLSIIHCPGHQKGNSAEARGNRMADQAAREAAMKAVLETSTLLAGKRTADGSEFEKRTADGSEFESPKKKAKVE

SEQ ID NO: 965 - protein, 2105 aa, synthetic construct
MPAAKRVKLDGGDKKYSIGLDIGTNSVGWAVITDEYKVPSKKFKVLGNTDRHSIKKNLIGALLFDSGETAEATRLKRTARRRYTRRKNRICYLQEIFSNEMAKVDDSFFHRLEESFLVEEDKKHERHPIFGNIVDEVAYHEKYPTIYHLRKKLVDSTDKADLRLIYLALAHMIKFRGHFLIEGDLNPDNSDVDKLFIQLVQTYNQLFEENPINASGVDAKAILSARLSKSRRLENLIAQLPGEKKNGLFGNLIALSLGLTPNFKSNFDLAEDAKLQLSKDTYDDDLDNLLAQIGDQYADLFLAAKNLSDAILLSDILRVNTEITKAPLSASMIKRYDEHHQDLTLLKALVRQQLPEKYKEIFFDQSKNGYAGYIDGGASQEEFYKFIKPILEKMDGTEELLVKLNREDLLRKQRTFDNGSIPHQIHLGELHAILRRQEDFYPFLKDNREKIEKILTFRIPYYVGPLARGNSRFAWMTRKSEETITPWNFEEVVDKGASAQSFIERMTNFDKNLPNEKVLPKHSLLYEYFTVYNELTKVKYVTEGMRKPAFLSGEQKKAIVDLLFKTNRKVTVKQLKEDYFKKIECFDSVEISGVEDRFNASLGTYHDLLKIIKDKDFLDNEENEDILEDIVLTLTLFEDREMIEERLKTYAHLFDDKVMKQLKRRRYTGWGRLSRKLINGIRDKQSGKTILDFLKSDGFANRNFMQLIHDDSLTFKEDIQKAQVSGQGDSLHEHIANLAGSPAIKKGILQTVKVVDELVKVMGRHKPENIVIEMARENQTTQKGQKNSRERMKRIEEGIKELGSQILKEHPVENTQLQNEKLYLYYLQNGRDMYVDQELDINRLSDYDVDHIVPQSFLKDDSIDNKVLTRSDKARGKSDNVPSEEVVKKMKNYWRQLLNAKLITQRKFDNLTKAERGGLSELDKAGFIKRQLVETRQITKHVAQILDSRMNTKYDENDKLIREVKVITLKSKLVSDFRKDFQFYKVREINNYHHAHDAYLNAVVGTALIKKYPKLESEFVYGDYKVYDVRKMIAKSEQEIGKATAKYFFYSNIMNFFKTEITLANGEIRKRPLIETNGETGEIVWDKGRDFATVRKVLSMPQVNIVKKTEVQTGGFSKESILPKRNSDKLIARKKDWDPKKYGGFDSPTVAYSVLVVAKVEKGKSKKLKSVKELLGITIMERSSFEKNPIDFLEAKGYKEVKKDLIIKLPKYSLFELENGRKRMLASAGELQKGNELALPSKYVNFLYLASHYEKLKGSPEDNEQKQLFVEQHKHYLDEIIEQISEFSKRVILADANLDKVLSAYNKHRDKPIREQAENIIHLFTLTNLGAPAAFKYFDTTIDRKRYTSTKEVLDATLIHQSITGLYETRIDLSQLGGDGGEAAAKEAAAKEAAAKEAAAKGGTLNIEDEYRLHETSKEPDVPLGSTWLSDFPQAWAETGGMGLAVRQAPLIIPLKATSTPVSIKQYPMSQEARLGIKPHIQRLLDQGILVPCQSPWNTPLLPVKKPGTNDYRPVQDLREVNKRVEDIHPTVPNPYNLLSGLPPSHQWYTVLDLKDAFFCLRLHPTSQPLFAFEWRDPEMGISGQLTWTRLPQGFKNSPTLFNEALHRDLADFRIQHPDLILLQYVDDLLLAATSEQDCQRGTRALLQTLGNLGYRASAKKAQICQKQVKYLGYLLKEGQRWLTEARKETVMGQPTPKTPRQLREFLGTAGFCRLWIPGFAEMAAPLYPLTKPGTLFNWGPDQQKAYQEIKQALLTAPALGLPDLTKPFELFVDEKQGYAKGVLTQKLGPWRRPVAYLSKKLDPVAAGWPPCLRMVAAIAVLTKDAGKLTMGQPLVILAPHAVEALVKQPPDRWLSNARMTHYQAMLLDTDRVQFGPVVALNPATLLPLPEKEAPHDCLEILAETHGTRPDLTDQPIPDADYTWYTDGSSFLQEGQRRAGAAVTTETEVIWARALPAGTSAQRAELIALTQALKMAEGKKLNVYTDSRYAFATAHVHGEIYRRRGWLTSEGREIKNKNEILALLKALFLPKRLSIIHCPGHQKGNSAEARGNRMADQAAREAAMKAVLETSTLLAGKRTADGSEFEKRTADGSEFESPKKKAKVE

SEQ ID NO: 966 - protein, 2093 aa, synthetic construct
MPAAKRVKLDGGDKKYSIGLDIGTNSVGWAVITDEYKVPSKKFKVLGNTDRHSIKKNLIGALLFDSGETAEATRLKRTARRRYTRRKNRICYLQEIFSNEMAKVDDSFFHRLEESFLVEEDKKHERHPIFGNIVDEVAYHEKYPTIYHLRKKLVDSTDKADLRLIYLALAHMIKFRGHFLIEGDLNPDNSDVDKLFIQLVQTYNQLFEENPINASGVDAKAILSARLSKSRRLENLIAQLPGEKKNGLFGNLIALSLGLTPNFKSNFDLAEDAKLQLSKDTYDDDLDNLLAQIGDQYADLFLAAKNLSDAILLSDILRVNTEITKAPLSASMIKRYDEHHQDLTLLKALVRQQLPEKYKEIFFDQSKNGYAGYIDGGASQEEFYKFIKPILEKMDGTEELLVKLNREDLLRKQRTFDNGSIPHQIHLGELHAILRRQEDFYPFLKDNREKIEKILTFRIPYYVGPLARGNSRFAWMTRKSEETITPWNFEEVVDKGASAQSFIERMTNFDKNLPNEKVLPKHSLLYEYFTVYNELTKVKYVTEGMRKPAFLSGEQKKAIVDLLFKTNRKVTVKQLKEDYFKKIECFDSVEISGVEDRFNASLGTYHDLLKIIKDKDFLDNEENEDILEDIVLTLTLFEDREMIEERLKTYAHLFDDKVMKQLKRRRYTGWGRLSRKLINGIRDKQSGKTILDFLKSDGFANRNFMQLIHDDSLTFKEDIQKAQVSGQGDSLHEHIANLAGSPAIKKGILQTVKVVDELVKVMGRHKPENIVIEMARENQTTQKGQKNSRERMKRIEEGIKELGSQILKEHPVENTQLQNEKLYLYYLQNGRDMYVDQELDINRLSDYDVDHIVPQSFLKDDSIDNKVLTRSDKARGKSDNVPSEEVVKKMKNYWRQLLNAKLITQRKFDNLTKAERGGLSELDKAGFIKRQLVETRQITKHVAQILDSRMNTKYDENDKLIREVKVITLKSKLVSDFRKDFQFYKVREINNYHHAHDAYLNAVVGTALIKKYPKLESEFVYGDYKVYDVRKMIAKSEQEIGKATAKYFFYSNIMNFFKTEITLANGEIRKRPLIETNGETGEIVWDKGRDFATVRKVLSMPQVNIVKKTEVQTGGFSKESILPKRNSDKLIARKKDWDPKKYGGFDSPTVAYSVLVVAKVEKGKSKKLKSVKELLGITIMERSSFEKNPIDFLEAKGYKEVKKDLIIKLPKYSLFELENGRKRMLASAGELQKGNELALPSKYVNFLYLASHYEKLKGSPEDNEQKQLFVEQHKHYLDEIIEQISEFSKRVILADANLDKVLSAYNKHRDKPIREQAENIIHLFTLTNLGAPAAFKYFDTTIDRKRYTSTKEVLDATLIHQSITGLYETRIDLSQLGGDGGGSSEAAAKGGTLNIEDEYRLHETSKEPDVPLGSTWLSDFPQAWAETGGMGLAVRQAPLIIPLKATSTPVSIKQYPMSQEARLGIKPHIQRLLDQGILVPCQSPWNTPLLPVKKPGTNDYRPVQDLREVNKRVEDIHPTVPNPYNLLSGLPPSHQWYTVLDLKDAFFCLRLHPTSQPLFAFEWRDPEMGISGQLTWTRLPQGFKNSPTLFNEALHRDLADFRIQHPDLILLQYVDDLLLAATSEQDCQRGTRALLQTLGNLGYRASAKKAQICQKQVKYLGYLLKEGQRWLTEARKETVMGQPTPKTPRQLREFLGTAGFCRLWIPGFAEMAAPLYPLTKPGTLFNWGPDQQKAYQEIKQALLTAPALGLPDLTKPFELFVDEKQGYAKGVLTQKLGPWRRPVAYLSKKLDPVAAGWPPCLRMVAAIAVLTKDAGKLTMGQPLVILAPHAVEALVKQPPDRWLSNARMTHYQAMLLDTDRVQFGPVVALNPATLLPLPEKEAPHDCLEILAETHGTRPDLTDQPIPDADYTWYTDGSSFLQEGQRRAGAAVTTETEVIWARALPAGTSAQRAELIALTQALKMAEGKKLNVYTDSRYAFATAHVHGEIYRRRGWLTSEGREIKNKNEILALLKALFLPKRLSIIHCPGHQKGNSAEARGNRMADQAAREAAMKAVLETSTLLAGKRTADGSEFEKRTADGSEFESPKKKAKVE

SEQ ID NO: 967 - protein, 2096 aa, synthetic construct
MPAAKRVKLDGGDKKYSIGLDIGTNSVGWAVITDEYKVPSKKFKVLGNTDRHSIKKNLIGALLFDSGETAEATRLKRTARRRYTRRKNRICYLQEIFSNEMAKVDDSFFHRLEESFLVEEDKKHERHPIFGNIVDEVAYHEKYPTIYHLRKKLVDSTDKADLRLIYLALAHMIKFRGHFLIEGDLNPDNSDVDKLFIQLVQTYNQLFEENPINASGVDAKAILSARLSKSRRLENLIAQLPGEKKNGLFGNLIALSLGLTPNFKSNFDLAEDAKLQLSKDTYDDDLDNLLAQIGDQYADLFLAAKNLSDAILLSDILRVNTEITKAPLSASMIKRYDEHHQDLTLLKALVRQQLPEKYKEIFFDQSKNGYAGYIDGGASQEEFYKFIKPILEKMDGTEELLVKLNREDLLRKQRTFDNGSIPHQIHLGELHAILRRQEDFYPFLKDNREKIEKILTFRIPYYVGPLARGNSRFAWMTRKSEETITPWNFEEVVDKGASAQSFIERMTNFDKNLPNEKVLPKHSLLYEYFTVYNELTKVKYVTEGMRKPAFLSGEQKKAIVDLLFKTNRKVTVKQLKEDYFKKIECFDSVEISGVEDRFNASLGTYHDLLKIIKDKDFLDNEENEDILEDIVLTLTLFEDREMIEERLKTYAHLFDDKVMKQLKRRRYTGWGRLSRKLINGIRDKQSGKTILDFLKSDGFANRNFMQLIHDDSLTFKEDIQKAQVSGQGDSLHEHIANLAGSPAIKKGILQTVKVVDELVKVMGRHKPENIVIEMARENQTTQKGQKNSRERMKRIEEGIKELGSQILKEHPVENTQLQNEKLYLYYLQNGRDMYVDQELDINRLSDYDVDHIVPQSFLKDDSIDNKVLTRSDKARGKSDNVPSEEVVKKMKNYWRQLLNAKLITQRKFDNLTKAERGGLSELDKAGFIKRQLVETRQITKHVAQILDSRMNTKYDENDKLIREVKVITLKSKLVSDFRKDFQFYKVREINNYHHAHDAYLNAVVGTALIKKYPKLESEFVYGDYKVYDVRKMIAKSEQEIGKATAKYFFYSNIMNFFKTEITLANGEIRKRPLIETNGETGEIVWDKGRDFATVRKVLSMPQVNIVKKTEVQTGGFSKESILPKRNSDKLIARKKDWDPKKYGGFDSPTVAYSVLVVAKVEKGKSKKLKSVKELLGITIMERSSFEKNPIDFLEAKGYKEVKKDLIIKLPKYSLFELENGRKRMLASAGELQKGNELALPSKYVNFLYLASHYEKLKGSPEDNEQKQLFVEQHKHYLDEIIEQISEFSKRVILADANLDKVLSAYNKHRDKPIREQAENIIHLFTLTNLGAPAAFKYFDTTIDRKRYTSTKEVLDATLIHQSITGLYETRIDLSQLGGDGGPAPGSSEAAAKGGTLNIEDEYRLHETSKEPDVPLGSTWLSDFPQAWAETGGMGLAVRQAPLIIPLKATSTPVSIKQYPMSQEARLGIKPHIQRLLDQGILVPCQSPWNTPLLPVKKPGTNDYRPVQDLREVNKRVEDIHPTVPNPYNLLSGLPPSHQWYTVLDLKDAFFCLRLHPTSQPLFAFEWRDPEMGISGQLTWTRLPQGFKNSPTLFNEALHRDLADFRIQHPDLILLQYVDDLLLAATSEQDCQRGTRALLQTLGNLGYRASAKKAQICQKQVKYLGYLLKEGQRWLTEARKETVMGQPTPKTPRQLREFLGTAGFCRLWIPGFAEMAAPLYPLTKPGTLFNWGPDQQKAYQEIKQALLTAPALGLPDLTKPFELFVDEKQGYAKGVLTQKLGPWRRPVAYLSKKLDPVAAGWPPCLRMVAAIAVLTKDAGKLTMGQPLVILAPHAVEALVKQPPDRWLSNARMTHYQAMLLDTDRVQFGPVVALNPATLLPLPEKEAPHDCLEILAETHGTRPDLTDQPIPDADYTWYTDGSSFLQEGQRRAGAAVTTETEVIWARALPAGTSAQRAELIALTQALKMAEGKKLNVYTDSRYAFATAHVHGEIYRRRGWLTSEGREIKNKNEILALLKALFLPKRLSIIHCPGHQKGNSAEARGNRMADQAAREAAMKAVLETSTLLAGKRTADGSEFEKRTADGSEFESPKKKAKVE

SEQ ID NO: 968 - protein, 2096 aa, synthetic construct
MPAAKRVKLDGGDKKYSIGLDIGTNSVGWAVITDEYKVPSKKFKVLGNTDRHSIKKNLIGALLFDSGETAEATRLKRTARRRYTRRKNRICYLQEIFSNEMAKVDDSFFHRLEESFLVEEDKKHERHPIFGNIVDEVAYHEKYPTIYHLRKKLVDSTDKADLRLIYLALAHMIKFRGHFLIEGDLNPDNSDVDKLFIQLVQTYNQLFEENPINASGVDAKAILSARLSKSRRLENLIAQLPGEKKNGLFGNLIALSLGLTPNFKSNFDLAEDAKLQLSKDTYDDDLDNLLAQIGDQYADLFLAAKNLSDAILLSDILRVNTEITKAPLSASMIKRYDEHHQDLTLLKALVRQQLPEKYKEIFFDQSKNGYAGYIDGGASQEEFYKFIKPILEKMDGTEELLVKLNREDLLRKQRTFDNGSIPHQIHLGELHAILRRQEDFYPFLKDNREKIEKILTFRIPYYVGPLARGNSRFAWMTRKSEETITPWNFEEVVDKGASAQSFIERMTNFDKNLPNEKVLPKHSLLYEYFTVYNELTKVKYVTEGMRKPAFLSGEQKKAIVDLLFKTNRKVTVKQLKEDYFKKIECFDSVEISGVEDRFNASLGTYHDLLKIIKDKDFLDNEENEDILEDIVLTLTLFEDREMIEERLKTYAHLFDDKVMKQLKRRRYTGWGRLSRKLINGIRDKQSGKTILDFLKSDGFANRNFMQLIHDDSLTFKEDIQKAQVSGQGDSLHEHIANLAGSPAIKKGILQTVKVVDELVKVMGRHKPENIVIEMARENQTTQKGQKNSRERMKRIEEGIKELGSQILKEHPVENTQLQNEKLYLYYLQNGRDMYVDQELDINRLSDYDVDHIVPQSFLKDDSIDNKVLTRSDKARGKSDNVPSEEVVKKMKNYWRQLLNAKLITQRKFDNLTKAERGGLSELDKAGFIKRQLVETRQITKHVAQILDSRMNTKYDENDKLIREVKVITLKSKLVSDFRKDFQFYKVREINNYHHAHDAYLNAVVGTALIKKYPKLESEFVYGDYKVYDVRKMIAKSEQEIGKATAKYFFYSNIMNFFKTEITLANGEIRKRPLIETNGETGEIVWDKGRDFATVRKVLSMPQVNIVKKTEVQTGGFSKESILPKRNSDKLIARKKDWDPKKYGGFDSPTVAYSVLVVAKVEKGKSKKLKSVKELLGITIMERSSFEKNPIDFLEAKGYKEVKKDLIIKLPKYSLFELENGRKRMLASAGELQKGNELALPSKYVNFLYLASHYEKLKGSPEDNEQKQLFVEQHKHYLDEIIEQISEFSKRVILADANLDKVLSAYNKHRDKPIREQAENIIHLFTLTNLGAPAAFKYFDTTIDRKRYTSTKEVLDATLIHQSITGLYETRIDLSQLGGDGGGGSPAPEAAAKGGTLNIEDEYRLHETSKEPDVPLGSTWLSDFPQAWAETGGMGLAVRQAPLIIPLKATSTPVSIKQYPMSQEARLGIKPHIQRLLDQGILVPCQSPWNTPLLPVKKPGTNDYRPVQDLREVNKRVEDIHPTVPNPYNLLSGLPPSHQWYTVLDLKDAFFCLRLHPTSQPLFAFEWRDPEMGISGQLTWTRLPQGFKNSPTLFNEALHRDLADFRIQHPDLILLQYVDDLLLAATSEQDCQRGTRALLQTLGNLGYRASAKKAQICQKQVKYLGYLLKEGQRWLTEARKETVMGQPTPKTPRQLREFLGTAGFCRLWIPGFAEMAAPLYPLTKPGTLFNWGPDQQKAYQEIKQALLTAPALGLPDLTKPFELFVDEKQGYAKGVLTQKLGPWRRPVAYLSKKLDPVAAGWPPCLRMVAAIAVLTKDAGKLTMGQPLVILAPHAVEALVKQPPDRWLSNARMTHYQAMLLDTDRVQFGPVVALNPATLLPLPEKEAPHDCLEILAETHGTRPDLTDQPIPDADYTWYTDGSSFLQEGQRRAGAAVTTETEVIWARALPAGTSAQRAELIALTQALKMAEGKKLNVYTDSRYAFATAHVHGEIYRRRGWLTSEGREIKNKNEILALLKALFLPKRLSIIHCPGHQKGNSAEARGNRMADQAAREAAMKAVLETSTLLAGKRTADGSEFEKRTADGSEFESPKKKAKVE

SEQ ID NO: 969 - protein, 2094 aa, synthetic construct
MPAAKRVKLDGGDKKYSIGLDIGTNSVGWAVITDEYKVPSKKFKVLGNTDRHSIKKNLIGALLFDSGETAEATRLKRTARRRYTRRKNRICYLQEIFSNEMAKVDDSFFHRLEESFLVEEDKKHERHPIFGNIVDEVAYHEKYPTIYHLRKKLVDSTDKADLRLIYLALAHMIKFRGHFLIEGDLNPDNSDVDKLFIQLVQTYNQLFEENPINASGVDAKAILSARLSKSRRLENLIAQLPGEKKNGLFGNLIALSLGLTPNFKSNFDLAEDAKLQLSKDTYDDDLDNLLAQIGDQYADLFLAAKNLSDAILLSDILRVNTEITKAPLSASMIKRYDEHHQDLTLLKALVRQQLPEKYKEIFFDQSKNGYAGYIDGGASQEEFYKFIKPILEKMDGTEELLVKLNREDLLRKQRTFDNGSIPHQIHLGELHAILRRQEDFYPFLKDNREKIEKILTFRIPYYVGPLARGNSRFAWMTRKSEETITPWNFEEVVDKGASAQSFIERMTNFDKNLPNEKVLPKHSLLYEYFTVYNELTKVKYVTEGMRKPAFLSGEQKKAIVDLLFKTNRKVTVKQLKEDYFKKIECFDSVEISGVEDRFNASLGTYHDLLKIIKDKDFLDNEENEDILEDIVLTLTLFEDREMIEERLKTYAHLFDDKVMKQLKRRRYTGWGRLSRKLINGIRDKQSGKTILDFLKSDGFANRNFMQLIHDDSLTFKEDIQKAQVSGQGDSLHEHIANLAGSPAIKKGILQTVKVVDELVKVMGRHKPENIVIEMARENQTTQKGQKNSRERMKRIEEGIKELGSQILKEHPVENTQLQNEKLYLYYLQNGRDMYVDQELDINRLSDYDVDHIVPQSFLKDDSIDNKVLTRSDKARGKSDNVPSEEVVKKMKNYWRQLLNAKLITQRKFDNLTKAERGGLSELDKAGFIKRQLVETRQITKHVAQILDSRMNTKYDENDKLIREVKVITLKSKLVSDFRKDFQFYKVREINNYHHAHDAYLNAVVGTALIKKYPKLESEFVYGDYKVYDVRKMIAKSEQEIGKATAKYFFYSNIMNFFKTEITLANGEIRKRPLIETNGETGEIVWDKGRDFATVRKVLSMPQVNIVKKTEVQTGGFSKESILPKRNSDKLIARKKDWDPKKYGGFDSPTVAYSVLVVAKVEKGKSKKLKSVKELLGITIMERSSFEKNPIDFLEAKGYKEVKKDLIIKLPKYSLFELENGRKRMLASAGELQKGNELALPSKYVNFLYLASHYEKLKGSPEDNEQKQLFVEQHKHYLDEIIEQISEFSKRVILADANLDKVLSAYNKHRDKPIREQAENIIHLFTLTNLGAPAAFKYFDTTIDRKRYTSTKEVLDATLIHQSITGLYETRIDLSQLGGDGGGGGGSSPAPGGTLNIEDEYRLHETSKEPDVPLGSTWLSDFPQAWAETGGMGLAVRQAPLIIPLKATSTPVSIKQYPMSQEARLGIKPHIQRLLDQGILVPCQSPWNTPLLPVKKPGTNDYRPVQDLREVNKRVEDIHPTVPNPYNLLSGLPPSHQWYTVLDLKDAFFCLRLHPTSQPLFAFEWRDPEMGISGQLTWTRLPQGFKNSPTLFNEALHRDLADFRIQHPDLILLQYVDDLLLAATSEQDCQRGTRALLQTLGNLGYRASAKKAQICQKQVKYLGYLLKEGQRWLTEARKETVMGQPTPKTPRQLREFLGTAGFCRLWIPGFAEMAAPLYPLTKPGTLFNWGPDQQKAYQEIKQALLTAPALGLPDLTKPFELFVDEKQGYAKGVLTQKLGPWRRPVAYLSKKLDPVAAGWPPCLRMVAAIAVLTKDAGKLTMGQPLVILAPHAVEALVKQPPDRWLSNARMTHYQAMLLDTDRVQFGPVVALNPATLLPLPEKEAPHDCLEILAETHGTRPDLTDQPIPDADYTWYTDGSSFLQEGQRRAGAAVTTETEVIWARALPAGTSAQRAELIALTQALKMAEGKKLNVYTDSRYAFATAHVHGEIYRRRGWLTSEGREIKNKNEILALLKALFLPKRLSIIHCPGHQKGNSAEARGNRMADQAAREAAMKAVLETSTLLAGKRTADGSEFEKRTADGSEFESPKKKAKVE

SEQ ID NO: 970 - protein, 2094 aa, synthetic construct
MPAAKRVKLDGGDKKYSIGLDIGTNSVGWAVITDEYKVPSKKFKVLGNTDRHSIKKNLIGALLFDSGETAEATRLKRTARRRYTRRKNRICYLQEIFSNEMAKVDDSFFHRLEESFLVEEDKKHERHPIFGNIVDEVAYHEKYPTIYHLRKKLVDSTDKADLRLIYLALAHMIKFRGHFLIEGDLNPDNSDVDKLFIQLVQTYNQLFEENPINASGVDAKAILSARLSKSRRLENLIAQLPGEKKNGLFGNLIALSLGLTPNFKSNFDLAEDAKLQLSKDTYDDDLDNLLAQIGDQYADLFLAAKNLSDAILLSDILRVNTEITKAPLSASMIKRYDEHHQDLTLLKALVRQQLPEKYKEIFFDQSKNGYAGYIDGGASQEEFYKFIKPILEKMDGTEELLVKLNREDLLRKQRTFDNGSIPHQIHLGELHAILRRQEDFYPFLKDNREKIEKILTFRIPYYVGPLARGNSRFAWMTRKSEETITPWNFEEVVDKGASAQSFIERMTNFDKNLPNEKVLPKHSLLYEYFTVYNELTKVKYVTEGMRKPAFLSGEQKKAIVDLLFKTNRKVTVKQLKEDYFKKIECFDSVEISGVEDRFNASLGTYHDLLKIIKDKDFLDNEENEDILEDIVLTLTLFEDREMIEERLKTYAHLFDDKVMKQLKRRRYTGWGRLSRKLINGIRDKQSGKTILDFLKSDGFANRNFMQLIHDDSLTFKEDIQKAQVSGQGDSLHEHIANLAGSPAIKKGILQTVKVVDELVKVMGRHKPENIVIEMARENQTTQKGQKNSRERMKRIEEGIKELGSQILKEHPVENTQLQNEKLYLYYLQNGRDMYVDQELDINRLSDYDVDHIVPQSFLKDDSIDNKVLTRSDKARGKSDNVPSEEVVKKMKNYWRQLLNAKLITQRKFDNLTKAERGGLSELDKAGFIKRQLVETRQITKHVAQILDSRMNTKYDENDKLIREVKVITLKSKLVSDFRKDFQFYKVREINNYHHAHDAYLNAVVGTALIKKYPKLESEFVYGDYKVYDVRKMIAKSEQEIGKATAKYFFYSNIMNFFKTEITLANGEIRKRPLIETNGETGEIVWDKGRDFATVRKVLSMPQVNIVKKTEVQTGGFSKESILPKRNSDKLIARKKDWDPKKYGGFDSPTVAYSVLVVAKVEKGKSKKLKSVKELLGITIMERSSFEKNPIDFLEAKGYKEVKKDLIIKLPKYSLFELENGRKRMLASAGELQKGNELALPSKYVNFLYLASHYEKLKGSPEDNEQKQLFVEQHKHYLDEIIEQISEFSKRVILADANLDKVLSAYNKHRDKPIREQAENIIHLFTLTNLGAPAAFKYFDTTIDRKRYTSTKEVLDATLIHQSITGLYETRIDLSQLGGDGGPAPGSSGGSGGTLNIEDEYRLHETSKEPDVPLGSTWLSDFPQAWAETGGMGLAVRQAPLIIPLKATSTPVSIKQYPMSQEARLGIKPHIQRLLDQGILVPCQSPWNTPLLPVKKPGTNDYRPVQDLREVNKRVEDIHPTVPNPYNLLSGLPPSHQWYTVLDLKDAFFCLRLHPTSQPLFAFEWRDPEMGISGQLTWTRLPQGFKNSPTLFNEALHRDLADFRIQHPDLILLQYVDDLLLAATSEQDCQRGTRALLQTLGNLGYRASAKKAQICQKQVKYLGYLLKEGQRWLTEARKETVMGQPTPKTPRQLREFLGTAGFCRLWIPGFAEMAAPLYPLTKPGTLFNWGPDQQKAYQEIKQALLTAPALGLPDLTKPFELFVDEKQGYAKGVLTQKLGPWRRPVAYLSKKLDPVAAGWPPCLRMVAAIAVLTKDAGKLTMGQPLVILAPHAVEALVKQPPDRWLSNARMTHYQAMLLDTDRVQFGPVVALNPATLLPLPEKEAPHDCLEILAETHGTRPDLTDQPIPDADYTWYTDGSSFLQEGQRRAGAAVTTETEVIWARALPAGTSAQRAELIALTQALKMAEGKKLNVYTDSRYAFATAHVHGEIYRRRGWLTSEGREIKNKNEILALLKALFLPKRLSIIHCPGHQKGNSAEARGNRMADQAAREAAMKAVLETSTLLAGKRTADGSEFEKRTADGSEFESPKKKAKVE

SEQ ID NO: 971 - protein, 2096 aa, synthetic construct
MPAAKRVKLDGGDKKYSIGLDIGTNSVGWAVITDEYKVPSKKFKVLGNTDRHSIKKNLIGALLFDSGETAEATRLKRTARRRYTRRKNRICYLQEIFSNEMAKVDDSFFHRLEESFLVEEDKKHERHPIFGNIVDEVAYHEKYPTIYHLRKKLVDSTDKADLRLIYLALAHMIKFRGHFLIEGDLNPDNSDVDKLFIQLVQTYNQLFEENPINASGVDAKAILSARLSKSRRLENLIAQLPGEKKNGLFGNLIALSLGLTPNFKSNFDLAEDAKLQLSKDTYDDDLDNLLAQIGDQYADLFLAAKNLSDAILLSDILRVNTEITKAPLSASMIKRYDEHHQDLTLLKALVRQQLPEKYKEIFFDQSKNGYAGYIDGGASQEEFYKFIKPILEKMDGTEELLVKLNREDLLRKQRTFDNGSIPHQIHLGELHAILRRQEDFYPFLKDNREKIEKILTFRIPYYVGPLARGNSRFAWMTRKSEETITPWNFEEVVDKGASAQSFIERMTNFDKNLPNEKVLPKHSLLYEYFTVYNELTKVKYVTEGMRKPAFLSGEQKKAIVDLLFKTNRKVTVKQLKEDYFKKIECFDSVEISGVEDRFNASLGTYHDLLKIIKDKDFLDNEENEDILEDIVLTLTLFEDREMIEERLKTYAHLFDDKVMKQLKRRRYTGWGRLSRKLINGIRDKQSGKTILDFLKSDGFANRNFMQLIHDDSLTFKEDIQKAQVSGQGDSLHEHIANLAGSPAIKKGILQTVKVVDELVKVMGRHKPENIVIEMARENQTTQKGQKNSRERMKRIEEGIKELGSQILKEHPVENTQLQNEKLYLYYLQNGRDMYVDQELDINRLSDYDVDHIVPQSFLKDDSIDNKVLTRSDKARGKSDNVPSEEVVKKMKNYWRQLLNAKLITQRKFDNLTKAERGGLSELDKAGFIKRQLVETRQITKHVAQILDSRMNTKYDENDKLIREVKVITLKSKLVSDFRKDFQFYKVREINNYHHAHDAYLNAVVGTALIKKYPKLESEFVYGDYKVYDVRKMIAKSEQEIGKATAKYFFYSNIMNFFKTEITLANGEIRKRPLIETNGETGEIVWDKGRDFATVRKVLSMPQVNIVKKTEVQTGGFSKESILPKRNSDKLIARKKDWDPKKYGGFDSPTVAYSVLVVAKVEKGKSKKLKSVKELLGITIMERSSFEKNPIDFLEAKGYKEVKKDLIIKLPKYSLFELENGRKRMLASAGELQKGNELALPSKYVNFLYLASHYEKLKGSPEDNEQKQLFVEQHKHYLDEIIEQISEFSKRVILADANLDKVLSAYNKHRDKPIREQAENIIHLFTLTNLGAPAAFKYFDTTIDRKRYTSTKEVLDATLIHQSITGLYETRIDLSQLGGDGGGSSGGGEAAAKGGTLNIEDEYRLHETSKEPDVPLGSTWLSDFPQAWAETGGMGLAVRQAPLIIPLKATSTPVSIKQYPMSQEARLGIKPHIQRLLDQGILVPCQSPWNTPLLPVKKPGTNDYRPVQDLREVNKRVEDIHPTVPNPYNLLSGLPPSHQWYTVLDLKDAFFCLRLHPTSQPLFAFEWRDPEMGISGQLTWTRLPQGFKNSPTLFNEALHRDLADFRIQHPDLILLQYVDDLLLAATSEQDCQRGTRALLQTLGNLGYRASAKKAQICQKQVKYLGYLLKEGQRWLTEARKETVMGQPTPKTPRQLREFLGTAGFCRLWIPGFAEMAAPLYPLTKPGTLFNWGPDQQKAYQEIKQALLTAPALGLPDLTKPFELFVDEKQGYAKGVLTQKLGPWRRPVAYLSKKLDPVAAGWPPCLRMVAAIAVLTKDAGKLTMGQPLVILAPHAVEALVKQPPDRWLSNARMTHYQAMLLDTDRVQFGPVVALNPATLLPLPEKEAPHDCLEILAETHGTRPDLTDQPIPDADYTWYTDGSSFLQEGQRRAGAAVTTETEVIWARALPAGTSAQRAELIALTQALKMAEGKKLNVYTDSRYAFATAHVHGEIYRRRGWLTSEGREIKNKNEILALLKALFLPKRLSIIHCPGHQKGNSAEARGNRMADQAAREAAMKAVLETSTLLAGKRTADGSEFEKRTADGSEFESPKKKAKVE

SEQ ID NO: 972 - protein, 2100 aa, synthetic construct
MPAAKRVKLDGGDKKYSIGLDIGTNSVGWAVITDEYKVPSKKFKVLGNTDRHSIKKNLIGALLFDSGETAEATRLKRTARRRYTRRKNRICYLQEIFSNEMAKVDDSFFHRLEESFLVEEDKKHERHPIFGNIVDEVAYHEKYPTIYHLRKKLVDSTDKADLRLIYLALAHMIKFRGHFLIEGDLNPDNSDVDKLFIQLVQTYNQLFEENPINASGVDAKAILSARLSKSRRLENLIAQLPGEKKNGLFGNLIALSLGLTPNFKSNFDLAEDAKLQLSKDTYDDDLDNLLAQIGDQYADLFLAAKNLSDAILLSDILRVNTEITKAPLSASMIKRYDEHHQDLTLLKALVRQQLPEKYKEIFFDQSKNGYAGYIDGGASQEEFYKFIKPILEKMDGTEELLVKLNREDLLRKQRTFDNGSIPHQIHLGELHAILRRQEDFYPFLKDNREKIEKILTFRIPYYVGPLARGNSRFAWMTRKSEETITPWNFEEVVDKGASAQSFIERMTNFDKNLPNEKVLPKHSLLYEYFTVYNELTKVKYVTEGMRKPAFLSGEQKKAIVDLLFKTNRKVTVKQLKEDYFKKIECFDSVEISGVEDRFNASLGTYHDLLKIIKDKDFLDNEENEDILEDIVLTLTLFEDREMIEERLKTYAHLFDDKVMKQLKRRRYTGWGRLSRKLINGIRDKQSGKTILDFLKSDGFANRNFMQLIHDDSLTFKEDIQKAQVSGQGDSLHEHIANLAGSPAIKKGILQTVKVVDELVKVMGRHKPENIVIEMARENQTTQKGQKNSRERMKRIEEGIKELGSQILKEHPVENTQLQNEKLYLYYLQNGRDMYVDQELDINRLSDYDVDHIVPQSFLKDDSIDNKVLTRSDKARGKSDNVPSEEVVKKMKNYWRQLLNAKLITQRKFDNLTKAERGGLSELDKAGFIKRQLVETRQITKHVAQILDSRMNTKYDENDKLIREVKVITLKSKLVSDFRKDFQFYKVREINNYHHAHDAYLNAVVGTALIKKYPKLESEFVYGDYKVYDVRKMIAKSEQEIGKATAKYFFYSNIMNFFKTEITLANGEIRKRPLIETNGETGEIVWDKGRDFATVRKVLSMPQVNIVKKTEVQTGGFSKESILPKRNSDKLIARKKDWDPKKYGGFDSPTVAYSVLVVAKVEKGKSKKLKSVKELLGITIMERSSFEKNPIDFLEAKGYKEVKKDLIIKLPKYSLFELENGRKRMLASAGELQKGNELALPSKYVNFLYLASHYEKLKGSPEDNEQKQLFVEQHKHYLDEIIEQISEFSKRVILADANLDKVLSAYNKHRDKPIREQAENIIHLFTLTNLGAPAAFKYFDTTIDRKRYTSTKEVLDATLIHQSITGLYETRIDLSQLGGDGGGGGGSEAAAKGGGGSGGTLNIEDEYRLHETSKEPDVPLGSTWLSDFPQAWAETGGMGLAVRQAPLIIPLKATSTPVSIKQYPMSQEARLGIKPHIQRLLDQGILVPCQSPWNTPLLPVKKPGTNDYRPVQDLREVNKRVEDIHPTVPNPYNLLSGLPPSHQWYTVLDLKDAFFCLRLHPTSQPLFAFEWRDPEMGISGQLTWTRLPQGFKNSPTLFNEALHRDLADFRIQHPDLILLQYVDDLLLAATSEQDCQRGTRALLQTLGNLGYRASAKKAQICQKQVKYLGYLLKEGQRWLTEARKETVMGQPTPKTPRQLREFLGTAGFCRLWIPGFAEMAAPLYPLTKPGTLFNWGPDQQKAYQEIKQALLTAPALGLPDLTKPFELFVDEKQGYAKGVLTQKLGPWRRPVAYLSKKLDPVAAGWPPCLRMVAAIAVLTKDAGKLTMGQPLVILAPHAVEALVKQPPDRWLSNARMTHYQAMLLDTDRVQFGPVVALNPATLLPLPEKEAPHDCLEILAETHGTRPDLTDQPIPDADYTWYTDGSSFLQEGQRRAGAAVTTETEVIWARALPAGTSAQRAELIALTQALKMAEGKKLNVYTDSRYAFATAHVHGEIYRRRGWLTSEGREIKNKNEILALLKALFLPKRLSIIHCPGHQKGNSAEARGNRMADQAAREAAMKAVLETSTLLAGKRTADGSEFEKRTADGSEFESPKKKAKVE

SEQ ID NO: 973 - protein, 2096 aa, synthetic construct
MPAAKRVKLDGGDKKYSIGLDIGTNSVGWAVITDEYKVPSKKFKVLGNTDRHSIKKNLIGALLFDSGETAEATRLKRTARRRYTRRKNRICYLQEIFSNEMAKVDDSFFHRLEESFLVEEDKKHERHPIFGNIVDEVAYHEKYPTIYHLRKKLVDSTDKADLRLIYLALAHMIKFRGHFLIEGDLNPDNSDVDKLFIQLVQTYNQLFEENPINASGVDAKAILSARLSKSRRLENLIAQLPGEKKNGLFGNLIALSLGLTPNFKSNFDLAEDAKLQLSKDTYDDDLDNLLAQIGDQYADLFLAAKNLSDAILLSDILRVNTEITKAPLSASMIKRYDEHHQDLTLLKALVRQQLPEKYKEIFFDQSKNGYAGYIDGGASQEEFYKFIKPILEKMDGTEELLVKLNREDLLRKQRTFDNGSIPHQIHLGELHAILRRQEDFYPFLKDNREKIEKILTFRIPYYVGPLARGNSRFAWMTRKSEETITPWNFEEVVDKGASAQSFIERMTNFDKNLPNEKVLPKHSLLYEYFTVYNELTKVKYVTEGMRKPAFLSGEQKKAIVDLLFKTNRKVTVKQLKEDYFKKIECFDSVEISGVEDRFNASLGTYHDLLKIIKDKDFLDNEENEDILEDIVLTLTLFEDREMIEERLKTYAHLFDDKVMKQLKRRRYTGWGRLSRKLINGIRDKQSGKTILDFLKSDGFANRNFMQLIHDDSLTFKEDIQKAQVSGQGDSLHEHIANLAGSPAIKKGILQTVKVVDELVKVMGRHKPENIVIEMARENQTTQKGQKNSRERMKRIEEGIKELGSQILKEHPVENTQLQNEKLYLYYLQNGRDMYVDQELDINRLSDYDVDHIVPQSFLKDDSIDNKVLTRSDKARGKSDNVPSEEVVKKMKNYWRQLLNAKLITQRKFDNLTKAERGGLSELDKAGFIKRQLVETRQITKHVAQILDSRMNTKYDENDKLIREVKVITLKSKLVSDFRKDFQFYKVREINNYHHAHDAYLNAVVGTALIKKYPKLESEFVYGDYKVYDVRKMIAKSEQEIGKATAKYFFYSNIMNFFKTEITLANGEIRKRPLIETNGETGEIVWDKGRDFATVRKVLSMPQVNIVKKTEVQTGGFSKESILPKRNSDKLIARKKDWDPKKYGGFDSPTVAYSVLVVAKVEKGKSKKLKSVKELLGITIMERSSFEKNPIDFLEAKGYKEVKKDLIIKLPKYSLFELENGRKRMLASAGELQKGNELALPSKYVNFLYLASHYEKLKGSPEDNEQKQLFVEQHKHYLDEIIEQISEFSKRVILADANLDKVLSAYNKHRDKPIREQAENIIHLFTLTNLGAPAAFKYFDTTIDRKRYTSTKEVLDATLIHQSITGLYETRIDLSQLGGDGGGGGGGSEAAAKGGTLNIEDEYRLHETSKEPDVPLGSTWLSDFPQAWAETGGMGLAVRQAPLIIPLKATSTPVSIKQYPMSQEARLGIKPHIQRLLDQGILVPCQSPWNTPLLPVKKPGTNDYRPVQDLREVNKRVEDIHPTVPNPYNLLSGLPPSHQWYTVLDLKDAFFCLRLHPTSQPLFAFEWRDPEMGISGQLTWTRLPQGFKNSPTLFNEALHRDLADFRIQHPDLILLQYVDDLLLAATSEQDCQRGTRALLQTLGNLGYRASAKKAQICQKQVKYLGYLLKEGQRWLTEARKETVMGQPTPKTPRQLREFLGTAGFCRLWIPGFAEMAAPLYPLTKPGTLFNWGPDQQKAYQEIKQALLTAPALGLPDLTKPFELFVDEKQGYAKGVLTQKLGPWRRPVAYLSKKLDPVAAGWPPCLRMVAAIAVLTKDAGKLTMGQPLVILAPHAVEALVKQPPDRWLSNARMTHYQAMLLDTDRVQFGPVVALNPATLLPLPEKEAPHDCLEILAETHGTRPDLTDQPIPDADYTWYTDGSSFLQEGQRRAGAAVTTETEVIWARALPAGTSAQRAELIALTQALKMAEGKKLNVYTDSRYAFATAHVHGEIYRRRGWLTSEGREIKNKNEILALLKALFLPKRLSIIHCPGHQKGNSAEARGNRMADQAAREAAMKAVLETSTLLAGKRTADGSEFEKRTADGSEFESPKKKAKVE

SEQ ID NO: 974 - protein, 2091 aa, synthetic construct
MPAAKRVKLDGGDKKYSIGLDIGTNSVGWAVITDEYKVPSKKFKVLGNTDRHSIKKNLIGALLFDSGETAEATRLKRTARRRYTRRKNRICYLQEIFSNEMAKVDDSFFHRLEESFLVEEDKKHERHPIFGNIVDEVAYHEKYPTIYHLRKKLVDSTDKADLRLIYLALAHMIKFRGHFLIEGDLNPDNSDVDKLFIQLVQTYNQLFEENPINASGVDAKAILSARLSKSRRLENLIAQLPGEKKNGLFGNLIALSLGLTPNFKSNFDLAEDAKLQLSKDTYDDDLDNLLAQIGDQYADLFLAAKNLSDAILLSDILRVNTEITKAPLSASMIKRYDEHHQDLTLLKALVRQQLPEKYKEIFFDQSKNGYAGYIDGGASQEEFYKFIKPILEKMDGTEELLVKLNREDLLRKQRTFDNGSIPHQIHLGELHAILRRQEDFYPFLKDNREKIEKILTFRIPYYVGPLARGNSRFAWMTRKSEETITPWNFEEVVDKGASAQSFIERMTNFDKNLPNEKVLPKHSLLYEYFTVYNELTKVKYVTEGMRKPAFLSGEQKKAIVDLLFKTNRKVTVKQLKEDYFKKIECFDSVEISGVEDRFNASLGTYHDLLKIIKDKDFLDNEENEDILEDIVLTLTLFEDREMIEERLKTYAHLFDDKVMKQLKRRRYTGWGRLSRKLINGIRDKQSGKTILDFLKSDGFANRNFMQLIHDDSLTFKEDIQKAQVSGQGDSLHEHIANLAGSPAIKKGILQTVKVVDELVKVMGRHKPENIVIEMARENQTTQKGQKNSRERMKRIEEGIKELGSQILKEHPVENTQLQNEKLYLYYLQNGRDMYVDQELDINRLSDYDVDHIVPQSFLKDDSIDNKVLTRSDKARGKSDNVPSEEVVKKMKNYWRQLLNAKLITQRKFDNLTKAERGGLSELDKAGFIKRQLVETRQITKHVAQILDSRMNTKYDENDKLIREVKVITLKSKLVSDFRKDFQFYKVREINNYHHAHDAYLNAVVGTALIKKYPKLESEFVYGDYKVYDVRKMIAKSEQEIGKATAKYFFYSNIMNFFKTEITLANGEIRKRPLIETNGETGEIVWDKGRDFATVRKVLSMPQVNIVKKTEVQTGGFSKESILPKRNSDKLIARKKDWDPKKYGGFDSPTVAYSVLVVAKVEKGKSKKLKSVKELLGITIMERSSFEKNPIDFLEAKGYKEVKKDLIIKLPKYSLFELENGRKRMLASAGELQKGNELALPSKYVNFLYLASHYEKLKGSPEDNEQKQLFVEQHKHYLDEIIEQISEFSKRVILADANLDKVLSAYNKHRDKPIREQAENIIHLFTLTNLGAPAAFKYFDTTIDRKRYTSTKEVLDATLIHQSITGLYETRIDLSQLGGDGGGGGGGSGGTLNIEDEYRLHETSKEPDVPLGSTWLSDFPQAWAETGGMGLAVRQAPLIIPLKATSTPVSIKQYPMSQEARLGIKPHIQRLLDQGILVPCQSPWNTPLLPVKKPGTNDYRPVQDLREVNKRVEDIHPTVPNPYNLLSGLPPSHQWYTVLDLKDAFFCLRLHPTSQPLFAFEWRDPEMGISGQLTWTRLPQGFKNSPTLFNEALHRDLADFRIQHPDLILLQYVDDLLLAATSEQDCQRGTRALLQTLGNLGYRASAKKAQICQKQVKYLGYLLKEGQRWLTEARKETVMGQPTPKTPRQLREFLGTAGFCRLWIPGFAEMAAPLYPLTKPGTLFNWGPDQQKAYQEIKQALLTAPALGLPDLTKPFELFVDEKQGYAKGVLTQKLGPWRRPVAYLSKKLDPVAAGWPPCLRMVAAIAVLTKDAGKLTMGQPLVILAPHAVEALVKQPPDRWLSNARMTHYQAMLLDTDRVQFGPVVALNPATLLPLPEKEAPHDCLEILAETHGTRPDLTDQPIPDADYTWYTDGSSFLQEGQRRAGAAVTTETEVIWARALPAGTSAQRAELIALTQALKMAEGKKLNVYTDSRYAFATAHVHGEIYRRRGWLTSEGREIKNKNEILALLKALFLPKRLSIIHCPGHQKGNSAEARGNRMADQAAREAAMKAVLETSTLLAGKRTADGSEFEKRTADGSEFESPKKKAKVE

SEQ ID NO: 975 - protein, 2096 aa, synthetic construct
MPAAKRVKLDGGDKKYSIGLDIGTNSVGWAVITDEYKVPSKKFKVLGNTDRHSIKKNLIGALLFDSGETAEATRLKRTARRRYTRRKNRICYLQEIFSNEMAKVDDSFFHRLEESFLVEEDKKHERHPIFGNIVDEVAYHEKYPTIYHLRKKLVDSTDKADLRLIYLALAHMIKFRGHFLIEGDLNPDNSDVDKLFIQLVQTYNQLFEENPINASGVDAKAILSARLSKSRRLENLIAQLPGEKKNGLFGNLIALSLGLTPNFKSNFDLAEDAKLQLSKDTYDDDLDNLLAQIGDQYADLFLAAKNLSDAILLSDILRVNTEITKAPLSASMIKRYDEHHQDLTLLKALVRQQLPEKYKEIFFDQSKNGYAGYIDGGASQEEFYKFIKPILEKMDGTEELLVKLNREDLLRKQRTFDNGSIPHQIHLGELHAILRRQEDFYPFLKDNREKIEKILTFRIPYYVGPLARGNSRFAWMTRKSEETITPWNFEEVVDKGASAQSFIERMTNFDKNLPNEKVLPKHSLLYEYFTVYNELTKVKYVTEGMRKPAFLSGEQKKAIVDLLFKTNRKVTVKQLKEDYFKKIECFDSVEISGVEDRFNASLGTYHDLLKIIKDKDFLDNEENEDILEDIVLTLTLFEDREMIEERLKTYAHLFDDKVMKQLKRRRYTGWGRLSRKLINGIRDKQSGKTILDFLKSDGFANRNFMQLIHDDSLTFKEDIQKAQVSGQGDSLHEHIANLAGSPAIKKGILQTVKVVDELVKVMGRHKPENIVIEMARENQTTQKGQKNSRERMKRIEEGIKELGSQILKEHPVENTQLQNEKLYLYYLQNGRDMYVDQELDINRLSDYDVDHIVPQSFLKDDSIDNKVLTRSDKARGKSDNVPSEEVVKKMKNYWRQLLNAKLITQRKFDNLTKAERGGLSELDKAGFIKRQLVETRQITKHVAQILDSRMNTKYDENDKLIREVKVITLKSKLVSDFRKDFQFYKVREINNYHHAHDAYLNAVVGTALIKKYPKLESEFVYGDYKVYDVRKMIAKSEQEIGKATAKYFFYSNIMNFFKTEITLANGEIRKRPLIETNGETGEIVWDKGRDFATVRKVLSMPQVNIVKKTEVQTGGFSKESILPKRNSDKLIARKKDWDPKKYGGFDSPTVAYSVLVVAKVEKGKSKKLKSVKELLGITIMERSSFEKNPIDFLEAKGYKEVKKDLIIKLPKYSLFELENGRKRMLASAGELQKGNELALPSKYVNFLYLASHYEKLKGSPEDNEQKQLFVEQHKHYLDEIIEQISEFSKRVILADANLDKVLSAYNKHRDKPIREQAENIIHLFTLTNLGAPAAFKYFDTTIDRKRYTSTKEVLDATLIHQSITGLYETRIDLSQLGGDGGGSSGGSEAAAKGGTLNIEDEYRLHETSKEPDVPLGSTWLSDFPQAWAETGGMGLAVRQAPLIIPLKATSTPVSIKQYPMSQEARLGIKPHIQRLLDQGILVPCQSPWNTPLLPVKKPGTNDYRPVQDLREVNKRVEDIHPTVPNPYNLLSGLPPSHQWYTVLDLKDAFFCLRLHPTSQPLFAFEWRDPEMGISGQLTWTRLPQGFKNSPTLFNEALHRDLADFRIQHPDLILLQYVDDLLLAATSEQDCQRGTRALLQTLGNLGYRASAKKAQICQKQVKYLGYLLKEGQRWLTEARKETVMGQPTPKTPRQLREFLGTAGFCRLWIPGFAEMAAPLYPLTKPGTLFNWGPDQQKAYQEIKQALLTAPALGLPDLTKPFELFVDEKQGYAKGVLTQKLGPWRRPVAYLSKKLDPVAAGWPPCLRMVAAIAVLTKDAGKLTMGQPLVILAPHAVEALVKQPPDRWLSNARMTHYQAMLLDTDRVQFGPVVALNPATLLPLPEKEAPHDCLEILAETHGTRPDLTDQPIPDADYTWYTDGSSFLQEGQRRAGAAVTTETEVIWARALPAGTSAQRAELIALTQALKMAEGKKLNVYTDSRYAFATAHVHGEIYRRRGWLTSEGREIKNKNEILALLKALFLPKRLSIIHCPGHQKGNSAEARGNRMADQAAREAAMKAVLETSTLLAGKRTADGSEFEKRTADGSEFESPKKKAKVE

SEQ ID NO: 976 - protein, 2115 aa, synthetic construct
MPAAKRVKLDGGDKKYSIGLDIGTNSVGWAVITDEYKVPSKKFKVLGNTDRHSIKKNLIGALLFDSGETAEATRLKRTARRRYTRRKNRICYLQEIFSNEMAKVDDSFFHRLEESFLVEEDKKHERHPIFGNIVDEVAYHEKYPTIYHLRKKLVDSTDKADLRLIYLALAHMIKFRGHFLIEGDLNPDNSDVDKLFIQLVQTYNQLFEENPINASGVDAKAILSARLSKSRRLENLIAQLPGEKKNGLFGNLIALSLGLTPNFKSNFDLAEDAKLQLSKDTYDDDLDNLLAQIGDQYADLFLAAKNLSDAILLSDILRVNTEITKAPLSASMIKRYDEHHQDLTLLKALVRQQLPEKYKEIFFDQSKNGYAGYIDGGASQEEFYKFIKPILEKMDGTEELLVKLNREDLLRKQRTFDNGSIPHQIHLGELHAILRRQEDFYPFLKDNREKIEKILTFRIPYYVGPLARGNSRFAWMTRKSEETITPWNFEEVVDKGASAQSFIERMTNFDKNLPNEKVLPKHSLLYEYFTVYNELTKVKYVTEGMRKPAFLSGEQKKAIVDLLFKTNRKVTVKQLKEDYFKKIECFDSVEISGVEDRFNASLGTYHDLLKIIKDKDFLDNEENEDILEDIVLTLTLFEDREMIEERLKTYAHLFDDKVMKQLKRRRYTGWGRLSRKLINGIRDKQSGKTILDFLKSDGFANRNFMQLIHDDSLTFKEDIQKAQVSGQGDSLHEHIANLAGSPAIKKGILQTVKVVDELVKVMGRHKPENIVIEMARENQTTQKGQKNSRERMKRIEEGIKELGSQILKEHPVENTQLQNEKLYLYYLQNGRDMYVDQELDINRLSDYDVDHIVPQSFLKDDSIDNKVLTRSDKARGKSDNVPSEEVVKKMKNYWRQLLNAKLITQRKFDNLTKAERGGLSELDKAGFIKRQLVETRQITKHVAQILDSRMNTKYDENDKLIREVKVITLKSKLVSDFRKDFQFYKVREINNYHHAHDAYLNAVVGTALIKKYPKLESEFVYGDYKVYDVRKMIAKSEQEIGKATAKYFFYSNIMNFFKTEITLANGEIRKRPLIETNGETGEIVWDKGRDFATVRKVLSMPQVNIVKKTEVQTGGFSKESILPKRNSDKLIARKKDWDPKKYGGFDSPTVAYSVLVVAKVEKGKSKKLKSVKELLGITIMERSSFEKNPIDFLEAKGYKEVKKDLIIKLPKYSLFELENGRKRMLASAGELQKGNELALPSKYVNFLYLASHYEKLKGSPEDNEQKQLFVEQHKHYLDEIIEQISEFSKRVILADANLDKVLSAYNKHRDKPIREQAENIIHLFTLTNLGAPAAFKYFDTTIDRKRYTSTKEVLDATLIHQSITGLYETRIDLSQLGGDGGGGGGSGGGGSGGGGSGGGGSGGGGSGGGGSGGTLNIEDEYRLHETSKEPDVPLGSTWLSDFPQAWAETGGMGLAVRQAPLIIPLKATSTPVSIKQYPMSQEARLGIKPHIQRLLDQGILVPCQSPWNTPLLPVKKPGTNDYRPVQDLREVNKRVEDIHPTVPNPYNLLSGLPPSHQWYTVLDLKDAFFCLRLHPTSQPLFAFEWRDPEMGISGQLTWTRLPQGFKNSPTLFNEALHRDLADFRIQHPDLILLQYVDDLLLAATSEQDCQRGTRALLQTLGNLGYRASAKKAQICQKQVKYLGYLLKEGQRWLTEARKETVMGQPTPKTPRQLREFLGTAGFCRLWIPGFAEMAAPLYPLTKPGTLFNWGPDQQKAYQEIKQALLTAPALGLPDLTKPFELFVDEKQGYAKGVLTQKLGPWRRPVAYLSKKLDPVAAGWPPCLRMVAAIAVLTKDAGKLTMGQPLVILAPHAVEALVKQPPDRWLSNARMTHYQAMLLDTDRVQFGPVVALNPATLLPLPEKEAPHDCLEILAETHGTRPDLTDQPIPDADYTWYTDGSSFLQEGQRRAGAAVTTETEVIWARALPAGTSAQRAELIALTQALKMAEGKKLNVYTDSRYAFATAHVHGEIYRRRGWLTSEGREIKNKNEILALLKALFLPKRLSIIHCPGHQKGNSAEARGNRMADQAAREAAMKAVLETSTLLAGKRTADGSEFEKRTADGSEFESPKKKAKVE

SEQ ID NO: 977 - protein, 2105 aa, synthetic construct
MPAAKRVKLDGGDKKYSIGLDIGTNSVGWAVITDEYKVPSKKFKVLGNTDRHSIKKNLIGALLFDSGETAEATRLKRTARRRYTRRKNRICYLQEIFSNEMAKVDDSFFHRLEESFLVEEDKKHERHPIFGNIVDEVAYHEKYPTIYHLRKKLVDSTDKADLRLIYLALAHMIKFRGHFLIEGDLNPDNSDVDKLFIQLVQTYNQLFEENPINASGVDAKAILSARLSKSRRLENLIAQLPGEKKNGLFGNLIALSLGLTPNFKSNFDLAEDAKLQLSKDTYDDDLDNLLAQIGDQYADLFLAAKNLSDAILLSDILRVNTEITKAPLSASMIKRYDEHHQDLTLLKALVRQQLPEKYKEIFFDQSKNGYAGYIDGGASQEEFYKFIKPILEKMDGTEELLVKLNREDLLRKQRTFDNGSIPHQIHLGELHAILRRQEDFYPFLKDNREKIEKILTFRIPYYVGPLARGNSRFAWMTRKSEETITPWNFEEVVDKGASAQSFIERMTNFDKNLPNEKVLPKHSLLYEYFTVYNELTKVKYVTEGMRKPAFLSGEQKKAIVDLLFKTNRKVTVKQLKEDYFKKIECFDSVEISGVEDRFNASLGTYHDLLKIIKDKDFLDNEENEDILEDIVLTLTLFEDREMIEERLKTYAHLFDDKVMKQLKRRRYTGWGRLSRKLINGIRDKQSGKTILDFLKSDGFANRNFMQLIHDDSLTFKEDIQKAQVSGQGDSLHEHIANLAGSPAIKKGILQTVKVVDELVKVMGRHKPENIVIEMARENQTTQKGQKNSRERMKRIEEGIKELGSQILKEHPVENTQLQNEKLYLYYLQNGRDMYVDQELDINRLSDYDVDHIVPQSFLKDDSIDNKVLTRSDKARGKSDNVPSEEVVKKMKNYWRQLLNAKLITQRKFDNLTKAERGGLSELDKAGFIKRQLVETRQITKHVAQILDSRMNTKYDENDKLIREVKVITLKSKLVSDFRKDFQFYKVREINNYHHAHDAYLNAVVGTALIKKYPKLESEFVYGDYKVYDVRKMIAKSEQEIGKATAKYFFYSNIMNFFKTEITLANGEIRKRPLIETNGETGEIVWDKGRDFATVRKVLSMPQVNIVKKTEVQTGGFSKESILPKRNSDKLIARKKDWDPKKYGGFDSPTVAYSVLVVAKVEKGKSKKLKSVKELLGITIMERSSFEKNPIDFLEAKGYKEVKKDLIIKLPKYSLFELENGRKRMLASAGELQKGNELALPSKYVNFLYLASHYEKLKGSPEDNEQKQLFVEQHKHYLDEIIEQISEFSKRVILADANLDKVLSAYNKHRDKPIREQAENIIHLFTLTNLGAPAAFKYFDTTIDRKRYTSTKEVLDATLIHQSITGLYETRIDLSQLGGDGGGGGGSGGGGSGGGGSGGGGSGGTLNIEDEYRLHETSKEPDVPLGSTWLSDFPQAWAETGGMGLAVRQAPLIIPLKATSTPVSIKQYPMSQEARLGIKPHIQRLLDQGILVPCQSPWNTPLLPVKKPGTNDYRPVQDLREVNKRVEDIHPTVPNPYNLLSGLPPSHQWYTVLDLKDAFFCLRLHPTSQPLFAFEWRDPEMGISGQLTWTRLPQGFKNSPTLFNEALHRDLADFRIQHPDLILLQYVDDLLLAATSEQDCQRGTRALLQTLGNLGYRASAKKAQICQKQVKYLGYLLKEGQRWLTEARKETVMGQPTPKTPRQLREFLGTAGFCRLWIPGFAEMAAPLYPLTKPGTLFNWGPDQQKAYQEIKQALLTAPALGLPDLTKPFELFVDEKQGYAKGVLTQKLGPWRRPVAYLSKKLDPVAAGWPPCLRMVAAIAVLTKDAGKLTMGQPLVILAPHAVEALVKQPPDRWLSNARMTHYQAMLLDTDRVQFGPVVALNPATLLPLPEKEAPHDCLEILAETHGTRPDLTDQPIPDADYTWYTDGSSFLQEGQRRAGAAVTTETEVIWARALPAGTSAQRAELIALTQALKMAEGKKLNVYTDSRYAFATAHVHGEIYRRRGWLTSEGREIKNKNEILALLKALFLPKRLSIIHCPGHQKGNSAEARGNRMADQAAREAAMKAVLETSTLLAGKRTADGSEFEKRTADGSEFESPKKKAKVE

SEQ ID NO: 978 - protein, 2094 aa, synthetic construct
MPAAKRVKLDGGDKKYSIGLDIGTNSVGWAVITDEYKVPSKKFKVLGNTDRHSIKKNLIGALLFDSGETAEATRLKRTARRRYTRRKNRICYLQEIFSNEMAKVDDSFFHRLEESFLVEEDKKHERHPIFGNIVDEVAYHEKYPTIYHLRKKLVDSTDKADLRLIYLALAHMIKFRGHFLIEGDLNPDNSDVDKLFIQLVQTYNQLFEENPINASGVDAKAILSARLSKSRRLENLIAQLPGEKKNGLFGNLIALSLGLTPNFKSNFDLAEDAKLQLSKDTYDDDLDNLLAQIGDQYADLFLAAKNLSDAILLSDILRVNTEITKAPLSASMIKRYDEHHQDLTLLKALVRQQLPEKYKEIFFDQSKNGYAGYIDGGASQEEFYKFIKPILEKMDGTEELLVKLNREDLLRKQRTFDNGSIPHQIHLGELHAILRRQEDFYPFLKDNREKIEKILTFRIPYYVGPLARGNSRFAWMTRKSEETITPWNFEEVVDKGASAQSFIERMTNFDKNLPNEKVLPKHSLLYEYFTVYNELTKVKYVTEGMRKPAFLSGEQKKAIVDLLFKTNRKVTVKQLKEDYFKKIECFDSVEISGVEDRFNASLGTYHDLLKIIKDKDFLDNEENEDILEDIVLTLTLFEDREMIEERLKTYAHLFDDKVMKQLKRRRYTGWGRLSRKLINGIRDKQSGKTILDFLKSDGFANRNFMQLIHDDSLTFKEDIQKAQVSGQGDSLHEHIANLAGSPAIKKGILQTVKVVDELVKVMGRHKPENIVIEMARENQTTQKGQKNSRERMKRIEEGIKELGSQILKEHPVENTQLQNEKLYLYYLQNGRDMYVDQELDINRLSDYDVDHIVPQSFLKDDSIDNKVLTRSDKARGKSDNVPSEEVVKKMKNYWRQLLNAKLITQRKFDNLTKAERGGLSELDKAGFIKRQLVETRQITKHVAQILDSRMNTKYDENDKLIREVKVITLKSKLVSDFRKDFQFYKVREINNYHHAHDAYLNAVVGTALIKKYPKLESEFVYGDYKVYDVRKMIAKSEQEIGKATAKYFFYSNIMNFFKTEITLANGEIRKRPLIETNGETGEIVWDKGRDFATVRKVLSMPQVNIVKKTEVQTGGFSKESILPKRNSDKLIARKKDWDPKKYGGFDSPTVAYSVLVVAKVEKGKSKKLKSVKELLGITIMERSSFEKNPIDFLEAKGYKEVKKDLIIKLPKYSLFELENGRKRMLASAGELQKGNELALPSKYVNFLYLASHYEKLKGSPEDNEQKQLFVEQHKHYLDEIIEQISEFSKRVILADANLDKVLSAYNKHRDKPIREQAENIIHLFTLTNLGAPAAFKYFDTTIDRKRYTSTKEVLDATLIHQSITGLYETRIDLSQLGGDGGPAPAPAPAPGGTLNIEDEYRLHETSKEPDVPLGSTWLSDFPQAWAETGGMGLAVRQAPLIIPLKATSTPVSIKQYPMSQEARLGIKPHIQRLLDQGILVPCQSPWNTPLLPVKKPGTNDYRPVQDLREVNKRVEDIHPTVPNPYNLLSGLPPSHQWYTVLDLKDAFFCLRLHPTSQPLFAFEWRDPEMGISGQLTWTRLPQGFKNSPTLFNEALHRDLADFRIQHPDLILLQYVDDLLLAATSEQDCQRGTRALLQTLGNLGYRASAKKAQICQKQVKYLGYLLKEGQRWLTEARKETVMGQPTPKTPRQLREFLGTAGFCRLWIPGFAEMAAPLYPLTKPGTLFNWGPDQQKAYQEIKQALLTAPALGLPDLTKPFELFVDEKQGYAKGVLTQKLGPWRRPVAYLSKKLDPVAAGWPPCLRMVAAIAVLTKDAGKLTMGQPLVILAPHAVEALVKQPPDRWLSNARMTHYQAMLLDTDRVQFGPVVALNPATLLPLPEKEAPHDCLEILAETHGTRPDLTDQPIPDADYTWYTDGSSFLQEGQRRAGAAVTTETEVIWARALPAGTSAQRAELIALTQALKMAEGKKLNVYTDSRYAFATAHVHGEIYRRRGWLTSEGREIKNKNEILALLKALFLPKRLSIIHCPGHQKGNSAEARGNRMADQAAREAAMKAVLETSTLLAGKRTADGSEFEKRTADGSEFESPKKKAKVE

SEQ ID NO: 979 - protein, 2096 aa, synthetic construct
MPAAKRVKLDGGDKKYSIGLDIGTNSVGWAVITDEYKVPSKKFKVLGNTDRHSIKKNLIGALLFDSGETAEATRLKRTARRRYTRRKNRICYLQEIFSNEMAKVDDSFFHRLEESFLVEEDKKHERHPIFGNIVDEVAYHEKYPTIYHLRKKLVDSTDKADLRLIYLALAHMIKFRGHFLIEGDLNPDNSDVDKLFIQLVQTYNQLFEENPINASGVDAKAILSARLSKSRRLENLIAQLPGEKKNGLFGNLIALSLGLTPNFKSNFDLAEDAKLQLSKDTYDDDLDNLLAQIGDQYADLFLAAKNLSDAILLSDILRVNTEITKAPLSASMIKRYDEHHQDLTLLKALVRQQLPEKYKEIFFDQSKNGYAGYIDGGASQEEFYKFIKPILEKMDGTEELLVKLNREDLLRKQRTFDNGSIPHQIHLGELHAILRRQEDFYPFLKDNREKIEKILTFRIPYYVGPLARGNSRFAWMTRKSEETITPWNFEEVVDKGASAQSFIERMTNFDKNLPNEKVLPKHSLLYEYFTVYNELTKVKYVTEGMRKPAFLSGEQKKAIVDLLFKTNRKVTVKQLKEDYFKKIECFDSVEISGVEDRFNASLGTYHDLLKIIKDKDFLDNEENEDILEDIVLTLTLFEDREMIEERLKTYAHLFDDKVMKQLKRRRYTGWGRLSRKLINGIRDKQSGKTILDFLKSDGFANRNFMQLIHDDSLTFKEDIQKAQVSGQGDSLHEHIANLAGSPAIKKGILQTVKVVDELVKVMGRHKPENIVIEMARENQTTQKGQKNSRERMKRIEEGIKELGSQILKEHPVENTQLQNEKLYLYYLQNGRDMYVDQELDINRLSDYDVDHIVPQSFLKDDSIDNKVLTRSDKARGKSDNVPSEEVVKKMKNYWRQLLNAKLITQRKFDNLTKAERGGLSELDKAGFIKRQLVETRQITKHVAQILDSRMNTKYDENDKLIREVKVITLKSKLVSDFRKDFQFYKVREINNYHHAHDAYLNAVVGTALIKKYPKLESEFVYGDYKVYDVRKMIAKSEQEIGKATAKYFFYSNIMNFFKTEITLANGEIRKRPLIETNGETGEIVWDKGRDFATVRKVLSMPQVNIVKKTEVQTGGFSKESILPKRNSDKLIARKKDWDPKKYGGFDSPTVAYSVLVVAKVEKGKSKKLKSVKELLGITIMERSSFEKNPIDFLEAKGYKEVKKDLIIKLPKYSLFELENGRKRMLASAGELQKGNELALPSKYVNFLYLASHYEKLKGSPEDNEQKQLFVEQHKHYLDEIIEQISEFSKRVILADANLDKVLSAYNKHRDKPIREQAENIIHLFTLTNLGAPAAFKYFDTTIDRKRYTSTKEVLDATLIHQSITGLYETRIDLSQLGGDGGGGGEAAAKGGSGGTLNIEDEYRLHETSKEPDVPLGSTWLSDFPQAWAETGGMGLAVRQAPLIIPLKATSTPVSIKQYPMSQEARLGIKPHIQRLLDQGILVPCQSPWNTPLLPVKKPGTNDYRPVQDLREVNKRVEDIHPTVPNPYNLLSGLPPSHQWYTVLDLKDAFFCLRLHPTSQPLFAFEWRDPEMGISGQLTWTRLPQGFKNSPTLFNEALHRDLADFRIQHPDLILLQYVDDLLLAATSEQDCQRGTRALLQTLGNLGYRASAKKAQICQKQVKYLGYLLKEGQRWLTEARKETVMGQPTPKTPRQLREFLGTAGFCRLWIPGFAEMAAPLYPLTKPGTLFNWGPDQQKAYQEIKQALLTAPALGLPDLTKPFELFVDEKQGYAKGVLTQKLGPWRRPVAYLSKKLDPVAAGWPPCLRMVAAIAVLTKDAGKLTMGQPLVILAPHAVEALVKQPPDRWLSNARMTHYQAMLLDTDRVQFGPVVALNPATLLPLPEKEAPHDCLEILAETHGTRPDLTDQPIPDADYTWYTDGSSFLQEGQRRAGAAVTTETEVIWARALPAGTSAQRAELIALTQALKMAEGKKLNVYTDSRYAFATAHVHGEIYRRRGWLTSEGREIKNKNEILALLKALFLPKRLSIIHCPGHQKGNSAEARGNRMADQAAREAAMKAVLETSTLLAGKRTADGSEFEKRTADGSEFESPKKKAKVE

SEQ ID NO: 980 - protein, 2094 aa, synthetic construct
MPAAKRVKLDGGDKKYSIGLDIGTNSVGWAVITDEYKVPSKKFKVLGNTDRHSIKKNLIGALLFDSGETAEATRLKRTARRRYTRRKNRICYLQEIFSNEMAKVDDSFFHRLEESFLVEEDKKHERHPIFGNIVDEVAYHEKYPTIYHLRKKLVDSTDKADLRLIYLALAHMIKFRGHFLIEGDLNPDNSDVDKLFIQLVQTYNQLFEENPINASGVDAKAILSARLSKSRRLENLIAQLPGEKKNGLFGNLIALSLGLTPNFKSNFDLAEDAKLQLSKDTYDDDLDNLLAQIGDQYADLFLAAKNLSDAILLSDILRVNTEITKAPLSASMIKRYDEHHQDLTLLKALVRQQLPEKYKEIFFDQSKNGYAGYIDGGASQEEFYKFIKPILEKMDGTEELLVKLNREDLLRKQRTFDNGSIPHQIHLGELHAILRRQEDFYPFLKDNREKIEKILTFRIPYYVGPLARGNSRFAWMTRKSEETITPWNFEEVVDKGASAQSFIERMTNFDKNLPNEKVLPKHSLLYEYFTVYNELTKVKYVTEGMRKPAFLSGEQKKAIVDLLFKTNRKVTVKQLKEDYFKKIECFDSVEISGVEDRFNASLGTYHDLLKIIKDKDFLDNEENEDILEDIVLTLTLFEDREMIEERLKTYAHLFDDKVMKQLKRRRYTGWGRLSRKLINGIRDKQSGKTILDFLKSDGFANRNFMQLIHDDSLTFKEDIQKAQVSGQGDSLHEHIANLAGSPAIKKGILQTVKVVDELVKVMGRHKPENIVIEMARENQTTQKGQKNSRERMKRIEEGIKELGSQILKEHPVENTQLQNEKLYLYYLQNGRDMYVDQELDINRLSDYDVDHIVPQSFLKDDSIDNKVLTRSDKARGKSDNVPSEEVVKKMKNYWRQLLNAKLITQRKFDNLTKAERGGLSELDKAGFIKRQLVETRQITKHVAQILDSRMNTKYDENDKLIREVKVITLKSKLVSDFRKDFQFYKVREINNYHHAHDAYLNAVVGTALIKKYPKLESEFVYGDYKVYDVRKMIAKSEQEIGKATAKYFFYSNIMNFFKTEITLANGEIRKRPLIETNGETGEIVWDKGRDFATVRKVLSMPQVNIVKKTEVQTGGFSKESILPKRNSDKLIARKKDWDPKKYGGFDSPTVAYSVLVVAKVEKGKSKKLKSVKELLGITIMERSSFEKNPIDFLEAKGYKEVKKDLIIKLPKYSLFELENGRKRMLASAGELQKGNELALPSKYVNFLYLASHYEKLKGSPEDNEQKQLFVEQHKHYLDEIIEQISEFSKRVILADANLDKVLSAYNKHRDKPIREQAENIIHLFTLTNLGAPAAFKYFDTTIDRKRYTSTKEVLDATLIHQSITGLYETRIDLSQLGGDGGGGSGGSGGSGGTLNIEDEYRLHETSKEPDVPLGSTWLSDFPQAWAETGGMGLAVRQAPLIIPLKATSTPVSIKQYPMSQEARLGIKPHIQRLLDQGILVPCQSPWNTPLLPVKKPGTNDYRPVQDLREVNKRVEDIHPTVPNPYNLLSGLPPSHQWYTVLDLKDAFFCLRLHPTSQPLFAFEWRDPEMGISGQLTWTRLPQGFKNSPTLFNEALHRDLADFRIQHPDLILLQYVDDLLLAATSEQDCQRGTRALLQTLGNLGYRASAKKAQICQKQVKYLGYLLKEGQRWLTEARKETVMGQPTPKTPRQLREFLGTAGFCRLWIPGFAEMAAPLYPLTKPGTLFNWGPDQQKAYQEIKQALLTAPALGLPDLTKPFELFVDEKQGYAKGVLTQKLGPWRRPVAYLSKKLDPVAAGWPPCLRMVAAIAVLTKDAGKLTMGQPLVILAPHAVEALVKQPPDRWLSNARMTHYQAMLLDTDRVQFGPVVALNPATLLPLPEKEAPHDCLEILAETHGTRPDLTDQPIPDADYTWYTDGSSFLQEGQRRAGAAVTTETEVIWARALPAGTSAQRAELIALTQALKMAEGKKLNVYTDSRYAFATAHVHGEIYRRRGWLTSEGREIKNKNEILALLKALFLPKRLSIIHCPGHQKGNSAEARGNRMADQAAREAAMKAVLETSTLLAGKRTADGSEFEKRTADGSEFESPKKKAKVE

SEQ ID NO: 981 - protein, 2100 aa, synthetic construct
MPAAKRVKLDGGDKKYSIGLDIGTNSVGWAVITDEYKVPSKKFKVLGNTDRHSIKKNLIGALLFDSGETAEATRLKRTARRRYTRRKNRICYLQEIFSNEMAKVDDSFFHRLEESFLVEEDKKHERHPIFGNIVDEVAYHEKYPTIYHLRKKLVDSTDKADLRLIYLALAHMIKFRGHFLIEGDLNPDNSDVDKLFIQLVQTYNQLFEENPINASGVDAKAILSARLSKSRRLENLIAQLPGEKKNGLFGNLIALSLGLTPNFKSNFDLAEDAKLQLSKDTYDDDLDNLLAQIGDQYADLFLAAKNLSDAILLSDILRVNTEITKAPLSASMIKRYDEHHQDLTLLKALVRQQLPEKYKEIFFDQSKNGYAGYIDGGASQEEFYKFIKPILEKMDGTEELLVKLNREDLLRKQRTFDNGSIPHQIHLGELHAILRRQEDFYPFLKDNREKIEKILTFRIPYYVGPLARGNSRFAWMTRKSEETITPWNFEEVVDKGASAQSFIERMTNFDKNLPNEKVLPKHSLLYEYFTVYNELTKVKYVTEGMRKPAFLSGEQKKAIVDLLFKTNRKVTVKQLKEDYFKKIECFDSVEISGVEDRFNASLGTYHDLLKIIKDKDFLDNEENEDILEDIVLTLTLFEDREMIEERLKTYAHLFDDKVMKQLKRRRYTGWGRLSRKLINGIRDKQSGKTILDFLKSDGFANRNFMQLIHDDSLTFKEDIQKAQVSGQGDSLHEHIANLAGSPAIKKGILQTVKVVDELVKVMGRHKPENIVIEMARENQTTQKGQKNSRERMKRIEEGIKELGSQILKEHPVENTQLQNEKLYLYYLQNGRDMYVDQELDINRLSDYDVDHIVPQSFLKDDSIDNKVLTRSDKARGKSDNVPSEEVVKKMKNYWRQLLNAKLITQRKFDNLTKAERGGLSELDKAGFIKRQLVETRQITKHVAQILDSRMNTKYDENDKLIREVKVITLKSKLVSDFRKDFQFYKVREINNYHHAHDAYLNAVVGTALIKKYPKLESEFVYGDYKVYDVRKMIAKSEQEIGKATAKYFFYSNIMNFFKTEITLANGEIRKRPLIETNGETGEIVWDKGRDFATVRKVLSMPQVNIVKKTEVQTGGFSKESILPKRNSDKLIARKKDWDPKKYGGFDSPTVAYSVLVVAKVEKGKSKKLKSVKELLGITIMERSSFEKNPIDFLEAKGYKEVKKDLIIKLPKYSLFELENGRKRMLASAGELQKGNELALPSKYVNFLYLASHYEKLKGSPEDNEQKQLFVEQHKHYLDEIIEQISEFSKRVILADANLDKVLSAYNKHRDKPIREQAENIIHLFTLTNLGAPAAFKYFDTTIDRKRYTSTKEVLDATLIHQSITGLYETRIDLSQLGGDGGEAAAKGGGGSEAAAKGGTLNIEDEYRLHETSKEPDVPLGSTWLSDFPQAWAETGGMGLAVRQAPLIIPLKATSTPVSIKQYPMSQEARLGIKPHIQRLLDQGILVPCQSPWNTPLLPVKKPGTNDYRPVQDLREVNKRVEDIHPTVPNPYNLLSGLPPSHQWYTVLDLKDAFFCLRLHPTSQPLFAFEWRDPEMGISGQLTWTRLPQGFKNSPTLFNEALHRDLADFRIQHPDLILLQYVDDLLLAATSEQDCQRGTRALLQTLGNLGYRASAKKAQICQKQVKYLGYLLKEGQRWLTEARKETVMGQPTPKTPRQLREFLGTAGFCRLWIPGFAEMAAPLYPLTKPGTLFNWGPDQQKAYQEIKQALLTAPALGLPDLTKPFELFVDEKQGYAKGVLTQKLGPWRRPVAYLSKKLDPVAAGWPPCLRMVAAIAVLTKDAGKLTMGQPLVILAPHAVEALVKQPPDRWLSNARMTHYQAMLLDTDRVQFGPVVALNPATLLPLPEKEAPHDCLEILAETHGTRPDLTDQPIPDADYTWYTDGSSFLQEGQRRAGAAVTTETEVIWARALPAGTSAQRAELIALTQALKMAEGKKLNVYTDSRYAFATAHVHGEIYRRRGWLTSEGREIKNKNEILALLKALFLPKRLSIIHCPGHQKGNSAEARGNRMADQAAREAAMKAVLETSTLLAGKRTADGSEFEKRTADGSEFESPKKKAKVE

SEQ ID NO: 982 - protein, 2093 aa, synthetic construct
MPAAKRVKLDGGDKKYSIGLDIGTNSVGWAVITDEYKVPSKKFKVLGNTDRHSIKKNLIGALLFDSGETAEATRLKRTARRRYTRRKNRICYLQEIFSNEMAKVDDSFFHRLEESFLVEEDKKHERHPIFGNIVDEVAYHEKYPTIYHLRKKLVDSTDKADLRLIYLALAHMIKFRGHFLIEGDLNPDNSDVDKLFIQLVQTYNQLFEENPINASGVDAKAILSARLSKSRRLENLIAQLPGEKKNGLFGNLIALSLGLTPNFKSNFDLAEDAKLQLSKDTYDDDLDNLLAQIGDQYADLFLAAKNLSDAILLSDILRVNTEITKAPLSASMIKRYDEHHQDLTLLKALVRQQLPEKYKEIFFDQSKNGYAGYIDGGASQEEFYKFIKPILEKMDGTEELLVKLNREDLLRKQRTFDNGSIPHQIHLGELHAILRRQEDFYPFLKDNREKIEKILTFRIPYYVGPLARGNSRFAWMTRKSEETITPWNFEEVVDKGASAQSFIERMTNFDKNLPNEKVLPKHSLLYEYFTVYNELTKVKYVTEGMRKPAFLSGEQKKAIVDLLFKTNRKVTVKQLKEDYFKKIECFDSVEISGVEDRFNASLGTYHDLLKIIKDKDFLDNEENEDILEDIVLTLTLFEDREMIEERLKTYAHLFDDKVMKQLKRRRYTGWGRLSRKLINGIRDKQSGKTILDFLKSDGFANRNFMQLIHDDSLTFKEDIQKAQVSGQGDSLHEHIANLAGSPAIKKGILQTVKVVDELVKVMGRHKPENIVIEMARENQTTQKGQKNSRERMKRIEEGIKELGSQILKEHPVENTQLQNEKLYLYYLQNGRDMYVDQELDINRLSDYDVDHIVPQSFLKDDSIDNKVLTRSDKARGKSDNVPSEEVVKKMKNYWRQLLNAKLITQRKFDNLTKAERGGLSELDKAGFIKRQLVETRQITKHVAQILDSRMNTKYDENDKLIREVKVITLKSKLVSDFRKDFQFYKVREINNYHHAHDAYLNAVVGTALIKKYPKLESEFVYGDYKVYDVRKMIAKSEQEIGKATAKYFFYSNIMNFFKTEITLANGEIRKRPLIETNGETGEIVWDKGRDFATVRKVLSMPQVNIVKKTEVQTGGFSKESILPKRNSDKLIARKKDWDPKKYGGFDSPTVAYSVLVVAKVEKGKSKKLKSVKELLGITIMERSSFEKNPIDFLEAKGYKEVKKDLIIKLPKYSLFELENGRKRMLASAGELQKGNELALPSKYVNFLYLASHYEKLKGSPEDNEQKQLFVEQHKHYLDEIIEQISEFSKRVILADANLDKVLSAYNKHRDKPIREQAENIIHLFTLTNLGAPAAFKYFDTTIDRKRYTSTKEVLDATLIHQSITGLYETRIDLSQLGGDGGEAAAKPAPGGTLNIEDEYRLHETSKEPDVPLGSTWLSDFPQAWAETGGMGLAVRQAPLIIPLKATSTPVSIKQYPMSQEARLGIKPHIQRLLDQGILVPCQSPWNTPLLPVKKPGTNDYRPVQDLREVNKRVEDIHPTVPNPYNLLSGLPPSHQWYTVLDLKDAFFCLRLHPTSQPLFAFEWRDPEMGISGQLTWTRLPQGFKNSPTLFNEALHRDLADFRIQHPDLILLQYVDDLLLAATSEQDCQRGTRALLQTLGNLGYRASAKKAQICQKQVKYLGYLLKEGQRWLTEARKETVMGQPTPKTPRQLREFLGTAGFCRLWIPGFAEMAAPLYPLTKPGTLFNWGPDQQKAYQEIKQALLTAPALGLPDLTKPFELFVDEKQGYAKGVLTQKLGPWRRPVAYLSKKLDPVAAGWPPCLRMVAAIAVLTKDAGKLTMGQPLVILAPHAVEALVKQPPDRWLSNARMTHYQAMLLDTDRVQFGPVVALNPATLLPLPEKEAPHDCLEILAETHGTRPDLTDQPIPDADYTWYTDGSSFLQEGQRRAGAAVTTETEVIWARALPAGTSAQRAELIALTQALKMAEGKKLNVYTDSRYAFATAHVHGEIYRRRGWLTSEGREIKNKNEILALLKALFLPKRLSIIHCPGHQKGNSAEARGNRMADQAAREAAMKAVLETSTLLAGKRTADGSEFEKRTADGSEFESPKKKAKVE

SEQ ID NO: 983 - protein, 2090 aa, synthetic construct
MPAAKRVKLDGGDKKYSIGLDIGTNSVGWAVITDEYKVPSKKFKVLGNTDRHSIKKNLIGALLFDSGETAEATRLKRTARRRYTRRKNRICYLQEIFSNEMAKVDDSFFHRLEESFLVEEDKKHERHPIFGNIVDEVAYHEKYPTIYHLRKKLVDSTDKADLRLIYLALAHMIKFRGHFLIEGDLNPDNSDVDKLFIQLVQTYNQLFEENPINASGVDAKAILSARLSKSRRLENLIAQLPGEKKNGLFGNLIALSLGLTPNFKSNFDLAEDAKLQLSKDTYDDDLDNLLAQIGDQYADLFLAAKNLSDAILLSDILRVNTEITKAPLSASMIKRYDEHHQDLTLLKALVRQQLPEKYKEIFFDQSKNGYAGYIDGGASQEEFYKFIKPILEKMDGTEELLVKLNREDLLRKQRTFDNGSIPHQIHLGELHAILRRQEDFYPFLKDNREKIEKILTFRIPYYVGPLARGNSRFAWMTRKSEETITPWNFEEVVDKGASAQSFIERMTNFDKNLPNEKVLPKHSLLYEYFTVYNELTKVKYVTEGMRKPAFLSGEQKKAIVDLLFKTNRKVTVKQLKEDYFKKIECFDSVEISGVEDRFNASLGTYHDLLKIIKDKDFLDNEENEDILEDIVLTLTLFEDREMIEERLKTYAHLFDDKVMKQLKRRRYTGWGRLSRKLINGIRDKQSGKTILDFLKSDGFANRNFMQLIHDDSLTFKEDIQKAQVSGQGDSLHEHIANLAGSPAIKKGILQTVKVVDELVKVMGRHKPENIVIEMARENQTTQKGQKNSRERMKRIEEGIKELGSQILKEHPVENTQLQNEKLYLYYLQNGRDMYVDQELDINRLSDYDVDHIVPQSFLKDDSIDNKVLTRSDKARGKSDNVPSEEVVKKMKNYWRQLLNAKLITQRKFDNLTKAERGGLSELDKAGFIKRQLVETRQITKHVAQILDSRMNTKYDENDKLIREVKVITLKSKLVSDFRKDFQFYKVREINNYHHAHDAYLNAVVGTALIKKYPKLESEFVYGDYKVYDVRKMIAKSEQEIGKATAKYFFYSNIMNFFKTEITLANGEIRKRPLIETNGETGEIVWDKGRDFATVRKVLSMPQVNIVKKTEVQTGGFSKESILPKRNSDKLIARKKDWDPKKYGGFDSPTVAYSVLVVAKVEKGKSKKLKSVKELLGITIMERSSFEKNPIDFLEAKGYKEVKKDLIIKLPKYSLFELENGRKRMLASAGELQKGNELALPSKYVNFLYLASHYEKLKGSPEDNEQKQLFVEQHKHYLDEIIEQISEFSKRVILADANLDKVLSAYNKHRDKPIREQAENIIHLFTLTNLGAPAAFKYFDTTIDRKRYTSTKEVLDATLIHQSITGLYETRIDLSQLGGDGGPAPAPGGTLNIEDEYRLHETSKEPDVPLGSTWLSDFPQAWAETGGMGLAVRQAPLIIPLKATSTPVSIKQYPMSQEARLGIKPHIQRLLDQGILVPCQSPWNTPLLPVKKPGTNDYRPVQDLREVNKRVEDIHPTVPNPYNLLSGLPPSHQWYTVLDLKDAFFCLRLHPTSQPLFAFEWRDPEMGISGQLTWTRLPQGFKNSPTLFNEALHRDLADFRIQHPDLILLQYVDDLLLAATSEQDCQRGTRALLQTLGNLGYRASAKKAQICQKQVKYLGYLLKEGQRWLTEARKETVMGQPTPKTPRQLREFLGTAGFCRLWIPGFAEMAAPLYPLTKPGTLFNWGPDQQKAYQEIKQALLTAPALGLPDLTKPFELFVDEKQGYAKGVLTQKLGPWRRPVAYLSKKLDPVAAGWPPCLRMVAAIAVLTKDAGKLTMGQPLVILAPHAVEALVKQPPDRWLSNARMTHYQAMLLDTDRVQFGPVVALNPATLLPLPEKEAPHDCLEILAETHGTRPDLTDQPIPDADYTWYTDGSSFLQEGQRRAGAAVTTETEVIWARALPAGTSAQRAELIALTQALKMAEGKKLNVYTDSRYAFATAHVHGEIYRRRGWLTSEGREIKNKNEILALLKALFLPKRLSIIHCPGHQKGNSAEARGNRMADQAAREAAMKAVLETSTLLAGKRTADGSEFEKRTADGSEFESPKKKAKVE

SEQ ID NO: 984 - protein, 2094 aa, synthetic construct
MPAAKRVKLDGGDKKYSIGLDIGTNSVGWAVITDEYKVPSKKFKVLGNTDRHSIKKNLIGALLFDSGETAEATRLKRTARRRYTRRKNRICYLQEIFSNEMAKVDDSFFHRLEESFLVEEDKKHERHPIFGNIVDEVAYHEKYPTIYHLRKKLVDSTDKADLRLIYLALAHMIKFRGHFLIEGDLNPDNSDVDKLFIQLVQTYNQLFEENPINASGVDAKAILSARLSKSRRLENLIAQLPGEKKNGLFGNLIALSLGLTPNFKSNFDLAEDAKLQLSKDTYDDDLDNLLAQIGDQYADLFLAAKNLSDAILLSDILRVNTEITKAPLSASMIKRYDEHHQDLTLLKALVRQQLPEKYKEIFFDQSKNGYAGYIDGGASQEEFYKFIKPILEKMDGTEELLVKLNREDLLRKQRTFDNGSIPHQIHLGELHAILRRQEDFYPFLKDNREKIEKILTFRIPYYVGPLARGNSRFAWMTRKSEETITPWNFEEVVDKGASAQSFIERMTNFDKNLPNEKVLPKHSLLYEYFTVYNELTKVKYVTEGMRKPAFLSGEQKKAIVDLLFKTNRKVTVKQLKEDYFKKIECFDSVEISGVEDRFNASLGTYHDLLKIIKDKDFLDNEENEDILEDIVLTLTLFEDREMIEERLKTYAHLFDDKVMKQLKRRRYTGWGRLSRKLINGIRDKQSGKTILDFLKSDGFANRNFMQLIHDDSLTFKEDIQKAQVSGQGDSLHEHIANLAGSPAIKKGILQTVKVVDELVKVMGRHKPENIVIEMARENQTTQKGQKNSRERMKRIEEGIKELGSQILKEHPVENTQLQNEKLYLYYLQNGRDMYVDQELDINRLSDYDVDHIVPQSFLKDDSIDNKVLTRSDKARGKSDNVPSEEVVKKMKNYWRQLLNAKLITQRKFDNLTKAERGGLSELDKAGFIKRQLVETRQITKHVAQILDSRMNTKYDENDKLIREVKVITLKSKLVSDFRKDFQFYKVREINNYHHAHDAYLNAVVGTALIKKYPKLESEFVYGDYKVYDVRKMIAKSEQEIGKATAKYFFYSNIMNFFKTEITLANGEIRKRPLIETNGETGEIVWDKGRDFATVRKVLSMPQVNIVKKTEVQTGGFSKESILPKRNSDKLIARKKDWDPKKYGGFDSPTVAYSVLVVAKVEKGKSKKLKSVKELLGITIMERSSFEKNPIDFLEAKGYKEVKKDLIIKLPKYSLFELENGRKRMLASAGELQKGNELALPSKYVNFLYLASHYEKLKGSPEDNEQKQLFVEQHKHYLDEIIEQISEFSKRVILADANLDKVLSAYNKHRDKPIREQAENIIHLFTLTNLGAPAAFKYFDTTIDRKRYTSTKEVLDATLIHQSITGLYETRIDLSQLGGDGGGGGPAPGGSGGTLNIEDEYRLHETSKEPDVPLGSTWLSDFPQAWAETGGMGLAVRQAPLIIPLKATSTPVSIKQYPMSQEARLGIKPHIQRLLDQGILVPCQSPWNTPLLPVKKPGTNDYRPVQDLREVNKRVEDIHPTVPNPYNLLSGLPPSHQWYTVLDLKDAFFCLRLHPTSQPLFAFEWRDPEMGISGQLTWTRLPQGFKNSPTLFNEALHRDLADFRIQHPDLILLQYVDDLLLAATSEQDCQRGTRALLQTLGNLGYRASAKKAQICQKQVKYLGYLLKEGQRWLTEARKETVMGQPTPKTPRQLREFLGTAGFCRLWIPGFAEMAAPLYPLTKPGTLFNWGPDQQKAYQEIKQALLTAPALGLPDLTKPFELFVDEKQGYAKGVLTQKLGPWRRPVAYLSKKLDPVAAGWPPCLRMVAAIAVLTKDAGKLTMGQPLVILAPHAVEALVKQPPDRWLSNARMTHYQAMLLDTDRVQFGPVVALNPATLLPLPEKEAPHDCLEILAETHGTRPDLTDQPIPDADYTWYTDGSSFLQEGQRRAGAAVTTETEVIWARALPAGTSAQRAELIALTQALKMAEGKKLNVYTDSRYAFATAHVHGEIYRRRGWLTSEGREIKNKNEILALLKALFLPKRLSIIHCPGHQKGNSAEARGNRMADQAAREAAMKAVLETSTLLAGKRTADGSEFEKRTADGSEFESPKKKAKVE

SEQ ID NO: 985 - protein, 2096 aa, synthetic construct
MPAAKRVKLDGGDKKYSIGLDIGTNSVGWAVITDEYKVPSKKFKVLGNTDRHSIKKNLIGALLFDSGETAEATRLKRTARRRYTRRKNRICYLQEIFSNEMAKVDDSFFHRLEESFLVEEDKKHERHPIFGNIVDEVAYHEKYPTIYHLRKKLVDSTDKADLRLIYLALAHMIKFRGHFLIEGDLNPDNSDVDKLFIQLVQTYNQLFEENPINASGVDAKAILSARLSKSRRLENLIAQLPGEKKNGLFGNLIALSLGLTPNFKSNFDLAEDAKLQLSKDTYDDDLDNLLAQIGDQYADLFLAAKNLSDAILLSDILRVNTEITKAPLSASMIKRYDEHHQDLTLLKALVRQQLPEKYKEIFFDQSKNGYAGYIDGGASQEEFYKFIKPILEKMDGTEELLVKLNREDLLRKQRTFDNGSIPHQIHLGELHAILRRQEDFYPFLKDNREKIEKILTFRIPYYVGPLARGNSRFAWMTRKSEETITPWNFEEVVDKGASAQSFIERMTNFDKNLPNEKVLPKHSLLYEYFTVYNELTKVKYVTEGMRKPAFLSGEQKKAIVDLLFKTNRKVTVKQLKEDYFKKIECFDSVEISGVEDRFNASLGTYHDLLKIIKDKDFLDNEENEDILEDIVLTLTLFEDREMIEERLKTYAHLFDDKVMKQLKRRRYTGWGRLSRKLINGIRDKQSGKTILDFLKSDGFANRNFMQLIHDDSLTFKEDIQKAQVSGQGDSLHEHIANLAGSPAIKKGILQTVKVVDELVKVMGRHKPENIVIEMARENQTTQKGQKNSRERMKRIEEGIKELGSQILKEHPVENTQLQNEKLYLYYLQNGRDMYVDQELDINRLSDYDVDHIVPQSFLKDDSIDNKVLTRSDKARGKSDNVPSEEVVKKMKNYWRQLLNAKLITQRKFDNLTKAERGGLSELDKAGFIKRQLVETRQITKHVAQILDSRMNTKYDENDKLIREVKVITLKSKLVSDFRKDFQFYKVREINNYHHAHDAYLNAVVGTALIKKYPKLESEFVYGDYKVYDVRKMIAKSEQEIGKATAKYFFYSNIMNFFKTEITLANGEIRKRPLIETNGETGEIVWDKGRDFATVRKVLSMPQVNIVKKTEVQTGGFSKESILPKRNSDKLIARKKDWDPKKYGGFDSPTVAYSVLVVAKVEKGKSKKLKSVKELLGITIMERSSFEKNPIDFLEAKGYKEVKKDLIIKLPKYSLFELENGRKRMLASAGELQKGNELALPSKYVNFLYLASHYEKLKGSPEDNEQKQLFVEQHKHYLDEIIEQISEFSKRVILADANLDKVLSAYNKHRDKPIREQAENIIHLFTLTNLGAPAAFKYFDTTIDRKRYTSTKEVLDATLIHQSITGLYETRIDLSQLGGDGGGGGEAAAKPAPGGTLNIEDEYRLHETSKEPDVPLGSTWLSDFPQAWAETGGMGLAVRQAPLIIPLKATSTPVSIKQYPMSQEARLGIKPHIQRLLDQGILVPCQSPWNTPLLPVKKPGTNDYRPVQDLREVNKRVEDIHPTVPNPYNLLSGLPPSHQWYTVLDLKDAFFCLRLHPTSQPLFAFEWRDPEMGISGQLTWTRLPQGFKNSPTLFNEALHRDLADFRIQHPDLILLQYVDDLLLAATSEQDCQRGTRALLQTLGNLGYRASAKKAQICQKQVKYLGYLLKEGQRWLTEARKETVMGQPTPKTPRQLREFLGTAGFCRLWIPGFAEMAAPLYPLTKPGTLFNWGPDQQKAYQEIKQALLTAPALGLPDLTKPFELFVDEKQGYAKGVLTQKLGPWRRPVAYLSKKLDPVAAGWPPCLRMVAAIAVLTKDAGKLTMGQPLVILAPHAVEALVKQPPDRWLSNARMTHYQAMLLDTDRVQFGPVVALNPATLLPLPEKEAPHDCLEILAETHGTRPDLTDQPIPDADYTWYTDGSSFLQEGQRRAGAAVTTETEVIWARALPAGTSAQRAELIALTQALKMAEGKKLNVYTDSRYAFATAHVHGEIYRRRGWLTSEGREIKNKNEILALLKALFLPKRLSIIHCPGHQKGNSAEARGNRMADQAAREAAMKAVLETSTLLAGKRTADGSEFEKRTADGSEFESPKKKAKVE

SEQ ID NO: 986 - protein, 2094 aa, synthetic construct
MPAAKRVKLDGGDKKYSIGLDIGTNSVGWAVITDEYKVPSKKFKVLGNTDRHSIKKNLIGALLFDSGETAEATRLKRTARRRYTRRKNRICYLQEIFSNEMAKVDDSFFHRLEESFLVEEDKKHERHPIFGNIVDEVAYHEKYPTIYHLRKKLVDSTDKADLRLIYLALAHMIKFRGHFLIEGDLNPDNSDVDKLFIQLVQTYNQLFEENPINASGVDAKAILSARLSKSRRLENLIAQLPGEKKNGLFGNLIALSLGLTPNFKSNFDLAEDAKLQLSKDTYDDDLDNLLAQIGDQYADLFLAAKNLSDAILLSDILRVNTEITKAPLSASMIKRYDEHHQDLTLLKALVRQQLPEKYKEIFFDQSKNGYAGYIDGGASQEEFYKFIKPILEKMDGTEELLVKLNREDLLRKQRTFDNGSIPHQIHLGELHAILRRQEDFYPFLKDNREKIEKILTFRIPYYVGPLARGNSRFAWMTRKSEETITPWNFEEVVDKGASAQSFIERMTNFDKNLPNEKVLPKHSLLYEYFTVYNELTKVKYVTEGMRKPAFLSGEQKKAIVDLLFKTNRKVTVKQLKEDYFKKIECFDSVEISGVEDRFNASLGTYHDLLKIIKDKDFLDNEENEDILEDIVLTLTLFEDREMIEERLKTYAHLFDDKVMKQLKRRRYTGWGRLSRKLINGIRDKQSGKTILDFLKSDGFANRNFMQLIHDDSLTFKEDIQKAQVSGQGDSLHEHIANLAGSPAIKKGILQTVKVVDELVKVMGRHKPENIVIEMARENQTTQKGQKNSRERMKRIEEGIKELGSQILKEHPVENTQLQNEKLYLYYLQNGRDMYVDQELDINRLSDYDVDHIVPQSFLKDDSIDNKVLTRSDKARGKSDNVPSEEVVKKMKNYWRQLLNAKLITQRKFDNLTKAERGGLSELDKAGFIKRQLVETRQITKHVAQILDSRMNTKYDENDKLIREVKVITLKSKLVSDFRKDFQFYKVREINNYHHAHDAYLNAVVGTALIKKYPKLESEFVYGDYKVYDVRKMIAKSEQEIGKATAKYFFYSNIMNFFKTEITLANGEIRKRPLIETNGETGEIVWDKGRDFATVRKVLSMPQVNIVKKTEVQTGGFSKESILPKRNSDKLIARKKDWDPKKYGGFDSPTVAYSVLVVAKVEKGKSKKLKSVKELLGITIMERSSFEKNPIDFLEAKGYKEVKKDLIIKLPKYSLFELENGRKRMLASAGELQKGNELALPSKYVNFLYLASHYEKLKGSPEDNEQKQLFVEQHKHYLDEIIEQISEFSKRVILADANLDKVLSAYNKHRDKPIREQAENIIHLFTLTNLGAPAAFKYFDTTIDRKRYTSTKEVLDATLIHQSITGLYETRIDLSQLGGDGGGGSPAPGSSGGTLNIEDEYRLHETSKEPDVPLGSTWLSDFPQAWAETGGMGLAVRQAPLIIPLKATSTPVSIKQYPMSQEARLGIKPHIQRLLDQGILVPCQSPWNTPLLPVKKPGTNDYRPVQDLREVNKRVEDIHPTVPNPYNLLSGLPPSHQWYTVLDLKDAFFCLRLHPTSQPLFAFEWRDPEMGISGQLTWTRLPQGFKNSPTLFNEALHRDLADFRIQHPDLILLQYVDDLLLAATSEQDCQRGTRALLQTLGNLGYRASAKKAQICQKQVKYLGYLLKEGQRWLTEARKETVMGQPTPKTPRQLREFLGTAGFCRLWIPGFAEMAAPLYPLTKPGTLFNWGPDQQKAYQEIKQALLTAPALGLPDLTKPFELFVDEKQGYAKGVLTQKLGPWRRPVAYLSKKLDPVAAGWPPCLRMVAAIAVLTKDAGKLTMGQPLVILAPHAVEALVKQPPDRWLSNARMTHYQAMLLDTDRVQFGPVVALNPATLLPLPEKEAPHDCLEILAETHGTRPDLTDQPIPDADYTWYTDGSSFLQEGQRRAGAAVTTETEVIWARALPAGTSAQRAELIALTQALKMAEGKKLNVYTDSRYAFATAHVHGEIYRRRGWLTSEGREIKNKNEILALLKALFLPKRLSIIHCPGHQKGNSAEARGNRMADQAAREAAMKAVLETSTLLAGKRTADGSEFEKRTADGSEFESPKKKAKVE

SEQ ID NO: 987 - protein, 2094 aa, synthetic construct
MPAAKRVKLDGGDKKYSIGLDIGTNSVGWAVITDEYKVPSKKFKVLGNTDRHSIKKNLIGALLFDSGETAEATRLKRTARRRYTRRKNRICYLQEIFSNEMAKVDDSFFHRLEESFLVEEDKKHERHPIFGNIVDEVAYHEKYPTIYHLRKKLVDSTDKADLRLIYLALAHMIKFRGHFLIEGDLNPDNSDVDKLFIQLVQTYNQLFEENPINASGVDAKAILSARLSKSRRLENLIAQLPGEKKNGLFGNLIALSLGLTPNFKSNFDLAEDAKLQLSKDTYDDDLDNLLAQIGDQYADLFLAAKNLSDAILLSDILRVNTEITKAPLSASMIKRYDEHHQDLTLLKALVRQQLPEKYKEIFFDQSKNGYAGYIDGGASQEEFYKFIKPILEKMDGTEELLVKLNREDLLRKQRTFDNGSIPHQIHLGELHAILRRQEDFYPFLKDNREKIEKILTFRIPYYVGPLARGNSRFAWMTRKSEETITPWNFEEVVDKGASAQSFIERMTNFDKNLPNEKVLPKHSLLYEYFTVYNELTKVKYVTEGMRKPAFLSGEQKKAIVDLLFKTNRKVTVKQLKEDYFKKIECFDSVEISGVEDRFNASLGTYHDLLKIIKDKDFLDNEENEDILEDIVLTLTLFEDREMIEERLKTYAHLFDDKVMKQLKRRRYTGWGRLSRKLINGIRDKQSGKTILDFLKSDGFANRNFMQLIHDDSLTFKEDIQKAQVSGQGDSLHEHIANLAGSPAIKKGILQTVKVVDELVKVMGRHKPENIVIEMARENQTTQKGQKNSRERMKRIEEGIKELGSQILKEHPVENTQLQNEKLYLYYLQNGRDMYVDQELDINRLSDYDVDHIVPQSFLKDDSIDNKVLTRSDKARGKSDNVPSEEVVKKMKNYWRQLLNAKLITQRKFDNLTKAERGGLSELDKAGFIKRQLVETRQITKHVAQILDSRMNTKYDENDKLIREVKVITLKSKLVSDFRKDFQFYKVREINNYHHAHDAYLNAVVGTALIKKYPKLESEFVYGDYKVYDVRKMIAKSEQEIGKATAKYFFYSNIMNFFKTEITLANGEIRKRPLIETNGETGEIVWDKGRDFATVRKVLSMPQVNIVKKTEVQTGGFSKESILPKRNSDKLIARKKDWDPKKYGGFDSPTVAYSVLVVAKVEKGKSKKLKSVKELLGITIMERSSFEKNPIDFLEAKGYKEVKKDLIIKLPKYSLFELENGRKRMLASAGELQKGNELALPSKYVNFLYLASHYEKLKGSPEDNEQKQLFVEQHKHYLDEIIEQISEFSKRVILADANLDKVLSAYNKHRDKPIREQAENIIHLFTLTNLGAPAAFKYFDTTIDRKRYTSTKEVLDATLIHQSITGLYETRIDLSQLGGDGGGSSPAPGGSGGTLNIEDEYRLHETSKEPDVPLGSTWLSDFPQAWAETGGMGLAVRQAPLIIPLKATSTPVSIKQYPMSQEARLGIKPHIQRLLDQGILVPCQSPWNTPLLPVKKPGTNDYRPVQDLREVNKRVEDIHPTVPNPYNLLSGLPPSHQWYTVLDLKDAFFCLRLHPTSQPLFAFEWRDPEMGISGQLTWTRLPQGFKNSPTLFNEALHRDLADFRIQHPDLILLQYVDDLLLAATSEQDCQRGTRALLQTLGNLGYRASAKKAQICQKQVKYLGYLLKEGQRWLTEARKETVMGQPTPKTPRQLREFLGTAGFCRLWIPGFAEMAAPLYPLTKPGTLFNWGPDQQKAYQEIKQALLTAPALGLPDLTKPFELFVDEKQGYAKGVLTQKLGPWRRPVAYLSKKLDPVAAGWPPCLRMVAAIAVLTKDAGKLTMGQPLVILAPHAVEALVKQPPDRWLSNARMTHYQAMLLDTDRVQFGPVVALNPATLLPLPEKEAPHDCLEILAETHGTRPDLTDQPIPDADYTWYTDGSSFLQEGQRRAGAAVTTETEVIWARALPAGTSAQRAELIALTQALKMAEGKKLNVYTDSRYAFATAHVHGEIYRRRGWLTSEGREIKNKNEILALLKALFLPKRLSIIHCPGHQKGNSAEARGNRMADQAAREAAMKAVLETSTLLAGKRTADGSEFEKRTADGSEFESPKKKAKVE

SEQ ID NO: 988 - protein, 2090 aa, synthetic construct
MPAAKRVKLDGGDKKYSIGLDIGTNSVGWAVITDEYKVPSKKFKVLGNTDRHSIKKNLIGALLFDSGETAEATRLKRTARRRYTRRKNRICYLQEIFSNEMAKVDDSFFHRLEESFLVEEDKKHERHPIFGNIVDEVAYHEKYPTIYHLRKKLVDSTDKADLRLIYLALAHMIKFRGHFLIEGDLNPDNSDVDKLFIQLVQTYNQLFEENPINASGVDAKAILSARLSKSRRLENLIAQLPGEKKNGLFGNLIALSLGLTPNFKSNFDLAEDAKLQLSKDTYDDDLDNLLAQIGDQYADLFLAAKNLSDAILLSDILRVNTEITKAPLSASMIKRYDEHHQDLTLLKALVRQQLPEKYKEIFFDQSKNGYAGYIDGGASQEEFYKFIKPILEKMDGTEELLVKLNREDLLRKQRTFDNGSIPHQIHLGELHAILRRQEDFYPFLKDNREKIEKILTFRIPYYVGPLARGNSRFAWMTRKSEETITPWNFEEVVDKGASAQSFIERMTNFDKNLPNEKVLPKHSLLYEYFTVYNELTKVKYVTEGMRKPAFLSGEQKKAIVDLLFKTNRKVTVKQLKEDYFKKIECFDSVEISGVEDRFNASLGTYHDLLKIIKDKDFLDNEENEDILEDIVLTLTLFEDREMIEERLKTYAHLFDDKVMKQLKRRRYTGWGRLSRKLINGIRDKQSGKTILDFLKSDGFANRNFMQLIHDDSLTFKEDIQKAQVSGQGDSLHEHIANLAGSPAIKKGILQTVKVVDELVKVMGRHKPENIVIEMARENQTTQKGQKNSRERMKRIEEGIKELGSQILKEHPVENTQLQNEKLYLYYLQNGRDMYVDQELDINRLSDYDVDHIVPQSFLKDDSIDNKVLTRSDKARGKSDNVPSEEVVKKMKNYWRQLLNAKLITQRKFDNLTKAERGGLSELDKAGFIKRQLVETRQITKHVAQILDSRMNTKYDENDKLIREVKVITLKSKLVSDFRKDFQFYKVREINNYHHAHDAYLNAVVGTALIKKYPKLESEFVYGDYKVYDVRKMIAKSEQEIGKATAKYFFYSNIMNFFKTEITLANGEIRKRPLIETNGETGEIVWDKGRDFATVRKVLSMPQVNIVKKTEVQTGGFSKESILPKRNSDKLIARKKDWDPKKYGGFDSPTVAYSVLVVAKVEKGKSKKLKSVKELLGITIMERSSFEKNPIDFLEAKGYKEVKKDLIIKLPKYSLFELENGRKRMLASAGELQKGNELALPSKYVNFLYLASHYEKLKGSPEDNEQKQLFVEQHKHYLDEIIEQISEFSKRVILADANLDKVLSAYNKHRDKPIREQAENIIHLFTLTNLGAPAAFKYFDTTIDRKRYTSTKEVLDATLIHQSITGLYETRIDLSQLGGDGGEAAAKGGTLNIEDEYRLHETSKEPDVPLGSTWLSDFPQAWAETGGMGLAVRQAPLIIPLKATSTPVSIKQYPMSQEARLGIKPHIQRLLDQGILVPCQSPWNTPLLPVKKPGTNDYRPVQDLREVNKRVEDIHPTVPNPYNLLSGLPPSHQWYTVLDLKDAFFCLRLHPTSQPLFAFEWRDPEMGISGQLTWTRLPQGFKNSPTLFNEALHRDLADFRIQHPDLILLQYVDDLLLAATSEQDCQRGTRALLQTLGNLGYRASAKKAQICQKQVKYLGYLLKEGQRWLTEARKETVMGQPTPKTPRQLREFLGTAGFCRLWIPGFAEMAAPLYPLTKPGTLFNWGPDQQKAYQEIKQALLTAPALGLPDLTKPFELFVDEKQGYAKGVLTQKLGPWRRPVAYLSKKLDPVAAGWPPCLRMVAAIAVLTKDAGKLTMGQPLVILAPHAVEALVKQPPDRWLSNARMTHYQAMLLDTDRVQFGPVVALNPATLLPLPEKEAPHDCLEILAETHGTRPDLTDQPIPDADYTWYTDGSSFLQEGQRRAGAAVTTETEVIWARALPAGTSAQRAELIALTQALKMAEGKKLNVYTDSRYAFATAHVHGEIYRRRGWLTSEGREIKNKNEILALLKALFLPKRLSIIHCPGHQKGNSAEARGNRMADQAAREAAMKAVLETSTLLAGKRTADGSEFEKRTADGSEFESPKKKAKVE

SEQ ID NO: 989 - protein, 2094 aa, synthetic construct
MPAAKRVKLDGGDKKYSIGLDIGTNSVGWAVITDEYKVPSKKFKVLGNTDRHSIKKNLIGALLFDSGETAEATRLKRTARRRYTRRKNRICYLQEIFSNEMAKVDDSFFHRLEESFLVEEDKKHERHPIFGNIVDEVAYHEKYPTIYHLRKKLVDSTDKADLRLIYLALAHMIKFRGHFLIEGDLNPDNSDVDKLFIQLVQTYNQLFEENPINASGVDAKAILSARLSKSRRLENLIAQLPGEKKNGLFGNLIALSLGLTPNFKSNFDLAEDAKLQLSKDTYDDDLDNLLAQIGDQYADLFLAAKNLSDAILLSDILRVNTEITKAPLSASMIKRYDEHHQDLTLLKALVRQQLPEKYKEIFFDQSKNGYAGYIDGGASQEEFYKFIKPILEKMDGTEELLVKLNREDLLRKQRTFDNGSIPHQIHLGELHAILRRQEDFYPFLKDNREKIEKILTFRIPYYVGPLARGNSRFAWMTRKSEETITPWNFEEVVDKGASAQSFIERMTNFDKNLPNEKVLPKHSLLYEYFTVYNELTKVKYVTEGMRKPAFLSGEQKKAIVDLLFKTNRKVTVKQLKEDYFKKIECFDSVEISGVEDRFNASLGTYHDLLKIIKDKDFLDNEENEDILEDIVLTLTLFEDREMIEERLKTYAHLFDDKVMKQLKRRRYTGWGRLSRKLINGIRDKQSGKTILDFLKSDGFANRNFMQLIHDDSLTFKEDIQKAQVSGQGDSLHEHIANLAGSPAIKKGILQTVKVVDELVKVMGRHKPENIVIEMARENQTTQKGQKNSRERMKRIEEGIKELGSQILKEHPVENTQLQNEKLYLYYLQNGRDMYVDQELDINRLSDYDVDHIVPQSFLKDDSIDNKVLTRSDKARGKSDNVPSEEVVKKMKNYWRQLLNAKLITQRKFDNLTKAERGGLSELDKAGFIKRQLVETRQITKHVAQILDSRMNTKYDENDKLIREVKVITLKSKLVSDFRKDFQFYKVREINNYHHAHDAYLNAVVGTALIKKYPKLESEFVYGDYKVYDVRKMIAKSEQEIGKATAKYFFYSNIMNFFKTEITLANGEIRKRPLIETNGETGEIVWDKGRDFATVRKVLSMPQVNIVKKTEVQTGGFSKESILPKRNSDKLIARKKDWDPKKYGGFDSPTVAYSVLVVAKVEKGKSKKLKSVKELLGITIMERSSFEKNPIDFLEAKGYKEVKKDLIIKLPKYSLFELENGRKRMLASAGELQKGNELALPSKYVNFLYLASHYEKLKGSPEDNEQKQLFVEQHKHYLDEIIEQISEFSKRVILADANLDKVLSAYNKHRDKPIREQAENIIHLFTLTNLGAPAAFKYFDTTIDRKRYTSTKEVLDATLIHQSITGLYETRIDLSQLGGDGGGGGGGSGSSGGTLNIEDEYRLHETSKEPDVPLGSTWLSDFPQAWAETGGMGLAVRQAPLIIPLKATSTPVSIKQYPMSQEARLGIKPHIQRLLDQGILVPCQSPWNTPLLPVKKPGTNDYRPVQDLREVNKRVEDIHPTVPNPYNLLSGLPPSHQWYTVLDLKDAFFCLRLHPTSQPLFAFEWRDPEMGISGQLTWTRLPQGFKNSPTLFNEALHRDLADFRIQHPDLILLQYVDDLLLAATSEQDCQRGTRALLQTLGNLGYRASAKKAQICQKQVKYLGYLLKEGQRWLTEARKETVMGQPTPKTPRQLREFLGTAGFCRLWIPGFAEMAAPLYPLTKPGTLFNWGPDQQKAYQEIKQALLTAPALGLPDLTKPFELFVDEKQGYAKGVLTQKLGPWRRPVAYLSKKLDPVAAGWPPCLRMVAAIAVLTKDAGKLTMGQPLVILAPHAVEALVKQPPDRWLSNARMTHYQAMLLDTDRVQFGPVVALNPATLLPLPEKEAPHDCLEILAETHGTRPDLTDQPIPDADYTWYTDGSSFLQEGQRRAGAAVTTETEVIWARALPAGTSAQRAELIALTQALKMAEGKKLNVYTDSRYAFATAHVHGEIYRRRGWLTSEGREIKNKNEILALLKALFLPKRLSIIHCPGHQKGNSAEARGNRMADQAAREAAMKAVLETSTLLAGKRTADGSEFEKRTADGSEFESPKKKAKVE

SEQ ID NO: 990 - protein, 2091 aa, synthetic construct
MPAAKRVKLDGGDKKYSIGLDIGTNSVGWAVITDEYKVPSKKFKVLGNTDRHSIKKNLIGALLFDSGETAEATRLKRTARRRYTRRKNRICYLQEIFSNEMAKVDDSFFHRLEESFLVEEDKKHERHPIFGNIVDEVAYHEKYPTIYHLRKKLVDSTDKADLRLIYLALAHMIKFRGHFLIEGDLNPDNSDVDKLFIQLVQTYNQLFEENPINASGVDAKAILSARLSKSRRLENLIAQLPGEKKNGLFGNLIALSLGLTPNFKSNFDLAEDAKLQLSKDTYDDDLDNLLAQIGDQYADLFLAAKNLSDAILLSDILRVNTEITKAPLSASMIKRYDEHHQDLTLLKALVRQQLPEKYKEIFFDQSKNGYAGYIDGGASQEEFYKFIKPILEKMDGTEELLVKLNREDLLRKQRTFDNGSIPHQIHLGELHAILRRQEDFYPFLKDNREKIEKILTFRIPYYVGPLARGNSRFAWMTRKSEETITPWNFEEVVDKGASAQSFIERMTNFDKNLPNEKVLPKHSLLYEYFTVYNELTKVKYVTEGMRKPAFLSGEQKKAIVDLLFKTNRKVTVKQLKEDYFKKIECFDSVEISGVEDRFNASLGTYHDLLKIIKDKDFLDNEENEDILEDIVLTLTLFEDREMIEERLKTYAHLFDDKVMKQLKRRRYTGWGRLSRKLINGIRDKQSGKTILDFLKSDGFANRNFMQLIHDDSLTFKEDIQKAQVSGQGDSLHEHIANLAGSPAIKKGILQTVKVVDELVKVMGRHKPENIVIEMARENQTTQKGQKNSRERMKRIEEGIKELGSQILKEHPVENTQLQNEKLYLYYLQNGRDMYVDQELDINRLSDYDVDHIVPQSFLKDDSIDNKVLTRSDKARGKSDNVPSEEVVKKMKNYWRQLLNAKLITQRKFDNLTKAERGGLSELDKAGFIKRQLVETRQITKHVAQILDSRMNTKYDENDKLIREVKVITLKSKLVSDFRKDFQFYKVREINNYHHAHDAYLNAVVGTALIKKYPKLESEFVYGDYKVYDVRKMIAKSEQEIGKATAKYFFYSNIMNFFKTEITLANGEIRKRPLIETNGETGEIVWDKGRDFATVRKVLSMPQVNIVKKTEVQTGGFSKESILPKRNSDKLIARKKDWDPKKYGGFDSPTVAYSVLVVAKVEKGKSKKLKSVKELLGITIMERSSFEKNPIDFLEAKGYKEVKKDLIIKLPKYSLFELENGRKRMLASAGELQKGNELALPSKYVNFLYLASHYEKLKGSPEDNEQKQLFVEQHKHYLDEIIEQISEFSKRVILADANLDKVLSAYNKHRDKPIREQAENIIHLFTLTNLGAPAAFKYFDTTIDRKRYTSTKEVLDATLIHQSITGLYETRIDLSQLGGDGGPAPGSSGGTLNIEDEYRLHETSKEPDVPLGSTWLSDFPQAWAETGGMGLAVRQAPLIIPLKATSTPVSIKQYPMSQEARLGIKPHIQRLLDQGILVPCQSPWNTPLLPVKKPGTNDYRPVQDLREVNKRVEDIHPTVPNPYNLLSGLPPSHQWYTVLDLKDAFFCLRLHPTSQPLFAFEWRDPEMGISGQLTWTRLPQGFKNSPTLFNEALHRDLADFRIQHPDLILLQYVDDLLLAATSEQDCQRGTRALLQTLGNLGYRASAKKAQICQKQVKYLGYLLKEGQRWLTEARKETVMGQPTPKTPRQLREFLGTAGFCRLWIPGFAEMAAPLYPLTKPGTLFNWGPDQQKAYQEIKQALLTAPALGLPDLTKPFELFVDEKQGYAKGVLTQKLGPWRRPVAYLSKKLDPVAAGWPPCLRMVAAIAVLTKDAGKLTMGQPLVILAPHAVEALVKQPPDRWLSNARMTHYQAMLLDTDRVQFGPVVALNPATLLPLPEKEAPHDCLEILAETHGTRPDLTDQPIPDADYTWYTDGSSFLQEGQRRAGAAVTTETEVIWARALPAGTSAQRAELIALTQALKMAEGKKLNVYTDSRYAFATAHVHGEIYRRRGWLTSEGREIKNKNEILALLKALFLPKRLSIIHCPGHQKGNSAEARGNRMADQAAREAAMKAVLETSTLLAGKRTADGSEFEKRTADGSEFESPKKKAKVE

SEQ ID NO: 991 - protein, 2095 aa, synthetic construct
MPAAKRVKLDGGDKKYSIGLDIGTNSVGWAVITDEYKVPSKKFKVLGNTDRHSIKKNLIGALLFDSGETAEATRLKRTARRRYTRRKNRICYLQEIFSNEMAKVDDSFFHRLEESFLVEEDKKHERHPIFGNIVDEVAYHEKYPTIYHLRKKLVDSTDKADLRLIYLALAHMIKFRGHFLIEGDLNPDNSDVDKLFIQLVQTYNQLFEENPINASGVDAKAILSARLSKSRRLENLIAQLPGEKKNGLFGNLIALSLGLTPNFKSNFDLAEDAKLQLSKDTYDDDLDNLLAQIGDQYADLFLAAKNLSDAILLSDILRVNTEITKAPLSASMIKRYDEHHQDLTLLKALVRQQLPEKYKEIFFDQSKNGYAGYIDGGASQEEFYKFIKPILEKMDGTEELLVKLNREDLLRKQRTFDNGSIPHQIHLGELHAILRRQEDFYPFLKDNREKIEKILTFRIPYYVGPLARGNSRFAWMTRKSEETITPWNFEEVVDKGASAQSFIERMTNFDKNLPNEKVLPKHSLLYEYFTVYNELTKVKYVTEGMRKPAFLSGEQKKAIVDLLFKTNRKVTVKQLKEDYFKKIECFDSVEISGVEDRFNASLGTYHDLLKIIKDKDFLDNEENEDILEDIVLTLTLFEDREMIEERLKTYAHLFDDKVMKQLKRRRYTGWGRLSRKLINGIRDKQSGKTILDFLKSDGFANRNFMQLIHDDSLTFKEDIQKAQVSGQGDSLHEHIANLAGSPAIKKGILQTVKVVDELVKVMGRHKPENIVIEMARENQTTQKGQKNSRERMKRIEEGIKELGSQILKEHPVENTQLQNEKLYLYYLQNGRDMYVDQELDINRLSDYDVDHIVPQSFLKDDSIDNKVLTRSDKARGKSDNVPSEEVVKKMKNYWRQLLNAKLITQRKFDNLTKAERGGLSELDKAGFIKRQLVETRQITKHVAQILDSRMNTKYDENDKLIREVKVITLKSKLVSDFRKDFQFYKVREINNYHHAHDAYLNAVVGTALIKKYPKLESEFVYGDYKVYDVRKMIAKSEQEIGKATAKYFFYSNIMNFFKTEITLANGEIRKRPLIETNGETGEIVWDKGRDFATVRKVLSMPQVNIVKKTEVQTGGFSKESILPKRNSDKLIARKKDWDPKKYGGFDSPTVAYSVLVVAKVEKGKSKKLKSVKELLGITIMERSSFEKNPIDFLEAKGYKEVKKDLIIKLPKYSLFELENGRKRMLASAGELQKGNELALPSKYVNFLYLASHYEKLKGSPEDNEQKQLFVEQHKHYLDEIIEQISEFSKRVILADANLDKVLSAYNKHRDKPIREQAENIIHLFTLTNLGAPAAFKYFDTTIDRKRYTSTKEVLDATLIHQSITGLYETRIDLSQLGGDGGEAAAKEAAAKGGTLNIEDEYRLHETSKEPDVPLGSTWLSDFPQAWAETGGMGLAVRQAPLIIPLKATSTPVSIKQYPMSQEARLGIKPHIQRLLDQGILVPCQSPWNTPLLPVKKPGTNDYRPVQDLREVNKRVEDIHPTVPNPYNLLSGLPPSHQWYTVLDLKDAFFCLRLHPTSQPLFAFEWRDPEMGISGQLTWTRLPQGFKNSPTLFNEALHRDLADFRIQHPDLILLQYVDDLLLAATSEQDCQRGTRALLQTLGNLGYRASAKKAQICQKQVKYLGYLLKEGQRWLTEARKETVMGQPTPKTPRQLREFLGTAGFCRLWIPGFAEMAAPLYPLTKPGTLFNWGPDQQKAYQEIKQALLTAPALGLPDLTKPFELFVDEKQGYAKGVLTQKLGPWRRPVAYLSKKLDPVAAGWPPCLRMVAAIAVLTKDAGKLTMGQPLVILAPHAVEALVKQPPDRWLSNARMTHYQAMLLDTDRVQFGPVVALNPATLLPLPEKEAPHDCLEILAETHGTRPDLTDQPIPDADYTWYTDGSSFLQEGQRRAGAAVTTETEVIWARALPAGTSAQRAELIALTQALKMAEGKKLNVYTDSRYAFATAHVHGEIYRRRGWLTSEGREIKNKNEILALLKALFLPKRLSIIHCPGHQKGNSAEARGNRMADQAAREAAMKAVLETSTLLAGKRTADGSEFEKRTADGSEFESPKKKAKVE

SEQ ID NO: 992 - protein, 2091 aa, synthetic construct
MPAAKRVKLDGGDKKYSIGLDIGTNSVGWAVITDEYKVPSKKFKVLGNTDRHSIKKNLIGALLFDSGETAEATRLKRTARRRYTRRKNRICYLQEIFSNEMAKVDDSFFHRLEESFLVEEDKKHERHPIFGNIVDEVAYHEKYPTIYHLRKKLVDSTDKADLRLIYLALAHMIKFRGHFLIEGDLNPDNSDVDKLFIQLVQTYNQLFEENPINASGVDAKAILSARLSKSRRLENLIAQLPGEKKNGLFGNLIALSLGLTPNFKSNFDLAEDAKLQLSKDTYDDDLDNLLAQIGDQYADLFLAAKNLSDAILLSDILRVNTEITKAPLSASMIKRYDEHHQDLTLLKALVRQQLPEKYKEIFFDQSKNGYAGYIDGGASQEEFYKFIKPILEKMDGTEELLVKLNREDLLRKQRTFDNGSIPHQIHLGELHAILRRQEDFYPFLKDNREKIEKILTFRIPYYVGPLARGNSRFAWMTRKSEETITPWNFEEVVDKGASAQSFIERMTNFDKNLPNEKVLPKHSLLYEYFTVYNELTKVKYVTEGMRKPAFLSGEQKKAIVDLLFKTNRKVTVKQLKEDYFKKIECFDSVEISGVEDRFNASLGTYHDLLKIIKDKDFLDNEENEDILEDIVLTLTLFEDREMIEERLKTYAHLFDDKVMKQLKRRRYTGWGRLSRKLINGIRDKQSGKTILDFLKSDGFANRNFMQLIHDDSLTFKEDIQKAQVSGQGDSLHEHIANLAGSPAIKKGILQTVKVVDELVKVMGRHKPENIVIEMARENQTTQKGQKNSRERMKRIEEGIKELGSQILKEHPVENTQLQNEKLYLYYLQNGRDMYVDQELDINRLSDYDVDHIVPQSFLKDDSIDNKVLTRSDKARGKSDNVPSEEVVKKMKNYWRQLLNAKLITQRKFDNLTKAERGGLSELDKAGFIKRQLVETRQITKHVAQILDSRMNTKYDENDKLIREVKVITLKSKLVSDFRKDFQFYKVREINNYHHAHDAYLNAVVGTALIKKYPKLESEFVYGDYKVYDVRKMIAKSEQEIGKATAKYFFYSNIMNFFKTEITLANGEIRKRPLIETNGETGEIVWDKGRDFATVRKVLSMPQVNIVKKTEVQTGGFSKESILPKRNSDKLIARKKDWDPKKYGGFDSPTVAYSVLVVAKVEKGKSKKLKSVKELLGITIMERSSFEKNPIDFLEAKGYKEVKKDLIIKLPKYSLFELENGRKRMLASAGELQKGNELALPSKYVNFLYLASHYEKLKGSPEDNEQKQLFVEQHKHYLDEIIEQISEFSKRVILADANLDKVLSAYNKHRDKPIREQAENIIHLFTLTNLGAPAAFKYFDTTIDRKRYTSTKEVLDATLIHQSITGLYETRIDLSQLGGDGGGSSGGGGGTLNIEDEYRLHETSKEPDVPLGSTWLSDFPQAWAETGGMGLAVRQAPLIIPLKATSTPVSIKQYPMSQEARLGIKPHIQRLLDQGILVPCQSPWNTPLLPVKKPGTNDYRPVQDLREVNKRVEDIHPTVPNPYNLLSGLPPSHQWYTVLDLKDAFFCLRLHPTSQPLFAFEWRDPEMGISGQLTWTRLPQGFKNSPTLFNEALHRDLADFRIQHPDLILLQYVDDLLLAATSEQDCQRGTRALLQTLGNLGYRASAKKAQICQKQVKYLGYLLKEGQRWLTEARKETVMGQPTPKTPRQLREFLGTAGFCRLWIPGFAEMAAPLYPLTKPGTLFNWGPDQQKAYQEIKQALLTAPALGLPDLTKPFELFVDEKQGYAKGVLTQKLGPWRRPVAYLSKKLDPVAAGWPPCLRMVAAIAVLTKDAGKLTMGQPLVILAPHAVEALVKQPPDRWLSNARMTHYQAMLLDTDRVQFGPVVALNPATLLPLPEKEAPHDCLEILAETHGTRPDLTDQPIPDADYTWYTDGSSFLQEGQRRAGAAVTTETEVIWARALPAGTSAQRAELIALTQALKMAEGKKLNVYTDSRYAFATAHVHGEIYRRRGWLTSEGREIKNKNEILALLKALFLPKRLSIIHCPGHQKGNSAEARGNRMADQAAREAAMKAVLETSTLLAGKRTADGSEFEKRTADGSEFESPKKKAKVE

SEQ ID NO: 993 - protein, 2093 aa, synthetic construct
MPAAKRVKLDGGDKKYSIGLDIGTNSVGWAVITDEYKVPSKKFKVLGNTDRHSIKKNLIGALLFDSGETAEATRLKRTARRRYTRRKNRICYLQEIFSNEMAKVDDSFFHRLEESFLVEEDKKHERHPIFGNIVDEVAYHEKYPTIYHLRKKLVDSTDKADLRLIYLALAHMIKFRGHFLIEGDLNPDNSDVDKLFIQLVQTYNQLFEENPINASGVDAKAILSARLSKSRRLENLIAQLPGEKKNGLFGNLIALSLGLTPNFKSNFDLAEDAKLQLSKDTYDDDLDNLLAQIGDQYADLFLAAKNLSDAILLSDILRVNTEITKAPLSASMIKRYDEHHQDLTLLKALVRQQLPEKYKEIFFDQSKNGYAGYIDGGASQEEFYKFIKPILEKMDGTEELLVKLNREDLLRKQRTFDNGSIPHQIHLGELHAILRRQEDFYPFLKDNREKIEKILTFRIPYYVGPLARGNSRFAWMTRKSEETITPWNFEEVVDKGASAQSFIERMTNFDKNLPNEKVLPKHSLLYEYFTVYNELTKVKYVTEGMRKPAFLSGEQKKAIVDLLFKTNRKVTVKQLKEDYFKKIECFDSVEISGVEDRFNASLGTYHDLLKIIKDKDFLDNEENEDILEDIVLTLTLFEDREMIEERLKTYAHLFDDKVMKQLKRRRYTGWGRLSRKLINGIRDKQSGKTILDFLKSDGFANRNFMQLIHDDSLTFKEDIQKAQVSGQGDSLHEHIANLAGSPAIKKGILQTVKVVDELVKVMGRHKPENIVIEMARENQTTQKGQKNSRERMKRIEEGIKELGSQILKEHPVENTQLQNEKLYLYYLQNGRDMYVDQELDINRLSDYDVDHIVPQSFLKDDSIDNKVLTRSDKARGKSDNVPSEEVVKKMKNYWRQLLNAKLITQRKFDNLTKAERGGLSELDKAGFIKRQLVETRQITKHVAQILDSRMNTKYDENDKLIREVKVITLKSKLVSDFRKDFQFYKVREINNYHHAHDAYLNAVVGTALIKKYPKLESEFVYGDYKVYDVRKMIAKSEQEIGKATAKYFFYSNIMNFFKTEITLANGEIRKRPLIETNGETGEIVWDKGRDFATVRKVLSMPQVNIVKKTEVQTGGFSKESILPKRNSDKLIARKKDWDPKKYGGFDSPTVAYSVLVVAKVEKGKSKKLKSVKELLGITIMERSSFEKNPIDFLEAKGYKEVKKDLIIKLPKYSLFELENGRKRMLASAGELQKGNELALPSKYVNFLYLASHYEKLKGSPEDNEQKQLFVEQHKHYLDEIIEQISEFSKRVILADANLDKVLSAYNKHRDKPIREQAENIIHLFTLTNLGAPAAFKYFDTTIDRKRYTSTKEVLDATLIHQSITGLYETRIDLSQLGGDGGGGSEAAAKGGTLNIEDEYRLHETSKEPDVPLGSTWLSDFPQAWAETGGMGLAVRQAPLIIPLKATSTPVSIKQYPMSQEARLGIKPHIQRLLDQGILVPCQSPWNTPLLPVKKPGTNDYRPVQDLREVNKRVEDIHPTVPNPYNLLSGLPPSHQWYTVLDLKDAFFCLRLHPTSQPLFAFEWRDPEMGISGQLTWTRLPQGFKNSPTLFNEALHRDLADFRIQHPDLILLQYVDDLLLAATSEQDCQRGTRALLQTLGNLGYRASAKKAQICQKQVKYLGYLLKEGQRWLTEARKETVMGQPTPKTPRQLREFLGTAGFCRLWIPGFAEMAAPLYPLTKPGTLFNWGPDQQKAYQEIKQALLTAPALGLPDLTKPFELFVDEKQGYAKGVLTQKLGPWRRPVAYLSKKLDPVAAGWPPCLRMVAAIAVLTKDAGKLTMGQPLVILAPHAVEALVKQPPDRWLSNARMTHYQAMLLDTDRVQFGPVVALNPATLLPLPEKEAPHDCLEILAETHGTRPDLTDQPIPDADYTWYTDGSSFLQEGQRRAGAAVTTETEVIWARALPAGTSAQRAELIALTQALKMAEGKKLNVYTDSRYAFATAHVHGEIYRRRGWLTSEGREIKNKNEILALLKALFLPKRLSIIHCPGHQKGNSAEARGNRMADQAAREAAMKAVLETSTLLAGKRTADGSEFEKRTADGSEFESPKKKAKVE

SEQ ID NO: 994 - protein, 2100 aa, synthetic construct
MPAAKRVKLDGGDKKYSIGLDIGTNSVGWAVITDEYKVPSKKFKVLGNTDRHSIKKNLIGALLFDSGETAEATRLKRTARRRYTRRKNRICYLQEIFSNEMAKVDDSFFHRLEESFLVEEDKKHERHPIFGNIVDEVAYHEKYPTIYHLRKKLVDSTDKADLRLIYLALAHMIKFRGHFLIEGDLNPDNSDVDKLFIQLVQTYNQLFEENPINASGVDAKAILSARLSKSRRLENLIAQLPGEKKNGLFGNLIALSLGLTPNFKSNFDLAEDAKLQLSKDTYDDDLDNLLAQIGDQYADLFLAAKNLSDAILLSDILRVNTEITKAPLSASMIKRYDEHHQDLTLLKALVRQQLPEKYKEIFFDQSKNGYAGYIDGGASQEEFYKFIKPILEKMDGTEELLVKLNREDLLRKQRTFDNGSIPHQIHLGELHAILRRQEDFYPFLKDNREKIEKILTFRIPYYVGPLARGNSRFAWMTRKSEETITPWNFEEVVDKGASAQSFIERMTNFDKNLPNEKVLPKHSLLYEYFTVYNELTKVKYVTEGMRKPAFLSGEQKKAIVDLLFKTNRKVTVKQLKEDYFKKIECFDSVEISGVEDRFNASLGTYHDLLKIIKDKDFLDNEENEDILEDIVLTLTLFEDREMIEERLKTYAHLFDDKVMKQLKRRRYTGWGRLSRKLINGIRDKQSGKTILDFLKSDGFANRNFMQLIHDDSLTFKEDIQKAQVSGQGDSLHEHIANLAGSPAIKKGILQTVKVVDELVKVMGRHKPENIVIEMARENQTTQKGQKNSRERMKRIEEGIKELGSQILKEHPVENTQLQNEKLYLYYLQNGRDMYVDQELDINRLSDYDVDHIVPQSFLKDDSIDNKVLTRSDKARGKSDNVPSEEVVKKMKNYWRQLLNAKLITQRKFDNLTKAERGGLSELDKAGFIKRQLVETRQITKHVAQILDSRMNTKYDENDKLIREVKVITLKSKLVSDFRKDFQFYKVREINNYHHAHDAYLNAVVGTALIKKYPKLESEFVYGDYKVYDVRKMIAKSEQEIGKATAKYFFYSNIMNFFKTEITLANGEIRKRPLIETNGETGEIVWDKGRDFATVRKVLSMPQVNIVKKTEVQTGGFSKESILPKRNSDKLIARKKDWDPKKYGGFDSPTVAYSVLVVAKVEKGKSKKLKSVKELLGITIMERSSFEKNPIDFLEAKGYKEVKKDLIIKLPKYSLFELENGRKRMLASAGELQKGNELALPSKYVNFLYLASHYEKLKGSPEDNEQKQLFVEQHKHYLDEIIEQISEFSKRVILADANLDKVLSAYNKHRDKPIREQAENIIHLFTLTNLGAPAAFKYFDTTIDRKRYTSTKEVLDATLIHQSITGLYETRIDLSQLGGDGGGGSGGSGGSGGSGGSGGTLNIEDEYRLHETSKEPDVPLGSTWLSDFPQAWAETGGMGLAVRQAPLIIPLKATSTPVSIKQYPMSQEARLGIKPHIQRLLDQGILVPCQSPWNTPLLPVKKPGTNDYRPVQDLREVNKRVEDIHPTVPNPYNLLSGLPPSHQWYTVLDLKDAFFCLRLHPTSQPLFAFEWRDPEMGISGQLTWTRLPQGFKNSPTLFNEALHRDLADFRIQHPDLILLQYVDDLLLAATSEQDCQRGTRALLQTLGNLGYRASAKKAQICQKQVKYLGYLLKEGQRWLTEARKETVMGQPTPKTPRQLREFLGTAGFCRLWIPGFAEMAAPLYPLTKPGTLFNWGPDQQKAYQEIKQALLTAPALGLPDLTKPFELFVDEKQGYAKGVLTQKLGPWRRPVAYLSKKLDPVAAGWPPCLRMVAAIAVLTKDAGKLTMGQPLVILAPHAVEALVKQPPDRWLSNARMTHYQAMLLDTDRVQFGPVVALNPATLLPLPEKEAPHDCLEILAETHGTRPDLTDQPIPDADYTWYTDGSSFLQEGQRRAGAAVTTETEVIWARALPAGTSAQRAELIALTQALKMAEGKKLNVYTDSRYAFATAHVHGEIYRRRGWLTSEGREIKNKNEILALLKALFLPKRLSIIHCPGHQKGNSAEARGNRMADQAAREAAMKAVLETSTLLAGKRTADGSEFEKRTADGSEFESPKKKAKVE

SEQ ID NO: 995 - protein, 2094 aa, synthetic construct
MPAAKRVKLDGGDKKYSIGLDIGTNSVGWAVITDEYKVPSKKFKVLGNTDRHSIKKNLIGALLFDSGETAEATRLKRTARRRYTRRKNRICYLQEIFSNEMAKVDDSFFHRLEESFLVEEDKKHERHPIFGNIVDEVAYHEKYPTIYHLRKKLVDSTDKADLRLIYLALAHMIKFRGHFLIEGDLNPDNSDVDKLFIQLVQTYNQLFEENPINASGVDAKAILSARLSKSRRLENLIAQLPGEKKNGLFGNLIALSLGLTPNFKSNFDLAEDAKLQLSKDTYDDDLDNLLAQIGDQYADLFLAAKNLSDAILLSDILRVNTEITKAPLSASMIKRYDEHHQDLTLLKALVRQQLPEKYKEIFFDQSKNGYAGYIDGGASQEEFYKFIKPILEKMDGTEELLVKLNREDLLRKQRTFDNGSIPHQIHLGELHAILRRQEDFYPFLKDNREKIEKILTFRIPYYVGPLARGNSRFAWMTRKSEETITPWNFEEVVDKGASAQSFIERMTNFDKNLPNEKVLPKHSLLYEYFTVYNELTKVKYVTEGMRKPAFLSGEQKKAIVDLLFKTNRKVTVKQLKEDYFKKIECFDSVEISGVEDRFNASLGTYHDLLKIIKDKDFLDNEENEDILEDIVLTLTLFEDREMIEERLKTYAHLFDDKVMKQLKRRRYTGWGRLSRKLINGIRDKQSGKTILDFLKSDGFANRNFMQLIHDDSLTFKEDIQKAQVSGQGDSLHEHIANLAGSPAIKKGILQTVKVVDELVKVMGRHKPENIVIEMARENQTTQKGQKNSRERMKRIEEGIKELGSQILKEHPVENTQLQNEKLYLYYLQNGRDMYVDQELDINRLSDYDVDHIVPQSFLKDDSIDNKVLTRSDKARGKSDNVPSEEVVKKMKNYWRQLLNAKLITQRKFDNLTKAERGGLSELDKAGFIKRQLVETRQITKHVAQILDSRMNTKYDENDKLIREVKVITLKSKLVSDFRKDFQFYKVREINNYHHAHDAYLNAVVGTALIKKYPKLESEFVYGDYKVYDVRKMIAKSEQEIGKATAKYFFYSNIMNFFKTEITLANGEIRKRPLIETNGETGEIVWDKGRDFATVRKVLSMPQVNIVKKTEVQTGGFSKESILPKRNSDKLIARKKDWDPKKYGGFDSPTVAYSVLVVAKVEKGKSKKLKSVKELLGITIMERSSFEKNPIDFLEAKGYKEVKKDLIIKLPKYSLFELENGRKRMLASAGELQKGNELALPSKYVNFLYLASHYEKLKGSPEDNEQKQLFVEQHKHYLDEIIEQISEFSKRVILADANLDKVLSAYNKHRDKPIREQAENIIHLFTLTNLGAPAAFKYFDTTIDRKRYTSTKEVLDATLIHQSITGLYETRIDLSQLGGDGGGGSGSSGGGGGTLNIEDEYRLHETSKEPDVPLGSTWLSDFPQAWAETGGMGLAVRQAPLIIPLKATSTPVSIKQYPMSQEARLGIKPHIQRLLDQGILVPCQSPWNTPLLPVKKPGTNDYRPVQDLREVNKRVEDIHPTVPNPYNLLSGLPPSHQWYTVLDLKDAFFCLRLHPTSQPLFAFEWRDPEMGISGQLTWTRLPQGFKNSPTLFNEALHRDLADFRIQHPDLILLQYVDDLLLAATSEQDCQRGTRALLQTLGNLGYRASAKKAQICQKQVKYLGYLLKEGQRWLTEARKETVMGQPTPKTPRQLREFLGTAGFCRLWIPGFAEMAAPLYPLTKPGTLFNWGPDQQKAYQEIKQALLTAPALGLPDLTKPFELFVDEKQGYAKGVLTQKLGPWRRPVAYLSKKLDPVAAGWPPCLRMVAAIAVLTKDAGKLTMGQPLVILAPHAVEALVKQPPDRWLSNARMTHYQAMLLDTDRVQFGPVVALNPATLLPLPEKEAPHDCLEILAETHGTRPDLTDQPIPDADYTWYTDGSSFLQEGQRRAGAAVTTETEVIWARALPAGTSAQRAELIALTQALKMAEGKKLNVYTDSRYAFATAHVHGEIYRRRGWLTSEGREIKNKNEILALLKALFLPKRLSIIHCPGHQKGNSAEARGNRMADQAAREAAMKAVLETSTLLAGKRTADGSEFEKRTADGSEFESPKKKAKVE

SEQ ID NO: 996 - protein, 2100 aa, synthetic construct
MPAAKRVKLDGGDKKYSIGLDIGTNSVGWAVITDEYKVPSKKFKVLGNTDRHSIKKNLIGALLFDSGETAEATRLKRTARRRYTRRKNRICYLQEIFSNEMAKVDDSFFHRLEESFLVEEDKKHERHPIFGNIVDEVAYHEKYPTIYHLRKKLVDSTDKADLRLIYLALAHMIKFRGHFLIEGDLNPDNSDVDKLFIQLVQTYNQLFEENPINASGVDAKAILSARLSKSRRLENLIAQLPGEKKNGLFGNLIALSLGLTPNFKSNFDLAEDAKLQLSKDTYDDDLDNLLAQIGDQYADLFLAAKNLSDAILLSDILRVNTEITKAPLSASMIKRYDEHHQDLTLLKALVRQQLPEKYKEIFFDQSKNGYAGYIDGGASQEEFYKFIKPILEKMDGTEELLVKLNREDLLRKQRTFDNGSIPHQIHLGELHAILRRQEDFYPFLKDNREKIEKILTFRIPYYVGPLARGNSRFAWMTRKSEETITPWNFEEVVDKGASAQSFIERMTNFDKNLPNEKVLPKHSLLYEYFTVYNELTKVKYVTEGMRKPAFLSGEQKKAIVDLLFKTNRKVTVKQLKEDYFKKIECFDSVEISGVEDRFNASLGTYHDLLKIIKDKDFLDNEENEDILEDIVLTLTLFEDREMIEERLKTYAHLFDDKVMKQLKRRRYTGWGRLSRKLINGIRDKQSGKTILDFLKSDGFANRNFMQLIHDDSLTFKEDIQKAQVSGQGDSLHEHIANLAGSPAIKKGILQTVKVVDELVKVMGRHKPENIVIEMARENQTTQKGQKNSRERMKRIEEGIKELGSQILKEHPVENTQLQNEKLYLYYLQNGRDMYVDQELDINRLSDYDVDHIVPQSFLKDDSIDNKVLTRSDKARGKSDNVPSEEVVKKMKNYWRQLLNAKLITQRKFDNLTKAERGGLSELDKAGFIKRQLVETRQITKHVAQILDSRMNTKYDENDKLIREVKVITLKSKLVSDFRKDFQFYKVREINNYHHAHDAYLNAVVGTALIKKYPKLESEFVYGDYKVYDVRKMIAKSEQEIGKATAKYFFYSNIMNFFKTEITLANGEIRKRPLIETNGETGEIVWDKGRDFATVRKVLSMPQVNIVKKTEVQTGGFSKESILPKRNSDKLIARKKDWDPKKYGGFDSPTVAYSVLVVAKVEKGKSKKLKSVKELLGITIMERSSFEKNPIDFLEAKGYKEVKKDLIIKLPKYSLFELENGRKRMLASAGELQKGNELALPSKYVNFLYLASHYEKLKGSPEDNEQKQLFVEQHKHYLDEIIEQISEFSKRVILADANLDKVLSAYNKHRDKPIREQAENIIHLFTLTNLGAPAAFKYFDTTIDRKRYTSTKEVLDATLIHQSITGLYETRIDLSQLGGDGGEAAAKEAAAKEAAAKGGTLNIEDEYRLHETSKEPDVPLGSTWLSDFPQAWAETGGMGLAVRQAPLIIPLKATSTPVSIKQYPMSQEARLGIKPHIQRLLDQGILVPCQSPWNTPLLPVKKPGTNDYRPVQDLREVNKRVEDIHPTVPNPYNLLSGLPPSHQWYTVLDLKDAFFCLRLHPTSQPLFAFEWRDPEMGISGQLTWTRLPQGFKNSPTLFNEALHRDLADFRIQHPDLILLQYVDDLLLAATSEQDCQRGTRALLQTLGNLGYRASAKKAQICQKQVKYLGYLLKEGQRWLTEARKETVMGQPTPKTPRQLREFLGTAGFCRLWIPGFAEMAAPLYPLTKPGTLFNWGPDQQKAYQEIKQALLTAPALGLPDLTKPFELFVDEKQGYAKGVLTQKLGPWRRPVAYLSKKLDPVAAGWPPCLRMVAAIAVLTKDAGKLTMGQPLVILAPHAVEALVKQPPDRWLSNARMTHYQAMLLDTDRVQFGPVVALNPATLLPLPEKEAPHDCLEILAETHGTRPDLTDQPIPDADYTWYTDGSSFLQEGQRRAGAAVTTETEVIWARALPAGTSAQRAELIALTQALKMAEGKKLNVYTDSRYAFATAHVHGEIYRRRGWLTSEGREIKNKNEILALLKALFLPKRLSIIHCPGHQKGNSAEARGNRMADQAAREAAMKAVLETSTLLAGKRTADGSEFEKRTADGSEFESPKKKAKVE

SEQ ID NO: 997 - protein, 2088 aa, synthetic construct
MPAAKRVKLDGGDKKYSIGLDIGTNSVGWAVITDEYKVPSKKFKVLGNTDRHSIKKNLIGALLFDSGETAEATRLKRTARRRYTRRKNRICYLQEIFSNEMAKVDDSFFHRLEESFLVEEDKKHERHPIFGNIVDEVAYHEKYPTIYHLRKKLVDSTDKADLRLIYLALAHMIKFRGHFLIEGDLNPDNSDVDKLFIQLVQTYNQLFEENPINASGVDAKAILSARLSKSRRLENLIAQLPGEKKNGLFGNLIALSLGLTPNFKSNFDLAEDAKLQLSKDTYDDDLDNLLAQIGDQYADLFLAAKNLSDAILLSDILRVNTEITKAPLSASMIKRYDEHHQDLTLLKALVRQQLPEKYKEIFFDQSKNGYAGYIDGGASQEEFYKFIKPILEKMDGTEELLVKLNREDLLRKQRTFDNGSIPHQIHLGELHAILRRQEDFYPFLKDNREKIEKILTFRIPYYVGPLARGNSRFAWMTRKSEETITPWNFEEVVDKGASAQSFIERMTNFDKNLPNEKVLPKHSLLYEYFTVYNELTKVKYVTEGMRKPAFLSGEQKKAIVDLLFKTNRKVTVKQLKEDYFKKIECFDSVEISGVEDRFNASLGTYHDLLKIIKDKDFLDNEENEDILEDIVLTLTLFEDREMIEERLKTYAHLFDDKVMKQLKRRRYTGWGRLSRKLINGIRDKQSGKTILDFLKSDGFANRNFMQLIHDDSLTFKEDIQKAQVSGQGDSLHEHIANLAGSPAIKKGILQTVKVVDELVKVMGRHKPENIVIEMARENQTTQKGQKNSRERMKRIEEGIKELGSQILKEHPVENTQLQNEKLYLYYLQNGRDMYVDQELDINRLSDYDVDHIVPQSFLKDDSIDNKVLTRSDKARGKSDNVPSEEVVKKMKNYWRQLLNAKLITQRKFDNLTKAERGGLSELDKAGFIKRQLVETRQITKHVAQILDSRMNTKYDENDKLIREVKVITLKSKLVSDFRKDFQFYKVREINNYHHAHDAYLNAVVGTALIKKYPKLESEFVYGDYKVYDVRKMIAKSEQEIGKATAKYFFYSNIMNFFKTEITLANGEIRKRPLIETNGETGEIVWDKGRDFATVRKVLSMPQVNIVKKTEVQTGGFSKESILPKRNSDKLIARKKDWDPKKYGGFDSPTVAYSVLVVAKVEKGKSKKLKSVKELLGITIMERSSFEKNPIDFLEAKGYKEVKKDLIIKLPKYSLFELENGRKRMLASAGELQKGNELALPSKYVNFLYLASHYEKLKGSPEDNEQKQLFVEQHKHYLDEIIEQISEFSKRVILADANLDKVLSAYNKHRDKPIREQAENIIHLFTLTNLGAPAAFKYFDTTIDRKRYTSTKEVLDATLIHQSITGLYETRIDLSQLGGDGGGGGGGTLNIEDEYRLHETSKEPDVPLGSTWLSDFPQAWAETGGMGLAVRQAPLIIPLKATSTPVSIKQYPMSQEARLGIKPHIQRLLDQGILVPCQSPWNTPLLPVKKPGTNDYRPVQDLREVNKRVEDIHPTVPNPYNLLSGLPPSHQWYTVLDLKDAFFCLRLHPTSQPLFAFEWRDPEMGISGQLTWTRLPQGFKNSPTLFNEALHRDLADFRIQHPDLILLQYVDDLLLAATSEQDCQRGTRALLQTLGNLGYRASAKKAQICQKQVKYLGYLLKEGQRWLTEARKETVMGQPTPKTPRQLREFLGTAGFCRLWIPGFAEMAAPLYPLTKPGTLFNWGPDQQKAYQEIKQALLTAPALGLPDLTKPFELFVDEKQGYAKGVLTQKLGPWRRPVAYLSKKLDPVAAGWPPCLRMVAAIAVLTKDAGKLTMGQPLVILAPHAVEALVKQPPDRWLSNARMTHYQAMLLDTDRVQFGPVVALNPATLLPLPEKEAPHDCLEILAETHGTRPDLTDQPIPDADYTWYTDGSSFLQEGQRRAGAAVTTETEVIWARALPAGTSAQRAELIALTQALKMAEGKKLNVYTDSRYAFATAHVHGEIYRRRGWLTSEGREIKNKNEILALLKALFLPKRLSIIHCPGHQKGNSAEARGNRMADQAAREAAMKAVLETSTLLAGKRTADGSEFEKRTADGSEFESPKKKAKVE

SEQ ID NO: 998 - protein, 2090 aa, synthetic construct
MPAAKRVKLDGGDKKYSIGLDIGTNSVGWAVITDEYKVPSKKFKVLGNTDRHSIKKNLIGALLFDSGETAEATRLKRTARRRYTRRKNRICYLQEIFSNEMAKVDDSFFHRLEESFLVEEDKKHERHPIFGNIVDEVAYHEKYPTIYHLRKKLVDSTDKADLRLIYLALAHMIKFRGHFLIEGDLNPDNSDVDKLFIQLVQTYNQLFEENPINASGVDAKAILSARLSKSRRLENLIAQLPGEKKNGLFGNLIALSLGLTPNFKSNFDLAEDAKLQLSKDTYDDDLDNLLAQIGDQYADLFLAAKNLSDAILLSDILRVNTEITKAPLSASMIKRYDEHHQDLTLLKALVRQQLPEKYKEIFFDQSKNGYAGYIDGGASQEEFYKFIKPILEKMDGTEELLVKLNREDLLRKQRTFDNGSIPHQIHLGELHAILRRQEDFYPFLKDNREKIEKILTFRIPYYVGPLARGNSRFAWMTRKSEETITPWNFEEVVDKGASAQSFIERMTNFDKNLPNEKVLPKHSLLYEYFTVYNELTKVKYVTEGMRKPAFLSGEQKKAIVDLLFKTNRKVTVKQLKEDYFKKIECFDSVEISGVEDRFNASLGTYHDLLKIIKDKDFLDNEENEDILEDIVLTLTLFEDREMIEERLKTYAHLFDDKVMKQLKRRRYTGWGRLSRKLINGIRDKQSGKTILDFLKSDGFANRNFMQLIHDDSLTFKEDIQKAQVSGQGDSLHEHIANLAGSPAIKKGILQTVKVVDELVKVMGRHKPENIVIEMARENQTTQKGQKNSRERMKRIEEGIKELGSQILKEHPVENTQLQNEKLYLYYLQNGRDMYVDQELDINRLSDYDVDHIVPQSFLKDDSIDNKVLTRSDKARGKSDNVPSEEVVKKMKNYWRQLLNAKLITQRKFDNLTKAERGGLSELDKAGFIKRQLVETRQITKHVAQILDSRMNTKYDENDKLIREVKVITLKSKLVSDFRKDFQFYKVREINNYHHAHDAYLNAVVGTALIKKYPKLESEFVYGDYKVYDVRKMIAKSEQEIGKATAKYFFYSNIMNFFKTEITLANGEIRKRPLIETNGETGEIVWDKGRDFATVRKVLSMPQVNIVKKTEVQTGGFSKESILPKRNSDKLIARKKDWDPKKYGGFDSPTVAYSVLVVAKVEKGKSKKLKSVKELLGITIMERSSFEKNPIDFLEAKGYKEVKKDLIIKLPKYSLFELENGRKRMLASAGELQKGNELALPSKYVNFLYLASHYEKLKGSPEDNEQKQLFVEQHKHYLDEIIEQISEFSKRVILADANLDKVLSAYNKHRDKPIREQAENIIHLFTLTNLGAPAAFKYFDTTIDRKRYTSTKEVLDATLIHQSITGLYETRIDLSQLGGDGGGGGGSGGTLNIEDEYRLHETSKEPDVPLGSTWLSDFPQAWAETGGMGLAVRQAPLIIPLKATSTPVSIKQYPMSQEARLGIKPHIQRLLDQGILVPCQSPWNTPLLPVKKPGTNDYRPVQDLREVNKRVEDIHPTVPNPYNLLSGLPPSHQWYTVLDLKDAFFCLRLHPTSQPLFAFEWRDPEMGISGQLTWTRLPQGFKNSPTLFNEALHRDLADFRIQHPDLILLQYVDDLLLAATSEQDCQRGTRALLQTLGNLGYRASAKKAQICQKQVKYLGYLLKEGQRWLTEARKETVMGQPTPKTPRQLREFLGTAGFCRLWIPGFAEMAAPLYPLTKPGTLFNWGPDQQKAYQEIKQALLTAPALGLPDLTKPFELFVDEKQGYAKGVLTQKLGPWRRPVAYLSKKLDPVAAGWPPCLRMVAAIAVLTKDAGKLTMGQPLVILAPHAVEALVKQPPDRWLSNARMTHYQAMLLDTDRVQFGPVVALNPATLLPLPEKEAPHDCLEILAETHGTRPDLTDQPIPDADYTWYTDGSSFLQEGQRRAGAAVTTETEVIWARALPAGTSAQRAELIALTQALKMAEGKKLNVYTDSRYAFATAHVHGEIYRRRGWLTSEGREIKNKNEILALLKALFLPKRLSIIHCPGHQKGNSAEARGNRMADQAAREAAMKAVLETSTLLAGKRTADGSEFEKRTADGSEFESPKKKAKVE

SEQ ID NO: 999 - protein, 2094 aa, synthetic construct
MPAAKRVKLDGGDKKYSIGLDIGTNSVGWAVITDEYKVPSKKFKVLGNTDRHSIKKNLIGALLFDSGETAEATRLKRTARRRYTRRKNRICYLQEIFSNEMAKVDDSFFHRLEESFLVEEDKKHERHPIFGNIVDEVAYHEKYPTIYHLRKKLVDSTDKADLRLIYLALAHMIKFRGHFLIEGDLNPDNSDVDKLFIQLVQTYNQLFEENPINASGVDAKAILSARLSKSRRLENLIAQLPGEKKNGLFGNLIALSLGLTPNFKSNFDLAEDAKLQLSKDTYDDDLDNLLAQIGDQYADLFLAAKNLSDAILLSDILRVNTEITKAPLSASMIKRYDEHHQDLTLLKALVRQQLPEKYKEIFFDQSKNGYAGYIDGGASQEEFYKFIKPILEKMDGTEELLVKLNREDLLRKQRTFDNGSIPHQIHLGELHAILRRQEDFYPFLKDNREKIEKILTFRIPYYVGPLARGNSRFAWMTRKSEETITPWNFEEVVDKGASAQSFIERMTNFDKNLPNEKVLPKHSLLYEYFTVYNELTKVKYVTEGMRKPAFLSGEQKKAIVDLLFKTNRKVTVKQLKEDYFKKIECFDSVEISGVEDRFNASLGTYHDLLKIIKDKDFLDNEENEDILEDIVLTLTLFEDREMIEERLKTYAHLFDDKVMKQLKRRRYTGWGRLSRKLINGIRDKQSGKTILDFLKSDGFANRNFMQLIHDDSLTFKEDIQKAQVSGQGDSLHEHIANLAGSPAIKKGILQTVKVVDELVKVMGRHKPENIVIEMARENQTTQKGQKNSRERMKRIEEGIKELGSQILKEHPVENTQLQNEKLYLYYLQNGRDMYVDQELDINRLSDYDVDHIVPQSFLKDDSIDNKVLTRSDKARGKSDNVPSEEVVKKMKNYWRQLLNAKLITQRKFDNLTKAERGGLSELDKAGFIKRQLVETRQITKHVAQILDSRMNTKYDENDKLIREVKVITLKSKLVSDFRKDFQFYKVREINNYHHAHDAYLNAVVGTALIKKYPKLESEFVYGDYKVYDVRKMIAKSEQEIGKATAKYFFYSNIMNFFKTEITLANGEIRKRPLIETNGETGEIVWDKGRDFATVRKVLSMPQVNIVKKTEVQTGGFSKESILPKRNSDKLIARKKDWDPKKYGGFDSPTVAYSVLVVAKVEKGKSKKLKSVKELLGITIMERSSFEKNPIDFLEAKGYKEVKKDLIIKLPKYSLFELENGRKRMLASAGELQKGNELALPSKYVNFLYLASHYEKLKGSPEDNEQKQLFVEQHKHYLDEIIEQISEFSKRVILADANLDKVLSAYNKHRDKPIREQAENIIHLFTLTNLGAPAAFKYFDTTIDRKRYTSTKEVLDATLIHQSITGLYETRIDLSQLGGDGGGGGGGSPAPGGTLNIEDEYRLHETSKEPDVPLGSTWLSDFPQAWAETGGMGLAVRQAPLIIPLKATSTPVSIKQYPMSQEARLGIKPHIQRLLDQGILVPCQSPWNTPLLPVKKPGTNDYRPVQDLREVNKRVEDIHPTVPNPYNLLSGLPPSHQWYTVLDLKDAFFCLRLHPTSQPLFAFEWRDPEMGISGQLTWTRLPQGFKNSPTLFNEALHRDLADFRIQHPDLILLQYVDDLLLAATSEQDCQRGTRALLQTLGNLGYRASAKKAQICQKQVKYLGYLLKEGQRWLTEARKETVMGQPTPKTPRQLREFLGTAGFCRLWIPGFAEMAAPLYPLTKPGTLFNWGPDQQKAYQEIKQALLTAPALGLPDLTKPFELFVDEKQGYAKGVLTQKLGPWRRPVAYLSKKLDPVAAGWPPCLRMVAAIAVLTKDAGKLTMGQPLVILAPHAVEALVKQPPDRWLSNARMTHYQAMLLDTDRVQFGPVVALNPATLLPLPEKEAPHDCLEILAETHGTRPDLTDQPIPDADYTWYTDGSSFLQEGQRRAGAAVTTETEVIWARALPAGTSAQRAELIALTQALKMAEGKKLNVYTDSRYAFATAHVHGEIYRRRGWLTSEGREIKNKNEILALLKALFLPKRLSIIHCPGHQKGNSAEARGNRMADQAAREAAMKAVLETSTLLAGKRTADGSEFEKRTADGSEFESPKKKAKVE

SEQ ID NO: 1000 - protein, 2094 aa, synthetic construct
MPAAKRVKLDGGDKKYSIGLDIGTNSVGWAVITDEYKVPSKKFKVLGNTDRHSIKKNLIGALLFDSGETAEATRLKRTARRRYTRRKNRICYLQEIFSNEMAKVDDSFFHRLEESFLVEEDKKHERHPIFGNIVDEVAYHEKYPTIYHLRKKLVDSTDKADLRLIYLALAHMIKFRGHFLIEGDLNPDNSDVDKLFIQLVQTYNQLFEENPINASGVDAKAILSARLSKSRRLENLIAQLPGEKKNGLFGNLIALSLGLTPNFKSNFDLAEDAKLQLSKDTYDDDLDNLLAQIGDQYADLFLAAKNLSDAILLSDILRVNTEITKAPLSASMIKRYDEHHQDLTLLKALVRQQLPEKYKEIFFDQSKNGYAGYIDGGASQEEFYKFIKPILEKMDGTEELLVKLNREDLLRKQRTFDNGSIPHQIHLGELHAILRRQEDFYPFLKDNREKIEKILTFRIPYYVGPLARGNSRFAWMTRKSEETITPWNFEEVVDKGASAQSFIERMTNFDKNLPNEKVLPKHSLLYEYFTVYNELTKVKYVTEGMRKPAFLSGEQKKAIVDLLFKTNRKVTVKQLKEDYFKKIECFDSVEISGVEDRFNASLGTYHDLLKIIKDKDFLDNEENEDILEDIVLTLTLFEDREMIEERLKTYAHLFDDKVMKQLKRRRYTGWGRLSRKLINGIRDKQSGKTILDFLKSDGFANRNFMQLIHDDSLTFKEDIQKAQVSGQGDSLHEHIANLAGSPAIKKGILQTVKVVDELVKVMGRHKPENIVIEMARENQTTQKGQKNSRERMKRIEEGIKELGSQILKEHPVENTQLQNEKLYLYYLQNGRDMYVDQELDINRLSDYDVDHIVPQSFLKDDSIDNKVLTRSDKARGKSDNVPSEEVVKKMKNYWRQLLNAKLITQRKFDNLTKAERGGLSELDKAGFIKRQLVETRQITKHVAQILDSRMNTKYDENDKLIREVKVITLKSKLVSDFRKDFQFYKVREINNYHHAHDAYLNAVVGTALIKKYPKLESEFVYGDYKVYDVRKMIAKSEQEIGKATAKYFFYSNIMNFFKTEITLANGEIRKRPLIETNGETGEIVWDKGRDFATVRKVLSMPQVNIVKKTEVQTGGFSKESILPKRNSDKLIARKKDWDPKKYGGFDSPTVAYSVLVVAKVEKGKSKKLKSVKELLGITIMERSSFEKNPIDFLEAKGYKEVKKDLIIKLPKYSLFELENGRKRMLASAGELQKGNELALPSKYVNFLYLASHYEKLKGSPEDNEQKQLFVEQHKHYLDEIIEQISEFSKRVILADANLDKVLSAYNKHRDKPIREQAENIIHLFTLTNLGAPAAFKYFDTTIDRKRYTSTKEVLDATLIHQSITGLYETRIDLSQLGGDGGGSSPAPGGGGGTLNIEDEYRLHETSKEPDVPLGSTWLSDFPQAWAETGGMGLAVRQAPLIIPLKATSTPVSIKQYPMSQEARLGIKPHIQRLLDQGILVPCQSPWNTPLLPVKKPGTNDYRPVQDLREVNKRVEDIHPTVPNPYNLLSGLPPSHQWYTVLDLKDAFFCLRLHPTSQPLFAFEWRDPEMGISGQLTWTRLPQGFKNSPTLFNEALHRDLADFRIQHPDLILLQYVDDLLLAATSEQDCQRGTRALLQTLGNLGYRASAKKAQICQKQVKYLGYLLKEGQRWLTEARKETVMGQPTPKTPRQLREFLGTAGFCRLWIPGFAEMAAPLYPLTKPGTLFNWGPDQQKAYQEIKQALLTAPALGLPDLTKPFELFVDEKQGYAKGVLTQKLGPWRRPVAYLSKKLDPVAAGWPPCLRMVAAIAVLTKDAGKLTMGQPLVILAPHAVEALVKQPPDRWLSNARMTHYQAMLLDTDRVQFGPVVALNPATLLPLPEKEAPHDCLEILAETHGTRPDLTDQPIPDADYTWYTDGSSFLQEGQRRAGAAVTTETEVIWARALPAGTSAQRAELIALTQALKMAEGKKLNVYTDSRYAFATAHVHGEIYRRRGWLTSEGREIKNKNEILALLKALFLPKRLSIIHCPGHQKGNSAEARGNRMADQAAREAAMKAVLETSTLLAGKRTADGSEFEKRTADGSEFESPKKKAKVE

SEQ ID NO: 1001 - protein, 2094 aa, synthetic construct
MPAAKRVKLDGGDKKYSIGLDIGTNSVGWAVITDEYKVPSKKFKVLGNTDRHSIKKNLIGALLFDSGETAEATRLKRTARRRYTRRKNRICYLQEIFSNEMAKVDDSFFHRLEESFLVEEDKKHERHPIFGNIVDEVAYHEKYPTIYHLRKKLVDSTDKADLRLIYLALAHMIKFRGHFLIEGDLNPDNSDVDKLFIQLVQTYNQLFEENPINASGVDAKAILSARLSKSRRLENLIAQLPGEKKNGLFGNLIALSLGLTPNFKSNFDLAEDAKLQLSKDTYDDDLDNLLAQIGDQYADLFLAAKNLSDAILLSDILRVNTEITKAPLSASMIKRYDEHHQDLTLLKALVRQQLPEKYKEIFFDQSKNGYAGYIDGGASQEEFYKFIKPILEKMDGTEELLVKLNREDLLRKQRTFDNGSIPHQIHLGELHAILRRQEDFYPFLKDNREKIEKILTFRIPYYVGPLARGNSRFAWMTRKSEETITPWNFEEVVDKGASAQSFIERMTNFDKNLPNEKVLPKHSLLYEYFTVYNELTKVKYVTEGMRKPAFLSGEQKKAIVDLLFKTNRKVTVKQLKEDYFKKIECFDSVEISGVEDRFNASLGTYHDLLKIIKDKDFLDNEENEDILEDIVLTLTLFEDREMIEERLKTYAHLFDDKVMKQLKRRRYTGWGRLSRKLINGIRDKQSGKTILDFLKSDGFANRNFMQLIHDDSLTFKEDIQKAQVSGQGDSLHEHIANLAGSPAIKKGILQTVKVVDELVKVMGRHKPENIVIEMARENQTTQKGQKNSRERMKRIEEGIKELGSQILKEHPVENTQLQNEKLYLYYLQNGRDMYVDQELDINRLSDYDVDHIVPQSFLKDDSIDNKVLTRSDKARGKSDNVPSEEVVKKMKNYWRQLLNAKLITQRKFDNLTKAERGGLSELDKAGFIKRQLVETRQITKHVAQILDSRMNTKYDENDKLIREVKVITLKSKLVSDFRKDFQFYKVREINNYHHAHDAYLNAVVGTALIKKYPKLESEFVYGDYKVYDVRKMIAKSEQEIGKATAKYFFYSNIMNFFKTEITLANGEIRKRPLIETNGETGEIVWDKGRDFATVRKVLSMPQVNIVKKTEVQTGGFSKESILPKRNSDKLIARKKDWDPKKYGGFDSPTVAYSVLVVAKVEKGKSKKLKSVKELLGITIMERSSFEKNPIDFLEAKGYKEVKKDLIIKLPKYSLFELENGRKRMLASAGELQKGNELALPSKYVNFLYLASHYEKLKGSPEDNEQKQLFVEQHKHYLDEIIEQISEFSKRVILADANLDKVLSAYNKHRDKPIREQAENIIHLFTLTNLGAPAAFKYFDTTIDRKRYTSTKEVLDATLIHQSITGLYETRIDLSQLGGDGGGGSPAPGGGGGTLNIEDEYRLHETSKEPDVPLGSTWLSDFPQAWAETGGMGLAVRQAPLIIPLKATSTPVSIKQYPMSQEARLGIKPHIQRLLDQGILVPCQSPWNTPLLPVKKPGTNDYRPVQDLREVNKRVEDIHPTVPNPYNLLSGLPPSHQWYTVLDLKDAFFCLRLHPTSQPLFAFEWRDPEMGISGQLTWTRLPQGFKNSPTLFNEALHRDLADFRIQHPDLILLQYVDDLLLAATSEQDCQRGTRALLQTLGNLGYRASAKKAQICQKQVKYLGYLLKEGQRWLTEARKETVMGQPTPKTPRQLREFLGTAGFCRLWIPGFAEMAAPLYPLTKPGTLFNWGPDQQKAYQEIKQALLTAPALGLPDLTKPFELFVDEKQGYAKGVLTQKLGPWRRPVAYLSKKLDPVAAGWPPCLRMVAAIAVLTKDAGKLTMGQPLVILAPHAVEALVKQPPDRWLSNARMTHYQAMLLDTDRVQFGPVVALNPATLLPLPEKEAPHDCLEILAETHGTRPDLTDQPIPDADYTWYTDGSSFLQEGQRRAGAAVTTETEVIWARALPAGTSAQRAELIALTQALKMAEGKKLNVYTDSRYAFATAHVHGEIYRRRGWLTSEGREIKNKNEILALLKALFLPKRLSIIHCPGHQKGNSAEARGNRMADQAAREAAMKAVLETSTLLAGKRTADGSEFEKRTADGSEFESPKKKAKVE

SEQ ID NO: 1002 - protein, 2095 aa, synthetic construct
MPAAKRVKLDGGDKKYSIGLDIGTNSVGWAVITDEYKVPSKKFKVLGNTDRHSIKKNLIGALLFDSGETAEATRLKRTARRRYTRRKNRICYLQEIFSNEMAKVDDSFFHRLEESFLVEEDKKHERHPIFGNIVDEVAYHEKYPTIYHLRKKLVDSTDKADLRLIYLALAHMIKFRGHFLIEGDLNPDNSDVDKLFIQLVQTYNQLFEENPINASGVDAKAILSARLSKSRRLENLIAQLPGEKKNGLFGNLIALSLGLTPNFKSNFDLAEDAKLQLSKDTYDDDLDNLLAQIGDQYADLFLAAKNLSDAILLSDILRVNTEITKAPLSASMIKRYDEHHQDLTLLKALVRQQLPEKYKEIFFDQSKNGYAGYIDGGASQEEFYKFIKPILEKMDGTEELLVKLNREDLLRKQRTFDNGSIPHQIHLGELHAILRRQEDFYPFLKDNREKIEKILTFRIPYYVGPLARGNSRFAWMTRKSEETITPWNFEEVVDKGASAQSFIERMTNFDKNLPNEKVLPKHSLLYEYFTVYNELTKVKYVTEGMRKPAFLSGEQKKAIVDLLFKTNRKVTVKQLKEDYFKKIECFDSVEISGVEDRFNASLGTYHDLLKIIKDKDFLDNEENEDILEDIVLTLTLFEDREMIEERLKTYAHLFDDKVMKQLKRRRYTGWGRLSRKLINGIRDKQSGKTILDFLKSDGFANRNFMQLIHDDSLTFKEDIQKAQVSGQGDSLHEHIANLAGSPAIKKGILQTVKVVDELVKVMGRHKPENIVIEMARENQTTQKGQKNSRERMKRIEEGIKELGSQILKEHPVENTQLQNEKLYLYYLQNGRDMYVDQELDINRLSDYDVDHIVPQSFLKDDSIDNKVLTRSDKARGKSDNVPSEEVVKKMKNYWRQLLNAKLITQRKFDNLTKAERGGLSELDKAGFIKRQLVETRQITKHVAQILDSRMNTKYDENDKLIREVKVITLKSKLVSDFRKDFQFYKVREINNYHHAHDAYLNAVVGTALIKKYPKLESEFVYGDYKVYDVRKMIAKSEQEIGKATAKYFFYSNIMNFFKTEITLANGEIRKRPLIETNGETGEIVWDKGRDFATVRKVLSMPQVNIVKKTEVQTGGFSKESILPKRNSDKLIARKKDWDPKKYGGFDSPTVAYSVLVVAKVEKGKSKKLKSVKELLGITIMERSSFEKNPIDFLEAKGYKEVKKDLIIKLPKYSLFELENGRKRMLASAGELQKGNELALPSKYVNFLYLASHYEKLKGSPEDNEQKQLFVEQHKHYLDEIIEQISEFSKRVILADANLDKVLSAYNKHRDKPIREQAENIIHLFTLTNLGAPAAFKYFDTTIDRKRYTSTKEVLDATLIHQSITGLYETRIDLSQLGGDGGGGGGSGGGGSGGTLNIEDEYRLHETSKEPDVPLGSTWLSDFPQAWAETGGMGLAVRQAPLIIPLKATSTPVSIKQYPMSQEARLGIKPHIQRLLDQGILVPCQSPWNTPLLPVKKPGTNDYRPVQDLREVNKRVEDIHPTVPNPYNLLSGLPPSHQWYTVLDLKDAFFCLRLHPTSQPLFAFEWRDPEMGISGQLTWTRLPQGFKNSPTLFNEALHRDLADFRIQHPDLILLQYVDDLLLAATSEQDCQRGTRALLQTLGNLGYRASAKKAQICQKQVKYLGYLLKEGQRWLTEARKETVMGQPTPKTPRQLREFLGTAGFCRLWIPGFAEMAAPLYPLTKPGTLFNWGPDQQKAYQEIKQALLTAPALGLPDLTKPFELFVDEKQGYAKGVLTQKLGPWRRPVAYLSKKLDPVAAGWPPCLRMVAAIAVLTKDAGKLTMGQPLVILAPHAVEALVKQPPDRWLSNARMTHYQAMLLDTDRVQFGPVVALNPATLLPLPEKEAPHDCLEILAETHGTRPDLTDQPIPDADYTWYTDGSSFLQEGQRRAGAAVTTETEVIWARALPAGTSAQRAELIALTQALKMAEGKKLNVYTDSRYAFATAHVHGEIYRRRGWLTSEGREIKNKNEILALLKALFLPKRLSIIHCPGHQKGNSAEARGNRMADQAAREAAMKAVLETSTLLAGKRTADGSEFEKRTADGSEFESPKKKAKVE

SEQ ID NO: 1003 - protein, 2088 aa, synthetic construct
MPAAKRVKLDGGDKKYSIGLDIGTNSVGWAVITDEYKVPSKKFKVLGNTDRHSIKKNLIGALLFDSGETAEATRLKRTARRRYTRRKNRICYLQEIFSNEMAKVDDSFFHRLEESFLVEEDKKHERHPIFGNIVDEVAYHEKYPTIYHLRKKLVDSTDKADLRLIYLALAHMIKFRGHFLIEGDLNPDNSDVDKLFIQLVQTYNQLFEENPINASGVDAKAILSARLSKSRRLENLIAQLPGEKKNGLFGNLIALSLGLTPNFKSNFDLAEDAKLQLSKDTYDDDLDNLLAQIGDQYADLFLAAKNLSDAILLSDILRVNTEITKAPLSASMIKRYDEHHQDLTLLKALVRQQLPEKYKEIFFDQSKNGYAGYIDGGASQEEFYKFIKPILEKMDGTEELLVKLNREDLLRKQRTFDNGSIPHQIHLGELHAILRRQEDFYPFLKDNREKIEKILTFRIPYYVGPLARGNSRFAWMTRKSEETITPWNFEEVVDKGASAQSFIERMTNFDKNLPNEKVLPKHSLLYEYFTVYNELTKVKYVTEGMRKPAFLSGEQKKAIVDLLFKTNRKVTVKQLKEDYFKKIECFDSVEISGVEDRFNASLGTYHDLLKIIKDKDFLDNEENEDILEDIVLTLTLFEDREMIEERLKTYAHLFDDKVMKQLKRRRYTGWGRLSRKLINGIRDKQSGKTILDFLKSDGFANRNFMQLIHDDSLTFKEDIQKAQVSGQGDSLHEHIANLAGSPAIKKGILQTVKVVDELVKVMGRHKPENIVIEMARENQTTQKGQKNSRERMKRIEEGIKELGSQILKEHPVENTQLQNEKLYLYYLQNGRDMYVDQELDINRLSDYDVDHIVPQSFLKDDSIDNKVLTRSDKARGKSDNVPSEEVVKKMKNYWRQLLNAKLITQRKFDNLTKAERGGLSELDKAGFIKRQLVETRQITKHVAQILDSRMNTKYDENDKLIREVKVITLKSKLVSDFRKDFQFYKVREINNYHHAHDAYLNAVVGTALIKKYPKLESEFVYGDYKVYDVRKMIAKSEQEIGKATAKYFFYSNIMNFFKTEITLANGEIRKRPLIETNGETGEIVWDKGRDFATVRKVLSMPQVNIVKKTEVQTGGFSKESILPKRNSDKLIARKKDWDPKKYGGFDSPTVAYSVLVVAKVEKGKSKKLKSVKELLGITIMERSSFEKNPIDFLEAKGYKEVKKDLIIKLPKYSLFELENGRKRMLASAGELQKGNELALPSKYVNFLYLASHYEKLKGSPEDNEQKQLFVEQHKHYLDEIIEQISEFSKRVILADANLDKVLSAYNKHRDKPIREQAENIIHLFTLTNLGAPAAFKYFDTTIDRKRYTSTKEVLDATLIHQSITGLYETRIDLSQLGGDGGGGSGGTLNIEDEYRLHETSKEPDVPLGSTWLSDFPQAWAETGGMGLAVRQAPLIIPLKATSTPVSIKQYPMSQEARLGIKPHIQRLLDQGILVPCQSPWNTPLLPVKKPGTNDYRPVQDLREVNKRVEDIHPTVPNPYNLLSGLPPSHQWYTVLDLKDAFFCLRLHPTSQPLFAFEWRDPEMGISGQLTWTRLPQGFKNSPTLFNEALHRDLADFRIQHPDLILLQYVDDLLLAATSEQDCQRGTRALLQTLGNLGYRASAKKAQICQKQVKYLGYLLKEGQRWLTEARKETVMGQPTPKTPRQLREFLGTAGFCRLWIPGFAEMAAPLYPLTKPGTLFNWGPDQQKAYQEIKQALLTAPALGLPDLTKPFELFVDEKQGYAKGVLTQKLGPWRRPVAYLSKKLDPVAAGWPPCLRMVAAIAVLTKDAGKLTMGQPLVILAPHAVEALVKQPPDRWLSNARMTHYQAMLLDTDRVQFGPVVALNPATLLPLPEKEAPHDCLEILAETHGTRPDLTDQPIPDADYTWYTDGSSFLQEGQRRAGAAVTTETEVIWARALPAGTSAQRAELIALTQALKMAEGKKLNVYTDSRYAFATAHVHGEIYRRRGWLTSEGREIKNKNEILALLKALFLPKRLSIIHCPGHQKGNSAEARGNRMADQAAREAAMKAVLETSTLLAGKRTADGSEFEKRTADGSEFESPKKKAKVE

SEQ ID NO: 1004 - protein, 2094 aa, synthetic construct
MPAAKRVKLDGGDKKYSIGLDIGTNSVGWAVITDEYKVPSKKFKVLGNTDRHSIKKNLIGALLFDSGETAEATRLKRTARRRYTRRKNRICYLQEIFSNEMAKVDDSFFHRLEESFLVEEDKKHERHPIFGNIVDEVAYHEKYPTIYHLRKKLVDSTDKADLRLIYLALAHMIKFRGHFLIEGDLNPDNSDVDKLFIQLVQTYNQLFEENPINASGVDAKAILSARLSKSRRLENLIAQLPGEKKNGLFGNLIALSLGLTPNFKSNFDLAEDAKLQLSKDTYDDDLDNLLAQIGDQYADLFLAAKNLSDAILLSDILRVNTEITKAPLSASMIKRYDEHHQDLTLLKALVRQQLPEKYKEIFFDQSKNGYAGYIDGGASQEEFYKFIKPILEKMDGTEELLVKLNREDLLRKQRTFDNGSIPHQIHLGELHAILRRQEDFYPFLKDNREKIEKILTFRIPYYVGPLARGNSRFAWMTRKSEETITPWNFEEVVDKGASAQSFIERMTNFDKNLPNEKVLPKHSLLYEYFTVYNELTKVKYVTEGMRKPAFLSGEQKKAIVDLLFKTNRKVTVKQLKEDYFKKIECFDSVEISGVEDRFNASLGTYHDLLKIIKDKDFLDNEENEDILEDIVLTLTLFEDREMIEERLKTYAHLFDDKVMKQLKRRRYTGWGRLSRKLINGIRDKQSGKTILDFLKSDGFANRNFMQLIHDDSLTFKEDIQKAQVSGQGDSLHEHIANLAGSPAIKKGILQTVKVVDELVKVMGRHKPENIVIEMARENQTTQKGQKNSRERMKRIEEGIKELGSQILKEHPVENTQLQNEKLYLYYLQNGRDMYVDQELDINRLSDYDVDHIVPQSFLKDDSIDNKVLTRSDKARGKSDNVPSEEVVKKMKNYWRQLLNAKLITQRKFDNLTKAERGGLSELDKAGFIKRQLVETRQITKHVAQILDSRMNTKYDENDKLIREVKVITLKSKLVSDFRKDFQFYKVREINNYHHAHDAYLNAVVGTALIKKYPKLESEFVYGDYKVYDVRKMIAKSEQEIGKATAKYFFYSNIMNFFKTEITLANGEIRKRPLIETNGETGEIVWDKGRDFATVRKVLSMPQVNIVKKTEVQTGGFSKESILPKRNSDKLIARKKDWDPKKYGGFDSPTVAYSVLVVAKVEKGKSKKLKSVKELLGITIMERSSFEKNPIDFLEAKGYKEVKKDLIIKLPKYSLFELENGRKRMLASAGELQKGNELALPSKYVNFLYLASHYEKLKGSPEDNEQKQLFVEQHKHYLDEIIEQISEFSKRVILADANLDKVLSAYNKHRDKPIREQAENIIHLFTLTNLGAPAAFKYFDTTIDRKRYTSTKEVLDATLIHQSITGLYETRIDLSQLGGDGGGSSGGSGGGGGTLNIEDEYRLHETSKEPDVPLGSTWLSDFPQAWAETGGMGLAVRQAPLIIPLKATSTPVSIKQYPMSQEARLGIKPHIQRLLDQGILVPCQSPWNTPLLPVKKPGTNDYRPVQDLREVNKRVEDIHPTVPNPYNLLSGLPPSHQWYTVLDLKDAFFCLRLHPTSQPLFAFEWRDPEMGISGQLTWTRLPQGFKNSPTLFNEALHRDLADFRIQHPDLILLQYVDDLLLAATSEQDCQRGTRALLQTLGNLGYRASAKKAQICQKQVKYLGYLLKEGQRWLTEARKETVMGQPTPKTPRQLREFLGTAGFCRLWIPGFAEMAAPLYPLTKPGTLFNWGPDQQKAYQEIKQALLTAPALGLPDLTKPFELFVDEKQGYAKGVLTQKLGPWRRPVAYLSKKLDPVAAGWPPCLRMVAAIAVLTKDAGKLTMGQPLVILAPHAVEALVKQPPDRWLSNARMTHYQAMLLDTDRVQFGPVVALNPATLLPLPEKEAPHDCLEILAETHGTRPDLTDQPIPDADYTWYTDGSSFLQEGQRRAGAAVTTETEVIWARALPAGTSAQRAELIALTQALKMAEGKKLNVYTDSRYAFATAHVHGEIYRRRGWLTSEGREIKNKNEILALLKALFLPKRLSIIHCPGHQKGNSAEARGNRMADQAAREAAMKAVLETSTLLAGKRTADGSEFEKRTADGSEFESPKKKAKVE

SEQ ID NO: 1005 - protein, 2096 aa, synthetic construct
MPAAKRVKLDGGDKKYSIGLDIGTNSVGWAVITDEYKVPSKKFKVLGNTDRHSIKKNLIGALLFDSGETAEATRLKRTARRRYTRRKNRICYLQEIFSNEMAKVDDSFFHRLEESFLVEEDKKHERHPIFGNIVDEVAYHEKYPTIYHLRKKLVDSTDKADLRLIYLALAHMIKFRGHFLIEGDLNPDNSDVDKLFIQLVQTYNQLFEENPINASGVDAKAILSARLSKSRRLENLIAQLPGEKKNGLFGNLIALSLGLTPNFKSNFDLAEDAKLQLSKDTYDDDLDNLLAQIGDQYADLFLAAKNLSDAILLSDILRVNTEITKAPLSASMIKRYDEHHQDLTLLKALVRQQLPEKYKEIFFDQSKNGYAGYIDGGASQEEFYKFIKPILEKMDGTEELLVKLNREDLLRKQRTFDNGSIPHQIHLGELHAILRRQEDFYPFLKDNREKIEKILTFRIPYYVGPLARGNSRFAWMTRKSEETITPWNFEEVVDKGASAQSFIERMTNFDKNLPNEKVLPKHSLLYEYFTVYNELTKVKYVTEGMRKPAFLSGEQKKAIVDLLFKTNRKVTVKQLKEDYFKKIECFDSVEISGVEDRFNASLGTYHDLLKIIKDKDFLDNEENEDILEDIVLTLTLFEDREMIEERLKTYAHLFDDKVMKQLKRRRYTGWGRLSRKLINGIRDKQSGKTILDFLKSDGFANRNFMQLIHDDSLTFKEDIQKAQVSGQGDSLHEHIANLAGSPAIKKGILQTVKVVDELVKVMGRHKPENIVIEMARENQTTQKGQKNSRERMKRIEEGIKELGSQILKEHPVENTQLQNEKLYLYYLQNGRDMYVDQELDINRLSDYDVDHIVPQSFLKDDSIDNKVLTRSDKARGKSDNVPSEEVVKKMKNYWRQLLNAKLITQRKFDNLTKAERGGLSELDKAGFIKRQLVETRQITKHVAQILDSRMNTKYDENDKLIREVKVITLKSKLVSDFRKDFQFYKVREINNYHHAHDAYLNAVVGTALIKKYPKLESEFVYGDYKVYDVRKMIAKSEQEIGKATAKYFFYSNIMNFFKTEITLANGEIRKRPLIETNGETGEIVWDKGRDFATVRKVLSMPQVNIVKKTEVQTGGFSKESILPKRNSDKLIARKKDWDPKKYGGFDSPTVAYSVLVVAKVEKGKSKKLKSVKELLGITIMERSSFEKNPIDFLEAKGYKEVKKDLIIKLPKYSLFELENGRKRMLASAGELQKGNELALPSKYVNFLYLASHYEKLKGSPEDNEQKQLFVEQHKHYLDEIIEQISEFSKRVILADANLDKVLSAYNKHRDKPIREQAENIIHLFTLTNLGAPAAFKYFDTTIDRKRYTSTKEVLDATLIHQSITGLYETRIDLSQLGGDGGGGSGSSEAAAKGGTLNIEDEYRLHETSKEPDVPLGSTWLSDFPQAWAETGGMGLAVRQAPLIIPLKATSTPVSIKQYPMSQEARLGIKPHIQRLLDQGILVPCQSPWNTPLLPVKKPGTNDYRPVQDLREVNKRVEDIHPTVPNPYNLLSGLPPSHQWYTVLDLKDAFFCLRLHPTSQPLFAFEWRDPEMGISGQLTWTRLPQGFKNSPTLFNEALHRDLADFRIQHPDLILLQYVDDLLLAATSEQDCQRGTRALLQTLGNLGYRASAKKAQICQKQVKYLGYLLKEGQRWLTEARKETVMGQPTPKTPRQLREFLGTAGFCRLWIPGFAEMAAPLYPLTKPGTLFNWGPDQQKAYQEIKQALLTAPALGLPDLTKPFELFVDEKQGYAKGVLTQKLGPWRRPVAYLSKKLDPVAAGWPPCLRMVAAIAVLTKDAGKLTMGQPLVILAPHAVEALVKQPPDRWLSNARMTHYQAMLLDTDRVQFGPVVALNPATLLPLPEKEAPHDCLEILAETHGTRPDLTDQPIPDADYTWYTDGSSFLQEGQRRAGAAVTTETEVIWARALPAGTSAQRAELIALTQALKMAEGKKLNVYTDSRYAFATAHVHGEIYRRRGWLTSEGREIKNKNEILALLKALFLPKRLSIIHCPGHQKGNSAEARGNRMADQAAREAAMKAVLETSTLLAGKRTADGSEFEKRTADGSEFESPKKKAKVE

SEQ ID NO: 1006 - protein, 2131 aa, synthetic construct
MPAAKRVKLDGGDKKYSIGLDIGTNSVGWAVITDEYKVPSKKFKVLGNTDRHSIKKNLIGALLFDSGETAEATRLKRTARRRYTRRKNRICYLQEIFSNEMAKVDDSFFHRLEESFLVEEDKKHERHPIFGNIVDEVAYHEKYPTIYHLRKKLVDSTDKADLRLIYLALAHMIKFRGHFLIEGDLNPDNSDVDKLFIQLVQTYNQLFEENPINASGVDAKAILSARLSKSRRLENLIAQLPGEKKNGLFGNLIALSLGLTPNFKSNFDLAEDAKLQLSKDTYDDDLDNLLAQIGDQYADLFLAAKNLSDAILLSDILRVNTEITKAPLSASMIKRYDEHHQDLTLLKALVRQQLPEKYKEIFFDQSKNGYAGYIDGGASQEEFYKFIKPILEKMDGTEELLVKLNREDLLRKQRTFDNGSIPHQIHLGELHAILRRQEDFYPFLKDNREKIEKILTFRIPYYVGPLARGNSRFAWMTRKSEETITPWNFEEVVDKGASAQSFIERMTNFDKNLPNEKVLPKHSLLYEYFTVYNELTKVKYVTEGMRKPAFLSGEQKKAIVDLLFKTNRKVTVKQLKEDYFKKIECFDSVEISGVEDRFNASLGTYHDLLKIIKDKDFLDNEENEDILEDIVLTLTLFEDREMIEERLKTYAHLFDDKVMKQLKRRRYTGWGRLSRKLINGIRDKQSGKTILDFLKSDGFANRNFMQLIHDDSLTFKEDIQKAQVSGQGDSLHEHIANLAGSPAIKKGILQTVKVVDELVKVMGRHKPENIVIEMARENQTTQKGQKNSRERMKRIEEGIKELGSQILKEHPVENTQLQNEKLYLYYLQNGRDMYVDQELDINRLSDYDVDHIVPQSFLKDDSIDNKVLTRSDKARGKSDNVPSEEVVKKMKNYWRQLLNAKLITQRKFDNLTKAERGGLSELDKAGFIKRQLVETRQITKHVAQILDSRMNTKYDENDKLIREVKVITLKSKLVSDFRKDFQFYKVREINNYHHAHDAYLNAVVGTALIKKYPKLESEFVYGDYKVYDVRKMIAKSEQEIGKATAKYFFYSNIMNFFKTEITLANGEIRKRPLIETNGETGEIVWDKGRDFATVRKVLSMPQVNIVKKTEVQTGGFSKESILPKRNSDKLIARKKDWDPKKYGGFDSPTVAYSVLVVAKVEKGKSKKLKSVKELLGITIMERSSFEKNPIDFLEAKGYKEVKKDLIIKLPKYSLFELENGRKRMLASAGELQKGNELALPSKYVNFLYLASHYEKLKGSPEDNEQKQLFVEQHKHYLDEIIEQISEFSKRVILADANLDKVLSAYNKHRDKPIREQAENIIHLFTLTNLGAPAAFKYFDTTIDRKRYTSTKEVLDATLIHQSITGLYETRIDLSQLGGDGGAEAAAKEAAAKEAAAKEAAAKALEAEAAAKEAAAKEAAAKEAAAKAGGTLNIEDEYRLHETSKEPDVPLGSTWLSDFPQAWAETGGMGLAVRQAPLIIPLKATSTPVSIKQYPMSQEARLGIKPHIQRLLDQGILVPCQSPWNTPLLPVKKPGTNDYRPVQDLREVNKRVEDIHPTVPNPYNLLSGLPPSHQWYTVLDLKDAFFCLRLHPTSQPLFAFEWRDPEMGISGQLTWTRLPQGFKNSPTLFNEALHRDLADFRIQHPDLILLQYVDDLLLAATSEQDCQRGTRALLQTLGNLGYRASAKKAQICQKQVKYLGYLLKEGQRWLTEARKETVMGQPTPKTPRQLREFLGKAGFCRLFIPGFAEMAAPLYPLTKPGTLFNWGPDQQKAYQEIKQALLTAPALGLPDLTKPFELFVDEKQGYAKGVLTQKLGPWRRPVAYLSKKLDPVAAGWPPCLRMVAAIAVLTKDAGKLTMGQPLVILAPHAVEALVKQPPDRWLSNARMTHYQAMLLDTDRVQFGPVVALNPATLLPLPEKEAPHDCLEILAETHGTRPDLTDQPIPDADYTWYTDGSSFLQEGQRRAGAAVTTETEVIWARALPAGTSAQRAELIALTQALKMAEGKKLNVYTDSRYAFATAHVHGEIYRRRGWLTSEGREIKNKNEILALLKALFLPKRLSIIHCPGHQKGNSAEARGNRMADQAAREAAMKAVLETSTLLAGKRTADGSEFEKRTADGSEFESPKKKAKVE

SEQ ID NO: 1007 - protein, 2096 aa, synthetic construct
MPAAKRVKLDGGDKKYSIGLDIGTNSVGWAVITDEYKVPSKKFKVLGNTDRHSIKKNLIGALLFDSGETAEATRLKRTARRRYTRRKNRICYLQEIFSNEMAKVDDSFFHRLEESFLVEEDKKHERHPIFGNIVDEVAYHEKYPTIYHLRKKLVDSTDKADLRLIYLALAHMIKFRGHFLIEGDLNPDNSDVDKLFIQLVQTYNQLFEENPINASGVDAKAILSARLSKSRRLENLIAQLPGEKKNGLFGNLIALSLGLTPNFKSNFDLAEDAKLQLSKDTYDDDLDNLLAQIGDQYADLFLAAKNLSDAILLSDILRVNTEITKAPLSASMIKRYDEHHQDLTLLKALVRQQLPEKYKEIFFDQSKNGYAGYIDGGASQEEFYKFIKPILEKMDGTEELLVKLNREDLLRKQRTFDNGSIPHQIHLGELHAILRRQEDFYPFLKDNREKIEKILTFRIPYYVGPLARGNSRFAWMTRKSEETITPWNFEEVVDKGASAQSFIERMTNFDKNLPNEKVLPKHSLLYEYFTVYNELTKVKYVTEGMRKPAFLSGEQKKAIVDLLFKTNRKVTVKQLKEDYFKKIECFDSVEISGVEDRFNASLGTYHDLLKIIKDKDFLDNEENEDILEDIVLTLTLFEDREMIEERLKTYAHLFDDKVMKQLKRRRYTGWGRLSRKLINGIRDKQSGKTILDFLKSDGFANRNFMQLIHDDSLTFKEDIQKAQVSGQGDSLHEHIANLAGSPAIKKGILQTVKVVDELVKVMGRHKPENIVIEMARENQTTQKGQKNSRERMKRIEEGIKELGSQILKEHPVENTQLQNEKLYLYYLQNGRDMYVDQELDINRLSDYDVDHIVPQSFLKDDSIDNKVLTRSDKARGKSDNVPSEEVVKKMKNYWRQLLNAKLITQRKFDNLTKAERGGLSELDKAGFIKRQLVETRQITKHVAQILDSRMNTKYDENDKLIREVKVITLKSKLVSDFRKDFQFYKVREINNYHHAHDAYLNAVVGTALIKKYPKLESEFVYGDYKVYDVRKMIAKSEQEIGKATAKYFFYSNIMNFFKTEITLANGEIRKRPLIETNGETGEIVWDKGRDFATVRKVLSMPQVNIVKKTEVQTGGFSKESILPKRNSDKLIARKKDWDPKKYGGFDSPTVAYSVLVVAKVEKGKSKKLKSVKELLGITIMERSSFEKNPIDFLEAKGYKEVKKDLIIKLPKYSLFELENGRKRMLASAGELQKGNELALPSKYVNFLYLASHYEKLKGSPEDNEQKQLFVEQHKHYLDEIIEQISEFSKRVILADANLDKVLSAYNKHRDKPIREQAENIIHLFTLTNLGAPAAFKYFDTTIDRKRYTSTKEVLDATLIHQSITGLYETRIDLSQLGGDGGPAPEAAAKGSSGGTLNIEDEYRLHETSKEPDVPLGSTWLSDFPQAWAETGGMGLAVRQAPLIIPLKATSTPVSIKQYPMSQEARLGIKPHIQRLLDQGILVPCQSPWNTPLLPVKKPGTNDYRPVQDLREVNKRVEDIHPTVPNPYNLLSGLPPSHQWYTVLDLKDAFFCLRLHPTSQPLFAFEWRDPEMGISGQLTWTRLPQGFKNSPTLFNEALHRDLADFRIQHPDLILLQYVDDLLLAATSEQDCQRGTRALLQTLGNLGYRASAKKAQICQKQVKYLGYLLKEGQRWLTEARKETVMGQPTPKTPRQLREFLGKAGFCRLFIPGFAEMAAPLYPLTKPGTLFNWGPDQQKAYQEIKQALLTAPALGLPDLTKPFELFVDEKQGYAKGVLTQKLGPWRRPVAYLSKKLDPVAAGWPPCLRMVAAIAVLTKDAGKLTMGQPLVILAPHAVEALVKQPPDRWLSNARMTHYQAMLLDTDRVQFGPVVALNPATLLPLPEKEAPHDCLEILAETHGTRPDLTDQPIPDADYTWYTDGSSFLQEGQRRAGAAVTTETEVIWARALPAGTSAQRAELIALTQALKMAEGKKLNVYTDSRYAFATAHVHGEIYRRRGWLTSEGREIKNKNEILALLKALFLPKRLSIIHCPGHQKGNSAEARGNRMADQAAREAAMKAVLETSTLLAGKRTADGSEFEKRTADGSEFESPKKKAKVE

SEQ ID NO: 1008 - protein, 2105 aa, synthetic construct
MPAAKRVKLDGGDKKYSIGLDIGTNSVGWAVITDEYKVPSKKFKVLGNTDRHSIKKNLIGALLFDSGETAEATRLKRTARRRYTRRKNRICYLQEIFSNEMAKVDDSFFHRLEESFLVEEDKKHERHPIFGNIVDEVAYHEKYPTIYHLRKKLVDSTDKADLRLIYLALAHMIKFRGHFLIEGDLNPDNSDVDKLFIQLVQTYNQLFEENPINASGVDAKAILSARLSKSRRLENLIAQLPGEKKNGLFGNLIALSLGLTPNFKSNFDLAEDAKLQLSKDTYDDDLDNLLAQIGDQYADLFLAAKNLSDAILLSDILRVNTEITKAPLSASMIKRYDEHHQDLTLLKALVRQQLPEKYKEIFFDQSKNGYAGYIDGGASQEEFYKFIKPILEKMDGTEELLVKLNREDLLRKQRTFDNGSIPHQIHLGELHAILRRQEDFYPFLKDNREKIEKILTFRIPYYVGPLARGNSRFAWMTRKSEETITPWNFEEVVDKGASAQSFIERMTNFDKNLPNEKVLPKHSLLYEYFTVYNELTKVKYVTEGMRKPAFLSGEQKKAIVDLLFKTNRKVTVKQLKEDYFKKIECFDSVEISGVEDRFNASLGTYHDLLKIIKDKDFLDNEENEDILEDIVLTLTLFEDREMIEERLKTYAHLFDDKVMKQLKRRRYTGWGRLSRKLINGIRDKQSGKTILDFLKSDGFANRNFMQLIHDDSLTFKEDIQKAQVSGQGDSLHEHIANLAGSPAIKKGILQTVKVVDELVKVMGRHKPENIVIEMARENQTTQKGQKNSRERMKRIEEGIKELGSQILKEHPVENTQLQNEKLYLYYLQNGRDMYVDQELDINRLSDYDVDHIVPQSFLKDDSIDNKVLTRSDKARGKSDNVPSEEVVKKMKNYWRQLLNAKLITQRKFDNLTKAERGGLSELDKAGFIKRQLVETRQITKHVAQILDSRMNTKYDENDKLIREVKVITLKSKLVSDFRKDFQFYKVREINNYHHAHDAYLNAVVGTALIKKYPKLESEFVYGDYKVYDVRKMIAKSEQEIGKATAKYFFYSNIMNFFKTEITLANGEIRKRPLIETNGETGEIVWDKGRDFATVRKVLSMPQVNIVKKTEVQTGGFSKESILPKRNSDKLIARKKDWDPKKYGGFDSPTVAYSVLVVAKVEKGKSKKLKSVKELLGITIMERSSFEKNPIDFLEAKGYKEVKKDLIIKLPKYSLFELENGRKRMLASAGELQKGNELALPSKYVNFLYLASHYEKLKGSPEDNEQKQLFVEQHKHYLDEIIEQISEFSKRVILADANLDKVLSAYNKHRDKPIREQAENIIHLFTLTNLGAPAAFKYFDTTIDRKRYTSTKEVLDATLIHQSITGLYETRIDLSQLGGDGGEAAAKEAAAKEAAAKEAAAKGGTLNIEDEYRLHETSKEPDVPLGSTWLSDFPQAWAETGGMGLAVRQAPLIIPLKATSTPVSIKQYPMSQEARLGIKPHIQRLLDQGILVPCQSPWNTPLLPVKKPGTNDYRPVQDLREVNKRVEDIHPTVPNPYNLLSGLPPSHQWYTVLDLKDAFFCLRLHPTSQPLFAFEWRDPEMGISGQLTWTRLPQGFKNSPTLFNEALHRDLADFRIQHPDLILLQYVDDLLLAATSEQDCQRGTRALLQTLGNLGYRASAKKAQICQKQVKYLGYLLKEGQRWLTEARKETVMGQPTPKTPRQLREFLGKAGFCRLFIPGFAEMAAPLYPLTKPGTLFNWGPDQQKAYQEIKQALLTAPALGLPDLTKPFELFVDEKQGYAKGVLTQKLGPWRRPVAYLSKKLDPVAAGWPPCLRMVAAIAVLTKDAGKLTMGQPLVILAPHAVEALVKQPPDRWLSNARMTHYQAMLLDTDRVQFGPVVALNPATLLPLPEKEAPHDCLEILAETHGTRPDLTDQPIPDADYTWYTDGSSFLQEGQRRAGAAVTTETEVIWARALPAGTSAQRAELIALTQALKMAEGKKLNVYTDSRYAFATAHVHGEIYRRRGWLTSEGREIKNKNEILALLKALFLPKRLSIIHCPGHQKGNSAEARGNRMADQAAREAAMKAVLETSTLLAGKRTADGSEFEKRTADGSEFESPKKKAKVE

SEQ ID NO: 1009 - protein, 2090 aa, synthetic construct
MPAAKRVKLDGGDKKYSIGLDIGTNSVGWAVITDEYKVPSKKFKVLGNTDRHSIKKNLIGALLFDSGETAEATRLKRTARRRYTRRKNRICYLQEIFSNEMAKVDDSFFHRLEESFLVEEDKKHERHPIFGNIVDEVAYHEKYPTIYHLRKKLVDSTDKADLRLIYLALAHMIKFRGHFLIEGDLNPDNSDVDKLFIQLVQTYNQLFEENPINASGVDAKAILSARLSKSRRLENLIAQLPGEKKNGLFGNLIALSLGLTPNFKSNFDLAEDAKLQLSKDTYDDDLDNLLAQIGDQYADLFLAAKNLSDAILLSDILRVNTEITKAPLSASMIKRYDEHHQDLTLLKALVRQQLPEKYKEIFFDQSKNGYAGYIDGGASQEEFYKFIKPILEKMDGTEELLVKLNREDLLRKQRTFDNGSIPHQIHLGELHAILRRQEDFYPFLKDNREKIEKILTFRIPYYVGPLARGNSRFAWMTRKSEETITPWNFEEVVDKGASAQSFIERMTNFDKNLPNEKVLPKHSLLYEYFTVYNELTKVKYVTEGMRKPAFLSGEQKKAIVDLLFKTNRKVTVKQLKEDYFKKIECFDSVEISGVEDRFNASLGTYHDLLKIIKDKDFLDNEENEDILEDIVLTLTLFEDREMIEERLKTYAHLFDDKVMKQLKRRRYTGWGRLSRKLINGIRDKQSGKTILDFLKSDGFANRNFMQLIHDDSLTFKEDIQKAQVSGQGDSLHEHIANLAGSPAIKKGILQTVKVVDELVKVMGRHKPENIVIEMARENQTTQKGQKNSRERMKRIEEGIKELGSQILKEHPVENTQLQNEKLYLYYLQNGRDMYVDQELDINRLSDYDVDHIVPQSFLKDDSIDNKVLTRSDKARGKSDNVPSEEVVKKMKNYWRQLLNAKLITQRKFDNLTKAERGGLSELDKAGFIKRQLVETRQITKHVAQILDSRMNTKYDENDKLIREVKVITLKSKLVSDFRKDFQFYKVREINNYHHAHDAYLNAVVGTALIKKYPKLESEFVYGDYKVYDVRKMIAKSEQEIGKATAKYFFYSNIMNFFKTEITLANGEIRKRPLIETNGETGEIVWDKGRDFATVRKVLSMPQVNIVKKTEVQTGGFSKESILPKRNSDKLIARKKDWDPKKYGGFDSPTVAYSVLVVAKVEKGKSKKLKSVKELLGITIMERSSFEKNPIDFLEAKGYKEVKKDLIIKLPKYSLFELENGRKRMLASAGELQKGNELALPSKYVNFLYLASHYEKLKGSPEDNEQKQLFVEQHKHYLDEIIEQISEFSKRVILADANLDKVLSAYNKHRDKPIREQAENIIHLFTLTNLGAPAAFKYFDTTIDRKRYTSTKEVLDATLIHQSITGLYETRIDLSQLGGDGGEAAAKGGTLNIEDEYRLHETSKEPDVPLGSTWLSDFPQAWAETGGMGLAVRQAPLIIPLKATSTPVSIKQYPMSQEARLGIKPHIQRLLDQGILVPCQSPWNTPLLPVKKPGTNDYRPVQDLREVNKRVEDIHPTVPNPYNLLSGLPPSHQWYTVLDLKDAFFCLRLHPTSQPLFAFEWRDPEMGISGQLTWTRLPQGFKNSPTLFNEALHRDLADFRIQHPDLILLQYVDDLLLAATSEQDCQRGTRALLQTLGNLGYRASAKKAQICQKQVKYLGYLLKEGQRWLTEARKETVMGQPTPKTPRQLREFLGKAGFCRLFIPGFAEMAAPLYPLTKPGTLFNWGPDQQKAYQEIKQALLTAPALGLPDLTKPFELFVDEKQGYAKGVLTQKLGPWRRPVAYLSKKLDPVAAGWPPCLRMVAAIAVLTKDAGKLTMGQPLVILAPHAVEALVKQPPDRWLSNARMTHYQAMLLDTDRVQFGPVVALNPATLLPLPEKEAPHDCLEILAETHGTRPDLTDQPIPDADYTWYTDGSSFLQEGQRRAGAAVTTETEVIWARALPAGTSAQRAELIALTQALKMAEGKKLNVYTDSRYAFATAHVHGEIYRRRGWLTSEGREIKNKNEILALLKALFLPKRLSIIHCPGHQKGNSAEARGNRMADQAAREAAMKAVLETSTLLAGKRTADGSEFEKRTADGSEFESPKKKAKVE

SEQ ID NO: 1010 - protein, 2096 aa, synthetic construct
MPAAKRVKLDGGDKKYSIGLDIGTNSVGWAVITDEYKVPSKKFKVLGNTDRHSIKKNLIGALLFDSGETAEATRLKRTARRRYTRRKNRICYLQEIFSNEMAKVDDSFFHRLEESFLVEEDKKHERHPIFGNIVDEVAYHEKYPTIYHLRKKLVDSTDKADLRLIYLALAHMIKFRGHFLIEGDLNPDNSDVDKLFIQLVQTYNQLFEENPINASGVDAKAILSARLSKSRRLENLIAQLPGEKKNGLFGNLIALSLGLTPNFKSNFDLAEDAKLQLSKDTYDDDLDNLLAQIGDQYADLFLAAKNLSDAILLSDILRVNTEITKAPLSASMIKRYDEHHQDLTLLKALVRQQLPEKYKEIFFDQSKNGYAGYIDGGASQEEFYKFIKPILEKMDGTEELLVKLNREDLLRKQRTFDNGSIPHQIHLGELHAILRRQEDFYPFLKDNREKIEKILTFRIPYYVGPLARGNSRFAWMTRKSEETITPWNFEEVVDKGASAQSFIERMTNFDKNLPNEKVLPKHSLLYEYFTVYNELTKVKYVTEGMRKPAFLSGEQKKAIVDLLFKTNRKVTVKQLKEDYFKKIECFDSVEISGVEDRFNASLGTYHDLLKIIKDKDFLDNEENEDILEDIVLTLTLFEDREMIEERLKTYAHLFDDKVMKQLKRRRYTGWGRLSRKLINGIRDKQSGKTILDFLKSDGFANRNFMQLIHDDSLTFKEDIQKAQVSGQGDSLHEHIANLAGSPAIKKGILQTVKVVDELVKVMGRHKPENIVIEMARENQTTQKGQKNSRERMKRIEEGIKELGSQILKEHPVENTQLQNEKLYLYYLQNGRDMYVDQELDINRLSDYDVDHIVPQSFLKDDSIDNKVLTRSDKARGKSDNVPSEEVVKKMKNYWRQLLNAKLITQRKFDNLTKAERGGLSELDKAGFIKRQLVETRQITKHVAQILDSRMNTKYDENDKLIREVKVITLKSKLVSDFRKDFQFYKVREINNYHHAHDAYLNAVVGTALIKKYPKLESEFVYGDYKVYDVRKMIAKSEQEIGKATAKYFFYSNIMNFFKTEITLANGEIRKRPLIETNGETGEIVWDKGRDFATVRKVLSMPQVNIVKKTEVQTGGFSKESILPKRNSDKLIARKKDWDPKKYGGFDSPTVAYSVLVVAKVEKGKSKKLKSVKELLGITIMERSSFEKNPIDFLEAKGYKEVKKDLIIKLPKYSLFELENGRKRMLASAGELQKGNELALPSKYVNFLYLASHYEKLKGSPEDNEQKQLFVEQHKHYLDEIIEQISEFSKRVILADANLDKVLSAYNKHRDKPIREQAENIIHLFTLTNLGAPAAFKYFDTTIDRKRYTSTKEVLDATLIHQSITGLYETRIDLSQLGGDGGGSSPAPEAAAKGGTLNIEDEYRLHETSKEPDVPLGSTWLSDFPQAWAETGGMGLAVRQAPLIIPLKATSTPVSIKQYPMSQEARLGIKPHIQRLLDQGILVPCQSPWNTPLLPVKKPGTNDYRPVQDLREVNKRVEDIHPTVPNPYNLLSGLPPSHQWYTVLDLKDAFFCLRLHPTSQPLFAFEWRDPEMGISGQLTWTRLPQGFKNSPTLFNEALHRDLADFRIQHPDLILLQYVDDLLLAATSEQDCQRGTRALLQTLGNLGYRASAKKAQICQKQVKYLGYLLKEGQRWLTEARKETVMGQPTPKTPRQLREFLGKAGFCRLFIPGFAEMAAPLYPLTKPGTLFNWGPDQQKAYQEIKQALLTAPALGLPDLTKPFELFVDEKQGYAKGVLTQKLGPWRRPVAYLSKKLDPVAAGWPPCLRMVAAIAVLTKDAGKLTMGQPLVILAPHAVEALVKQPPDRWLSNARMTHYQAMLLDTDRVQFGPVVALNPATLLPLPEKEAPHDCLEILAETHGTRPDLTDQPIPDADYTWYTDGSSFLQEGQRRAGAAVTTETEVIWARALPAGTSAQRAELIALTQALKMAEGKKLNVYTDSRYAFATAHVHGEIYRRRGWLTSEGREIKNKNEILALLKALFLPKRLSIIHCPGHQKGNSAEARGNRMADQAAREAAMKAVLETSTLLAGKRTADGSEFEKRTADGSEFESPKKKAKVE

SEQ ID NO: 1011 - protein, 2088 aa, synthetic construct
MPAAKRVKLDGGDKKYSIGLDIGTNSVGWAVITDEYKVPSKKFKVLGNTDRHSIKKNLIGALLFDSGETAEATRLKRTARRRYTRRKNRICYLQEIFSNEMAKVDDSFFHRLEESFLVEEDKKHERHPIFGNIVDEVAYHEKYPTIYHLRKKLVDSTDKADLRLIYLALAHMIKFRGHFLIEGDLNPDNSDVDKLFIQLVQTYNQLFEENPINASGVDAKAILSARLSKSRRLENLIAQLPGEKKNGLFGNLIALSLGLTPNFKSNFDLAEDAKLQLSKDTYDDDLDNLLAQIGDQYADLFLAAKNLSDAILLSDILRVNTEITKAPLSASMIKRYDEHHQDLTLLKALVRQQLPEKYKEIFFDQSKNGYAGYIDGGASQEEFYKFIKPILEKMDGTEELLVKLNREDLLRKQRTFDNGSIPHQIHLGELHAILRRQEDFYPFLKDNREKIEKILTFRIPYYVGPLARGNSRFAWMTRKSEETITPWNFEEVVDKGASAQSFIERMTNFDKNLPNEKVLPKHSLLYEYFTVYNELTKVKYVTEGMRKPAFLSGEQKKAIVDLLFKTNRKVTVKQLKEDYFKKIECFDSVEISGVEDRFNASLGTYHDLLKIIKDKDFLDNEENEDILEDIVLTLTLFEDREMIEERLKTYAHLFDDKVMKQLKRRRYTGWGRLSRKLINGIRDKQSGKTILDFLKSDGFANRNFMQLIHDDSLTFKEDIQKAQVSGQGDSLHEHIANLAGSPAIKKGILQTVKVVDELVKVMGRHKPENIVIEMARENQTTQKGQKNSRERMKRIEEGIKELGSQILKEHPVENTQLQNEKLYLYYLQNGRDMYVDQELDINRLSDYDVDHIVPQSFLKDDSIDNKVLTRSDKARGKSDNVPSEEVVKKMKNYWRQLLNAKLITQRKFDNLTKAERGGLSELDKAGFIKRQLVETRQITKHVAQILDSRMNTKYDENDKLIREVKVITLKSKLVSDFRKDFQFYKVREINNYHHAHDAYLNAVVGTALIKKYPKLESEFVYGDYKVYDVRKMIAKSEQEIGKATAKYFFYSNIMNFFKTEITLANGEIRKRPLIETNGETGEIVWDKGRDFATVRKVLSMPQVNIVKKTEVQTGGFSKESILPKRNSDKLIARKKDWDPKKYGGFDSPTVAYSVLVVAKVEKGKSKKLKSVKELLGITIMERSSFEKNPIDFLEAKGYKEVKKDLIIKLPKYSLFELENGRKRMLASAGELQKGNELALPSKYVNFLYLASHYEKLKGSPEDNEQKQLFVEQHKHYLDEIIEQISEFSKRVILADANLDKVLSAYNKHRDKPIREQAENIIHLFTLTNLGAPAAFKYFDTTIDRKRYTSTKEVLDATLIHQSITGLYETRIDLSQLGGDGGGSSGGTLNIEDEYRLHETSKEPDVPLGSTWLSDFPQAWAETGGMGLAVRQAPLIIPLKATSTPVSIKQYPMSQEARLGIKPHIQRLLDQGILVPCQSPWNTPLLPVKKPGTNDYRPVQDLREVNKRVEDIHPTVPNPYNLLSGLPPSHQWYTVLDLKDAFFCLRLHPTSQPLFAFEWRDPEMGISGQLTWTRLPQGFKNSPTLFNEALHRDLADFRIQHPDLILLQYVDDLLLAATSEQDCQRGTRALLQTLGNLGYRASAKKAQICQKQVKYLGYLLKEGQRWLTEARKETVMGQPTPKTPRQLREFLGKAGFCRLFIPGFAEMAAPLYPLTKPGTLFNWGPDQQKAYQEIKQALLTAPALGLPDLTKPFELFVDEKQGYAKGVLTQKLGPWRRPVAYLSKKLDPVAAGWPPCLRMVAAIAVLTKDAGKLTMGQPLVILAPHAVEALVKQPPDRWLSNARMTHYQAMLLDTDRVQFGPVVALNPATLLPLPEKEAPHDCLEILAETHGTRPDLTDQPIPDADYTWYTDGSSFLQEGQRRAGAAVTTETEVIWARALPAGTSAQRAELIALTQALKMAEGKKLNVYTDSRYAFATAHVHGEIYRRRGWLTSEGREIKNKNEILALLKALFLPKRLSIIHCPGHQKGNSAEARGNRMADQAAREAAMKAVLETSTLLAGKRTADGSEFEKRTADGSEFESPKKKAKVE

SEQ ID NO: 1012 - protein, 2096 aa, synthetic construct
MPAAKRVKLDGGDKKYSIGLDIGTNSVGWAVITDEYKVPSKKFKVLGNTDRHSIKKNLIGALLFDSGETAEATRLKRTARRRYTRRKNRICYLQEIFSNEMAKVDDSFFHRLEESFLVEEDKKHERHPIFGNIVDEVAYHEKYPTIYHLRKKLVDSTDKADLRLIYLALAHMIKFRGHFLIEGDLNPDNSDVDKLFIQLVQTYNQLFEENPINASGVDAKAILSARLSKSRRLENLIAQLPGEKKNGLFGNLIALSLGLTPNFKSNFDLAEDAKLQLSKDTYDDDLDNLLAQIGDQYADLFLAAKNLSDAILLSDILRVNTEITKAPLSASMIKRYDEHHQDLTLLKALVRQQLPEKYKEIFFDQSKNGYAGYIDGGASQEEFYKFIKPILEKMDGTEELLVKLNREDLLRKQRTFDNGSIPHQIHLGELHAILRRQEDFYPFLKDNREKIEKILTFRIPYYVGPLARGNSRFAWMTRKSEETITPWNFEEVVDKGASAQSFIERMTNFDKNLPNEKVLPKHSLLYEYFTVYNELTKVKYVTEGMRKPAFLSGEQKKAIVDLLFKTNRKVTVKQLKEDYFKKIECFDSVEISGVEDRFNASLGTYHDLLKIIKDKDFLDNEENEDILEDIVLTLTLFEDREMIEERLKTYAHLFDDKVMKQLKRRRYTGWGRLSRKLINGIRDKQSGKTILDFLKSDGFANRNFMQLIHDDSLTFKEDIQKAQVSGQGDSLHEHIANLAGSPAIKKGILQTVKVVDELVKVMGRHKPENIVIEMARENQTTQKGQKNSRERMKRIEEGIKELGSQILKEHPVENTQLQNEKLYLYYLQNGRDMYVDQELDINRLSDYDVDHIVPQSFLKDDSIDNKVLTRSDKARGKSDNVPSEEVVKKMKNYWRQLLNAKLITQRKFDNLTKAERGGLSELDKAGFIKRQLVETRQITKHVAQILDSRMNTKYDENDKLIREVKVITLKSKLVSDFRKDFQFYKVREINNYHHAHDAYLNAVVGTALIKKYPKLESEFVYGDYKVYDVRKMIAKSEQEIGKATAKYFFYSNIMNFFKTEITLANGEIRKRPLIETNGETGEIVWDKGRDFATVRKVLSMPQVNIVKKTEVQTGGFSKESILPKRNSDKLIARKKDWDPKKYGGFDSPTVAYSVLVVAKVEKGKSKKLKSVKELLGITIMERSSFEKNPIDFLEAKGYKEVKKDLIIKLPKYSLFELENGRKRMLASAGELQKGNELALPSKYVNFLYLASHYEKLKGSPEDNEQKQLFVEQHKHYLDEIIEQISEFSKRVILADANLDKVLSAYNKHRDKPIREQAENIIHLFTLTNLGAPAAFKYFDTTIDRKRYTSTKEVLDATLIHQSITGLYETRIDLSQLGGDGGEAAAKGSSGGGGGTLNIEDEYRLHETSKEPDVPLGSTWLSDFPQAWAETGGMGLAVRQAPLIIPLKATSTPVSIKQYPMSQEARLGIKPHIQRLLDQGILVPCQSPWNTPLLPVKKPGTNDYRPVQDLREVNKRVEDIHPTVPNPYNLLSGLPPSHQWYTVLDLKDAFFCLRLHPTSQPLFAFEWRDPEMGISGQLTWTRLPQGFKNSPTLFNEALHRDLADFRIQHPDLILLQYVDDLLLAATSEQDCQRGTRALLQTLGNLGYRASAKKAQICQKQVKYLGYLLKEGQRWLTEARKETVMGQPTPKTPRQLREFLGKAGFCRLFIPGFAEMAAPLYPLTKPGTLFNWGPDQQKAYQEIKQALLTAPALGLPDLTKPFELFVDEKQGYAKGVLTQKLGPWRRPVAYLSKKLDPVAAGWPPCLRMVAAIAVLTKDAGKLTMGQPLVILAPHAVEALVKQPPDRWLSNARMTHYQAMLLDTDRVQFGPVVALNPATLLPLPEKEAPHDCLEILAETHGTRPDLTDQPIPDADYTWYTDGSSFLQEGQRRAGAAVTTETEVIWARALPAGTSAQRAELIALTQALKMAEGKKLNVYTDSRYAFATAHVHGEIYRRRGWLTSEGREIKNKNEILALLKALFLPKRLSIIHCPGHQKGNSAEARGNRMADQAAREAAMKAVLETSTLLAGKRTADGSEFEKRTADGSEFESPKKKAKVE

SEQ ID NO: 1013 - protein, 2094 aa, synthetic construct
MPAAKRVKLDGGDKKYSIGLDIGTNSVGWAVITDEYKVPSKKFKVLGNTDRHSIKKNLIGALLFDSGETAEATRLKRTARRRYTRRKNRICYLQEIFSNEMAKVDDSFFHRLEESFLVEEDKKHERHPIFGNIVDEVAYHEKYPTIYHLRKKLVDSTDKADLRLIYLALAHMIKFRGHFLIEGDLNPDNSDVDKLFIQLVQTYNQLFEENPINASGVDAKAILSARLSKSRRLENLIAQLPGEKKNGLFGNLIALSLGLTPNFKSNFDLAEDAKLQLSKDTYDDDLDNLLAQIGDQYADLFLAAKNLSDAILLSDILRVNTEITKAPLSASMIKRYDEHHQDLTLLKALVRQQLPEKYKEIFFDQSKNGYAGYIDGGASQEEFYKFIKPILEKMDGTEELLVKLNREDLLRKQRTFDNGSIPHQIHLGELHAILRRQEDFYPFLKDNREKIEKILTFRIPYYVGPLARGNSRFAWMTRKSEETITPWNFEEVVDKGASAQSFIERMTNFDKNLPNEKVLPKHSLLYEYFTVYNELTKVKYVTEGMRKPAFLSGEQKKAIVDLLFKTNRKVTVKQLKEDYFKKIECFDSVEISGVEDRFNASLGTYHDLLKIIKDKDFLDNEENEDILEDIVLTLTLFEDREMIEERLKTYAHLFDDKVMKQLKRRRYTGWGRLSRKLINGIRDKQSGKTILDFLKSDGFANRNFMQLIHDDSLTFKEDIQKAQVSGQGDSLHEHIANLAGSPAIKKGILQTVKVVDELVKVMGRHKPENIVIEMARENQTTQKGQKNSRERMKRIEEGIKELGSQILKEHPVENTQLQNEKLYLYYLQNGRDMYVDQELDINRLSDYDVDHIVPQSFLKDDSIDNKVLTRSDKARGKSDNVPSEEVVKKMKNYWRQLLNAKLITQRKFDNLTKAERGGLSELDKAGFIKRQLVETRQITKHVAQILDSRMNTKYDENDKLIREVKVITLKSKLVSDFRKDFQFYKVREINNYHHAHDAYLNAVVGTALIKKYPKLESEFVYGDYKVYDVRKMIAKSEQEIGKATAKYFFYSNIMNFFKTEITLANGEIRKRPLIETNGETGEIVWDKGRDFATVRKVLSMPQVNIVKKTEVQTGGFSKESILPKRNSDKLIARKKDWDPKKYGGFDSPTVAYSVLVVAKVEKGKSKKLKSVKELLGITIMERSSFEKNPIDFLEAKGYKEVKKDLIIKLPKYSLFELENGRKRMLASAGELQKGNELALPSKYVNFLYLASHYEKLKGSPEDNEQKQLFVEQHKHYLDEIIEQISEFSKRVILADANLDKVLSAYNKHRDKPIREQAENIIHLFTLTNLGAPAAFKYFDTTIDRKRYTSTKEVLDATLIHQSITGLYETRIDLSQLGGDGGGGGPAPGSSGGTLNIEDEYRLHETSKEPDVPLGSTWLSDFPQAWAETGGMGLAVRQAPLIIPLKATSTPVSIKQYPMSQEARLGIKPHIQRLLDQGILVPCQSPWNTPLLPVKKPGTNDYRPVQDLREVNKRVEDIHPTVPNPYNLLSGLPPSHQWYTVLDLKDAFFCLRLHPTSQPLFAFEWRDPEMGISGQLTWTRLPQGFKNSPTLFNEALHRDLADFRIQHPDLILLQYVDDLLLAATSEQDCQRGTRALLQTLGNLGYRASAKKAQICQKQVKYLGYLLKEGQRWLTEARKETVMGQPTPKTPRQLREFLGKAGFCRLFIPGFAEMAAPLYPLTKPGTLFNWGPDQQKAYQEIKQALLTAPALGLPDLTKPFELFVDEKQGYAKGVLTQKLGPWRRPVAYLSKKLDPVAAGWPPCLRMVAAIAVLTKDAGKLTMGQPLVILAPHAVEALVKQPPDRWLSNARMTHYQAMLLDTDRVQFGPVVALNPATLLPLPEKEAPHDCLEILAETHGTRPDLTDQPIPDADYTWYTDGSSFLQEGQRRAGAAVTTETEVIWARALPAGTSAQRAELIALTQALKMAEGKKLNVYTDSRYAFATAHVHGEIYRRRGWLTSEGREIKNKNEILALLKALFLPKRLSIIHCPGHQKGNSAEARGNRMADQAAREAAMKAVLETSTLLAGKRTADGSEFEKRTADGSEFESPKKKAKVE

SEQ ID NO: 1014 - protein, 2094 aa, synthetic construct
MPAAKRVKLDGGDKKYSIGLDIGTNSVGWAVITDEYKVPSKKFKVLGNTDRHSIKKNLIGALLFDSGETAEATRLKRTARRRYTRRKNRICYLQEIFSNEMAKVDDSFFHRLEESFLVEEDKKHERHPIFGNIVDEVAYHEKYPTIYHLRKKLVDSTDKADLRLIYLALAHMIKFRGHFLIEGDLNPDNSDVDKLFIQLVQTYNQLFEENPINASGVDAKAILSARLSKSRRLENLIAQLPGEKKNGLFGNLIALSLGLTPNFKSNFDLAEDAKLQLSKDTYDDDLDNLLAQIGDQYADLFLAAKNLSDAILLSDILRVNTEITKAPLSASMIKRYDEHHQDLTLLKALVRQQLPEKYKEIFFDQSKNGYAGYIDGGASQEEFYKFIKPILEKMDGTEELLVKLNREDLLRKQRTFDNGSIPHQIHLGELHAILRRQEDFYPFLKDNREKIEKILTFRIPYYVGPLARGNSRFAWMTRKSEETITPWNFEEVVDKGASAQSFIERMTNFDKNLPNEKVLPKHSLLYEYFTVYNELTKVKYVTEGMRKPAFLSGEQKKAIVDLLFKTNRKVTVKQLKEDYFKKIECFDSVEISGVEDRFNASLGTYHDLLKIIKDKDFLDNEENEDILEDIVLTLTLFEDREMIEERLKTYAHLFDDKVMKQLKRRRYTGWGRLSRKLINGIRDKQSGKTILDFLKSDGFANRNFMQLIHDDSLTFKEDIQKAQVSGQGDSLHEHIANLAGSPAIKKGILQTVKVVDELVKVMGRHKPENIVIEMARENQTTQKGQKNSRERMKRIEEGIKELGSQILKEHPVENTQLQNEKLYLYYLQNGRDMYVDQELDINRLSDYDVDHIVPQSFLKDDSIDNKVLTRSDKARGKSDNVPSEEVVKKMKNYWRQLLNAKLITQRKFDNLTKAERGGLSELDKAGFIKRQLVETRQITKHVAQILDSRMNTKYDENDKLIREVKVITLKSKLVSDFRKDFQFYKVREINNYHHAHDAYLNAVVGTALIKKYPKLESEFVYGDYKVYDVRKMIAKSEQEIGKATAKYFFYSNIMNFFKTEITLANGEIRKRPLIETNGETGEIVWDKGRDFATVRKVLSMPQVNIVKKTEVQTGGFSKESILPKRNSDKLIARKKDWDPKKYGGFDSPTVAYSVLVVAKVEKGKSKKLKSVKELLGITIMERSSFEKNPIDFLEAKGYKEVKKDLIIKLPKYSLFELENGRKRMLASAGELQKGNELALPSKYVNFLYLASHYEKLKGSPEDNEQKQLFVEQHKHYLDEIIEQISEFSKRVILADANLDKVLSAYNKHRDKPIREQAENIIHLFTLTNLGAPAAFKYFDTTIDRKRYTSTKEVLDATLIHQSITGLYETRIDLSQLGGDGGGSSPAPGGSGGTLNIEDEYRLHETSKEPDVPLGSTWLSDFPQAWAETGGMGLAVRQAPLIIPLKATSTPVSIKQYPMSQEARLGIKPHIQRLLDQGILVPCQSPWNTPLLPVKKPGTNDYRPVQDLREVNKRVEDIHPTVPNPYNLLSGLPPSHQWYTVLDLKDAFFCLRLHPTSQPLFAFEWRDPEMGISGQLTWTRLPQGFKNSPTLFNEALHRDLADFRIQHPDLILLQYVDDLLLAATSEQDCQRGTRALLQTLGNLGYRASAKKAQICQKQVKYLGYLLKEGQRWLTEARKETVMGQPTPKTPRQLREFLGKAGFCRLFIPGFAEMAAPLYPLTKPGTLFNWGPDQQKAYQEIKQALLTAPALGLPDLTKPFELFVDEKQGYAKGVLTQKLGPWRRPVAYLSKKLDPVAAGWPPCLRMVAAIAVLTKDAGKLTMGQPLVILAPHAVEALVKQPPDRWLSNARMTHYQAMLLDTDRVQFGPVVALNPATLLPLPEKEAPHDCLEILAETHGTRPDLTDQPIPDADYTWYTDGSSFLQEGQRRAGAAVTTETEVIWARALPAGTSAQRAELIALTQALKMAEGKKLNVYTDSRYAFATAHVHGEIYRRRGWLTSEGREIKNKNEILALLKALFLPKRLSIIHCPGHQKGNSAEARGNRMADQAAREAAMKAVLETSTLLAGKRTADGSEFEKRTADGSEFESPKKKAKVE

SEQ ID NO: 1015 - protein, 2094 aa, synthetic construct
MPAAKRVKLDGGDKKYSIGLDIGTNSVGWAVITDEYKVPSKKFKVLGNTDRHSIKKNLIGALLFDSGETAEATRLKRTARRRYTRRKNRICYLQEIFSNEMAKVDDSFFHRLEESFLVEEDKKHERHPIFGNIVDEVAYHEKYPTIYHLRKKLVDSTDKADLRLIYLALAHMIKFRGHFLIEGDLNPDNSDVDKLFIQLVQTYNQLFEENPINASGVDAKAILSARLSKSRRLENLIAQLPGEKKNGLFGNLIALSLGLTPNFKSNFDLAEDAKLQLSKDTYDDDLDNLLAQIGDQYADLFLAAKNLSDAILLSDILRVNTEITKAPLSASMIKRYDEHHQDLTLLKALVRQQLPEKYKEIFFDQSKNGYAGYIDGGASQEEFYKFIKPILEKMDGTEELLVKLNREDLLRKQRTFDNGSIPHQIHLGELHAILRRQEDFYPFLKDNREKIEKILTFRIPYYVGPLARGNSRFAWMTRKSEETITPWNFEEVVDKGASAQSFIERMTNFDKNLPNEKVLPKHSLLYEYFTVYNELTKVKYVTEGMRKPAFLSGEQKKAIVDLLFKTNRKVTVKQLKEDYFKKIECFDSVEISGVEDRFNASLGTYHDLLKIIKDKDFLDNEENEDILEDIVLTLTLFEDREMIEERLKTYAHLFDDKVMKQLKRRRYTGWGRLSRKLINGIRDKQSGKTILDFLKSDGFANRNFMQLIHDDSLTFKEDIQKAQVSGQGDSLHEHIANLAGSPAIKKGILQTVKVVDELVKVMGRHKPENIVIEMARENQTTQKGQKNSRERMKRIEEGIKELGSQILKEHPVENTQLQNEKLYLYYLQNGRDMYVDQELDINRLSDYDVDHIVPQSFLKDDSIDNKVLTRSDKARGKSDNVPSEEVVKKMKNYWRQLLNAKLITQRKFDNLTKAERGGLSELDKAGFIKRQLVETRQITKHVAQILDSRMNTKYDENDKLIREVKVITLKSKLVSDFRKDFQFYKVREINNYHHAHDAYLNAVVGTALIKKYPKLESEFVYGDYKVYDVRKMIAKSEQEIGKATAKYFFYSNIMNFFKTEITLANGEIRKRPLIETNGETGEIVWDKGRDFATVRKVLSMPQVNIVKKTEVQTGGFSKESILPKRNSDKLIARKKDWDPKKYGGFDSPTVAYSVLVVAKVEKGKSKKLKSVKELLGITIMERSSFEKNPIDFLEAKGYKEVKKDLIIKLPKYSLFELENGRKRMLASAGELQKGNELALPSKYVNFLYLASHYEKLKGSPEDNEQKQLFVEQHKHYLDEIIEQISEFSKRVILADANLDKVLSAYNKHRDKPIREQAENIIHLFTLTNLGAPAAFKYFDTTIDRKRYTSTKEVLDATLIHQSITGLYETRIDLSQLGGDGGGGGGGSPAPGGTLNIEDEYRLHETSKEPDVPLGSTWLSDFPQAWAETGGMGLAVRQAPLIIPLKATSTPVSIKQYPMSQEARLGIKPHIQRLLDQGILVPCQSPWNTPLLPVKKPGTNDYRPVQDLREVNKRVEDIHPTVPNPYNLLSGLPPSHQWYTVLDLKDAFFCLRLHPTSQPLFAFEWRDPEMGISGQLTWTRLPQGFKNSPTLFNEALHRDLADFRIQHPDLILLQYVDDLLLAATSEQDCQRGTRALLQTLGNLGYRASAKKAQICQKQVKYLGYLLKEGQRWLTEARKETVMGQPTPKTPRQLREFLGKAGFCRLFIPGFAEMAAPLYPLTKPGTLFNWGPDQQKAYQEIKQALLTAPALGLPDLTKPFELFVDEKQGYAKGVLTQKLGPWRRPVAYLSKKLDPVAAGWPPCLRMVAAIAVLTKDAGKLTMGQPLVILAPHAVEALVKQPPDRWLSNARMTHYQAMLLDTDRVQFGPVVALNPATLLPLPEKEAPHDCLEILAETHGTRPDLTDQPIPDADYTWYTDGSSFLQEGQRRAGAAVTTETEVIWARALPAGTSAQRAELIALTQALKMAEGKKLNVYTDSRYAFATAHVHGEIYRRRGWLTSEGREIKNKNEILALLKALFLPKRLSIIHCPGHQKGNSAEARGNRMADQAAREAAMKAVLETSTLLAGKRTADGSEFEKRTADGSEFESPKKKAKVE

SEQ ID NO: 1016 - protein, 2091 aa, synthetic construct
MPAAKRVKLDGGDKKYSIGLDIGTNSVGWAVITDEYKVPSKKFKVLGNTDRHSIKKNLIGALLFDSGETAEATRLKRTARRRYTRRKNRICYLQEIFSNEMAKVDDSFFHRLEESFLVEEDKKHERHPIFGNIVDEVAYHEKYPTIYHLRKKLVDSTDKADLRLIYLALAHMIKFRGHFLIEGDLNPDNSDVDKLFIQLVQTYNQLFEENPINASGVDAKAILSARLSKSRRLENLIAQLPGEKKNGLFGNLIALSLGLTPNFKSNFDLAEDAKLQLSKDTYDDDLDNLLAQIGDQYADLFLAAKNLSDAILLSDILRVNTEITKAPLSASMIKRYDEHHQDLTLLKALVRQQLPEKYKEIFFDQSKNGYAGYIDGGASQEEFYKFIKPILEKMDGTEELLVKLNREDLLRKQRTFDNGSIPHQIHLGELHAILRRQEDFYPFLKDNREKIEKILTFRIPYYVGPLARGNSRFAWMTRKSEETITPWNFEEVVDKGASAQSFIERMTNFDKNLPNEKVLPKHSLLYEYFTVYNELTKVKYVTEGMRKPAFLSGEQKKAIVDLLFKTNRKVTVKQLKEDYFKKIECFDSVEISGVEDRFNASLGTYHDLLKIIKDKDFLDNEENEDILEDIVLTLTLFEDREMIEERLKTYAHLFDDKVMKQLKRRRYTGWGRLSRKLINGIRDKQSGKTILDFLKSDGFANRNFMQLIHDDSLTFKEDIQKAQVSGQGDSLHEHIANLAGSPAIKKGILQTVKVVDELVKVMGRHKPENIVIEMARENQTTQKGQKNSRERMKRIEEGIKELGSQILKEHPVENTQLQNEKLYLYYLQNGRDMYVDQELDINRLSDYDVDHIVPQSFLKDDSIDNKVLTRSDKARGKSDNVPSEEVVKKMKNYWRQLLNAKLITQRKFDNLTKAERGGLSELDKAGFIKRQLVETRQITKHVAQILDSRMNTKYDENDKLIREVKVITLKSKLVSDFRKDFQFYKVREINNYHHAHDAYLNAVVGTALIKKYPKLESEFVYGDYKVYDVRKMIAKSEQEIGKATAKYFFYSNIMNFFKTEITLANGEIRKRPLIETNGETGEIVWDKGRDFATVRKVLSMPQVNIVKKTEVQTGGFSKESILPKRNSDKLIARKKDWDPKKYGGFDSPTVAYSVLVVAKVEKGKSKKLKSVKELLGITIMERSSFEKNPIDFLEAKGYKEVKKDLIIKLPKYSLFELENGRKRMLASAGELQKGNELALPSKYVNFLYLASHYEKLKGSPEDNEQKQLFVEQHKHYLDEIIEQISEFSKRVILADANLDKVLSAYNKHRDKPIREQAENIIHLFTLTNLGAPAAFKYFDTTIDRKRYTSTKEVLDATLIHQSITGLYETRIDLSQLGGDGGGGSGSSGGTLNIEDEYRLHETSKEPDVPLGSTWLSDFPQAWAETGGMGLAVRQAPLIIPLKATSTPVSIKQYPMSQEARLGIKPHIQRLLDQGILVPCQSPWNTPLLPVKKPGTNDYRPVQDLREVNKRVEDIHPTVPNPYNLLSGLPPSHQWYTVLDLKDAFFCLRLHPTSQPLFAFEWRDPEMGISGQLTWTRLPQGFKNSPTLFNEALHRDLADFRIQHPDLILLQYVDDLLLAATSEQDCQRGTRALLQTLGNLGYRASAKKAQICQKQVKYLGYLLKEGQRWLTEARKETVMGQPTPKTPRQLREFLGKAGFCRLFIPGFAEMAAPLYPLTKPGTLFNWGPDQQKAYQEIKQALLTAPALGLPDLTKPFELFVDEKQGYAKGVLTQKLGPWRRPVAYLSKKLDPVAAGWPPCLRMVAAIAVLTKDAGKLTMGQPLVILAPHAVEALVKQPPDRWLSNARMTHYQAMLLDTDRVQFGPVVALNPATLLPLPEKEAPHDCLEILAETHGTRPDLTDQPIPDADYTWYTDGSSFLQEGQRRAGAAVTTETEVIWARALPAGTSAQRAELIALTQALKMAEGKKLNVYTDSRYAFATAHVHGEIYRRRGWLTSEGREIKNKNEILALLKALFLPKRLSIIHCPGHQKGNSAEARGNRMADQAAREAAMKAVLETSTLLAGKRTADGSEFEKRTADGSEFESPKKKAKVE

SEQ ID NO: 1017 - protein, 2091 aa, synthetic construct
MPAAKRVKLDGGDKKYSIGLDIGTNSVGWAVITDEYKVPSKKFKVLGNTDRHSIKKNLIGALLFDSGETAEATRLKRTARRRYTRRKNRICYLQEIFSNEMAKVDDSFFHRLEESFLVEEDKKHERHPIFGNIVDEVAYHEKYPTIYHLRKKLVDSTDKADLRLIYLALAHMIKFRGHFLIEGDLNPDNSDVDKLFIQLVQTYNQLFEENPINASGVDAKAILSARLSKSRRLENLIAQLPGEKKNGLFGNLIALSLGLTPNFKSNFDLAEDAKLQLSKDTYDDDLDNLLAQIGDQYADLFLAAKNLSDAILLSDILRVNTEITKAPLSASMIKRYDEHHQDLTLLKALVRQQLPEKYKEIFFDQSKNGYAGYIDGGASQEEFYKFIKPILEKMDGTEELLVKLNREDLLRKQRTFDNGSIPHQIHLGELHAILRRQEDFYPFLKDNREKIEKILTFRIPYYVGPLARGNSRFAWMTRKSEETITPWNFEEVVDKGASAQSFIERMTNFDKNLPNEKVLPKHSLLYEYFTVYNELTKVKYVTEGMRKPAFLSGEQKKAIVDLLFKTNRKVTVKQLKEDYFKKIECFDSVEISGVEDRFNASLGTYHDLLKIIKDKDFLDNEENEDILEDIVLTLTLFEDREMIEERLKTYAHLFDDKVMKQLKRRRYTGWGRLSRKLINGIRDKQSGKTILDFLKSDGFANRNFMQLIHDDSLTFKEDIQKAQVSGQGDSLHEHIANLAGSPAIKKGILQTVKVVDELVKVMGRHKPENIVIEMARENQTTQKGQKNSRERMKRIEEGIKELGSQILKEHPVENTQLQNEKLYLYYLQNGRDMYVDQELDINRLSDYDVDHIVPQSFLKDDSIDNKVLTRSDKARGKSDNVPSEEVVKKMKNYWRQLLNAKLITQRKFDNLTKAERGGLSELDKAGFIKRQLVETRQITKHVAQILDSRMNTKYDENDKLIREVKVITLKSKLVSDFRKDFQFYKVREINNYHHAHDAYLNAVVGTALIKKYPKLESEFVYGDYKVYDVRKMIAKSEQEIGKATAKYFFYSNIMNFFKTEITLANGEIRKRPLIETNGETGEIVWDKGRDFATVRKVLSMPQVNIVKKTEVQTGGFSKESILPKRNSDKLIARKKDWDPKKYGGFDSPTVAYSVLVVAKVEKGKSKKLKSVKELLGITIMERSSFEKNPIDFLEAKGYKEVKKDLIIKLPKYSLFELENGRKRMLASAGELQKGNELALPSKYVNFLYLASHYEKLKGSPEDNEQKQLFVEQHKHYLDEIIEQISEFSKRVILADANLDKVLSAYNKHRDKPIREQAENIIHLFTLTNLGAPAAFKYFDTTIDRKRYTSTKEVLDATLIHQSITGLYETRIDLSQLGGDGGGGSPAPGGTLNIEDEYRLHETSKEPDVPLGSTWLSDFPQAWAETGGMGLAVRQAPLIIPLKATSTPVSIKQYPMSQEARLGIKPHIQRLLDQGILVPCQSPWNTPLLPVKKPGTNDYRPVQDLREVNKRVEDIHPTVPNPYNLLSGLPPSHQWYTVLDLKDAFFCLRLHPTSQPLFAFEWRDPEMGISGQLTWTRLPQGFKNSPTLFNEALHRDLADFRIQHPDLILLQYVDDLLLAATSEQDCQRGTRALLQTLGNLGYRASAKKAQICQKQVKYLGYLLKEGQRWLTEARKETVMGQPTPKTPRQLREFLGKAGFCRLFIPGFAEMAAPLYPLTKPGTLFNWGPDQQKAYQEIKQALLTAPALGLPDLTKPFELFVDEKQGYAKGVLTQKLGPWRRPVAYLSKKLDPVAAGWPPCLRMVAAIAVLTKDAGKLTMGQPLVILAPHAVEALVKQPPDRWLSNARMTHYQAMLLDTDRVQFGPVVALNPATLLPLPEKEAPHDCLEILAETHGTRPDLTDQPIPDADYTWYTDGSSFLQEGQRRAGAAVTTETEVIWARALPAGTSAQRAELIALTQALKMAEGKKLNVYTDSRYAFATAHVHGEIYRRRGWLTSEGREIKNKNEILALLKALFLPKRLSIIHCPGHQKGNSAEARGNRMADQAAREAAMKAVLETSTLLAGKRTADGSEFEKRTADGSEFESPKKKAKVE

SEQ ID NO: 1018 - protein, 2096 aa, synthetic construct
MPAAKRVKLDGGDKKYSIGLDIGTNSVGWAVITDEYKVPSKKFKVLGNTDRHSIKKNLIGALLFDSGETAEATRLKRTARRRYTRRKNRICYLQEIFSNEMAKVDDSFFHRLEESFLVEEDKKHERHPIFGNIVDEVAYHEKYPTIYHLRKKLVDSTDKADLRLIYLALAHMIKFRGHFLIEGDLNPDNSDVDKLFIQLVQTYNQLFEENPINASGVDAKAILSARLSKSRRLENLIAQLPGEKKNGLFGNLIALSLGLTPNFKSNFDLAEDAKLQLSKDTYDDDLDNLLAQIGDQYADLFLAAKNLSDAILLSDILRVNTEITKAPLSASMIKRYDEHHQDLTLLKALVRQQLPEKYKEIFFDQSKNGYAGYIDGGASQEEFYKFIKPILEKMDGTEELLVKLNREDLLRKQRTFDNGSIPHQIHLGELHAILRRQEDFYPFLKDNREKIEKILTFRIPYYVGPLARGNSRFAWMTRKSEETITPWNFEEVVDKGASAQSFIERMTNFDKNLPNEKVLPKHSLLYEYFTVYNELTKVKYVTEGMRKPAFLSGEQKKAIVDLLFKTNRKVTVKQLKEDYFKKIECFDSVEISGVEDRFNASLGTYHDLLKIIKDKDFLDNEENEDILEDIVLTLTLFEDREMIEERLKTYAHLFDDKVMKQLKRRRYTGWGRLSRKLINGIRDKQSGKTILDFLKSDGFANRNFMQLIHDDSLTFKEDIQKAQVSGQGDSLHEHIANLAGSPAIKKGILQTVKVVDELVKVMGRHKPENIVIEMARENQTTQKGQKNSRERMKRIEEGIKELGSQILKEHPVENTQLQNEKLYLYYLQNGRDMYVDQELDINRLSDYDVDHIVPQSFLKDDSIDNKVLTRSDKARGKSDNVPSEEVVKKMKNYWRQLLNAKLITQRKFDNLTKAERGGLSELDKAGFIKRQLVETRQITKHVAQILDSRMNTKYDENDKLIREVKVITLKSKLVSDFRKDFQFYKVREINNYHHAHDAYLNAVVGTALIKKYPKLESEFVYGDYKVYDVRKMIAKSEQEIGKATAKYFFYSNIMNFFKTEITLANGEIRKRPLIETNGETGEIVWDKGRDFATVRKVLSMPQVNIVKKTEVQTGGFSKESILPKRNSDKLIARKKDWDPKKYGGFDSPTVAYSVLVVAKVEKGKSKKLKSVKELLGITIMERSSFEKNPIDFLEAKGYKEVKKDLIIKLPKYSLFELENGRKRMLASAGELQKGNELALPSKYVNFLYLASHYEKLKGSPEDNEQKQLFVEQHKHYLDEIIEQISEFSKRVILADANLDKVLSAYNKHRDKPIREQAENIIHLFTLTNLGAPAAFKYFDTTIDRKRYTSTKEVLDATLIHQSITGLYETRIDLSQLGGDGGGGGEAAAKGGSGGTLNIEDEYRLHETSKEPDVPLGSTWLSDFPQAWAETGGMGLAVRQAPLIIPLKATSTPVSIKQYPMSQEARLGIKPHIQRLLDQGILVPCQSPWNTPLLPVKKPGTNDYRPVQDLREVNKRVEDIHPTVPNPYNLLSGLPPSHQWYTVLDLKDAFFCLRLHPTSQPLFAFEWRDPEMGISGQLTWTRLPQGFKNSPTLFNEALHRDLADFRIQHPDLILLQYVDDLLLAATSEQDCQRGTRALLQTLGNLGYRASAKKAQICQKQVKYLGYLLKEGQRWLTEARKETVMGQPTPKTPRQLREFLGKAGFCRLFIPGFAEMAAPLYPLTKPGTLFNWGPDQQKAYQEIKQALLTAPALGLPDLTKPFELFVDEKQGYAKGVLTQKLGPWRRPVAYLSKKLDPVAAGWPPCLRMVAAIAVLTKDAGKLTMGQPLVILAPHAVEALVKQPPDRWLSNARMTHYQAMLLDTDRVQFGPVVALNPATLLPLPEKEAPHDCLEILAETHGTRPDLTDQPIPDADYTWYTDGSSFLQEGQRRAGAAVTTETEVIWARALPAGTSAQRAELIALTQALKMAEGKKLNVYTDSRYAFATAHVHGEIYRRRGWLTSEGREIKNKNEILALLKALFLPKRLSIIHCPGHQKGNSAEARGNRMADQAAREAAMKAVLETSTLLAGKRTADGSEFEKRTADGSEFESPKKKAKVE

SEQ ID NO: 1019 - protein, 2097 aa, synthetic construct
MPAAKRVKLDGGDKKYSIGLDIGTNSVGWAVITDEYKVPSKKFKVLGNTDRHSIKKNLIGALLFDSGETAEATRLKRTARRRYTRRKNRICYLQEIFSNEMAKVDDSFFHRLEESFLVEEDKKHERHPIFGNIVDEVAYHEKYPTIYHLRKKLVDSTDKADLRLIYLALAHMIKFRGHFLIEGDLNPDNSDVDKLFIQLVQTYNQLFEENPINASGVDAKAILSARLSKSRRLENLIAQLPGEKKNGLFGNLIALSLGLTPNFKSNFDLAEDAKLQLSKDTYDDDLDNLLAQIGDQYADLFLAAKNLSDAILLSDILRVNTEITKAPLSASMIKRYDEHHQDLTLLKALVRQQLPEKYKEIFFDQSKNGYAGYIDGGASQEEFYKFIKPILEKMDGTEELLVKLNREDLLRKQRTFDNGSIPHQIHLGELHAILRRQEDFYPFLKDNREKIEKILTFRIPYYVGPLARGNSRFAWMTRKSEETITPWNFEEVVDKGASAQSFIERMTNFDKNLPNEKVLPKHSLLYEYFTVYNELTKVKYVTEGMRKPAFLSGEQKKAIVDLLFKTNRKVTVKQLKEDYFKKIECFDSVEISGVEDRFNASLGTYHDLLKIIKDKDFLDNEENEDILEDIVLTLTLFEDREMIEERLKTYAHLFDDKVMKQLKRRRYTGWGRLSRKLINGIRDKQSGKTILDFLKSDGFANRNFMQLIHDDSLTFKEDIQKAQVSGQGDSLHEHIANLAGSPAIKKGILQTVKVVDELVKVMGRHKPENIVIEMARENQTTQKGQKNSRERMKRIEEGIKELGSQILKEHPVENTQLQNEKLYLYYLQNGRDMYVDQELDINRLSDYDVDHIVPQSFLKDDSIDNKVLTRSDKARGKSDNVPSEEVVKKMKNYWRQLLNAKLITQRKFDNLTKAERGGLSELDKAGFIKRQLVETRQITKHVAQILDSRMNTKYDENDKLIREVKVITLKSKLVSDFRKDFQFYKVREINNYHHAHDAYLNAVVGTALIKKYPKLESEFVYGDYKVYDVRKMIAKSEQEIGKATAKYFFYSNIMNFFKTEITLANGEIRKRPLIETNGETGEIVWDKGRDFATVRKVLSMPQVNIVKKTEVQTGGFSKESILPKRNSDKLIARKKDWDPKKYGGFDSPTVAYSVLVVAKVEKGKSKKLKSVKELLGITIMERSSFEKNPIDFLEAKGYKEVKKDLIIKLPKYSLFELENGRKRMLASAGELQKGNELALPSKYVNFLYLASHYEKLKGSPEDNEQKQLFVEQHKHYLDEIIEQISEFSKRVILADANLDKVLSAYNKHRDKPIREQAENIIHLFTLTNLGAPAAFKYFDTTIDRKRYTSTKEVLDATLIHQSITGLYETRIDLSQLGGDGGGGSGGSGGSGGSGGTLNIEDEYRLHETSKEPDVPLGSTWLSDFPQAWAETGGMGLAVRQAPLIIPLKATSTPVSIKQYPMSQEARLGIKPHIQRLLDQGILVPCQSPWNTPLLPVKKPGTNDYRPVQDLREVNKRVEDIHPTVPNPYNLLSGLPPSHQWYTVLDLKDAFFCLRLHPTSQPLFAFEWRDPEMGISGQLTWTRLPQGFKNSPTLFNEALHRDLADFRIQHPDLILLQYVDDLLLAATSEQDCQRGTRALLQTLGNLGYRASAKKAQICQKQVKYLGYLLKEGQRWLTEARKETVMGQPTPKTPRQLREFLGKAGFCRLFIPGFAEMAAPLYPLTKPGTLFNWGPDQQKAYQEIKQALLTAPALGLPDLTKPFELFVDEKQGYAKGVLTQKLGPWRRPVAYLSKKLDPVAAGWPPCLRMVAAIAVLTKDAGKLTMGQPLVILAPHAVEALVKQPPDRWLSNARMTHYQAMLLDTDRVQFGPVVALNPATLLPLPEKEAPHDCLEILAETHGTRPDLTDQPIPDADYTWYTDGSSFLQEGQRRAGAAVTTETEVIWARALPAGTSAQRAELIALTQALKMAEGKKLNVYTDSRYAFATAHVHGEIYRRRGWLTSEGREIKNKNEILALLKALFLPKRLSIIHCPGHQKGNSAEARGNRMADQAAREAAMKAVLETSTLLAGKRTADGSEFEKRTADGSEFESPKKKAKVE

SEQ ID NO: 1020 - protein, 2098 aa, synthetic construct
MPAAKRVKLDGGDKKYSIGLDIGTNSVGWAVITDEYKVPSKKFKVLGNTDRHSIKKNLIGALLFDSGETAEATRLKRTARRRYTRRKNRICYLQEIFSNEMAKVDDSFFHRLEESFLVEEDKKHERHPIFGNIVDEVAYHEKYPTIYHLRKKLVDSTDKADLRLIYLALAHMIKFRGHFLIEGDLNPDNSDVDKLFIQLVQTYNQLFEENPINASGVDAKAILSARLSKSRRLENLIAQLPGEKKNGLFGNLIALSLGLTPNFKSNFDLAEDAKLQLSKDTYDDDLDNLLAQIGDQYADLFLAAKNLSDAILLSDILRVNTEITKAPLSASMIKRYDEHHQDLTLLKALVRQQLPEKYKEIFFDQSKNGYAGYIDGGASQEEFYKFIKPILEKMDGTEELLVKLNREDLLRKQRTFDNGSIPHQIHLGELHAILRRQEDFYPFLKDNREKIEKILTFRIPYYVGPLARGNSRFAWMTRKSEETITPWNFEEVVDKGASAQSFIERMTNFDKNLPNEKVLPKHSLLYEYFTVYNELTKVKYVTEGMRKPAFLSGEQKKAIVDLLFKTNRKVTVKQLKEDYFKKIECFDSVEISGVEDRFNASLGTYHDLLKIIKDKDFLDNEENEDILEDIVLTLTLFEDREMIEERLKTYAHLFDDKVMKQLKRRRYTGWGRLSRKLINGIRDKQSGKTILDFLKSDGFANRNFMQLIHDDSLTFKEDIQKAQVSGQGDSLHEHIANLAGSPAIKKGILQTVKVVDELVKVMGRHKPENIVIEMARENQTTQKGQKNSRERMKRIEEGIKELGSQILKEHPVENTQLQNEKLYLYYLQNGRDMYVDQELDINRLSDYDVDHIVPQSFLKDDSIDNKVLTRSDKARGKSDNVPSEEVVKKMKNYWRQLLNAKLITQRKFDNLTKAERGGLSELDKAGFIKRQLVETRQITKHVAQILDSRMNTKYDENDKLIREVKVITLKSKLVSDFRKDFQFYKVREINNYHHAHDAYLNAVVGTALIKKYPKLESEFVYGDYKVYDVRKMIAKSEQEIGKATAKYFFYSNIMNFFKTEITLANGEIRKRPLIETNGETGEIVWDKGRDFATVRKVLSMPQVNIVKKTEVQTGGFSKESILPKRNSDKLIARKKDWDPKKYGGFDSPTVAYSVLVVAKVEKGKSKKLKSVKELLGITIMERSSFEKNPIDFLEAKGYKEVKKDLIIKLPKYSLFELENGRKRMLASAGELQKGNELALPSKYVNFLYLASHYEKLKGSPEDNEQKQLFVEQHKHYLDEIIEQISEFSKRVILADANLDKVLSAYNKHRDKPIREQAENIIHLFTLTNLGAPAAFKYFDTTIDRKRYTSTKEVLDATLIHQSITGLYETRIDLSQLGGDGGPAPAPAPAPAPAPGGTLNIEDEYRLHETSKEPDVPLGSTWLSDFPQAWAETGGMGLAVRQAPLIIPLKATSTPVSIKQYPMSQEARLGIKPHIQRLLDQGILVPCQSPWNTPLLPVKKPGTNDYRPVQDLREVNKRVEDIHPTVPNPYNLLSGLPPSHQWYTVLDLKDAFFCLRLHPTSQPLFAFEWRDPEMGISGQLTWTRLPQGFKNSPTLFNEALHRDLADFRIQHPDLILLQYVDDLLLAATSEQDCQRGTRALLQTLGNLGYRASAKKAQICQKQVKYLGYLLKEGQRWLTEARKETVMGQPTPKTPRQLREFLGKAGFCRLFIPGFAEMAAPLYPLTKPGTLFNWGPDQQKAYQEIKQALLTAPALGLPDLTKPFELFVDEKQGYAKGVLTQKLGPWRRPVAYLSKKLDPVAAGWPPCLRMVAAIAVLTKDAGKLTMGQPLVILAPHAVEALVKQPPDRWLSNARMTHYQAMLLDTDRVQFGPVVALNPATLLPLPEKEAPHDCLEILAETHGTRPDLTDQPIPDADYTWYTDGSSFLQEGQRRAGAAVTTETEVIWARALPAGTSAQRAELIALTQALKMAEGKKLNVYTDSRYAFATAHVHGEIYRRRGWLTSEGREIKNKNEILALLKALFLPKRLSIIHCPGHQKGNSAEARGNRMADQAAREAAMKAVLETSTLLAGKRTADGSEFEKRTADGSEFESPKKKAKVE

SEQ ID NO: 1021 - protein, 2115 aa, synthetic construct
MPAAKRVKLDGGDKKYSIGLDIGTNSVGWAVITDEYKVPSKKFKVLGNTDRHSIKKNLIGALLFDSGETAEATRLKRTARRRYTRRKNRICYLQEIFSNEMAKVDDSFFHRLEESFLVEEDKKHERHPIFGNIVDEVAYHEKYPTIYHLRKKLVDSTDKADLRLIYLALAHMIKFRGHFLIEGDLNPDNSDVDKLFIQLVQTYNQLFEENPINASGVDAKAILSARLSKSRRLENLIAQLPGEKKNGLFGNLIALSLGLTPNFKSNFDLAEDAKLQLSKDTYDDDLDNLLAQIGDQYADLFLAAKNLSDAILLSDILRVNTEITKAPLSASMIKRYDEHHQDLTLLKALVRQQLPEKYKEIFFDQSKNGYAGYIDGGASQEEFYKFIKPILEKMDGTEELLVKLNREDLLRKQRTFDNGSIPHQIHLGELHAILRRQEDFYPFLKDNREKIEKILTFRIPYYVGPLARGNSRFAWMTRKSEETITPWNFEEVVDKGASAQSFIERMTNFDKNLPNEKVLPKHSLLYEYFTVYNELTKVKYVTEGMRKPAFLSGEQKKAIVDLLFKTNRKVTVKQLKEDYFKKIECFDSVEISGVEDRFNASLGTYHDLLKIIKDKDFLDNEENEDILEDIVLTLTLFEDREMIEERLKTYAHLFDDKVMKQLKRRRYTGWGRLSRKLINGIRDKQSGKTILDFLKSDGFANRNFMQLIHDDSLTFKEDIQKAQVSGQGDSLHEHIANLAGSPAIKKGILQTVKVVDELVKVMGRHKPENIVIEMARENQTTQKGQKNSRERMKRIEEGIKELGSQILKEHPVENTQLQNEKLYLYYLQNGRDMYVDQELDINRLSDYDVDHIVPQSFLKDDSIDNKVLTRSDKARGKSDNVPSEEVVKKMKNYWRQLLNAKLITQRKFDNLTKAERGGLSELDKAGFIKRQLVETRQITKHVAQILDSRMNTKYDENDKLIREVKVITLKSKLVSDFRKDFQFYKVREINNYHHAHDAYLNAVVGTALIKKYPKLESEFVYGDYKVYDVRKMIAKSEQEIGKATAKYFFYSNIMNFFKTEITLANGEIRKRPLIETNGETGEIVWDKGRDFATVRKVLSMPQVNIVKKTEVQTGGFSKESILPKRNSDKLIARKKDWDPKKYGGFDSPTVAYSVLVVAKVEKGKSKKLKSVKELLGITIMERSSFEKNPIDFLEAKGYKEVKKDLIIKLPKYSLFELENGRKRMLASAGELQKGNELALPSKYVNFLYLASHYEKLKGSPEDNEQKQLFVEQHKHYLDEIIEQISEFSKRVILADANLDKVLSAYNKHRDKPIREQAENIIHLFTLTNLGAPAAFKYFDTTIDRKRYTSTKEVLDATLIHQSITGLYETRIDLSQLGGDGGGGGGSGGGGSGGGGSGGGGSGGGGSGGGGSGGTLNIEDEYRLHETSKEPDVPLGSTWLSDFPQAWAETGGMGLAVRQAPLIIPLKATSTPVSIKQYPMSQEARLGIKPHIQRLLDQGILVPCQSPWNTPLLPVKKPGTNDYRPVQDLREVNKRVEDIHPTVPNPYNLLSGLPPSHQWYTVLDLKDAFFCLRLHPTSQPLFAFEWRDPEMGISGQLTWTRLPQGFKNSPTLFNEALHRDLADFRIQHPDLILLQYVDDLLLAATSEQDCQRGTRALLQTLGNLGYRASAKKAQICQKQVKYLGYLLKEGQRWLTEARKETVMGQPTPKTPRQLREFLGKAGFCRLFIPGFAEMAAPLYPLTKPGTLFNWGPDQQKAYQEIKQALLTAPALGLPDLTKPFELFVDEKQGYAKGVLTQKLGPWRRPVAYLSKKLDPVAAGWPPCLRMVAAIAVLTKDAGKLTMGQPLVILAPHAVEALVKQPPDRWLSNARMTHYQAMLLDTDRVQFGPVVALNPATLLPLPEKEAPHDCLEILAETHGTRPDLTDQPIPDADYTWYTDGSSFLQEGQRRAGAAVTTETEVIWARALPAGTSAQRAELIALTQALKMAEGKKLNVYTDSRYAFATAHVHGEIYRRRGWLTSEGREIKNKNEILALLKALFLPKRLSIIHCPGHQKGNSAEARGNRMADQAAREAAMKAVLETSTLLAGKRTADGSEFEKRTADGSEFESPKKKAKVE

SEQ ID NO: 1022 - protein, 2094 aa, synthetic construct
MPAAKRVKLDGGDKKYSIGLDIGTNSVGWAVITDEYKVPSKKFKVLGNTDRHSIKKNLIGALLFDSGETAEATRLKRTARRRYTRRKNRICYLQEIFSNEMAKVDDSFFHRLEESFLVEEDKKHERHPIFGNIVDEVAYHEKYPTIYHLRKKLVDSTDKADLRLIYLALAHMIKFRGHFLIEGDLNPDNSDVDKLFIQLVQTYNQLFEENPINASGVDAKAILSARLSKSRRLENLIAQLPGEKKNGLFGNLIALSLGLTPNFKSNFDLAEDAKLQLSKDTYDDDLDNLLAQIGDQYADLFLAAKNLSDAILLSDILRVNTEITKAPLSASMIKRYDEHHQDLTLLKALVRQQLPEKYKEIFFDQSKNGYAGYIDGGASQEEFYKFIKPILEKMDGTEELLVKLNREDLLRKQRTFDNGSIPHQIHLGELHAILRRQEDFYPFLKDNREKIEKILTFRIPYYVGPLARGNSRFAWMTRKSEETITPWNFEEVVDKGASAQSFIERMTNFDKNLPNEKVLPKHSLLYEYFTVYNELTKVKYVTEGMRKPAFLSGEQKKAIVDLLFKTNRKVTVKQLKEDYFKKIECFDSVEISGVEDRFNASLGTYHDLLKIIKDKDFLDNEENEDILEDIVLTLTLFEDREMIEERLKTYAHLFDDKVMKQLKRRRYTGWGRLSRKLINGIRDKQSGKTILDFLKSDGFANRNFMQLIHDDSLTFKEDIQKAQVSGQGDSLHEHIANLAGSPAIKKGILQTVKVVDELVKVMGRHKPENIVIEMARENQTTQKGQKNSRERMKRIEEGIKELGSQILKEHPVENTQLQNEKLYLYYLQNGRDMYVDQELDINRLSDYDVDHIVPQSFLKDDSIDNKVLTRSDKARGKSDNVPSEEVVKKMKNYWRQLLNAKLITQRKFDNLTKAERGGLSELDKAGFIKRQLVETRQITKHVAQILDSRMNTKYDENDKLIREVKVITLKSKLVSDFRKDFQFYKVREINNYHHAHDAYLNAVVGTALIKKYPKLESEFVYGDYKVYDVRKMIAKSEQEIGKATAKYFFYSNIMNFFKTEITLANGEIRKRPLIETNGETGEIVWDKGRDFATVRKVLSMPQVNIVKKTEVQTGGFSKESILPKRNSDKLIARKKDWDPKKYGGFDSPTVAYSVLVVAKVEKGKSKKLKSVKELLGITIMERSSFEKNPIDFLEAKGYKEVKKDLIIKLPKYSLFELENGRKRMLASAGELQKGNELALPSKYVNFLYLASHYEKLKGSPEDNEQKQLFVEQHKHYLDEIIEQISEFSKRVILADANLDKVLSAYNKHRDKPIREQAENIIHLFTLTNLGAPAAFKYFDTTIDRKRYTSTKEVLDATLIHQSITGLYETRIDLSQLGGDGGGGSGSSGGGGGTLNIEDEYRLHETSKEPDVPLGSTWLSDFPQAWAETGGMGLAVRQAPLIIPLKATSTPVSIKQYPMSQEARLGIKPHIQRLLDQGILVPCQSPWNTPLLPVKKPGTNDYRPVQDLREVNKRVEDIHPTVPNPYNLLSGLPPSHQWYTVLDLKDAFFCLRLHPTSQPLFAFEWRDPEMGISGQLTWTRLPQGFKNSPTLFNEALHRDLADFRIQHPDLILLQYVDDLLLAATSEQDCQRGTRALLQTLGNLGYRASAKKAQICQKQVKYLGYLLKEGQRWLTEARKETVMGQPTPKTPRQLREFLGKAGFCRLFIPGFAEMAAPLYPLTKPGTLFNWGPDQQKAYQEIKQALLTAPALGLPDLTKPFELFVDEKQGYAKGVLTQKLGPWRRPVAYLSKKLDPVAAGWPPCLRMVAAIAVLTKDAGKLTMGQPLVILAPHAVEALVKQPPDRWLSNARMTHYQAMLLDTDRVQFGPVVALNPATLLPLPEKEAPHDCLEILAETHGTRPDLTDQPIPDADYTWYTDGSSFLQEGQRRAGAAVTTETEVIWARALPAGTSAQRAELIALTQALKMAEGKKLNVYTDSRYAFATAHVHGEIYRRRGWLTSEGREIKNKNEILALLKALFLPKRLSIIHCPGHQKGNSAEARGNRMADQAAREAAMKAVLETSTLLAGKRTADGSEFEKRTADGSEFESPKKKAKVE

SEQ ID NO: 1023 - protein, 2093 aa, synthetic construct
MPAAKRVKLDGGDKKYSIGLDIGTNSVGWAVITDEYKVPSKKFKVLGNTDRHSIKKNLIGALLFDSGETAEATRLKRTARRRYTRRKNRICYLQEIFSNEMAKVDDSFFHRLEESFLVEEDKKHERHPIFGNIVDEVAYHEKYPTIYHLRKKLVDSTDKADLRLIYLALAHMIKFRGHFLIEGDLNPDNSDVDKLFIQLVQTYNQLFEENPINASGVDAKAILSARLSKSRRLENLIAQLPGEKKNGLFGNLIALSLGLTPNFKSNFDLAEDAKLQLSKDTYDDDLDNLLAQIGDQYADLFLAAKNLSDAILLSDILRVNTEITKAPLSASMIKRYDEHHQDLTLLKALVRQQLPEKYKEIFFDQSKNGYAGYIDGGASQEEFYKFIKPILEKMDGTEELLVKLNREDLLRKQRTFDNGSIPHQIHLGELHAILRRQEDFYPFLKDNREKIEKILTFRIPYYVGPLARGNSRFAWMTRKSEETITPWNFEEVVDKGASAQSFIERMTNFDKNLPNEKVLPKHSLLYEYFTVYNELTKVKYVTEGMRKPAFLSGEQKKAIVDLLFKTNRKVTVKQLKEDYFKKIECFDSVEISGVEDRFNASLGTYHDLLKIIKDKDFLDNEENEDILEDIVLTLTLFEDREMIEERLKTYAHLFDDKVMKQLKRRRYTGWGRLSRKLINGIRDKQSGKTILDFLKSDGFANRNFMQLIHDDSLTFKEDIQKAQVSGQGDSLHEHIANLAGSPAIKKGILQTVKVVDELVKVMGRHKPENIVIEMARENQTTQKGQKNSRERMKRIEEGIKELGSQILKEHPVENTQLQNEKLYLYYLQNGRDMYVDQELDINRLSDYDVDHIVPQSFLKDDSIDNKVLTRSDKARGKSDNVPSEEVVKKMKNYWRQLLNAKLITQRKFDNLTKAERGGLSELDKAGFIKRQLVETRQITKHVAQILDSRMNTKYDENDKLIREVKVITLKSKLVSDFRKDFQFYKVREINNYHHAHDAYLNAVVGTALIKKYPKLESEFVYGDYKVYDVRKMIAKSEQEIGKATAKYFFYSNIMNFFKTEITLANGEIRKRPLIETNGETGEIVWDKGRDFATVRKVLSMPQVNIVKKTEVQTGGFSKESILPKRNSDKLIARKKDWDPKKYGGFDSPTVAYSVLVVAKVEKGKSKKLKSVKELLGITIMERSSFEKNPIDFLEAKGYKEVKKDLIIKLPKYSLFELENGRKRMLASAGELQKGNELALPSKYVNFLYLASHYEKLKGSPEDNEQKQLFVEQHKHYLDEIIEQISEFSKRVILADANLDKVLSAYNKHRDKPIREQAENIIHLFTLTNLGAPAAFKYFDTTIDRKRYTSTKEVLDATLIHQSITGLYETRIDLSQLGGDGGEAAAKGGSGGTLNIEDEYRLHETSKEPDVPLGSTWLSDFPQAWAETGGMGLAVRQAPLIIPLKATSTPVSIKQYPMSQEARLGIKPHIQRLLDQGILVPCQSPWNTPLLPVKKPGTNDYRPVQDLREVNKRVEDIHPTVPNPYNLLSGLPPSHQWYTVLDLKDAFFCLRLHPTSQPLFAFEWRDPEMGISGQLTWTRLPQGFKNSPTLFNEALHRDLADFRIQHPDLILLQYVDDLLLAATSEQDCQRGTRALLQTLGNLGYRASAKKAQICQKQVKYLGYLLKEGQRWLTEARKETVMGQPTPKTPRQLREFLGKAGFCRLFIPGFAEMAAPLYPLTKPGTLFNWGPDQQKAYQEIKQALLTAPALGLPDLTKPFELFVDEKQGYAKGVLTQKLGPWRRPVAYLSKKLDPVAAGWPPCLRMVAAIAVLTKDAGKLTMGQPLVILAPHAVEALVKQPPDRWLSNARMTHYQAMLLDTDRVQFGPVVALNPATLLPLPEKEAPHDCLEILAETHGTRPDLTDQPIPDADYTWYTDGSSFLQEGQRRAGAAVTTETEVIWARALPAGTSAQRAELIALTQALKMAEGKKLNVYTDSRYAFATAHVHGEIYRRRGWLTSEGREIKNKNEILALLKALFLPKRLSIIHCPGHQKGNSAEARGNRMADQAAREAAMKAVLETSTLLAGKRTADGSEFEKRTADGSEFESPKKKAKVE

SEQ ID NO: 1024 - protein, 2094 aa, synthetic construct
MPAAKRVKLDGGDKKYSIGLDIGTNSVGWAVITDEYKVPSKKFKVLGNTDRHSIKKNLIGALLFDSGETAEATRLKRTARRRYTRRKNRICYLQEIFSNEMAKVDDSFFHRLEESFLVEEDKKHERHPIFGNIVDEVAYHEKYPTIYHLRKKLVDSTDKADLRLIYLALAHMIKFRGHFLIEGDLNPDNSDVDKLFIQLVQTYNQLFEENPINASGVDAKAILSARLSKSRRLENLIAQLPGEKKNGLFGNLIALSLGLTPNFKSNFDLAEDAKLQLSKDTYDDDLDNLLAQIGDQYADLFLAAKNLSDAILLSDILRVNTEITKAPLSASMIKRYDEHHQDLTLLKALVRQQLPEKYKEIFFDQSKNGYAGYIDGGASQEEFYKFIKPILEKMDGTEELLVKLNREDLLRKQRTFDNGSIPHQIHLGELHAILRRQEDFYPFLKDNREKIEKILTFRIPYYVGPLARGNSRFAWMTRKSEETITPWNFEEVVDKGASAQSFIERMTNFDKNLPNEKVLPKHSLLYEYFTVYNELTKVKYVTEGMRKPAFLSGEQKKAIVDLLFKTNRKVTVKQLKEDYFKKIECFDSVEISGVEDRFNASLGTYHDLLKIIKDKDFLDNEENEDILEDIVLTLTLFEDREMIEERLKTYAHLFDDKVMKQLKRRRYTGWGRLSRKLINGIRDKQSGKTILDFLKSDGFANRNFMQLIHDDSLTFKEDIQKAQVSGQGDSLHEHIANLAGSPAIKKGILQTVKVVDELVKVMGRHKPENIVIEMARENQTTQKGQKNSRERMKRIEEGIKELGSQILKEHPVENTQLQNEKLYLYYLQNGRDMYVDQELDINRLSDYDVDHIVPQSFLKDDSIDNKVLTRSDKARGKSDNVPSEEVVKKMKNYWRQLLNAKLITQRKFDNLTKAERGGLSELDKAGFIKRQLVETRQITKHVAQILDSRMNTKYDENDKLIREVKVITLKSKLVSDFRKDFQFYKVREINNYHHAHDAYLNAVVGTALIKKYPKLESEFVYGDYKVYDVRKMIAKSEQEIGKATAKYFFYSNIMNFFKTEITLANGEIRKRPLIETNGETGEIVWDKGRDFATVRKVLSMPQVNIVKKTEVQTGGFSKESILPKRNSDKLIARKKDWDPKKYGGFDSPTVAYSVLVVAKVEKGKSKKLKSVKELLGITIMERSSFEKNPIDFLEAKGYKEVKKDLIIKLPKYSLFELENGRKRMLASAGELQKGNELALPSKYVNFLYLASHYEKLKGSPEDNEQKQLFVEQHKHYLDEIIEQISEFSKRVILADANLDKVLSAYNKHRDKPIREQAENIIHLFTLTNLGAPAAFKYFDTTIDRKRYTSTKEVLDATLIHQSITGLYETRIDLSQLGGDGGGGGGGSGSSGGTLNIEDEYRLHETSKEPDVPLGSTWLSDFPQAWAETGGMGLAVRQAPLIIPLKATSTPVSIKQYPMSQEARLGIKPHIQRLLDQGILVPCQSPWNTPLLPVKKPGTNDYRPVQDLREVNKRVEDIHPTVPNPYNLLSGLPPSHQWYTVLDLKDAFFCLRLHPTSQPLFAFEWRDPEMGISGQLTWTRLPQGFKNSPTLFNEALHRDLADFRIQHPDLILLQYVDDLLLAATSEQDCQRGTRALLQTLGNLGYRASAKKAQICQKQVKYLGYLLKEGQRWLTEARKETVMGQPTPKTPRQLREFLGKAGFCRLFIPGFAEMAAPLYPLTKPGTLFNWGPDQQKAYQEIKQALLTAPALGLPDLTKPFELFVDEKQGYAKGVLTQKLGPWRRPVAYLSKKLDPVAAGWPPCLRMVAAIAVLTKDAGKLTMGQPLVILAPHAVEALVKQPPDRWLSNARMTHYQAMLLDTDRVQFGPVVALNPATLLPLPEKEAPHDCLEILAETHGTRPDLTDQPIPDADYTWYTDGSSFLQEGQRRAGAAVTTETEVIWARALPAGTSAQRAELIALTQALKMAEGKKLNVYTDSRYAFATAHVHGEIYRRRGWLTSEGREIKNKNEILALLKALFLPKRLSIIHCPGHQKGNSAEARGNRMADQAAREAAMKAVLETSTLLAGKRTADGSEFEKRTADGSEFESPKKKAKVE

SEQ ID NO: 1025 - protein, 2094 aa, synthetic construct
MPAAKRVKLDGGDKKYSIGLDIGTNSVGWAVITDEYKVPSKKFKVLGNTDRHSIKKNLIGALLFDSGETAEATRLKRTARRRYTRRKNRICYLQEIFSNEMAKVDDSFFHRLEESFLVEEDKKHERHPIFGNIVDEVAYHEKYPTIYHLRKKLVDSTDKADLRLIYLALAHMIKFRGHFLIEGDLNPDNSDVDKLFIQLVQTYNQLFEENPINASGVDAKAILSARLSKSRRLENLIAQLPGEKKNGLFGNLIALSLGLTPNFKSNFDLAEDAKLQLSKDTYDDDLDNLLAQIGDQYADLFLAAKNLSDAILLSDILRVNTEITKAPLSASMIKRYDEHHQDLTLLKALVRQQLPEKYKEIFFDQSKNGYAGYIDGGASQEEFYKFIKPILEKMDGTEELLVKLNREDLLRKQRTFDNGSIPHQIHLGELHAILRRQEDFYPFLKDNREKIEKILTFRIPYYVGPLARGNSRFAWMTRKSEETITPWNFEEVVDKGASAQSFIERMTNFDKNLPNEKVLPKHSLLYEYFTVYNELTKVKYVTEGMRKPAFLSGEQKKAIVDLLFKTNRKVTVKQLKEDYFKKIECFDSVEISGVEDRFNASLGTYHDLLKIIKDKDFLDNEENEDILEDIVLTLTLFEDREMIEERLKTYAHLFDDKVMKQLKRRRYTGWGRLSRKLINGIRDKQSGKTILDFLKSDGFANRNFMQLIHDDSLTFKEDIQKAQVSGQGDSLHEHIANLAGSPAIKKGILQTVKVVDELVKVMGRHKPENIVIEMARENQTTQKGQKNSRERMKRIEEGIKELGSQILKEHPVENTQLQNEKLYLYYLQNGRDMYVDQELDINRLSDYDVDHIVPQSFLKDDSIDNKVLTRSDKARGKSDNVPSEEVVKKMKNYWRQLLNAKLITQRKFDNLTKAERGGLSELDKAGFIKRQLVETRQITKHVAQILDSRMNTKYDENDKLIREVKVITLKSKLVSDFRKDFQFYKVREINNYHHAHDAYLNAVVGTALIKKYPKLESEFVYGDYKVYDVRKMIAKSEQEIGKATAKYFFYSNIMNFFKTEITLANGEIRKRPLIETNGETGEIVWDKGRDFATVRKVLSMPQVNIVKKTEVQTGGFSKESILPKRNSDKLIARKKDWDPKKYGGFDSPTVAYSVLVVAKVEKGKSKKLKSVKELLGITIMERSSFEKNPIDFLEAKGYKEVKKDLIIKLPKYSLFELENGRKRMLASAGELQKGNELALPSKYVNFLYLASHYEKLKGSPEDNEQKQLFVEQHKHYLDEIIEQISEFSKRVILADANLDKVLSAYNKHRDKPIREQAENIIHLFTLTNLGAPAAFKYFDTTIDRKRYTSTKEVLDATLIHQSITGLYETRIDLSQLGGDGGGGGPAPGGSGGTLNIEDEYRLHETSKEPDVPLGSTWLSDFPQAWAETGGMGLAVRQAPLIIPLKATSTPVSIKQYPMSQEARLGIKPHIQRLLDQGILVPCQSPWNTPLLPVKKPGTNDYRPVQDLREVNKRVEDIHPTVPNPYNLLSGLPPSHQWYTVLDLKDAFFCLRLHPTSQPLFAFEWRDPEMGISGQLTWTRLPQGFKNSPTLFNEALHRDLADFRIQHPDLILLQYVDDLLLAATSEQDCQRGTRALLQTLGNLGYRASAKKAQICQKQVKYLGYLLKEGQRWLTEARKETVMGQPTPKTPRQLREFLGKAGFCRLFIPGFAEMAAPLYPLTKPGTLFNWGPDQQKAYQEIKQALLTAPALGLPDLTKPFELFVDEKQGYAKGVLTQKLGPWRRPVAYLSKKLDPVAAGWPPCLRMVAAIAVLTKDAGKLTMGQPLVILAPHAVEALVKQPPDRWLSNARMTHYQAMLLDTDRVQFGPVVALNPATLLPLPEKEAPHDCLEILAETHGTRPDLTDQPIPDADYTWYTDGSSFLQEGQRRAGAAVTTETEVIWARALPAGTSAQRAELIALTQALKMAEGKKLNVYTDSRYAFATAHVHGEIYRRRGWLTSEGREIKNKNEILALLKALFLPKRLSIIHCPGHQKGNSAEARGNRMADQAAREAAMKAVLETSTLLAGKRTADGSEFEKRTADGSEFESPKKKAKVE

SEQ ID NO: 1026 - protein, 2110 aa, synthetic construct
MPAAKRVKLDGGDKKYSIGLDIGTNSVGWAVITDEYKVPSKKFKVLGNTDRHSIKKNLIGALLFDSGETAEATRLKRTARRRYTRRKNRICYLQEIFSNEMAKVDDSFFHRLEESFLVEEDKKHERHPIFGNIVDEVAYHEKYPTIYHLRKKLVDSTDKADLRLIYLALAHMIKFRGHFLIEGDLNPDNSDVDKLFIQLVQTYNQLFEENPINASGVDAKAILSARLSKSRRLENLIAQLPGEKKNGLFGNLIALSLGLTPNFKSNFDLAEDAKLQLSKDTYDDDLDNLLAQIGDQYADLFLAAKNLSDAILLSDILRVNTEITKAPLSASMIKRYDEHHQDLTLLKALVRQQLPEKYKEIFFDQSKNGYAGYIDGGASQEEFYKFIKPILEKMDGTEELLVKLNREDLLRKQRTFDNGSIPHQIHLGELHAILRRQEDFYPFLKDNREKIEKILTFRIPYYVGPLARGNSRFAWMTRKSEETITPWNFEEVVDKGASAQSFIERMTNFDKNLPNEKVLPKHSLLYEYFTVYNELTKVKYVTEGMRKPAFLSGEQKKAIVDLLFKTNRKVTVKQLKEDYFKKIECFDSVEISGVEDRFNASLGTYHDLLKIIKDKDFLDNEENEDILEDIVLTLTLFEDREMIEERLKTYAHLFDDKVMKQLKRRRYTGWGRLSRKLINGIRDKQSGKTILDFLKSDGFANRNFMQLIHDDSLTFKEDIQKAQVSGQGDSLHEHIANLAGSPAIKKGILQTVKVVDELVKVMGRHKPENIVIEMARENQTTQKGQKNSRERMKRIEEGIKELGSQILKEHPVENTQLQNEKLYLYYLQNGRDMYVDQELDINRLSDYDVDHIVPQSFLKDDSIDNKVLTRSDKARGKSDNVPSEEVVKKMKNYWRQLLNAKLITQRKFDNLTKAERGGLSELDKAGFIKRQLVETRQITKHVAQILDSRMNTKYDENDKLIREVKVITLKSKLVSDFRKDFQFYKVREINNYHHAHDAYLNAVVGTALIKKYPKLESEFVYGDYKVYDVRKMIAKSEQEIGKATAKYFFYSNIMNFFKTEITLANGEIRKRPLIETNGETGEIVWDKGRDFATVRKVLSMPQVNIVKKTEVQTGGFSKESILPKRNSDKLIARKKDWDPKKYGGFDSPTVAYSVLVVAKVEKGKSKKLKSVKELLGITIMERSSFEKNPIDFLEAKGYKEVKKDLIIKLPKYSLFELENGRKRMLASAGELQKGNELALPSKYVNFLYLASHYEKLKGSPEDNEQKQLFVEQHKHYLDEIIEQISEFSKRVILADANLDKVLSAYNKHRDKPIREQAENIIHLFTLTNLGAPAAFKYFDTTIDRKRYTSTKEVLDATLIHQSITGLYETRIDLSQLGGDGGGGGGSGGGGSGGGGSGGGGSGGGGSGGTLNIEDEYRLHETSKEPDVPLGSTWLSDFPQAWAETGGMGLAVRQAPLIIPLKATSTPVSIKQYPMSQEARLGIKPHIQRLLDQGILVPCQSPWNTPLLPVKKPGTNDYRPVQDLREVNKRVEDIHPTVPNPYNLLSGLPPSHQWYTVLDLKDAFFCLRLHPTSQPLFAFEWRDPEMGISGQLTWTRLPQGFKNSPTLFNEALHRDLADFRIQHPDLILLQYVDDLLLAATSEQDCQRGTRALLQTLGNLGYRASAKKAQICQKQVKYLGYLLKEGQRWLTEARKETVMGQPTPKTPRQLREFLGKAGFCRLFIPGFAEMAAPLYPLTKPGTLFNWGPDQQKAYQEIKQALLTAPALGLPDLTKPFELFVDEKQGYAKGVLTQKLGPWRRPVAYLSKKLDPVAAGWPPCLRMVAAIAVLTKDAGKLTMGQPLVILAPHAVEALVKQPPDRWLSNARMTHYQAMLLDTDRVQFGPVVALNPATLLPLPEKEAPHDCLEILAETHGTRPDLTDQPIPDADYTWYTDGSSFLQEGQRRAGAAVTTETEVIWARALPAGTSAQRAELIALTQALKMAEGKKLNVYTDSRYAFATAHVHGEIYRRRGWLTSEGREIKNKNEILALLKALFLPKRLSIIHCPGHQKGNSAEARGNRMADQAAREAAMKAVLETSTLLAGKRTADGSEFEKRTADGSEFESPKKKAKVE

SEQ ID NO: 1027 - protein, 2096 aa, synthetic construct
MPAAKRVKLDGGDKKYSIGLDIGTNSVGWAVITDEYKVPSKKFKVLGNTDRHSIKKNLIGALLFDSGETAEATRLKRTARRRYTRRKNRICYLQEIFSNEMAKVDDSFFHRLEESFLVEEDKKHERHPIFGNIVDEVAYHEKYPTIYHLRKKLVDSTDKADLRLIYLALAHMIKFRGHFLIEGDLNPDNSDVDKLFIQLVQTYNQLFEENPINASGVDAKAILSARLSKSRRLENLIAQLPGEKKNGLFGNLIALSLGLTPNFKSNFDLAEDAKLQLSKDTYDDDLDNLLAQIGDQYADLFLAAKNLSDAILLSDILRVNTEITKAPLSASMIKRYDEHHQDLTLLKALVRQQLPEKYKEIFFDQSKNGYAGYIDGGASQEEFYKFIKPILEKMDGTEELLVKLNREDLLRKQRTFDNGSIPHQIHLGELHAILRRQEDFYPFLKDNREKIEKILTFRIPYYVGPLARGNSRFAWMTRKSEETITPWNFEEVVDKGASAQSFIERMTNFDKNLPNEKVLPKHSLLYEYFTVYNELTKVKYVTEGMRKPAFLSGEQKKAIVDLLFKTNRKVTVKQLKEDYFKKIECFDSVEISGVEDRFNASLGTYHDLLKIIKDKDFLDNEENEDILEDIVLTLTLFEDREMIEERLKTYAHLFDDKVMKQLKRRRYTGWGRLSRKLINGIRDKQSGKTILDFLKSDGFANRNFMQLIHDDSLTFKEDIQKAQVSGQGDSLHEHIANLAGSPAIKKGILQTVKVVDELVKVMGRHKPENIVIEMARENQTTQKGQKNSRERMKRIEEGIKELGSQILKEHPVENTQLQNEKLYLYYLQNGRDMYVDQELDINRLSDYDVDHIVPQSFLKDDSIDNKVLTRSDKARGKSDNVPSEEVVKKMKNYWRQLLNAKLITQRKFDNLTKAERGGLSELDKAGFIKRQLVETRQITKHVAQILDSRMNTKYDENDKLIREVKVITLKSKLVSDFRKDFQFYKVREINNYHHAHDAYLNAVVGTALIKKYPKLESEFVYGDYKVYDVRKMIAKSEQEIGKATAKYFFYSNIMNFFKTEITLANGEIRKRPLIETNGETGEIVWDKGRDFATVRKVLSMPQVNIVKKTEVQTGGFSKESILPKRNSDKLIARKKDWDPKKYGGFDSPTVAYSVLVVAKVEKGKSKKLKSVKELLGITIMERSSFEKNPIDFLEAKGYKEVKKDLIIKLPKYSLFELENGRKRMLASAGELQKGNELALPSKYVNFLYLASHYEKLKGSPEDNEQKQLFVEQHKHYLDEIIEQISEFSKRVILADANLDKVLSAYNKHRDKPIREQAENIIHLFTLTNLGAPAAFKYFDTTIDRKRYTSTKEVLDATLIHQSITGLYETRIDLSQLGGDGGGSSEAAAKPAPGGTLNIEDEYRLHETSKEPDVPLGSTWLSDFPQAWAETGGMGLAVRQAPLIIPLKATSTPVSIKQYPMSQEARLGIKPHIQRLLDQGILVPCQSPWNTPLLPVKKPGTNDYRPVQDLREVNKRVEDIHPTVPNPYNLLSGLPPSHQWYTVLDLKDAFFCLRLHPTSQPLFAFEWRDPEMGISGQLTWTRLPQGFKNSPTLFNEALHRDLADFRIQHPDLILLQYVDDLLLAATSEQDCQRGTRALLQTLGNLGYRASAKKAQICQKQVKYLGYLLKEGQRWLTEARKETVMGQPTPKTPRQLREFLGKAGFCRLFIPGFAEMAAPLYPLTKPGTLFNWGPDQQKAYQEIKQALLTAPALGLPDLTKPFELFVDEKQGYAKGVLTQKLGPWRRPVAYLSKKLDPVAAGWPPCLRMVAAIAVLTKDAGKLTMGQPLVILAPHAVEALVKQPPDRWLSNARMTHYQAMLLDTDRVQFGPVVALNPATLLPLPEKEAPHDCLEILAETHGTRPDLTDQPIPDADYTWYTDGSSFLQEGQRRAGAAVTTETEVIWARALPAGTSAQRAELIALTQALKMAEGKKLNVYTDSRYAFATAHVHGEIYRRRGWLTSEGREIKNKNEILALLKALFLPKRLSIIHCPGHQKGNSAEARGNRMADQAAREAAMKAVLETSTLLAGKRTADGSEFEKRTADGSEFESPKKKAKVE

SEQ ID NO: 1028 - protein, 2101 aa, synthetic construct
MPAAKRVKLDGGDKKYSIGLDIGTNSVGWAVITDEYKVPSKKFKVLGNTDRHSIKKNLIGALLFDSGETAEATRLKRTARRRYTRRKNRICYLQEIFSNEMAKVDDSFFHRLEESFLVEEDKKHERHPIFGNIVDEVAYHEKYPTIYHLRKKLVDSTDKADLRLIYLALAHMIKFRGHFLIEGDLNPDNSDVDKLFIQLVQTYNQLFEENPINASGVDAKAILSARLSKSRRLENLIAQLPGEKKNGLFGNLIALSLGLTPNFKSNFDLAEDAKLQLSKDTYDDDLDNLLAQIGDQYADLFLAAKNLSDAILLSDILRVNTEITKAPLSASMIKRYDEHHQDLTLLKALVRQQLPEKYKEIFFDQSKNGYAGYIDGGASQEEFYKFIKPILEKMDGTEELLVKLNREDLLRKQRTFDNGSIPHQIHLGELHAILRRQEDFYPFLKDNREKIEKILTFRIPYYVGPLARGNSRFAWMTRKSEETITPWNFEEVVDKGASAQSFIERMTNFDKNLPNEKVLPKHSLLYEYFTVYNELTKVKYVTEGMRKPAFLSGEQKKAIVDLLFKTNRKVTVKQLKEDYFKKIECFDSVEISGVEDRFNASLGTYHDLLKIIKDKDFLDNEENEDILEDIVLTLTLFEDREMIEERLKTYAHLFDDKVMKQLKRRRYTGWGRLSRKLINGIRDKQSGKTILDFLKSDGFANRNFMQLIHDDSLTFKEDIQKAQVSGQGDSLHEHIANLAGSPAIKKGILQTVKVVDELVKVMGRHKPENIVIEMARENQTTQKGQKNSRERMKRIEEGIKELGSQILKEHPVENTQLQNEKLYLYYLQNGRDMYVDQELDINRLSDYDVDHIVPQSFLKDDSIDNKVLTRSDKARGKSDNVPSEEVVKKMKNYWRQLLNAKLITQRKFDNLTKAERGGLSELDKAGFIKRQLVETRQITKHVAQILDSRMNTKYDENDKLIREVKVITLKSKLVSDFRKDFQFYKVREINNYHHAHDAYLNAVVGTALIKKYPKLESEFVYGDYKVYDVRKMIAKSEQEIGKATAKYFFYSNIMNFFKTEITLANGEIRKRPLIETNGETGEIVWDKGRDFATVRKVLSMPQVNIVKKTEVQTGGFSKESILPKRNSDKLIARKKDWDPKKYGGFDSPTVAYSVLVVAKVEKGKSKKLKSVKELLGITIMERSSFEKNPIDFLEAKGYKEVKKDLIIKLPKYSLFELENGRKRMLASAGELQKGNELALPSKYVNFLYLASHYEKLKGSPEDNEQKQLFVEQHKHYLDEIIEQISEFSKRVILADANLDKVLSAYNKHRDKPIREQAENIIHLFTLTNLGAPAAFKYFDTTIDRKRYTSTKEVLDATLIHQSITGLYETRIDLSQLGGDGGSGSETPGTSESATPESGGTLNIEDEYRLHETSKEPDVPLGSTWLSDFPQAWAETGGMGLAVRQAPLIIPLKATSTPVSIKQYPMSQEARLGIKPHIQRLLDQGILVPCQSPWNTPLLPVKKPGTNDYRPVQDLREVNKRVEDIHPTVPNPYNLLSGLPPSHQWYTVLDLKDAFFCLRLHPTSQPLFAFEWRDPEMGISGQLTWTRLPQGFKNSPTLFNEALHRDLADFRIQHPDLILLQYVDDLLLAATSEQDCQRGTRALLQTLGNLGYRASAKKAQICQKQVKYLGYLLKEGQRWLTEARKETVMGQPTPKTPRQLREFLGKAGFCRLFIPGFAEMAAPLYPLTKPGTLFNWGPDQQKAYQEIKQALLTAPALGLPDLTKPFELFVDEKQGYAKGVLTQKLGPWRRPVAYLSKKLDPVAAGWPPCLRMVAAIAVLTKDAGKLTMGQPLVILAPHAVEALVKQPPDRWLSNARMTHYQAMLLDTDRVQFGPVVALNPATLLPLPEKEAPHDCLEILAETHGTRPDLTDQPIPDADYTWYTDGSSFLQEGQRRAGAAVTTETEVIWARALPAGTSAQRAELIALTQALKMAEGKKLNVYTDSRYAFATAHVHGEIYRRRGWLTSEGREIKNKNEILALLKALFLPKRLSIIHCPGHQKGNSAEARGNRMADQAAREAAMKAVLETSTLLAGKRTADGSEFEKRTADGSEFESPKKKAKVE

SEQ ID NO: 1029 - protein, 2110 aa, synthetic construct
MPAAKRVKLDGGDKKYSIGLDIGTNSVGWAVITDEYKVPSKKFKVLGNTDRHSIKKNLIGALLFDSGETAEATRLKRTARRRYTRRKNRICYLQEIFSNEMAKVDDSFFHRLEESFLVEEDKKHERHPIFGNIVDEVAYHEKYPTIYHLRKKLVDSTDKADLRLIYLALAHMIKFRGHFLIEGDLNPDNSDVDKLFIQLVQTYNQLFEENPINASGVDAKAILSARLSKSRRLENLIAQLPGEKKNGLFGNLIALSLGLTPNFKSNFDLAEDAKLQLSKDTYDDDLDNLLAQIGDQYADLFLAAKNLSDAILLSDILRVNTEITKAPLSASMIKRYDEHHQDLTLLKALVRQQLPEKYKEIFFDQSKNGYAGYIDGGASQEEFYKFIKPILEKMDGTEELLVKLNREDLLRKQRTFDNGSIPHQIHLGELHAILRRQEDFYPFLKDNREKIEKILTFRIPYYVGPLARGNSRFAWMTRKSEETITPWNFEEVVDKGASAQSFIERMTNFDKNLPNEKVLPKHSLLYEYFTVYNELTKVKYVTEGMRKPAFLSGEQKKAIVDLLFKTNRKVTVKQLKEDYFKKIECFDSVEISGVEDRFNASLGTYHDLLKIIKDKDFLDNEENEDILEDIVLTLTLFEDREMIEERLKTYAHLFDDKVMKQLKRRRYTGWGRLSRKLINGIRDKQSGKTILDFLKSDGFANRNFMQLIHDDSLTFKEDIQKAQVSGQGDSLHEHIANLAGSPAIKKGILQTVKVVDELVKVMGRHKPENIVIEMARENQTTQKGQKNSRERMKRIEEGIKELGSQILKEHPVENTQLQNEKLYLYYLQNGRDMYVDQELDINRLSDYDVDHIVPQSFLKDDSIDNKVLTRSDKARGKSDNVPSEEVVKKMKNYWRQLLNAKLITQRKFDNLTKAERGGLSELDKAGFIKRQLVETRQITKHVAQILDSRMNTKYDENDKLIREVKVITLKSKLVSDFRKDFQFYKVREINNYHHAHDAYLNAVVGTALIKKYPKLESEFVYGDYKVYDVRKMIAKSEQEIGKATAKYFFYSNIMNFFKTEITLANGEIRKRPLIETNGETGEIVWDKGRDFATVRKVLSMPQVNIVKKTEVQTGGFSKESILPKRNSDKLIARKKDWDPKKYGGFDSPTVAYSVLVVAKVEKGKSKKLKSVKELLGITIMERSSFEKNPIDFLEAKGYKEVKKDLIIKLPKYSLFELENGRKRMLASAGELQKGNELALPSKYVNFLYLASHYEKLKGSPEDNEQKQLFVEQHKHYLDEIIEQISEFSKRVILADANLDKVLSAYNKHRDKPIREQAENIIHLFTLTNLGAPAAFKYFDTTIDRKRYTSTKEVLDATLIHQSITGLYETRIDLSQLGGDGGEAAAKEAAAKEAAAKEAAAKEAAAKGGTLNIEDEYRLHETSKEPDVPLGSTWLSDFPQAWAETGGMGLAVRQAPLIIPLKATSTPVSIKQYPMSQEARLGIKPHIQRLLDQGILVPCQSPWNTPLLPVKKPGTNDYRPVQDLREVNKRVEDIHPTVPNPYNLLSGLPPSHQWYTVLDLKDAFFCLRLHPTSQPLFAFEWRDPEMGISGQLTWTRLPQGFKNSPTLFNEALHRDLADFRIQHPDLILLQYVDDLLLAATSEQDCQRGTRALLQTLGNLGYRASAKKAQICQKQVKYLGYLLKEGQRWLTEARKETVMGQPTPKTPRQLREFLGKAGFCRLFIPGFAEMAAPLYPLTKPGTLFNWGPDQQKAYQEIKQALLTAPALGLPDLTKPFELFVDEKQGYAKGVLTQKLGPWRRPVAYLSKKLDPVAAGWPPCLRMVAAIAVLTKDAGKLTMGQPLVILAPHAVEALVKQPPDRWLSNARMTHYQAMLLDTDRVQFGPVVALNPATLLPLPEKEAPHDCLEILAETHGTRPDLTDQPIPDADYTWYTDGSSFLQEGQRRAGAAVTTETEVIWARALPAGTSAQRAELIALTQALKMAEGKKLNVYTDSRYAFATAHVHGEIYRRRGWLTSEGREIKNKNEILALLKALFLPKRLSIIHCPGHQKGNSAEARGNRMADQAAREAAMKAVLETSTLLAGKRTADGSEFEKRTADGSEFESPKKKAKVE

SEQ ID NO: 1030 - protein, 2091 aa, synthetic construct
MPAAKRVKLDGGDKKYSIGLDIGTNSVGWAVITDEYKVPSKKFKVLGNTDRHSIKKNLIGALLFDSGETAEATRLKRTARRRYTRRKNRICYLQEIFSNEMAKVDDSFFHRLEESFLVEEDKKHERHPIFGNIVDEVAYHEKYPTIYHLRKKLVDSTDKADLRLIYLALAHMIKFRGHFLIEGDLNPDNSDVDKLFIQLVQTYNQLFEENPINASGVDAKAILSARLSKSRRLENLIAQLPGEKKNGLFGNLIALSLGLTPNFKSNFDLAEDAKLQLSKDTYDDDLDNLLAQIGDQYADLFLAAKNLSDAILLSDILRVNTEITKAPLSASMIKRYDEHHQDLTLLKALVRQQLPEKYKEIFFDQSKNGYAGYIDGGASQEEFYKFIKPILEKMDGTEELLVKLNREDLLRKQRTFDNGSIPHQIHLGELHAILRRQEDFYPFLKDNREKIEKILTFRIPYYVGPLARGNSRFAWMTRKSEETITPWNFEEVVDKGASAQSFIERMTNFDKNLPNEKVLPKHSLLYEYFTVYNELTKVKYVTEGMRKPAFLSGEQKKAIVDLLFKTNRKVTVKQLKEDYFKKIECFDSVEISGVEDRFNASLGTYHDLLKIIKDKDFLDNEENEDILEDIVLTLTLFEDREMIEERLKTYAHLFDDKVMKQLKRRRYTGWGRLSRKLINGIRDKQSGKTILDFLKSDGFANRNFMQLIHDDSLTFKEDIQKAQVSGQGDSLHEHIANLAGSPAIKKGILQTVKVVDELVKVMGRHKPENIVIEMARENQTTQKGQKNSRERMKRIEEGIKELGSQILKEHPVENTQLQNEKLYLYYLQNGRDMYVDQELDINRLSDYDVDHIVPQSFLKDDSIDNKVLTRSDKARGKSDNVPSEEVVKKMKNYWRQLLNAKLITQRKFDNLTKAERGGLSELDKAGFIKRQLVETRQITKHVAQILDSRMNTKYDENDKLIREVKVITLKSKLVSDFRKDFQFYKVREINNYHHAHDAYLNAVVGTALIKKYPKLESEFVYGDYKVYDVRKMIAKSEQEIGKATAKYFFYSNIMNFFKTEITLANGEIRKRPLIETNGETGEIVWDKGRDFATVRKVLSMPQVNIVKKTEVQTGGFSKESILPKRNSDKLIARKKDWDPKKYGGFDSPTVAYSVLVVAKVEKGKSKKLKSVKELLGITIMERSSFEKNPIDFLEAKGYKEVKKDLIIKLPKYSLFELENGRKRMLASAGELQKGNELALPSKYVNFLYLASHYEKLKGSPEDNEQKQLFVEQHKHYLDEIIEQISEFSKRVILADANLDKVLSAYNKHRDKPIREQAENIIHLFTLTNLGAPAAFKYFDTTIDRKRYTSTKEVLDATLIHQSITGLYETRIDLSQLGGDGGPAPGGSGGTLNIEDEYRLHETSKEPDVPLGSTWLSDFPQAWAETGGMGLAVRQAPLIIPLKATSTPVSIKQYPMSQEARLGIKPHIQRLLDQGILVPCQSPWNTPLLPVKKPGTNDYRPVQDLREVNKRVEDIHPTVPNPYNLLSGLPPSHQWYTVLDLKDAFFCLRLHPTSQPLFAFEWRDPEMGISGQLTWTRLPQGFKNSPTLFNEALHRDLADFRIQHPDLILLQYVDDLLLAATSEQDCQRGTRALLQTLGNLGYRASAKKAQICQKQVKYLGYLLKEGQRWLTEARKETVMGQPTPKTPRQLREFLGKAGFCRLFIPGFAEMAAPLYPLTKPGTLFNWGPDQQKAYQEIKQALLTAPALGLPDLTKPFELFVDEKQGYAKGVLTQKLGPWRRPVAYLSKKLDPVAAGWPPCLRMVAAIAVLTKDAGKLTMGQPLVILAPHAVEALVKQPPDRWLSNARMTHYQAMLLDTDRVQFGPVVALNPATLLPLPEKEAPHDCLEILAETHGTRPDLTDQPIPDADYTWYTDGSSFLQEGQRRAGAAVTTETEVIWARALPAGTSAQRAELIALTQALKMAEGKKLNVYTDSRYAFATAHVHGEIYRRRGWLTSEGREIKNKNEILALLKALFLPKRLSIIHCPGHQKGNSAEARGNRMADQAAREAAMKAVLETSTLLAGKRTADGSEFEKRTADGSEFESPKKKAKVE

SEQ ID NO: 1031 - protein, 2091 aa, synthetic construct
MPAAKRVKLDGGDKKYSIGLDIGTNSVGWAVITDEYKVPSKKFKVLGNTDRHSIKKNLIGALLFDSGETAEATRLKRTARRRYTRRKNRICYLQEIFSNEMAKVDDSFFHRLEESFLVEEDKKHERHPIFGNIVDEVAYHEKYPTIYHLRKKLVDSTDKADLRLIYLALAHMIKFRGHFLIEGDLNPDNSDVDKLFIQLVQTYNQLFEENPINASGVDAKAILSARLSKSRRLENLIAQLPGEKKNGLFGNLIALSLGLTPNFKSNFDLAEDAKLQLSKDTYDDDLDNLLAQIGDQYADLFLAAKNLSDAILLSDILRVNTEITKAPLSASMIKRYDEHHQDLTLLKALVRQQLPEKYKEIFFDQSKNGYAGYIDGGASQEEFYKFIKPILEKMDGTEELLVKLNREDLLRKQRTFDNGSIPHQIHLGELHAILRRQEDFYPFLKDNREKIEKILTFRIPYYVGPLARGNSRFAWMTRKSEETITPWNFEEVVDKGASAQSFIERMTNFDKNLPNEKVLPKHSLLYEYFTVYNELTKVKYVTEGMRKPAFLSGEQKKAIVDLLFKTNRKVTVKQLKEDYFKKIECFDSVEISGVEDRFNASLGTYHDLLKIIKDKDFLDNEENEDILEDIVLTLTLFEDREMIEERLKTYAHLFDDKVMKQLKRRRYTGWGRLSRKLINGIRDKQSGKTILDFLKSDGFANRNFMQLIHDDSLTFKEDIQKAQVSGQGDSLHEHIANLAGSPAIKKGILQTVKVVDELVKVMGRHKPENIVIEMARENQTTQKGQKNSRERMKRIEEGIKELGSQILKEHPVENTQLQNEKLYLYYLQNGRDMYVDQELDINRLSDYDVDHIVPQSFLKDDSIDNKVLTRSDKARGKSDNVPSEEVVKKMKNYWRQLLNAKLITQRKFDNLTKAERGGLSELDKAGFIKRQLVETRQITKHVAQILDSRMNTKYDENDKLIREVKVITLKSKLVSDFRKDFQFYKVREINNYHHAHDAYLNAVVGTALIKKYPKLESEFVYGDYKVYDVRKMIAKSEQEIGKATAKYFFYSNIMNFFKTEITLANGEIRKRPLIETNGETGEIVWDKGRDFATVRKVLSMPQVNIVKKTEVQTGGFSKESILPKRNSDKLIARKKDWDPKKYGGFDSPTVAYSVLVVAKVEKGKSKKLKSVKELLGITIMERSSFEKNPIDFLEAKGYKEVKKDLIIKLPKYSLFELENGRKRMLASAGELQKGNELALPSKYVNFLYLASHYEKLKGSPEDNEQKQLFVEQHKHYLDEIIEQISEFSKRVILADANLDKVLSAYNKHRDKPIREQAENIIHLFTLTNLGAPAAFKYFDTTIDRKRYTSTKEVLDATLIHQSITGLYETRIDLSQLGGDGGGGGGSSGGTLNIEDEYRLHETSKEPDVPLGSTWLSDFPQAWAETGGMGLAVRQAPLIIPLKATSTPVSIKQYPMSQEARLGIKPHIQRLLDQGILVPCQSPWNTPLLPVKKPGTNDYRPVQDLREVNKRVEDIHPTVPNPYNLLSGLPPSHQWYTVLDLKDAFFCLRLHPTSQPLFAFEWRDPEMGISGQLTWTRLPQGFKNSPTLFNEALHRDLADFRIQHPDLILLQYVDDLLLAATSEQDCQRGTRALLQTLGNLGYRASAKKAQICQKQVKYLGYLLKEGQRWLTEARKETVMGQPTPKTPRQLREFLGKAGFCRLFIPGFAEMAAPLYPLTKPGTLFNWGPDQQKAYQEIKQALLTAPALGLPDLTKPFELFVDEKQGYAKGVLTQKLGPWRRPVAYLSKKLDPVAAGWPPCLRMVAAIAVLTKDAGKLTMGQPLVILAPHAVEALVKQPPDRWLSNARMTHYQAMLLDTDRVQFGPVVALNPATLLPLPEKEAPHDCLEILAETHGTRPDLTDQPIPDADYTWYTDGSSFLQEGQRRAGAAVTTETEVIWARALPAGTSAQRAELIALTQALKMAEGKKLNVYTDSRYAFATAHVHGEIYRRRGWLTSEGREIKNKNEILALLKALFLPKRLSIIHCPGHQKGNSAEARGNRMADQAAREAAMKAVLETSTLLAGKRTADGSEFEKRTADGSEFESPKKKAKVE

SEQ ID NO: 1032 - protein, 2094 aa, synthetic construct
MPAAKRVKLDGGDKKYSIGLDIGTNSVGWAVITDEYKVPSKKFKVLGNTDRHSIKKNLIGALLFDSGETAEATRLKRTARRRYTRRKNRICYLQEIFSNEMAKVDDSFFHRLEESFLVEEDKKHERHPIFGNIVDEVAYHEKYPTIYHLRKKLVDSTDKADLRLIYLALAHMIKFRGHFLIEGDLNPDNSDVDKLFIQLVQTYNQLFEENPINASGVDAKAILSARLSKSRRLENLIAQLPGEKKNGLFGNLIALSLGLTPNFKSNFDLAEDAKLQLSKDTYDDDLDNLLAQIGDQYADLFLAAKNLSDAILLSDILRVNTEITKAPLSASMIKRYDEHHQDLTLLKALVRQQLPEKYKEIFFDQSKNGYAGYIDGGASQEEFYKFIKPILEKMDGTEELLVKLNREDLLRKQRTFDNGSIPHQIHLGELHAILRRQEDFYPFLKDNREKIEKILTFRIPYYVGPLARGNSRFAWMTRKSEETITPWNFEEVVDKGASAQSFIERMTNFDKNLPNEKVLPKHSLLYEYFTVYNELTKVKYVTEGMRKPAFLSGEQKKAIVDLLFKTNRKVTVKQLKEDYFKKIECFDSVEISGVEDRFNASLGTYHDLLKIIKDKDFLDNEENEDILEDIVLTLTLFEDREMIEERLKTYAHLFDDKVMKQLKRRRYTGWGRLSRKLINGIRDKQSGKTILDFLKSDGFANRNFMQLIHDDSLTFKEDIQKAQVSGQGDSLHEHIANLAGSPAIKKGILQTVKVVDELVKVMGRHKPENIVIEMARENQTTQKGQKNSRERMKRIEEGIKELGSQILKEHPVENTQLQNEKLYLYYLQNGRDMYVDQELDINRLSDYDVDHIVPQSFLKDDSIDNKVLTRSDKARGKSDNVPSEEVVKKMKNYWRQLLNAKLITQRKFDNLTKAERGGLSELDKAGFIKRQLVETRQITKHVAQILDSRMNTKYDENDKLIREVKVITLKSKLVSDFRKDFQFYKVREINNYHHAHDAYLNAVVGTALIKKYPKLESEFVYGDYKVYDVRKMIAKSEQEIGKATAKYFFYSNIMNFFKTEITLANGEIRKRPLIETNGETGEIVWDKGRDFATVRKVLSMPQVNIVKKTEVQTGGFSKESILPKRNSDKLIARKKDWDPKKYGGFDSPTVAYSVLVVAKVEKGKSKKLKSVKELLGITIMERSSFEKNPIDFLEAKGYKEVKKDLIIKLPKYSLFELENGRKRMLASAGELQKGNELALPSKYVNFLYLASHYEKLKGSPEDNEQKQLFVEQHKHYLDEIIEQISEFSKRVILADANLDKVLSAYNKHRDKPIREQAENIIHLFTLTNLGAPAAFKYFDTTIDRKRYTSTKEVLDATLIHQSITGLYETRIDLSQLGGDGGPAPAPAPAPGGTLNIEDEYRLHETSKEPDVPLGSTWLSDFPQAWAETGGMGLAVRQAPLIIPLKATSTPVSIKQYPMSQEARLGIKPHIQRLLDQGILVPCQSPWNTPLLPVKKPGTNDYRPVQDLREVNKRVEDIHPTVPNPYNLLSGLPPSHQWYTVLDLKDAFFCLRLHPTSQPLFAFEWRDPEMGISGQLTWTRLPQGFKNSPTLFNEALHRDLADFRIQHPDLILLQYVDDLLLAATSEQDCQRGTRALLQTLGNLGYRASAKKAQICQKQVKYLGYLLKEGQRWLTEARKETVMGQPTPKTPRQLREFLGKAGFCRLFIPGFAEMAAPLYPLTKPGTLFNWGPDQQKAYQEIKQALLTAPALGLPDLTKPFELFVDEKQGYAKGVLTQKLGPWRRPVAYLSKKLDPVAAGWPPCLRMVAAIAVLTKDAGKLTMGQPLVILAPHAVEALVKQPPDRWLSNARMTHYQAMLLDTDRVQFGPVVALNPATLLPLPEKEAPHDCLEILAETHGTRPDLTDQPIPDADYTWYTDGSSFLQEGQRRAGAAVTTETEVIWARALPAGTSAQRAELIALTQALKMAEGKKLNVYTDSRYAFATAHVHGEIYRRRGWLTSEGREIKNKNEILALLKALFLPKRLSIIHCPGHQKGNSAEARGNRMADQAAREAAMKAVLETSTLLAGKRTADGSEFEKRTADGSEFESPKKKAKVE

SEQ ID NO: 1033 - protein, 2094 aa, synthetic construct
MPAAKRVKLDGGDKKYSIGLDIGTNSVGWAVITDEYKVPSKKFKVLGNTDRHSIKKNLIGALLFDSGETAEATRLKRTARRRYTRRKNRICYLQEIFSNEMAKVDDSFFHRLEESFLVEEDKKHERHPIFGNIVDEVAYHEKYPTIYHLRKKLVDSTDKADLRLIYLALAHMIKFRGHFLIEGDLNPDNSDVDKLFIQLVQTYNQLFEENPINASGVDAKAILSARLSKSRRLENLIAQLPGEKKNGLFGNLIALSLGLTPNFKSNFDLAEDAKLQLSKDTYDDDLDNLLAQIGDQYADLFLAAKNLSDAILLSDILRVNTEITKAPLSASMIKRYDEHHQDLTLLKALVRQQLPEKYKEIFFDQSKNGYAGYIDGGASQEEFYKFIKPILEKMDGTEELLVKLNREDLLRKQRTFDNGSIPHQIHLGELHAILRRQEDFYPFLKDNREKIEKILTFRIPYYVGPLARGNSRFAWMTRKSEETITPWNFEEVVDKGASAQSFIERMTNFDKNLPNEKVLPKHSLLYEYFTVYNELTKVKYVTEGMRKPAFLSGEQKKAIVDLLFKTNRKVTVKQLKEDYFKKIECFDSVEISGVEDRFNASLGTYHDLLKIIKDKDFLDNEENEDILEDIVLTLTLFEDREMIEERLKTYAHLFDDKVMKQLKRRRYTGWGRLSRKLINGIRDKQSGKTILDFLKSDGFANRNFMQLIHDDSLTFKEDIQKAQVSGQGDSLHEHIANLAGSPAIKKGILQTVKVVDELVKVMGRHKPENIVIEMARENQTTQKGQKNSRERMKRIEEGIKELGSQILKEHPVENTQLQNEKLYLYYLQNGRDMYVDQELDINRLSDYDVDHIVPQSFLKDDSIDNKVLTRSDKARGKSDNVPSEEVVKKMKNYWRQLLNAKLITQRKFDNLTKAERGGLSELDKAGFIKRQLVETRQITKHVAQILDSRMNTKYDENDKLIREVKVITLKSKLVSDFRKDFQFYKVREINNYHHAHDAYLNAVVGTALIKKYPKLESEFVYGDYKVYDVRKMIAKSEQEIGKATAKYFFYSNIMNFFKTEITLANGEIRKRPLIETNGETGEIVWDKGRDFATVRKVLSMPQVNIVKKTEVQTGGFSKESILPKRNSDKLIARKKDWDPKKYGGFDSPTVAYSVLVVAKVEKGKSKKLKSVKELLGITIMERSSFEKNPIDFLEAKGYKEVKKDLIIKLPKYSLFELENGRKRMLASAGELQKGNELALPSKYVNFLYLASHYEKLKGSPEDNEQKQLFVEQHKHYLDEIIEQISEFSKRVILADANLDKVLSAYNKHRDKPIREQAENIIHLFTLTNLGAPAAFKYFDTTIDRKRYTSTKEVLDATLIHQSITGLYETRIDLSQLGGDGGPAPGSSGGGGGTLNIEDEYRLHETSKEPDVPLGSTWLSDFPQAWAETGGMGLAVRQAPLIIPLKATSTPVSIKQYPMSQEARLGIKPHIQRLLDQGILVPCQSPWNTPLLPVKKPGTNDYRPVQDLREVNKRVEDIHPTVPNPYNLLSGLPPSHQWYTVLDLKDAFFCLRLHPTSQPLFAFEWRDPEMGISGQLTWTRLPQGFKNSPTLFNEALHRDLADFRIQHPDLILLQYVDDLLLAATSEQDCQRGTRALLQTLGNLGYRASAKKAQICQKQVKYLGYLLKEGQRWLTEARKETVMGQPTPKTPRQLREFLGKAGFCRLFIPGFAEMAAPLYPLTKPGTLFNWGPDQQKAYQEIKQALLTAPALGLPDLTKPFELFVDEKQGYAKGVLTQKLGPWRRPVAYLSKKLDPVAAGWPPCLRMVAAIAVLTKDAGKLTMGQPLVILAPHAVEALVKQPPDRWLSNARMTHYQAMLLDTDRVQFGPVVALNPATLLPLPEKEAPHDCLEILAETHGTRPDLTDQPIPDADYTWYTDGSSFLQEGQRRAGAAVTTETEVIWARALPAGTSAQRAELIALTQALKMAEGKKLNVYTDSRYAFATAHVHGEIYRRRGWLTSEGREIKNKNEILALLKALFLPKRLSIIHCPGHQKGNSAEARGNRMADQAAREAAMKAVLETSTLLAGKRTADGSEFEKRTADGSEFESPKKKAKVE

SEQ ID NO: 1034 - protein, 2096 aa, synthetic construct
MPAAKRVKLDGGDKKYSIGLDIGTNSVGWAVITDEYKVPSKKFKVLGNTDRHSIKKNLIGALLFDSGETAEATRLKRTARRRYTRRKNRICYLQEIFSNEMAKVDDSFFHRLEESFLVEEDKKHERHPIFGNIVDEVAYHEKYPTIYHLRKKLVDSTDKADLRLIYLALAHMIKFRGHFLIEGDLNPDNSDVDKLFIQLVQTYNQLFEENPINASGVDAKAILSARLSKSRRLENLIAQLPGEKKNGLFGNLIALSLGLTPNFKSNFDLAEDAKLQLSKDTYDDDLDNLLAQIGDQYADLFLAAKNLSDAILLSDILRVNTEITKAPLSASMIKRYDEHHQDLTLLKALVRQQLPEKYKEIFFDQSKNGYAGYIDGGASQEEFYKFIKPILEKMDGTEELLVKLNREDLLRKQRTFDNGSIPHQIHLGELHAILRRQEDFYPFLKDNREKIEKILTFRIPYYVGPLARGNSRFAWMTRKSEETITPWNFEEVVDKGASAQSFIERMTNFDKNLPNEKVLPKHSLLYEYFTVYNELTKVKYVTEGMRKPAFLSGEQKKAIVDLLFKTNRKVTVKQLKEDYFKKIECFDSVEISGVEDRFNASLGTYHDLLKIIKDKDFLDNEENEDILEDIVLTLTLFEDREMIEERLKTYAHLFDDKVMKQLKRRRYTGWGRLSRKLINGIRDKQSGKTILDFLKSDGFANRNFMQLIHDDSLTFKEDIQKAQVSGQGDSLHEHIANLAGSPAIKKGILQTVKVVDELVKVMGRHKPENIVIEMARENQTTQKGQKNSRERMKRIEEGIKELGSQILKEHPVENTQLQNEKLYLYYLQNGRDMYVDQELDINRLSDYDVDHIVPQSFLKDDSIDNKVLTRSDKARGKSDNVPSEEVVKKMKNYWRQLLNAKLITQRKFDNLTKAERGGLSELDKAGFIKRQLVETRQITKHVAQILDSRMNTKYDENDKLIREVKVITLKSKLVSDFRKDFQFYKVREINNYHHAHDAYLNAVVGTALIKKYPKLESEFVYGDYKVYDVRKMIAKSEQEIGKATAKYFFYSNIMNFFKTEITLANGEIRKRPLIETNGETGEIVWDKGRDFATVRKVLSMPQVNIVKKTEVQTGGFSKESILPKRNSDKLIARKKDWDPKKYGGFDSPTVAYSVLVVAKVEKGKSKKLKSVKELLGITIMERSSFEKNPIDFLEAKGYKEVKKDLIIKLPKYSLFELENGRKRMLASAGELQKGNELALPSKYVNFLYLASHYEKLKGSPEDNEQKQLFVEQHKHYLDEIIEQISEFSKRVILADANLDKVLSAYNKHRDKPIREQAENIIHLFTLTNLGAPAAFKYFDTTIDRKRYTSTKEVLDATLIHQSITGLYETRIDLSQLGGDGGPAPGGSEAAAKGGTLNIEDEYRLHETSKEPDVPLGSTWLSDFPQAWAETGGMGLAVRQAPLIIPLKATSTPVSIKQYPMSQEARLGIKPHIQRLLDQGILVPCQSPWNTPLLPVKKPGTNDYRPVQDLREVNKRVEDIHPTVPNPYNLLSGLPPSHQWYTVLDLKDAFFCLRLHPTSQPLFAFEWRDPEMGISGQLTWTRLPQGFKNSPTLFNEALHRDLADFRIQHPDLILLQYVDDLLLAATSEQDCQRGTRALLQTLGNLGYRASAKKAQICQKQVKYLGYLLKEGQRWLTEARKETVMGQPTPKTPRQLREFLGKAGFCRLFIPGFAEMAAPLYPLTKPGTLFNWGPDQQKAYQEIKQALLTAPALGLPDLTKPFELFVDEKQGYAKGVLTQKLGPWRRPVAYLSKKLDPVAAGWPPCLRMVAAIAVLTKDAGKLTMGQPLVILAPHAVEALVKQPPDRWLSNARMTHYQAMLLDTDRVQFGPVVALNPATLLPLPEKEAPHDCLEILAETHGTRPDLTDQPIPDADYTWYTDGSSFLQEGQRRAGAAVTTETEVIWARALPAGTSAQRAELIALTQALKMAEGKKLNVYTDSRYAFATAHVHGEIYRRRGWLTSEGREIKNKNEILALLKALFLPKRLSIIHCPGHQKGNSAEARGNRMADQAAREAAMKAVLETSTLLAGKRTADGSEFEKRTADGSEFESPKKKAKVE

SEQ ID NO: 1035 - protein, 2096 aa, synthetic construct
MPAAKRVKLDGGDKKYSIGLDIGTNSVGWAVITDEYKVPSKKFKVLGNTDRHSIKKNLIGALLFDSGETAEATRLKRTARRRYTRRKNRICYLQEIFSNEMAKVDDSFFHRLEESFLVEEDKKHERHPIFGNIVDEVAYHEKYPTIYHLRKKLVDSTDKADLRLIYLALAHMIKFRGHFLIEGDLNPDNSDVDKLFIQLVQTYNQLFEENPINASGVDAKAILSARLSKSRRLENLIAQLPGEKKNGLFGNLIALSLGLTPNFKSNFDLAEDAKLQLSKDTYDDDLDNLLAQIGDQYADLFLAAKNLSDAILLSDILRVNTEITKAPLSASMIKRYDEHHQDLTLLKALVRQQLPEKYKEIFFDQSKNGYAGYIDGGASQEEFYKFIKPILEKMDGTEELLVKLNREDLLRKQRTFDNGSIPHQIHLGELHAILRRQEDFYPFLKDNREKIEKILTFRIPYYVGPLARGNSRFAWMTRKSEETITPWNFEEVVDKGASAQSFIERMTNFDKNLPNEKVLPKHSLLYEYFTVYNELTKVKYVTEGMRKPAFLSGEQKKAIVDLLFKTNRKVTVKQLKEDYFKKIECFDSVEISGVEDRFNASLGTYHDLLKIIKDKDFLDNEENEDILEDIVLTLTLFEDREMIEERLKTYAHLFDDKVMKQLKRRRYTGWGRLSRKLINGIRDKQSGKTILDFLKSDGFANRNFMQLIHDDSLTFKEDIQKAQVSGQGDSLHEHIANLAGSPAIKKGILQTVKVVDELVKVMGRHKPENIVIEMARENQTTQKGQKNSRERMKRIEEGIKELGSQILKEHPVENTQLQNEKLYLYYLQNGRDMYVDQELDINRLSDYDVDHIVPQSFLKDDSIDNKVLTRSDKARGKSDNVPSEEVVKKMKNYWRQLLNAKLITQRKFDNLTKAERGGLSELDKAGFIKRQLVETRQITKHVAQILDSRMNTKYDENDKLIREVKVITLKSKLVSDFRKDFQFYKVREINNYHHAHDAYLNAVVGTALIKKYPKLESEFVYGDYKVYDVRKMIAKSEQEIGKATAKYFFYSNIMNFFKTEITLANGEIRKRPLIETNGETGEIVWDKGRDFATVRKVLSMPQVNIVKKTEVQTGGFSKESILPKRNSDKLIARKKDWDPKKYGGFDSPTVAYSVLVVAKVEKGKSKKLKSVKELLGITIMERSSFEKNPIDFLEAKGYKEVKKDLIIKLPKYSLFELENGRKRMLASAGELQKGNELALPSKYVNFLYLASHYEKLKGSPEDNEQKQLFVEQHKHYLDEIIEQISEFSKRVILADANLDKVLSAYNKHRDKPIREQAENIIHLFTLTNLGAPAAFKYFDTTIDRKRYTSTKEVLDATLIHQSITGLYETRIDLSQLGGDGGGGSEAAAKPAPGGTLNIEDEYRLHETSKEPDVPLGSTWLSDFPQAWAETGGMGLAVRQAPLIIPLKATSTPVSIKQYPMSQEARLGIKPHIQRLLDQGILVPCQSPWNTPLLPVKKPGTNDYRPVQDLREVNKRVEDIHPTVPNPYNLLSGLPPSHQWYTVLDLKDAFFCLRLHPTSQPLFAFEWRDPEMGISGQLTWTRLPQGFKNSPTLFNEALHRDLADFRIQHPDLILLQYVDDLLLAATSEQDCQRGTRALLQTLGNLGYRASAKKAQICQKQVKYLGYLLKEGQRWLTEARKETVMGQPTPKTPRQLREFLGKAGFCRLFIPGFAEMAAPLYPLTKPGTLFNWGPDQQKAYQEIKQALLTAPALGLPDLTKPFELFVDEKQGYAKGVLTQKLGPWRRPVAYLSKKLDPVAAGWPPCLRMVAAIAVLTKDAGKLTMGQPLVILAPHAVEALVKQPPDRWLSNARMTHYQAMLLDTDRVQFGPVVALNPATLLPLPEKEAPHDCLEILAETHGTRPDLTDQPIPDADYTWYTDGSSFLQEGQRRAGAAVTTETEVIWARALPAGTSAQRAELIALTQALKMAEGKKLNVYTDSRYAFATAHVHGEIYRRRGWLTSEGREIKNKNEILALLKALFLPKRLSIIHCPGHQKGNSAEARGNRMADQAAREAAMKAVLETSTLLAGKRTADGSEFEKRTADGSEFESPKKKAKVE

SEQ ID NO: 1036 - protein, 2118 aa, synthetic construct
MPAAKRVKLDGGDKKYSIGLDIGTNSVGWAVITDEYKVPSKKFKVLGNTDRHSIKKNLIGALLFDSGETAEATRLKRTARRRYTRRKNRICYLQEIFSNEMAKVDDSFFHRLEESFLVEEDKKHERHPIFGNIVDEVAYHEKYPTIYHLRKKLVDSTDKADLRLIYLALAHMIKFRGHFLIEGDLNPDNSDVDKLFIQLVQTYNQLFEENPINASGVDAKAILSARLSKSRRLENLIAQLPGEKKNGLFGNLIALSLGLTPNFKSNFDLAEDAKLQLSKDTYDDDLDNLLAQIGDQYADLFLAAKNLSDAILLSDILRVNTEITKAPLSASMIKRYDEHHQDLTLLKALVRQQLPEKYKEIFFDQSKNGYAGYIDGGASQEEFYKFIKPILEKMDGTEELLVKLNREDLLRKQRTFDNGSIPHQIHLGELHAILRRQEDFYPFLKDNREKIEKILTFRIPYYVGPLARGNSRFAWMTRKSEETITPWNFEEVVDKGASAQSFIERMTNFDKNLPNEKVLPKHSLLYEYFTVYNELTKVKYVTEGMRKPAFLSGEQKKAIVDLLFKTNRKVTVKQLKEDYFKKIECFDSVEISGVEDRFNASLGTYHDLLKIIKDKDFLDNEENEDILEDIVLTLTLFEDREMIEERLKTYAHLFDDKVMKQLKRRRYTGWGRLSRKLINGIRDKQSGKTILDFLKSDGFANRNFMQLIHDDSLTFKEDIQKAQVSGQGDSLHEHIANLAGSPAIKKGILQTVKVVDELVKVMGRHKPENIVIEMARENQTTQKGQKNSRERMKRIEEGIKELGSQILKEHPVENTQLQNEKLYLYYLQNGRDMYVDQELDINRLSDYDVDHIVPQSFLKDDSIDNKVLTRSDKARGKSDNVPSEEVVKKMKNYWRQLLNAKLITQRKFDNLTKAERGGLSELDKAGFIKRQLVETRQITKHVAQILDSRMNTKYDENDKLIREVKVITLKSKLVSDFRKDFQFYKVREINNYHHAHDAYLNAVVGTALIKKYPKLESEFVYGDYKVYDVRKMIAKSEQEIGKATAKYFFYSNIMNFFKTEITLANGEIRKRPLIETNGETGEIVWDKGRDFATVRKVLSMPQVNIVKKTEVQTGGFSKESILPKRNSDKLIARKKDWDPKKYGGFDSPTVAYSVLVVAKVEKGKSKKLKSVKELLGITIMERSSFEKNPIDFLEAKGYKEVKKDLIIKLPKYSLFELENGRKRMLASAGELQKGNELALPSKYVNFLYLASHYEKLKGSPEDNEQKQLFVEQHKHYLDEIIEQISEFSKRVILADANLDKVLSAYNKHRDKPIREQAENIIHLFTLTNLGAPAAFKYFDTTIDRKRYTSTKEVLDATLIHQSITGLYETRIDLSQLGGDGGSGGSSGGSSGSETPGTSESATPESSGGSSGGSSGGTLNIEDEYRLHETSKEPDVPLGSTWLSDFPQAWAETGGMGLAVRQAPLIIPLKATSTPVSIKQYPMSQEARLGIKPHIQRLLDQGILVPCQSPWNTPLLPVKKPGTNDYRPVQDLREVNKRVEDIHPTVPNPYNLLSGLPPSHQWYTVLDLKDAFFCLRLHPTSQPLFAFEWRDPEMGISGQLTWTRLPQGFKNSPTLFNEALHRDLADFRIQHPDLILLQYVDDLLLAATSEQDCQRGTRALLQTLGNLGYRASAKKAQICQKQVKYLGYLLKEGQRWLTEARKETVMGQPTPKTPRQLREFLGKAGFCRLFIPGFAEMAAPLYPLTKPGTLFNWGPDQQKAYQEIKQALLTAPALGLPDLTKPFELFVDEKQGYAKGVLTQKLGPWRRPVAYLSKKLDPVAAGWPPCLRMVAAIAVLTKDAGKLTMGQPLVILAPHAVEALVKQPPDRWLSNARMTHYQAMLLDTDRVQFGPVVALNPATLLPLPEKEAPHDCLEILAETHGTRPDLTDQPIPDADYTWYTDGSSFLQEGQRRAGAAVTTETEVIWARALPAGTSAQRAELIALTQALKMAEGKKLNVYTDSRYAFATAHVHGEIYRRRGWLTSEGREIKNKNEILALLKALFLPKRLSIIHCPGHQKGNSAEARGNRMADQAAREAAMKAVLETSTLLAGKRTADGSEFEKRTADGSEFESPKKKAKVE

SEQ ID NO: 1037 - protein, 2100 aa, synthetic construct
MPAAKRVKLDGGDKKYSIGLDIGTNSVGWAVITDEYKVPSKKFKVLGNTDRHSIKKNLIGALLFDSGETAEATRLKRTARRRYTRRKNRICYLQEIFSNEMAKVDDSFFHRLEESFLVEEDKKHERHPIFGNIVDEVAYHEKYPTIYHLRKKLVDSTDKADLRLIYLALAHMIKFRGHFLIEGDLNPDNSDVDKLFIQLVQTYNQLFEENPINASGVDAKAILSARLSKSRRLENLIAQLPGEKKNGLFGNLIALSLGLTPNFKSNFDLAEDAKLQLSKDTYDDDLDNLLAQIGDQYADLFLAAKNLSDAILLSDILRVNTEITKAPLSASMIKRYDEHHQDLTLLKALVRQQLPEKYKEIFFDQSKNGYAGYIDGGASQEEFYKFIKPILEKMDGTEELLVKLNREDLLRKQRTFDNGSIPHQIHLGELHAILRRQEDFYPFLKDNREKIEKILTFRIPYYVGPLARGNSRFAWMTRKSEETITPWNFEEVVDKGASAQSFIERMTNFDKNLPNEKVLPKHSLLYEYFTVYNELTKVKYVTEGMRKPAFLSGEQKKAIVDLLFKTNRKVTVKQLKEDYFKKIECFDSVEISGVEDRFNASLGTYHDLLKIIKDKDFLDNEENEDILEDIVLTLTLFEDREMIEERLKTYAHLFDDKVMKQLKRRRYTGWGRLSRKLINGIRDKQSGKTILDFLKSDGFANRNFMQLIHDDSLTFKEDIQKAQVSGQGDSLHEHIANLAGSPAIKKGILQTVKVVDELVKVMGRHKPENIVIEMARENQTTQKGQKNSRERMKRIEEGIKELGSQILKEHPVENTQLQNEKLYLYYLQNGRDMYVDQELDINRLSDYDVDHIVPQSFLKDDSIDNKVLTRSDKARGKSDNVPSEEVVKKMKNYWRQLLNAKLITQRKFDNLTKAERGGLSELDKAGFIKRQLVETRQITKHVAQILDSRMNTKYDENDKLIREVKVITLKSKLVSDFRKDFQFYKVREINNYHHAHDAYLNAVVGTALIKKYPKLESEFVYGDYKVYDVRKMIAKSEQEIGKATAKYFFYSNIMNFFKTEITLANGEIRKRPLIETNGETGEIVWDKGRDFATVRKVLSMPQVNIVKKTEVQTGGFSKESILPKRNSDKLIARKKDWDPKKYGGFDSPTVAYSVLVVAKVEKGKSKKLKSVKELLGITIMERSSFEKNPIDFLEAKGYKEVKKDLIIKLPKYSLFELENGRKRMLASAGELQKGNELALPSKYVNFLYLASHYEKLKGSPEDNEQKQLFVEQHKHYLDEIIEQISEFSKRVILADANLDKVLSAYNKHRDKPIREQAENIIHLFTLTNLGAPAAFKYFDTTIDRKRYTSTKEVLDATLIHQSITGLYETRIDLSQLGGDGGEAAAKGGGGSEAAAKGGTLNIEDEYRLHETSKEPDVPLGSTWLSDFPQAWAETGGMGLAVRQAPLIIPLKATSTPVSIKQYPMSQEARLGIKPHIQRLLDQGILVPCQSPWNTPLLPVKKPGTNDYRPVQDLREVNKRVEDIHPTVPNPYNLLSGLPPSHQWYTVLDLKDAFFCLRLHPTSQPLFAFEWRDPEMGISGQLTWTRLPQGFKNSPTLFNEALHRDLADFRIQHPDLILLQYVDDLLLAATSEQDCQRGTRALLQTLGNLGYRASAKKAQICQKQVKYLGYLLKEGQRWLTEARKETVMGQPTPKTPRQLREFLGKAGFCRLFIPGFAEMAAPLYPLTKPGTLFNWGPDQQKAYQEIKQALLTAPALGLPDLTKPFELFVDEKQGYAKGVLTQKLGPWRRPVAYLSKKLDPVAAGWPPCLRMVAAIAVLTKDAGKLTMGQPLVILAPHAVEALVKQPPDRWLSNARMTHYQAMLLDTDRVQFGPVVALNPATLLPLPEKEAPHDCLEILAETHGTRPDLTDQPIPDADYTWYTDGSSFLQEGQRRAGAAVTTETEVIWARALPAGTSAQRAELIALTQALKMAEGKKLNVYTDSRYAFATAHVHGEIYRRRGWLTSEGREIKNKNEILALLKALFLPKRLSIIHCPGHQKGNSAEARGNRMADQAAREAAMKAVLETSTLLAGKRTADGSEFEKRTADGSEFESPKKKAKVE

SEQ ID NO: 1038 - protein, 2094 aa, synthetic construct
MPAAKRVKLDGGDKKYSIGLDIGTNSVGWAVITDEYKVPSKKFKVLGNTDRHSIKKNLIGALLFDSGETAEATRLKRTARRRYTRRKNRICYLQEIFSNEMAKVDDSFFHRLEESFLVEEDKKHERHPIFGNIVDEVAYHEKYPTIYHLRKKLVDSTDKADLRLIYLALAHMIKFRGHFLIEGDLNPDNSDVDKLFIQLVQTYNQLFEENPINASGVDAKAILSARLSKSRRLENLIAQLPGEKKNGLFGNLIALSLGLTPNFKSNFDLAEDAKLQLSKDTYDDDLDNLLAQIGDQYADLFLAAKNLSDAILLSDILRVNTEITKAPLSASMIKRYDEHHQDLTLLKALVRQQLPEKYKEIFFDQSKNGYAGYIDGGASQEEFYKFIKPILEKMDGTEELLVKLNREDLLRKQRTFDNGSIPHQIHLGELHAILRRQEDFYPFLKDNREKIEKILTFRIPYYVGPLARGNSRFAWMTRKSEETITPWNFEEVVDKGASAQSFIERMTNFDKNLPNEKVLPKHSLLYEYFTVYNELTKVKYVTEGMRKPAFLSGEQKKAIVDLLFKTNRKVTVKQLKEDYFKKIECFDSVEISGVEDRFNASLGTYHDLLKIIKDKDFLDNEENEDILEDIVLTLTLFEDREMIEERLKTYAHLFDDKVMKQLKRRRYTGWGRLSRKLINGIRDKQSGKTILDFLKSDGFANRNFMQLIHDDSLTFKEDIQKAQVSGQGDSLHEHIANLAGSPAIKKGILQTVKVVDELVKVMGRHKPENIVIEMARENQTTQKGQKNSRERMKRIEEGIKELGSQILKEHPVENTQLQNEKLYLYYLQNGRDMYVDQELDINRLSDYDVDHIVPQSFLKDDSIDNKVLTRSDKARGKSDNVPSEEVVKKMKNYWRQLLNAKLITQRKFDNLTKAERGGLSELDKAGFIKRQLVETRQITKHVAQILDSRMNTKYDENDKLIREVKVITLKSKLVSDFRKDFQFYKVREINNYHHAHDAYLNAVVGTALIKKYPKLESEFVYGDYKVYDVRKMIAKSEQEIGKATAKYFFYSNIMNFFKTEITLANGEIRKRPLIETNGETGEIVWDKGRDFATVRKVLSMPQVNIVKKTEVQTGGFSKESILPKRNSDKLIARKKDWDPKKYGGFDSPTVAYSVLVVAKVEKGKSKKLKSVKELLGITIMERSSFEKNPIDFLEAKGYKEVKKDLIIKLPKYSLFELENGRKRMLASAGELQKGNELALPSKYVNFLYLASHYEKLKGSPEDNEQKQLFVEQHKHYLDEIIEQISEFSKRVILADANLDKVLSAYNKHRDKPIREQAENIIHLFTLTNLGAPAAFKYFDTTIDRKRYTSTKEVLDATLIHQSITGLYETRIDLSQLGGDGGGSSPAPGGGGGTLNIEDEYRLHETSKEPDVPLGSTWLSDFPQAWAETGGMGLAVRQAPLIIPLKATSTPVSIKQYPMSQEARLGIKPHIQRLLDQGILVPCQSPWNTPLLPVKKPGTNDYRPVQDLREVNKRVEDIHPTVPNPYNLLSGLPPSHQWYTVLDLKDAFFCLRLHPTSQPLFAFEWRDPEMGISGQLTWTRLPQGFKNSPTLFNEALHRDLADFRIQHPDLILLQYVDDLLLAATSEQDCQRGTRALLQTLGNLGYRASAKKAQICQKQVKYLGYLLKEGQRWLTEARKETVMGQPTPKTPRQLREFLGKAGFCRLFIPGFAEMAAPLYPLTKPGTLFNWGPDQQKAYQEIKQALLTAPALGLPDLTKPFELFVDEKQGYAKGVLTQKLGPWRRPVAYLSKKLDPVAAGWPPCLRMVAAIAVLTKDAGKLTMGQPLVILAPHAVEALVKQPPDRWLSNARMTHYQAMLLDTDRVQFGPVVALNPATLLPLPEKEAPHDCLEILAETHGTRPDLTDQPIPDADYTWYTDGSSFLQEGQRRAGAAVTTETEVIWARALPAGTSAQRAELIALTQALKMAEGKKLNVYTDSRYAFATAHVHGEIYRRRGWLTSEGREIKNKNEILALLKALFLPKRLSIIHCPGHQKGNSAEARGNRMADQAAREAAMKAVLETSTLLAGKRTADGSEFEKRTADGSEFESPKKKAKVE

SEQ ID NO: 1039 - protein, 2096 aa, synthetic construct
MPAAKRVKLDGGDKKYSIGLDIGTNSVGWAVITDEYKVPSKKFKVLGNTDRHSIKKNLIGALLFDSGETAEATRLKRTARRRYTRRKNRICYLQEIFSNEMAKVDDSFFHRLEESFLVEEDKKHERHPIFGNIVDEVAYHEKYPTIYHLRKKLVDSTDKADLRLIYLALAHMIKFRGHFLIEGDLNPDNSDVDKLFIQLVQTYNQLFEENPINASGVDAKAILSARLSKSRRLENLIAQLPGEKKNGLFGNLIALSLGLTPNFKSNFDLAEDAKLQLSKDTYDDDLDNLLAQIGDQYADLFLAAKNLSDAILLSDILRVNTEITKAPLSASMIKRYDEHHQDLTLLKALVRQQLPEKYKEIFFDQSKNGYAGYIDGGASQEEFYKFIKPILEKMDGTEELLVKLNREDLLRKQRTFDNGSIPHQIHLGELHAILRRQEDFYPFLKDNREKIEKILTFRIPYYVGPLARGNSRFAWMTRKSEETITPWNFEEVVDKGASAQSFIERMTNFDKNLPNEKVLPKHSLLYEYFTVYNELTKVKYVTEGMRKPAFLSGEQKKAIVDLLFKTNRKVTVKQLKEDYFKKIECFDSVEISGVEDRFNASLGTYHDLLKIIKDKDFLDNEENEDILEDIVLTLTLFEDREMIEERLKTYAHLFDDKVMKQLKRRRYTGWGRLSRKLINGIRDKQSGKTILDFLKSDGFANRNFMQLIHDDSLTFKEDIQKAQVSGQGDSLHEHIANLAGSPAIKKGILQTVKVVDELVKVMGRHKPENIVIEMARENQTTQKGQKNSRERMKRIEEGIKELGSQILKEHPVENTQLQNEKLYLYYLQNGRDMYVDQELDINRLSDYDVDHIVPQSFLKDDSIDNKVLTRSDKARGKSDNVPSEEVVKKMKNYWRQLLNAKLITQRKFDNLTKAERGGLSELDKAGFIKRQLVETRQITKHVAQILDSRMNTKYDENDKLIREVKVITLKSKLVSDFRKDFQFYKVREINNYHHAHDAYLNAVVGTALIKKYPKLESEFVYGDYKVYDVRKMIAKSEQEIGKATAKYFFYSNIMNFFKTEITLANGEIRKRPLIETNGETGEIVWDKGRDFATVRKVLSMPQVNIVKKTEVQTGGFSKESILPKRNSDKLIARKKDWDPKKYGGFDSPTVAYSVLVVAKVEKGKSKKLKSVKELLGITIMERSSFEKNPIDFLEAKGYKEVKKDLIIKLPKYSLFELENGRKRMLASAGELQKGNELALPSKYVNFLYLASHYEKLKGSPEDNEQKQLFVEQHKHYLDEIIEQISEFSKRVILADANLDKVLSAYNKHRDKPIREQAENIIHLFTLTNLGAPAAFKYFDTTIDRKRYTSTKEVLDATLIHQSITGLYETRIDLSQLGGDGGEAAAKGSSPAPGGTLNIEDEYRLHETSKEPDVPLGSTWLSDFPQAWAETGGMGLAVRQAPLIIPLKATSTPVSIKQYPMSQEARLGIKPHIQRLLDQGILVPCQSPWNTPLLPVKKPGTNDYRPVQDLREVNKRVEDIHPTVPNPYNLLSGLPPSHQWYTVLDLKDAFFCLRLHPTSQPLFAFEWRDPEMGISGQLTWTRLPQGFKNSPTLFNEALHRDLADFRIQHPDLILLQYVDDLLLAATSEQDCQRGTRALLQTLGNLGYRASAKKAQICQKQVKYLGYLLKEGQRWLTEARKETVMGQPTPKTPRQLREFLGKAGFCRLFIPGFAEMAAPLYPLTKPGTLFNWGPDQQKAYQEIKQALLTAPALGLPDLTKPFELFVDEKQGYAKGVLTQKLGPWRRPVAYLSKKLDPVAAGWPPCLRMVAAIAVLTKDAGKLTMGQPLVILAPHAVEALVKQPPDRWLSNARMTHYQAMLLDTDRVQFGPVVALNPATLLPLPEKEAPHDCLEILAETHGTRPDLTDQPIPDADYTWYTDGSSFLQEGQRRAGAAVTTETEVIWARALPAGTSAQRAELIALTQALKMAEGKKLNVYTDSRYAFATAHVHGEIYRRRGWLTSEGREIKNKNEILALLKALFLPKRLSIIHCPGHQKGNSAEARGNRMADQAAREAAMKAVLETSTLLAGKRTADGSEFEKRTADGSEFESPKKKAKVE

SEQ ID NO: 1040 - protein, 2091 aa, synthetic construct
MPAAKRVKLDGGDKKYSIGLDIGTNSVGWAVITDEYKVPSKKFKVLGNTDRHSIKKNLIGALLFDSGETAEATRLKRTARRRYTRRKNRICYLQEIFSNEMAKVDDSFFHRLEESFLVEEDKKHERHPIFGNIVDEVAYHEKYPTIYHLRKKLVDSTDKADLRLIYLALAHMIKFRGHFLIEGDLNPDNSDVDKLFIQLVQTYNQLFEENPINASGVDAKAILSARLSKSRRLENLIAQLPGEKKNGLFGNLIALSLGLTPNFKSNFDLAEDAKLQLSKDTYDDDLDNLLAQIGDQYADLFLAAKNLSDAILLSDILRVNTEITKAPLSASMIKRYDEHHQDLTLLKALVRQQLPEKYKEIFFDQSKNGYAGYIDGGASQEEFYKFIKPILEKMDGTEELLVKLNREDLLRKQRTFDNGSIPHQIHLGELHAILRRQEDFYPFLKDNREKIEKILTFRIPYYVGPLARGNSRFAWMTRKSEETITPWNFEEVVDKGASAQSFIERMTNFDKNLPNEKVLPKHSLLYEYFTVYNELTKVKYVTEGMRKPAFLSGEQKKAIVDLLFKTNRKVTVKQLKEDYFKKIECFDSVEISGVEDRFNASLGTYHDLLKIIKDKDFLDNEENEDILEDIVLTLTLFEDREMIEERLKTYAHLFDDKVMKQLKRRRYTGWGRLSRKLINGIRDKQSGKTILDFLKSDGFANRNFMQLIHDDSLTFKEDIQKAQVSGQGDSLHEHIANLAGSPAIKKGILQTVKVVDELVKVMGRHKPENIVIEMARENQTTQKGQKNSRERMKRIEEGIKELGSQILKEHPVENTQLQNEKLYLYYLQNGRDMYVDQELDINRLSDYDVDHIVPQSFLKDDSIDNKVLTRSDKARGKSDNVPSEEVVKKMKNYWRQLLNAKLITQRKFDNLTKAERGGLSELDKAGFIKRQLVETRQITKHVAQILDSRMNTKYDENDKLIREVKVITLKSKLVSDFRKDFQFYKVREINNYHHAHDAYLNAVVGTALIKKYPKLESEFVYGDYKVYDVRKMIAKSEQEIGKATAKYFFYSNIMNFFKTEITLANGEIRKRPLIETNGETGEIVWDKGRDFATVRKVLSMPQVNIVKKTEVQTGGFSKESILPKRNSDKLIARKKDWDPKKYGGFDSPTVAYSVLVVAKVEKGKSKKLKSVKELLGITIMERSSFEKNPIDFLEAKGYKEVKKDLIIKLPKYSLFELENGRKRMLASAGELQKGNELALPSKYVNFLYLASHYEKLKGSPEDNEQKQLFVEQHKHYLDEIIEQISEFSKRVILADANLDKVLSAYNKHRDKPIREQAENIIHLFTLTNLGAPAAFKYFDTTIDRKRYTSTKEVLDATLIHQSITGLYETRIDLSQLGGDGGGGSGGSGGTLNIEDEYRLHETSKEPDVPLGSTWLSDFPQAWAETGGMGLAVRQAPLIIPLKATSTPVSIKQYPMSQEARLGIKPHIQRLLDQGILVPCQSPWNTPLLPVKKPGTNDYRPVQDLREVNKRVEDIHPTVPNPYNLLSGLPPSHQWYTVLDLKDAFFCLRLHPTSQPLFAFEWRDPEMGISGQLTWTRLPQGFKNSPTLFNEALHRDLADFRIQHPDLILLQYVDDLLLAATSEQDCQRGTRALLQTLGNLGYRASAKKAQICQKQVKYLGYLLKEGQRWLTEARKETVMGQPTPKTPRQLREFLGKAGFCRLFIPGFAEMAAPLYPLTKPGTLFNWGPDQQKAYQEIKQALLTAPALGLPDLTKPFELFVDEKQGYAKGVLTQKLGPWRRPVAYLSKKLDPVAAGWPPCLRMVAAIAVLTKDAGKLTMGQPLVILAPHAVEALVKQPPDRWLSNARMTHYQAMLLDTDRVQFGPVVALNPATLLPLPEKEAPHDCLEILAETHGTRPDLTDQPIPDADYTWYTDGSSFLQEGQRRAGAAVTTETEVIWARALPAGTSAQRAELIALTQALKMAEGKKLNVYTDSRYAFATAHVHGEIYRRRGWLTSEGREIKNKNEILALLKALFLPKRLSIIHCPGHQKGNSAEARGNRMADQAAREAAMKAVLETSTLLAGKRTADGSEFEKRTADGSEFESPKKKAKVE

SEQ ID NO: 1041 - protein, 2096 aa, synthetic construct
MPAAKRVKLDGGDKKYSIGLDIGTNSVGWAVITDEYKVPSKKFKVLGNTDRHSIKKNLIGALLFDSGETAEATRLKRTARRRYTRRKNRICYLQEIFSNEMAKVDDSFFHRLEESFLVEEDKKHERHPIFGNIVDEVAYHEKYPTIYHLRKKLVDSTDKADLRLIYLALAHMIKFRGHFLIEGDLNPDNSDVDKLFIQLVQTYNQLFEENPINASGVDAKAILSARLSKSRRLENLIAQLPGEKKNGLFGNLIALSLGLTPNFKSNFDLAEDAKLQLSKDTYDDDLDNLLAQIGDQYADLFLAAKNLSDAILLSDILRVNTEITKAPLSASMIKRYDEHHQDLTLLKALVRQQLPEKYKEIFFDQSKNGYAGYIDGGASQEEFYKFIKPILEKMDGTEELLVKLNREDLLRKQRTFDNGSIPHQIHLGELHAILRRQEDFYPFLKDNREKIEKILTFRIPYYVGPLARGNSRFAWMTRKSEETITPWNFEEVVDKGASAQSFIERMTNFDKNLPNEKVLPKHSLLYEYFTVYNELTKVKYVTEGMRKPAFLSGEQKKAIVDLLFKTNRKVTVKQLKEDYFKKIECFDSVEISGVEDRFNASLGTYHDLLKIIKDKDFLDNEENEDILEDIVLTLTLFEDREMIEERLKTYAHLFDDKVMKQLKRRRYTGWGRLSRKLINGIRDKQSGKTILDFLKSDGFANRNFMQLIHDDSLTFKEDIQKAQVSGQGDSLHEHIANLAGSPAIKKGILQTVKVVDELVKVMGRHKPENIVIEMARENQTTQKGQKNSRERMKRIEEGIKELGSQILKEHPVENTQLQNEKLYLYYLQNGRDMYVDQELDINRLSDYDVDHIVPQSFLKDDSIDNKVLTRSDKARGKSDNVPSEEVVKKMKNYWRQLLNAKLITQRKFDNLTKAERGGLSELDKAGFIKRQLVETRQITKHVAQILDSRMNTKYDENDKLIREVKVITLKSKLVSDFRKDFQFYKVREINNYHHAHDAYLNAVVGTALIKKYPKLESEFVYGDYKVYDVRKMIAKSEQEIGKATAKYFFYSNIMNFFKTEITLANGEIRKRPLIETNGETGEIVWDKGRDFATVRKVLSMPQVNIVKKTEVQTGGFSKESILPKRNSDKLIARKKDWDPKKYGGFDSPTVAYSVLVVAKVEKGKSKKLKSVKELLGITIMERSSFEKNPIDFLEAKGYKEVKKDLIIKLPKYSLFELENGRKRMLASAGELQKGNELALPSKYVNFLYLASHYEKLKGSPEDNEQKQLFVEQHKHYLDEIIEQISEFSKRVILADANLDKVLSAYNKHRDKPIREQAENIIHLFTLTNLGAPAAFKYFDTTIDRKRYTSTKEVLDATLIHQSITGLYETRIDLSQLGGDGGEAAAKGGSPAPGGTLNIEDEYRLHETSKEPDVPLGSTWLSDFPQAWAETGGMGLAVRQAPLIIPLKATSTPVSIKQYPMSQEARLGIKPHIQRLLDQGILVPCQSPWNTPLLPVKKPGTNDYRPVQDLREVNKRVEDIHPTVPNPYNLLSGLPPSHQWYTVLDLKDAFFCLRLHPTSQPLFAFEWRDPEMGISGQLTWTRLPQGFKNSPTLFNEALHRDLADFRIQHPDLILLQYVDDLLLAATSEQDCQRGTRALLQTLGNLGYRASAKKAQICQKQVKYLGYLLKEGQRWLTEARKETVMGQPTPKTPRQLREFLGKAGFCRLFIPGFAEMAAPLYPLTKPGTLFNWGPDQQKAYQEIKQALLTAPALGLPDLTKPFELFVDEKQGYAKGVLTQKLGPWRRPVAYLSKKLDPVAAGWPPCLRMVAAIAVLTKDAGKLTMGQPLVILAPHAVEALVKQPPDRWLSNARMTHYQAMLLDTDRVQFGPVVALNPATLLPLPEKEAPHDCLEILAETHGTRPDLTDQPIPDADYTWYTDGSSFLQEGQRRAGAAVTTETEVIWARALPAGTSAQRAELIALTQALKMAEGKKLNVYTDSRYAFATAHVHGEIYRRRGWLTSEGREIKNKNEILALLKALFLPKRLSIIHCPGHQKGNSAEARGNRMADQAAREAAMKAVLETSTLLAGKRTADGSEFEKRTADGSEFESPKKKAKVE

SEQ ID NO: 1042 - protein, 2100 aa, synthetic construct
MPAAKRVKLDGGDKKYSIGLDIGTNSVGWAVITDEYKVPSKKFKVLGNTDRHSIKKNLIGALLFDSGETAEATRLKRTARRRYTRRKNRICYLQEIFSNEMAKVDDSFFHRLEESFLVEEDKKHERHPIFGNIVDEVAYHEKYPTIYHLRKKLVDSTDKADLRLIYLALAHMIKFRGHFLIEGDLNPDNSDVDKLFIQLVQTYNQLFEENPINASGVDAKAILSARLSKSRRLENLIAQLPGEKKNGLFGNLIALSLGLTPNFKSNFDLAEDAKLQLSKDTYDDDLDNLLAQIGDQYADLFLAAKNLSDAILLSDILRVNTEITKAPLSASMIKRYDEHHQDLTLLKALVRQQLPEKYKEIFFDQSKNGYAGYIDGGASQEEFYKFIKPILEKMDGTEELLVKLNREDLLRKQRTFDNGSIPHQIHLGELHAILRRQEDFYPFLKDNREKIEKILTFRIPYYVGPLARGNSRFAWMTRKSEETITPWNFEEVVDKGASAQSFIERMTNFDKNLPNEKVLPKHSLLYEYFTVYNELTKVKYVTEGMRKPAFLSGEQKKAIVDLLFKTNRKVTVKQLKEDYFKKIECFDSVEISGVEDRFNASLGTYHDLLKIIKDKDFLDNEENEDILEDIVLTLTLFEDREMIEERLKTYAHLFDDKVMKQLKRRRYTGWGRLSRKLINGIRDKQSGKTILDFLKSDGFANRNFMQLIHDDSLTFKEDIQKAQVSGQGDSLHEHIANLAGSPAIKKGILQTVKVVDELVKVMGRHKPENIVIEMARENQTTQKGQKNSRERMKRIEEGIKELGSQILKEHPVENTQLQNEKLYLYYLQNGRDMYVDQELDINRLSDYDVDHIVPQSFLKDDSIDNKVLTRSDKARGKSDNVPSEEVVKKMKNYWRQLLNAKLITQRKFDNLTKAERGGLSELDKAGFIKRQLVETRQITKHVAQILDSRMNTKYDENDKLIREVKVITLKSKLVSDFRKDFQFYKVREINNYHHAHDAYLNAVVGTALIKKYPKLESEFVYGDYKVYDVRKMIAKSEQEIGKATAKYFFYSNIMNFFKTEITLANGEIRKRPLIETNGETGEIVWDKGRDFATVRKVLSMPQVNIVKKTEVQTGGFSKESILPKRNSDKLIARKKDWDPKKYGGFDSPTVAYSVLVVAKVEKGKSKKLKSVKELLGITIMERSSFEKNPIDFLEAKGYKEVKKDLIIKLPKYSLFELENGRKRMLASAGELQKGNELALPSKYVNFLYLASHYEKLKGSPEDNEQKQLFVEQHKHYLDEIIEQISEFSKRVILADANLDKVLSAYNKHRDKPIREQAENIIHLFTLTNLGAPAAFKYFDTTIDRKRYTSTKEVLDATLIHQSITGLYETRIDLSQLGGDGGGGGGSGGGGSGGGGSGGTLNIEDEYRLHETSKEPDVPLGSTWLSDFPQAWAETGGMGLAVRQAPLIIPLKATSTPVSIKQYPMSQEARLGIKPHIQRLLDQGILVPCQSPWNTPLLPVKKPGTNDYRPVQDLREVNKRVEDIHPTVPNPYNLLSGLPPSHQWYTVLDLKDAFFCLRLHPTSQPLFAFEWRDPEMGISGQLTWTRLPQGFKNSPTLFNEALHRDLADFRIQHPDLILLQYVDDLLLAATSEQDCQRGTRALLQTLGNLGYRASAKKAQICQKQVKYLGYLLKEGQRWLTEARKETVMGQPTPKTPRQLREFLGKAGFCRLFIPGFAEMAAPLYPLTKPGTLFNWGPDQQKAYQEIKQALLTAPALGLPDLTKPFELFVDEKQGYAKGVLTQKLGPWRRPVAYLSKKLDPVAAGWPPCLRMVAAIAVLTKDAGKLTMGQPLVILAPHAVEALVKQPPDRWLSNARMTHYQAMLLDTDRVQFGPVVALNPATLLPLPEKEAPHDCLEILAETHGTRPDLTDQPIPDADYTWYTDGSSFLQEGQRRAGAAVTTETEVIWARALPAGTSAQRAELIALTQALKMAEGKKLNVYTDSRYAFATAHVHGEIYRRRGWLTSEGREIKNKNEILALLKALFLPKRLSIIHCPGHQKGNSAEARGNRMADQAAREAAMKAVLETSTLLAGKRTADGSEFEKRTADGSEFESPKKKAKVE

SEQ ID NO: 1043 - protein, 2094 aa, synthetic construct
MPAAKRVKLDGGDKKYSIGLDIGTNSVGWAVITDEYKVPSKKFKVLGNTDRHSIKKNLIGALLFDSGETAEATRLKRTARRRYTRRKNRICYLQEIFSNEMAKVDDSFFHRLEESFLVEEDKKHERHPIFGNIVDEVAYHEKYPTIYHLRKKLVDSTDKADLRLIYLALAHMIKFRGHFLIEGDLNPDNSDVDKLFIQLVQTYNQLFEENPINASGVDAKAILSARLSKSRRLENLIAQLPGEKKNGLFGNLIALSLGLTPNFKSNFDLAEDAKLQLSKDTYDDDLDNLLAQIGDQYADLFLAAKNLSDAILLSDILRVNTEITKAPLSASMIKRYDEHHQDLTLLKALVRQQLPEKYKEIFFDQSKNGYAGYIDGGASQEEFYKFIKPILEKMDGTEELLVKLNREDLLRKQRTFDNGSIPHQIHLGELHAILRRQEDFYPFLKDNREKIEKILTFRIPYYVGPLARGNSRFAWMTRKSEETITPWNFEEVVDKGASAQSFIERMTNFDKNLPNEKVLPKHSLLYEYFTVYNELTKVKYVTEGMRKPAFLSGEQKKAIVDLLFKTNRKVTVKQLKEDYFKKIECFDSVEISGVEDRFNASLGTYHDLLKIIKDKDFLDNEENEDILEDIVLTLTLFEDREMIEERLKTYAHLFDDKVMKQLKRRRYTGWGRLSRKLINGIRDKQSGKTILDFLKSDGFANRNFMQLIHDDSLTFKEDIQKAQVSGQGDSLHEHIANLAGSPAIKKGILQTVKVVDELVKVMGRHKPENIVIEMARENQTTQKGQKNSRERMKRIEEGIKELGSQILKEHPVENTQLQNEKLYLYYLQNGRDMYVDQELDINRLSDYDVDHIVPQSFLKDDSIDNKVLTRSDKARGKSDNVPSEEVVKKMKNYWRQLLNAKLITQRKFDNLTKAERGGLSELDKAGFIKRQLVETRQITKHVAQILDSRMNTKYDENDKLIREVKVITLKSKLVSDFRKDFQFYKVREINNYHHAHDAYLNAVVGTALIKKYPKLESEFVYGDYKVYDVRKMIAKSEQEIGKATAKYFFYSNIMNFFKTEITLANGEIRKRPLIETNGETGEIVWDKGRDFATVRKVLSMPQVNIVKKTEVQTGGFSKESILPKRNSDKLIARKKDWDPKKYGGFDSPTVAYSVLVVAKVEKGKSKKLKSVKELLGITIMERSSFEKNPIDFLEAKGYKEVKKDLIIKLPKYSLFELENGRKRMLASAGELQKGNELALPSKYVNFLYLASHYEKLKGSPEDNEQKQLFVEQHKHYLDEIIEQISEFSKRVILADANLDKVLSAYNKHRDKPIREQAENIIHLFTLTNLGAPAAFKYFDTTIDRKRYTSTKEVLDATLIHQSITGLYETRIDLSQLGGDGGPAPGSSGGSGGTLNIEDEYRLHETSKEPDVPLGSTWLSDFPQAWAETGGMGLAVRQAPLIIPLKATSTPVSIKQYPMSQEARLGIKPHIQRLLDQGILVPCQSPWNTPLLPVKKPGTNDYRPVQDLREVNKRVEDIHPTVPNPYNLLSGLPPSHQWYTVLDLKDAFFCLRLHPTSQPLFAFEWRDPEMGISGQLTWTRLPQGFKNSPTLFNEALHRDLADFRIQHPDLILLQYVDDLLLAATSEQDCQRGTRALLQTLGNLGYRASAKKAQICQKQVKYLGYLLKEGQRWLTEARKETVMGQPTPKTPRQLREFLGKAGFCRLFIPGFAEMAAPLYPLTKPGTLFNWGPDQQKAYQEIKQALLTAPALGLPDLTKPFELFVDEKQGYAKGVLTQKLGPWRRPVAYLSKKLDPVAAGWPPCLRMVAAIAVLTKDAGKLTMGQPLVILAPHAVEALVKQPPDRWLSNARMTHYQAMLLDTDRVQFGPVVALNPATLLPLPEKEAPHDCLEILAETHGTRPDLTDQPIPDADYTWYTDGSSFLQEGQRRAGAAVTTETEVIWARALPAGTSAQRAELIALTQALKMAEGKKLNVYTDSRYAFATAHVHGEIYRRRGWLTSEGREIKNKNEILALLKALFLPKRLSIIHCPGHQKGNSAEARGNRMADQAAREAAMKAVLETSTLLAGKRTADGSEFEKRTADGSEFESPKKKAKVE

SEQ ID NO: 1044 - protein, 2093 aa, synthetic construct
MPAAKRVKLDGGDKKYSIGLDIGTNSVGWAVITDEYKVPSKKFKVLGNTDRHSIKKNLIGALLFDSGETAEATRLKRTARRRYTRRKNRICYLQEIFSNEMAKVDDSFFHRLEESFLVEEDKKHERHPIFGNIVDEVAYHEKYPTIYHLRKKLVDSTDKADLRLIYLALAHMIKFRGHFLIEGDLNPDNSDVDKLFIQLVQTYNQLFEENPINASGVDAKAILSARLSKSRRLENLIAQLPGEKKNGLFGNLIALSLGLTPNFKSNFDLAEDAKLQLSKDTYDDDLDNLLAQIGDQYADLFLAAKNLSDAILLSDILRVNTEITKAPLSASMIKRYDEHHQDLTLLKALVRQQLPEKYKEIFFDQSKNGYAGYIDGGASQEEFYKFIKPILEKMDGTEELLVKLNREDLLRKQRTFDNGSIPHQIHLGELHAILRRQEDFYPFLKDNREKIEKILTFRIPYYVGPLARGNSRFAWMTRKSEETITPWNFEEVVDKGASAQSFIERMTNFDKNLPNEKVLPKHSLLYEYFTVYNELTKVKYVTEGMRKPAFLSGEQKKAIVDLLFKTNRKVTVKQLKEDYFKKIECFDSVEISGVEDRFNASLGTYHDLLKIIKDKDFLDNEENEDILEDIVLTLTLFEDREMIEERLKTYAHLFDDKVMKQLKRRRYTGWGRLSRKLINGIRDKQSGKTILDFLKSDGFANRNFMQLIHDDSLTFKEDIQKAQVSGQGDSLHEHIANLAGSPAIKKGILQTVKVVDELVKVMGRHKPENIVIEMARENQTTQKGQKNSRERMKRIEEGIKELGSQILKEHPVENTQLQNEKLYLYYLQNGRDMYVDQELDINRLSDYDVDHIVPQSFLKDDSIDNKVLTRSDKARGKSDNVPSEEVVKKMKNYWRQLLNAKLITQRKFDNLTKAERGGLSELDKAGFIKRQLVETRQITKHVAQILDSRMNTKYDENDKLIREVKVITLKSKLVSDFRKDFQFYKVREINNYHHAHDAYLNAVVGTALIKKYPKLESEFVYGDYKVYDVRKMIAKSEQEIGKATAKYFFYSNIMNFFKTEITLANGEIRKRPLIETNGETGEIVWDKGRDFATVRKVLSMPQVNIVKKTEVQTGGFSKESILPKRNSDKLIARKKDWDPKKYGGFDSPTVAYSVLVVAKVEKGKSKKLKSVKELLGITIMERSSFEKNPIDFLEAKGYKEVKKDLIIKLPKYSLFELENGRKRMLASAGELQKGNELALPSKYVNFLYLASHYEKLKGSPEDNEQKQLFVEQHKHYLDEIIEQISEFSKRVILADANLDKVLSAYNKHRDKPIREQAENIIHLFTLTNLGAPAAFKYFDTTIDRKRYTSTKEVLDATLIHQSITGLYETRIDLSQLGGDGGGGGEAAAKGGTLNIEDEYRLHETSKEPDVPLGSTWLSDFPQAWAETGGMGLAVRQAPLIIPLKATSTPVSIKQYPMSQEARLGIKPHIQRLLDQGILVPCQSPWNTPLLPVKKPGTNDYRPVQDLREVNKRVEDIHPTVPNPYNLLSGLPPSHQWYTVLDLKDAFFCLRLHPTSQPLFAFEWRDPEMGISGQLTWTRLPQGFKNSPTLFNEALHRDLADFRIQHPDLILLQYVDDLLLAATSEQDCQRGTRALLQTLGNLGYRASAKKAQICQKQVKYLGYLLKEGQRWLTEARKETVMGQPTPKTPRQLREFLGKAGFCRLFIPGFAEMAAPLYPLTKPGTLFNWGPDQQKAYQEIKQALLTAPALGLPDLTKPFELFVDEKQGYAKGVLTQKLGPWRRPVAYLSKKLDPVAAGWPPCLRMVAAIAVLTKDAGKLTMGQPLVILAPHAVEALVKQPPDRWLSNARMTHYQAMLLDTDRVQFGPVVALNPATLLPLPEKEAPHDCLEILAETHGTRPDLTDQPIPDADYTWYTDGSSFLQEGQRRAGAAVTTETEVIWARALPAGTSAQRAELIALTQALKMAEGKKLNVYTDSRYAFATAHVHGEIYRRRGWLTSEGREIKNKNEILALLKALFLPKRLSIIHCPGHQKGNSAEARGNRMADQAAREAAMKAVLETSTLLAGKRTADGSEFEKRTADGSEFESPKKKAKVE

SEQ ID NO: 1045 - protein, 2100 aa, synthetic construct
MPAAKRVKLDGGDKKYSIGLDIGTNSVGWAVITDEYKVPSKKFKVLGNTDRHSIKKNLIGALLFDSGETAEATRLKRTARRRYTRRKNRICYLQEIFSNEMAKVDDSFFHRLEESFLVEEDKKHERHPIFGNIVDEVAYHEKYPTIYHLRKKLVDSTDKADLRLIYLALAHMIKFRGHFLIEGDLNPDNSDVDKLFIQLVQTYNQLFEENPINASGVDAKAILSARLSKSRRLENLIAQLPGEKKNGLFGNLIALSLGLTPNFKSNFDLAEDAKLQLSKDTYDDDLDNLLAQIGDQYADLFLAAKNLSDAILLSDILRVNTEITKAPLSASMIKRYDEHHQDLTLLKALVRQQLPEKYKEIFFDQSKNGYAGYIDGGASQEEFYKFIKPILEKMDGTEELLVKLNREDLLRKQRTFDNGSIPHQIHLGELHAILRRQEDFYPFLKDNREKIEKILTFRIPYYVGPLARGNSRFAWMTRKSEETITPWNFEEVVDKGASAQSFIERMTNFDKNLPNEKVLPKHSLLYEYFTVYNELTKVKYVTEGMRKPAFLSGEQKKAIVDLLFKTNRKVTVKQLKEDYFKKIECFDSVEISGVEDRFNASLGTYHDLLKIIKDKDFLDNEENEDILEDIVLTLTLFEDREMIEERLKTYAHLFDDKVMKQLKRRRYTGWGRLSRKLINGIRDKQSGKTILDFLKSDGFANRNFMQLIHDDSLTFKEDIQKAQVSGQGDSLHEHIANLAGSPAIKKGILQTVKVVDELVKVMGRHKPENIVIEMARENQTTQKGQKNSRERMKRIEEGIKELGSQILKEHPVENTQLQNEKLYLYYLQNGRDMYVDQELDINRLSDYDVDHIVPQSFLKDDSIDNKVLTRSDKARGKSDNVPSEEVVKKMKNYWRQLLNAKLITQRKFDNLTKAERGGLSELDKAGFIKRQLVETRQITKHVAQILDSRMNTKYDENDKLIREVKVITLKSKLVSDFRKDFQFYKVREINNYHHAHDAYLNAVVGTALIKKYPKLESEFVYGDYKVYDVRKMIAKSEQEIGKATAKYFFYSNIMNFFKTEITLANGEIRKRPLIETNGETGEIVWDKGRDFATVRKVLSMPQVNIVKKTEVQTGGFSKESILPKRNSDKLIARKKDWDPKKYGGFDSPTVAYSVLVVAKVEKGKSKKLKSVKELLGITIMERSSFEKNPIDFLEAKGYKEVKKDLIIKLPKYSLFELENGRKRMLASAGELQKGNELALPSKYVNFLYLASHYEKLKGSPEDNEQKQLFVEQHKHYLDEIIEQISEFSKRVILADANLDKVLSAYNKHRDKPIREQAENIIHLFTLTNLGAPAAFKYFDTTIDRKRYTSTKEVLDATLIHQSITGLYETRIDLSQLGGDGGGSSGSSGSSGSSGSSGGTLNIEDEYRLHETSKEPDVPLGSTWLSDFPQAWAETGGMGLAVRQAPLIIPLKATSTPVSIKQYPMSQEARLGIKPHIQRLLDQGILVPCQSPWNTPLLPVKKPGTNDYRPVQDLREVNKRVEDIHPTVPNPYNLLSGLPPSHQWYTVLDLKDAFFCLRLHPTSQPLFAFEWRDPEMGISGQLTWTRLPQGFKNSPTLFNEALHRDLADFRIQHPDLILLQYVDDLLLAATSEQDCQRGTRALLQTLGNLGYRASAKKAQICQKQVKYLGYLLKEGQRWLTEARKETVMGQPTPKTPRQLREFLGKAGFCRLFIPGFAEMAAPLYPLTKPGTLFNWGPDQQKAYQEIKQALLTAPALGLPDLTKPFELFVDEKQGYAKGVLTQKLGPWRRPVAYLSKKLDPVAAGWPPCLRMVAAIAVLTKDAGKLTMGQPLVILAPHAVEALVKQPPDRWLSNARMTHYQAMLLDTDRVQFGPVVALNPATLLPLPEKEAPHDCLEILAETHGTRPDLTDQPIPDADYTWYTDGSSFLQEGQRRAGAAVTTETEVIWARALPAGTSAQRAELIALTQALKMAEGKKLNVYTDSRYAFATAHVHGEIYRRRGWLTSEGREIKNKNEILALLKALFLPKRLSIIHCPGHQKGNSAEARGNRMADQAAREAAMKAVLETSTLLAGKRTADGSEFEKRTADGSEFESPKKKAKVE

SEQ ID NO: 1046 - protein, 2096 aa, synthetic construct
MPAAKRVKLDGGDKKYSIGLDIGTNSVGWAVITDEYKVPSKKFKVLGNTDRHSIKKNLIGALLFDSGETAEATRLKRTARRRYTRRKNRICYLQEIFSNEMAKVDDSFFHRLEESFLVEEDKKHERHPIFGNIVDEVAYHEKYPTIYHLRKKLVDSTDKADLRLIYLALAHMIKFRGHFLIEGDLNPDNSDVDKLFIQLVQTYNQLFEENPINASGVDAKAILSARLSKSRRLENLIAQLPGEKKNGLFGNLIALSLGLTPNFKSNFDLAEDAKLQLSKDTYDDDLDNLLAQIGDQYADLFLAAKNLSDAILLSDILRVNTEITKAPLSASMIKRYDEHHQDLTLLKALVRQQLPEKYKEIFFDQSKNGYAGYIDGGASQEEFYKFIKPILEKMDGTEELLVKLNREDLLRKQRTFDNGSIPHQIHLGELHAILRRQEDFYPFLKDNREKIEKILTFRIPYYVGPLARGNSRFAWMTRKSEETITPWNFEEVVDKGASAQSFIERMTNFDKNLPNEKVLPKHSLLYEYFTVYNELTKVKYVTEGMRKPAFLSGEQKKAIVDLLFKTNRKVTVKQLKEDYFKKIECFDSVEISGVEDRFNASLGTYHDLLKIIKDKDFLDNEENEDILEDIVLTLTLFEDREMIEERLKTYAHLFDDKVMKQLKRRRYTGWGRLSRKLINGIRDKQSGKTILDFLKSDGFANRNFMQLIHDDSLTFKEDIQKAQVSGQGDSLHEHIANLAGSPAIKKGILQTVKVVDELVKVMGRHKPENIVIEMARENQTTQKGQKNSRERMKRIEEGIKELGSQILKEHPVENTQLQNEKLYLYYLQNGRDMYVDQELDINRLSDYDVDHIVPQSFLKDDSIDNKVLTRSDKARGKSDNVPSEEVVKKMKNYWRQLLNAKLITQRKFDNLTKAERGGLSELDKAGFIKRQLVETRQITKHVAQILDSRMNTKYDENDKLIREVKVITLKSKLVSDFRKDFQFYKVREINNYHHAHDAYLNAVVGTALIKKYPKLESEFVYGDYKVYDVRKMIAKSEQEIGKATAKYFFYSNIMNFFKTEITLANGEIRKRPLIETNGETGEIVWDKGRDFATVRKVLSMPQVNIVKKTEVQTGGFSKESILPKRNSDKLIARKKDWDPKKYGGFDSPTVAYSVLVVAKVEKGKSKKLKSVKELLGITIMERSSFEKNPIDFLEAKGYKEVKKDLIIKLPKYSLFELENGRKRMLASAGELQKGNELALPSKYVNFLYLASHYEKLKGSPEDNEQKQLFVEQHKHYLDEIIEQISEFSKRVILADANLDKVLSAYNKHRDKPIREQAENIIHLFTLTNLGAPAAFKYFDTTIDRKRYTSTKEVLDATLIHQSITGLYETRIDLSQLGGDGGGGSGGGEAAAKGGTLNIEDEYRLHETSKEPDVPLGSTWLSDFPQAWAETGGMGLAVRQAPLIIPLKATSTPVSIKQYPMSQEARLGIKPHIQRLLDQGILVPCQSPWNTPLLPVKKPGTNDYRPVQDLREVNKRVEDIHPTVPNPYNLLSGLPPSHQWYTVLDLKDAFFCLRLHPTSQPLFAFEWRDPEMGISGQLTWTRLPQGFKNSPTLFNEALHRDLADFRIQHPDLILLQYVDDLLLAATSEQDCQRGTRALLQTLGNLGYRASAKKAQICQKQVKYLGYLLKEGQRWLTEARKETVMGQPTPKTPRQLREFLGKAGFCRLFIPGFAEMAAPLYPLTKPGTLFNWGPDQQKAYQEIKQALLTAPALGLPDLTKPFELFVDEKQGYAKGVLTQKLGPWRRPVAYLSKKLDPVAAGWPPCLRMVAAIAVLTKDAGKLTMGQPLVILAPHAVEALVKQPPDRWLSNARMTHYQAMLLDTDRVQFGPVVALNPATLLPLPEKEAPHDCLEILAETHGTRPDLTDQPIPDADYTWYTDGSSFLQEGQRRAGAAVTTETEVIWARALPAGTSAQRAELIALTQALKMAEGKKLNVYTDSRYAFATAHVHGEIYRRRGWLTSEGREIKNKNEILALLKALFLPKRLSIIHCPGHQKGNSAEARGNRMADQAAREAAMKAVLETSTLLAGKRTADGSEFEKRTADGSEFESPKKKAKVE

SEQ ID NO: 1047 - protein, 2091 aa, synthetic construct
MPAAKRVKLDGGDKKYSIGLDIGTNSVGWAVITDEYKVPSKKFKVLGNTDRHSIKKNLIGALLFDSGETAEATRLKRTARRRYTRRKNRICYLQEIFSNEMAKVDDSFFHRLEESFLVEEDKKHERHPIFGNIVDEVAYHEKYPTIYHLRKKLVDSTDKADLRLIYLALAHMIKFRGHFLIEGDLNPDNSDVDKLFIQLVQTYNQLFEENPINASGVDAKAILSARLSKSRRLENLIAQLPGEKKNGLFGNLIALSLGLTPNFKSNFDLAEDAKLQLSKDTYDDDLDNLLAQIGDQYADLFLAAKNLSDAILLSDILRVNTEITKAPLSASMIKRYDEHHQDLTLLKALVRQQLPEKYKEIFFDQSKNGYAGYIDGGASQEEFYKFIKPILEKMDGTEELLVKLNREDLLRKQRTFDNGSIPHQIHLGELHAILRRQEDFYPFLKDNREKIEKILTFRIPYYVGPLARGNSRFAWMTRKSEETITPWNFEEVVDKGASAQSFIERMTNFDKNLPNEKVLPKHSLLYEYFTVYNELTKVKYVTEGMRKPAFLSGEQKKAIVDLLFKTNRKVTVKQLKEDYFKKIECFDSVEISGVEDRFNASLGTYHDLLKIIKDKDFLDNEENEDILEDIVLTLTLFEDREMIEERLKTYAHLFDDKVMKQLKRRRYTGWGRLSRKLINGIRDKQSGKTILDFLKSDGFANRNFMQLIHDDSLTFKEDIQKAQVSGQGDSLHEHIANLAGSPAIKKGILQTVKVVDELVKVMGRHKPENIVIEMARENQTTQKGQKNSRERMKRIEEGIKELGSQILKEHPVENTQLQNEKLYLYYLQNGRDMYVDQELDINRLSDYDVDHIVPQSFLKDDSIDNKVLTRSDKARGKSDNVPSEEVVKKMKNYWRQLLNAKLITQRKFDNLTKAERGGLSELDKAGFIKRQLVETRQITKHVAQILDSRMNTKYDENDKLIREVKVITLKSKLVSDFRKDFQFYKVREINNYHHAHDAYLNAVVGTALIKKYPKLESEFVYGDYKVYDVRKMIAKSEQEIGKATAKYFFYSNIMNFFKTEITLANGEIRKRPLIETNGETGEIVWDKGRDFATVRKVLSMPQVNIVKKTEVQTGGFSKESILPKRNSDKLIARKKDWDPKKYGGFDSPTVAYSVLVVAKVEKGKSKKLKSVKELLGITIMERSSFEKNPIDFLEAKGYKEVKKDLIIKLPKYSLFELENGRKRMLASAGELQKGNELALPSKYVNFLYLASHYEKLKGSPEDNEQKQLFVEQHKHYLDEIIEQISEFSKRVILADANLDKVLSAYNKHRDKPIREQAENIIHLFTLTNLGAPAAFKYFDTTIDRKRYTSTKEVLDATLIHQSITGLYETRIDLSQLGGDGGGSSGSSGGTLNIEDEYRLHETSKEPDVPLGSTWLSDFPQAWAETGGMGLAVRQAPLIIPLKATSTPVSIKQYPMSQEARLGIKPHIQRLLDQGILVPCQSPWNTPLLPVKKPGTNDYRPVQDLREVNKRVEDIHPTVPNPYNLLSGLPPSHQWYTVLDLKDAFFCLRLHPTSQPLFAFEWRDPEMGISGQLTWTRLPQGFKNSPTLFNEALHRDLADFRIQHPDLILLQYVDDLLLAATSEQDCQRGTRALLQTLGNLGYRASAKKAQICQKQVKYLGYLLKEGQRWLTEARKETVMGQPTPKTPRQLREFLGKAGFCRLFIPGFAEMAAPLYPLTKPGTLFNWGPDQQKAYQEIKQALLTAPALGLPDLTKPFELFVDEKQGYAKGVLTQKLGPWRRPVAYLSKKLDPVAAGWPPCLRMVAAIAVLTKDAGKLTMGQPLVILAPHAVEALVKQPPDRWLSNARMTHYQAMLLDTDRVQFGPVVALNPATLLPLPEKEAPHDCLEILAETHGTRPDLTDQPIPDADYTWYTDGSSFLQEGQRRAGAAVTTETEVIWARALPAGTSAQRAELIALTQALKMAEGKKLNVYTDSRYAFATAHVHGEIYRRRGWLTSEGREIKNKNEILALLKALFLPKRLSIIHCPGHQKGNSAEARGNRMADQAAREAAMKAVLETSTLLAGKRTADGSEFEKRTADGSEFESPKKKAKVE

SEQ ID NO: 1048 - protein, 2093 aa, synthetic construct
MPAAKRVKLDGGDKKYSIGLDIGTNSVGWAVITDEYKVPSKKFKVLGNTDRHSIKKNLIGALLFDSGETAEATRLKRTARRRYTRRKNRICYLQEIFSNEMAKVDDSFFHRLEESFLVEEDKKHERHPIFGNIVDEVAYHEKYPTIYHLRKKLVDSTDKADLRLIYLALAHMIKFRGHFLIEGDLNPDNSDVDKLFIQLVQTYNQLFEENPINASGVDAKAILSARLSKSRRLENLIAQLPGEKKNGLFGNLIALSLGLTPNFKSNFDLAEDAKLQLSKDTYDDDLDNLLAQIGDQYADLFLAAKNLSDAILLSDILRVNTEITKAPLSASMIKRYDEHHQDLTLLKALVRQQLPEKYKEIFFDQSKNGYAGYIDGGASQEEFYKFIKPILEKMDGTEELLVKLNREDLLRKQRTFDNGSIPHQIHLGELHAILRRQEDFYPFLKDNREKIEKILTFRIPYYVGPLARGNSRFAWMTRKSEETITPWNFEEVVDKGASAQSFIERMTNFDKNLPNEKVLPKHSLLYEYFTVYNELTKVKYVTEGMRKPAFLSGEQKKAIVDLLFKTNRKVTVKQLKEDYFKKIECFDSVEISGVEDRFNASLGTYHDLLKIIKDKDFLDNEENEDILEDIVLTLTLFEDREMIEERLKTYAHLFDDKVMKQLKRRRYTGWGRLSRKLINGIRDKQSGKTILDFLKSDGFANRNFMQLIHDDSLTFKEDIQKAQVSGQGDSLHEHIANLAGSPAIKKGILQTVKVVDELVKVMGRHKPENIVIEMARENQTTQKGQKNSRERMKRIEEGIKELGSQILKEHPVENTQLQNEKLYLYYLQNGRDMYVDQELDINRLSDYDVDHIVPQSFLKDDSIDNKVLTRSDKARGKSDNVPSEEVVKKMKNYWRQLLNAKLITQRKFDNLTKAERGGLSELDKAGFIKRQLVETRQITKHVAQILDSRMNTKYDENDKLIREVKVITLKSKLVSDFRKDFQFYKVREINNYHHAHDAYLNAVVGTALIKKYPKLESEFVYGDYKVYDVRKMIAKSEQEIGKATAKYFFYSNIMNFFKTEITLANGEIRKRPLIETNGETGEIVWDKGRDFATVRKVLSMPQVNIVKKTEVQTGGFSKESILPKRNSDKLIARKKDWDPKKYGGFDSPTVAYSVLVVAKVEKGKSKKLKSVKELLGITIMERSSFEKNPIDFLEAKGYKEVKKDLIIKLPKYSLFELENGRKRMLASAGELQKGNELALPSKYVNFLYLASHYEKLKGSPEDNEQKQLFVEQHKHYLDEIIEQISEFSKRVILADANLDKVLSAYNKHRDKPIREQAENIIHLFTLTNLGAPAAFKYFDTTIDRKRYTSTKEVLDATLIHQSITGLYETRIDLSQLGGDGGEAAAKPAPGGTLNIEDEYRLHETSKEPDVPLGSTWLSDFPQAWAETGGMGLAVRQAPLIIPLKATSTPVSIKQYPMSQEARLGIKPHIQRLLDQGILVPCQSPWNTPLLPVKKPGTNDYRPVQDLREVNKRVEDIHPTVPNPYNLLSGLPPSHQWYTVLDLKDAFFCLRLHPTSQPLFAFEWRDPEMGISGQLTWTRLPQGFKNSPTLFNEALHRDLADFRIQHPDLILLQYVDDLLLAATSEQDCQRGTRALLQTLGNLGYRASAKKAQICQKQVKYLGYLLKEGQRWLTEARKETVMGQPTPKTPRQLREFLGKAGFCRLFIPGFAEMAAPLYPLTKPGTLFNWGPDQQKAYQEIKQALLTAPALGLPDLTKPFELFVDEKQGYAKGVLTQKLGPWRRPVAYLSKKLDPVAAGWPPCLRMVAAIAVLTKDAGKLTMGQPLVILAPHAVEALVKQPPDRWLSNARMTHYQAMLLDTDRVQFGPVVALNPATLLPLPEKEAPHDCLEILAETHGTRPDLTDQPIPDADYTWYTDGSSFLQEGQRRAGAAVTTETEVIWARALPAGTSAQRAELIALTQALKMAEGKKLNVYTDSRYAFATAHVHGEIYRRRGWLTSEGREIKNKNEILALLKALFLPKRLSIIHCPGHQKGNSAEARGNRMADQAAREAAMKAVLETSTLLAGKRTADGSEFEKRTADGSEFESPKKKAKVE

SEQ ID NO: 1049 - protein, 2105 aa, synthetic construct
MPAAKRVKLDGGDKKYSIGLDIGTNSVGWAVITDEYKVPSKKFKVLGNTDRHSIKKNLIGALLFDSGETAEATRLKRTARRRYTRRKNRICYLQEIFSNEMAKVDDSFFHRLEESFLVEEDKKHERHPIFGNIVDEVAYHEKYPTIYHLRKKLVDSTDKADLRLIYLALAHMIKFRGHFLIEGDLNPDNSDVDKLFIQLVQTYNQLFEENPINASGVDAKAILSARLSKSRRLENLIAQLPGEKKNGLFGNLIALSLGLTPNFKSNFDLAEDAKLQLSKDTYDDDLDNLLAQIGDQYADLFLAAKNLSDAILLSDILRVNTEITKAPLSASMIKRYDEHHQDLTLLKALVRQQLPEKYKEIFFDQSKNGYAGYIDGGASQEEFYKFIKPILEKMDGTEELLVKLNREDLLRKQRTFDNGSIPHQIHLGELHAILRRQEDFYPFLKDNREKIEKILTFRIPYYVGPLARGNSRFAWMTRKSEETITPWNFEEVVDKGASAQSFIERMTNFDKNLPNEKVLPKHSLLYEYFTVYNELTKVKYVTEGMRKPAFLSGEQKKAIVDLLFKTNRKVTVKQLKEDYFKKIECFDSVEISGVEDRFNASLGTYHDLLKIIKDKDFLDNEENEDILEDIVLTLTLFEDREMIEERLKTYAHLFDDKVMKQLKRRRYTGWGRLSRKLINGIRDKQSGKTILDFLKSDGFANRNFMQLIHDDSLTFKEDIQKAQVSGQGDSLHEHIANLAGSPAIKKGILQTVKVVDELVKVMGRHKPENIVIEMARENQTTQKGQKNSRERMKRIEEGIKELGSQILKEHPVENTQLQNEKLYLYYLQNGRDMYVDQELDINRLSDYDVDHIVPQSFLKDDSIDNKVLTRSDKARGKSDNVPSEEVVKKMKNYWRQLLNAKLITQRKFDNLTKAERGGLSELDKAGFIKRQLVETRQITKHVAQILDSRMNTKYDENDKLIREVKVITLKSKLVSDFRKDFQFYKVREINNYHHAHDAYLNAVVGTALIKKYPKLESEFVYGDYKVYDVRKMIAKSEQEIGKATAKYFFYSNIMNFFKTEITLANGEIRKRPLIETNGETGEIVWDKGRDFATVRKVLSMPQVNIVKKTEVQTGGFSKESILPKRNSDKLIARKKDWDPKKYGGFDSPTVAYSVLVVAKVEKGKSKKLKSVKELLGITIMERSSFEKNPIDFLEAKGYKEVKKDLIIKLPKYSLFELENGRKRMLASAGELQKGNELALPSKYVNFLYLASHYEKLKGSPEDNEQKQLFVEQHKHYLDEIIEQISEFSKRVILADANLDKVLSAYNKHRDKPIREQAENIIHLFTLTNLGAPAAFKYFDTTIDRKRYTSTKEVLDATLIHQSITGLYETRIDLSQLGGDGGGGGGSGGGGSGGGGSGGGGSGGTLNIEDEYRLHETSKEPDVPLGSTWLSDFPQAWAETGGMGLAVRQAPLIIPLKATSTPVSIKQYPMSQEARLGIKPHIQRLLDQGILVPCQSPWNTPLLPVKKPGTNDYRPVQDLREVNKRVEDIHPTVPNPYNLLSGLPPSHQWYTVLDLKDAFFCLRLHPTSQPLFAFEWRDPEMGISGQLTWTRLPQGFKNSPTLFNEALHRDLADFRIQHPDLILLQYVDDLLLAATSEQDCQRGTRALLQTLGNLGYRASAKKAQICQKQVKYLGYLLKEGQRWLTEARKETVMGQPTPKTPRQLREFLGKAGFCRLFIPGFAEMAAPLYPLTKPGTLFNWGPDQQKAYQEIKQALLTAPALGLPDLTKPFELFVDEKQGYAKGVLTQKLGPWRRPVAYLSKKLDPVAAGWPPCLRMVAAIAVLTKDAGKLTMGQPLVILAPHAVEALVKQPPDRWLSNARMTHYQAMLLDTDRVQFGPVVALNPATLLPLPEKEAPHDCLEILAETHGTRPDLTDQPIPDADYTWYTDGSSFLQEGQRRAGAAVTTETEVIWARALPAGTSAQRAELIALTQALKMAEGKKLNVYTDSRYAFATAHVHGEIYRRRGWLTSEGREIKNKNEILALLKALFLPKRLSIIHCPGHQKGNSAEARGNRMADQAAREAAMKAVLETSTLLAGKRTADGSEFEKRTADGSEFESPKKKAKVE

SEQ ID NO: 1050 - protein, 2093 aa, synthetic construct
MPAAKRVKLDGGDKKYSIGLDIGTNSVGWAVITDEYKVPSKKFKVLGNTDRHSIKKNLIGALLFDSGETAEATRLKRTARRRYTRRKNRICYLQEIFSNEMAKVDDSFFHRLEESFLVEEDKKHERHPIFGNIVDEVAYHEKYPTIYHLRKKLVDSTDKADLRLIYLALAHMIKFRGHFLIEGDLNPDNSDVDKLFIQLVQTYNQLFEENPINASGVDAKAILSARLSKSRRLENLIAQLPGEKKNGLFGNLIALSLGLTPNFKSNFDLAEDAKLQLSKDTYDDDLDNLLAQIGDQYADLFLAAKNLSDAILLSDILRVNTEITKAPLSASMIKRYDEHHQDLTLLKALVRQQLPEKYKEIFFDQSKNGYAGYIDGGASQEEFYKFIKPILEKMDGTEELLVKLNREDLLRKQRTFDNGSIPHQIHLGELHAILRRQEDFYPFLKDNREKIEKILTFRIPYYVGPLARGNSRFAWMTRKSEETITPWNFEEVVDKGASAQSFIERMTNFDKNLPNEKVLPKHSLLYEYFTVYNELTKVKYVTEGMRKPAFLSGEQKKAIVDLLFKTNRKVTVKQLKEDYFKKIECFDSVEISGVEDRFNASLGTYHDLLKIIKDKDFLDNEENEDILEDIVLTLTLFEDREMIEERLKTYAHLFDDKVMKQLKRRRYTGWGRLSRKLINGIRDKQSGKTILDFLKSDGFANRNFMQLIHDDSLTFKEDIQKAQVSGQGDSLHEHIANLAGSPAIKKGILQTVKVVDELVKVMGRHKPENIVIEMARENQTTQKGQKNSRERMKRIEEGIKELGSQILKEHPVENTQLQNEKLYLYYLQNGRDMYVDQELDINRLSDYDVDHIVPQSFLKDDSIDNKVLTRSDKARGKSDNVPSEEVVKKMKNYWRQLLNAKLITQRKFDNLTKAERGGLSELDKAGFIKRQLVETRQITKHVAQILDSRMNTKYDENDKLIREVKVITLKSKLVSDFRKDFQFYKVREINNYHHAHDAYLNAVVGTALIKKYPKLESEFVYGDYKVYDVRKMIAKSEQEIGKATAKYFFYSNIMNFFKTEITLANGEIRKRPLIETNGETGEIVWDKGRDFATVRKVLSMPQVNIVKKTEVQTGGFSKESILPKRNSDKLIARKKDWDPKKYGGFDSPTVAYSVLVVAKVEKGKSKKLKSVKELLGITIMERSSFEKNPIDFLEAKGYKEVKKDLIIKLPKYSLFELENGRKRMLASAGELQKGNELALPSKYVNFLYLASHYEKLKGSPEDNEQKQLFVEQHKHYLDEIIEQISEFSKRVILADANLDKVLSAYNKHRDKPIREQAENIIHLFTLTNLGAPAAFKYFDTTIDRKRYTSTKEVLDATLIHQSITGLYETRIDLSQLGGDGGEAAAKGGGGGTLNIEDEYRLHETSKEPDVPLGSTWLSDFPQAWAETGGMGLAVRQAPLIIPLKATSTPVSIKQYPMSQEARLGIKPHIQRLLDQGILVPCQSPWNTPLLPVKKPGTNDYRPVQDLREVNKRVEDIHPTVPNPYNLLSGLPPSHQWYTVLDLKDAFFCLRLHPTSQPLFAFEWRDPEMGISGQLTWTRLPQGFKNSPTLFNEALHRDLADFRIQHPDLILLQYVDDLLLAATSEQDCQRGTRALLQTLGNLGYRASAKKAQICQKQVKYLGYLLKEGQRWLTEARKETVMGQPTPKTPRQLREFLGKAGFCRLFIPGFAEMAAPLYPLTKPGTLFNWGPDQQKAYQEIKQALLTAPALGLPDLTKPFELFVDEKQGYAKGVLTQKLGPWRRPVAYLSKKLDPVAAGWPPCLRMVAAIAVLTKDAGKLTMGQPLVILAPHAVEALVKQPPDRWLSNARMTHYQAMLLDTDRVQFGPVVALNPATLLPLPEKEAPHDCLEILAETHGTRPDLTDQPIPDADYTWYTDGSSFLQEGQRRAGAAVTTETEVIWARALPAGTSAQRAELIALTQALKMAEGKKLNVYTDSRYAFATAHVHGEIYRRRGWLTSEGREIKNKNEILALLKALFLPKRLSIIHCPGHQKGNSAEARGNRMADQAAREAAMKAVLETSTLLAGKRTADGSEFEKRTADGSEFESPKKKAKVE

SEQ ID NO: 1051 - protein, 2096 aa, synthetic construct
MPAAKRVKLDGGDKKYSIGLDIGTNSVGWAVITDEYKVPSKKFKVLGNTDRHSIKKNLIGALLFDSGETAEATRLKRTARRRYTRRKNRICYLQEIFSNEMAKVDDSFFHRLEESFLVEEDKKHERHPIFGNIVDEVAYHEKYPTIYHLRKKLVDSTDKADLRLIYLALAHMIKFRGHFLIEGDLNPDNSDVDKLFIQLVQTYNQLFEENPINASGVDAKAILSARLSKSRRLENLIAQLPGEKKNGLFGNLIALSLGLTPNFKSNFDLAEDAKLQLSKDTYDDDLDNLLAQIGDQYADLFLAAKNLSDAILLSDILRVNTEITKAPLSASMIKRYDEHHQDLTLLKALVRQQLPEKYKEIFFDQSKNGYAGYIDGGASQEEFYKFIKPILEKMDGTEELLVKLNREDLLRKQRTFDNGSIPHQIHLGELHAILRRQEDFYPFLKDNREKIEKILTFRIPYYVGPLARGNSRFAWMTRKSEETITPWNFEEVVDKGASAQSFIERMTNFDKNLPNEKVLPKHSLLYEYFTVYNELTKVKYVTEGMRKPAFLSGEQKKAIVDLLFKTNRKVTVKQLKEDYFKKIECFDSVEISGVEDRFNASLGTYHDLLKIIKDKDFLDNEENEDILEDIVLTLTLFEDREMIEERLKTYAHLFDDKVMKQLKRRRYTGWGRLSRKLINGIRDKQSGKTILDFLKSDGFANRNFMQLIHDDSLTFKEDIQKAQVSGQGDSLHEHIANLAGSPAIKKGILQTVKVVDELVKVMGRHKPENIVIEMARENQTTQKGQKNSRERMKRIEEGIKELGSQILKEHPVENTQLQNEKLYLYYLQNGRDMYVDQELDINRLSDYDVDHIVPQSFLKDDSIDNKVLTRSDKARGKSDNVPSEEVVKKMKNYWRQLLNAKLITQRKFDNLTKAERGGLSELDKAGFIKRQLVETRQITKHVAQILDSRMNTKYDENDKLIREVKVITLKSKLVSDFRKDFQFYKVREINNYHHAHDAYLNAVVGTALIKKYPKLESEFVYGDYKVYDVRKMIAKSEQEIGKATAKYFFYSNIMNFFKTEITLANGEIRKRPLIETNGETGEIVWDKGRDFATVRKVLSMPQVNIVKKTEVQTGGFSKESILPKRNSDKLIARKKDWDPKKYGGFDSPTVAYSVLVVAKVEKGKSKKLKSVKELLGITIMERSSFEKNPIDFLEAKGYKEVKKDLIIKLPKYSLFELENGRKRMLASAGELQKGNELALPSKYVNFLYLASHYEKLKGSPEDNEQKQLFVEQHKHYLDEIIEQISEFSKRVILADANLDKVLSAYNKHRDKPIREQAENIIHLFTLTNLGAPAAFKYFDTTIDRKRYTSTKEVLDATLIHQSITGLYETRIDLSQLGGDGGEAAAKGGSGGGGGTLNIEDEYRLHETSKEPDVPLGSTWLSDFPQAWAETGGMGLAVRQAPLIIPLKATSTPVSIKQYPMSQEARLGIKPHIQRLLDQGILVPCQSPWNTPLLPVKKPGTNDYRPVQDLREVNKRVEDIHPTVPNPYNLLSGLPPSHQWYTVLDLKDAFFCLRLHPTSQPLFAFEWRDPEMGISGQLTWTRLPQGFKNSPTLFNEALHRDLADFRIQHPDLILLQYVDDLLLAATSEQDCQRGTRALLQTLGNLGYRASAKKAQICQKQVKYLGYLLKEGQRWLTEARKETVMGQPTPKTPRQLREFLGKAGFCRLFIPGFAEMAAPLYPLTKPGTLFNWGPDQQKAYQEIKQALLTAPALGLPDLTKPFELFVDEKQGYAKGVLTQKLGPWRRPVAYLSKKLDPVAAGWPPCLRMVAAIAVLTKDAGKLTMGQPLVILAPHAVEALVKQPPDRWLSNARMTHYQAMLLDTDRVQFGPVVALNPATLLPLPEKEAPHDCLEILAETHGTRPDLTDQPIPDADYTWYTDGSSFLQEGQRRAGAAVTTETEVIWARALPAGTSAQRAELIALTQALKMAEGKKLNVYTDSRYAFATAHVHGEIYRRRGWLTSEGREIKNKNEILALLKALFLPKRLSIIHCPGHQKGNSAEARGNRMADQAAREAAMKAVLETSTLLAGKRTADGSEFEKRTADGSEFESPKKKAKVE

SEQ ID NO: 1052 - protein, 2115 aa, synthetic construct
MPAAKRVKLDGGDKKYSIGLDIGTNSVGWAVITDEYKVPSKKFKVLGNTDRHSIKKNLIGALLFDSGETAEATRLKRTARRRYTRRKNRICYLQEIFSNEMAKVDDSFFHRLEESFLVEEDKKHERHPIFGNIVDEVAYHEKYPTIYHLRKKLVDSTDKADLRLIYLALAHMIKFRGHFLIEGDLNPDNSDVDKLFIQLVQTYNQLFEENPINASGVDAKAILSARLSKSRRLENLIAQLPGEKKNGLFGNLIALSLGLTPNFKSNFDLAEDAKLQLSKDTYDDDLDNLLAQIGDQYADLFLAAKNLSDAILLSDILRVNTEITKAPLSASMIKRYDEHHQDLTLLKALVRQQLPEKYKEIFFDQSKNGYAGYIDGGASQEEFYKFIKPILEKMDGTEELLVKLNREDLLRKQRTFDNGSIPHQIHLGELHAILRRQEDFYPFLKDNREKIEKILTFRIPYYVGPLARGNSRFAWMTRKSEETITPWNFEEVVDKGASAQSFIERMTNFDKNLPNEKVLPKHSLLYEYFTVYNELTKVKYVTEGMRKPAFLSGEQKKAIVDLLFKTNRKVTVKQLKEDYFKKIECFDSVEISGVEDRFNASLGTYHDLLKIIKDKDFLDNEENEDILEDIVLTLTLFEDREMIEERLKTYAHLFDDKVMKQLKRRRYTGWGRLSRKLINGIRDKQSGKTILDFLKSDGFANRNFMQLIHDDSLTFKEDIQKAQVSGQGDSLHEHIANLAGSPAIKKGILQTVKVVDELVKVMGRHKPENIVIEMARENQTTQKGQKNSRERMKRIEEGIKELGSQILKEHPVENTQLQNEKLYLYYLQNGRDMYVDQELDINRLSDYDVDHIVPQSFLKDDSIDNKVLTRSDKARGKSDNVPSEEVVKKMKNYWRQLLNAKLITQRKFDNLTKAERGGLSELDKAGFIKRQLVETRQITKHVAQILDSRMNTKYDENDKLIREVKVITLKSKLVSDFRKDFQFYKVREINNYHHAHDAYLNAVVGTALIKKYPKLESEFVYGDYKVYDVRKMIAKSEQEIGKATAKYFFYSNIMNFFKTEITLANGEIRKRPLIETNGETGEIVWDKGRDFATVRKVLSMPQVNIVKKTEVQTGGFSKESILPKRNSDKLIARKKDWDPKKYGGFDSPTVAYSVLVVAKVEKGKSKKLKSVKELLGITIMERSSFEKNPIDFLEAKGYKEVKKDLIIKLPKYSLFELENGRKRMLASAGELQKGNELALPSKYVNFLYLASHYEKLKGSPEDNEQKQLFVEQHKHYLDEIIEQISEFSKRVILADANLDKVLSAYNKHRDKPIREQAENIIHLFTLTNLGAPAAFKYFDTTIDRKRYTSTKEVLDATLIHQSITGLYETRIDLSQLGGDGGEAAAKEAAAKEAAAKEAAAKEAAAKEAAAKGGTLNIEDEYRLHETSKEPDVPLGSTWLSDFPQAWAETGGMGLAVRQAPLIIPLKATSTPVSIKQYPMSQEARLGIKPHIQRLLDQGILVPCQSPWNTPLLPVKKPGTNDYRPVQDLREVNKRVEDIHPTVPNPYNLLSGLPPSHQWYTVLDLKDAFFCLRLHPTSQPLFAFEWRDPEMGISGQLTWTRLPQGFKNSPTLFNEALHRDLADFRIQHPDLILLQYVDDLLLAATSEQDCQRGTRALLQTLGNLGYRASAKKAQICQKQVKYLGYLLKEGQRWLTEARKETVMGQPTPKTPRQLREFLGKAGFCRLFIPGFAEMAAPLYPLTKPGTLFNWGPDQQKAYQEIKQALLTAPALGLPDLTKPFELFVDEKQGYAKGVLTQKLGPWRRPVAYLSKKLDPVAAGWPPCLRMVAAIAVLTKDAGKLTMGQPLVILAPHAVEALVKQPPDRWLSNARMTHYQAMLLDTDRVQFGPVVALNPATLLPLPEKEAPHDCLEILAETHGTRPDLTDQPIPDADYTWYTDGSSFLQEGQRRAGAAVTTETEVIWARALPAGTSAQRAELIALTQALKMAEGKKLNVYTDSRYAFATAHVHGEIYRRRGWLTSEGREIKNKNEILALLKALFLPKRLSIIHCPGHQKGNSAEARGNRMADQAAREAAMKAVLETSTLLAGKRTADGSEFEKRTADGSEFESPKKKAKVE

SEQ ID NO: 1053 - protein, 2096 aa, synthetic construct
MPAAKRVKLDGGDKKYSIGLDIGTNSVGWAVITDEYKVPSKKFKVLGNTDRHSIKKNLIGALLFDSGETAEATRLKRTARRRYTRRKNRICYLQEIFSNEMAKVDDSFFHRLEESFLVEEDKKHERHPIFGNIVDEVAYHEKYPTIYHLRKKLVDSTDKADLRLIYLALAHMIKFRGHFLIEGDLNPDNSDVDKLFIQLVQTYNQLFEENPINASGVDAKAILSARLSKSRRLENLIAQLPGEKKNGLFGNLIALSLGLTPNFKSNFDLAEDAKLQLSKDTYDDDLDNLLAQIGDQYADLFLAAKNLSDAILLSDILRVNTEITKAPLSASMIKRYDEHHQDLTLLKALVRQQLPEKYKEIFFDQSKNGYAGYIDGGASQEEFYKFIKPILEKMDGTEELLVKLNREDLLRKQRTFDNGSIPHQIHLGELHAILRRQEDFYPFLKDNREKIEKILTFRIPYYVGPLARGNSRFAWMTRKSEETITPWNFEEVVDKGASAQSFIERMTNFDKNLPNEKVLPKHSLLYEYFTVYNELTKVKYVTEGMRKPAFLSGEQKKAIVDLLFKTNRKVTVKQLKEDYFKKIECFDSVEISGVEDRFNASLGTYHDLLKIIKDKDFLDNEENEDILEDIVLTLTLFEDREMIEERLKTYAHLFDDKVMKQLKRRRYTGWGRLSRKLINGIRDKQSGKTILDFLKSDGFANRNFMQLIHDDSLTFKEDIQKAQVSGQGDSLHEHIANLAGSPAIKKGILQTVKVVDELVKVMGRHKPENIVIEMARENQTTQKGQKNSRERMKRIEEGIKELGSQILKEHPVENTQLQNEKLYLYYLQNGRDMYVDQELDINRLSDYDVDHIVPQSFLKDDSIDNKVLTRSDKARGKSDNVPSEEVVKKMKNYWRQLLNAKLITQRKFDNLTKAERGGLSELDKAGFIKRQLVETRQITKHVAQILDSRMNTKYDENDKLIREVKVITLKSKLVSDFRKDFQFYKVREINNYHHAHDAYLNAVVGTALIKKYPKLESEFVYGDYKVYDVRKMIAKSEQEIGKATAKYFFYSNIMNFFKTEITLANGEIRKRPLIETNGETGEIVWDKGRDFATVRKVLSMPQVNIVKKTEVQTGGFSKESILPKRNSDKLIARKKDWDPKKYGGFDSPTVAYSVLVVAKVEKGKSKKLKSVKELLGITIMERSSFEKNPIDFLEAKGYKEVKKDLIIKLPKYSLFELENGRKRMLASAGELQKGNELALPSKYVNFLYLASHYEKLKGSPEDNEQKQLFVEQHKHYLDEIIEQISEFSKRVILADANLDKVLSAYNKHRDKPIREQAENIIHLFTLTNLGAPAAFKYFDTTIDRKRYTSTKEVLDATLIHQSITGLYETRIDLSQLGGDGGGGGGSSEAAAKGGTLNIEDEYRLHETSKEPDVPLGSTWLSDFPQAWAETGGMGLAVRQAPLIIPLKATSTPVSIKQYPMSQEARLGIKPHIQRLLDQGILVPCQSPWNTPLLPVKKPGTNDYRPVQDLREVNKRVEDIHPTVPNPYNLLSGLPPSHQWYTVLDLKDAFFCLRLHPTSQPLFAFEWRDPEMGISGQLTWTRLPQGFKNSPTLFNEALHRDLADFRIQHPDLILLQYVDDLLLAATSEQDCQRGTRALLQTLGNLGYRASAKKAQICQKQVKYLGYLLKEGQRWLTEARKETVMGQPTPKTPRQLREFLGKAGFCRLFIPGFAEMAAPLYPLTKPGTLFNWGPDQQKAYQEIKQALLTAPALGLPDLTKPFELFVDEKQGYAKGVLTQKLGPWRRPVAYLSKKLDPVAAGWPPCLRMVAAIAVLTKDAGKLTMGQPLVILAPHAVEALVKQPPDRWLSNARMTHYQAMLLDTDRVQFGPVVALNPATLLPLPEKEAPHDCLEILAETHGTRPDLTDQPIPDADYTWYTDGSSFLQEGQRRAGAAVTTETEVIWARALPAGTSAQRAELIALTQALKMAEGKKLNVYTDSRYAFATAHVHGEIYRRRGWLTSEGREIKNKNEILALLKALFLPKRLSIIHCPGHQKGNSAEARGNRMADQAAREAAMKAVLETSTLLAGKRTADGSEFEKRTADGSEFESPKKKAKVE

SEQ ID NO: 1054 - protein, 2096 aa, synthetic construct
MPAAKRVKLDGGDKKYSIGLDIGTNSVGWAVITDEYKVPSKKFKVLGNTDRHSIKKNLIGALLFDSGETAEATRLKRTARRRYTRRKNRICYLQEIFSNEMAKVDDSFFHRLEESFLVEEDKKHERHPIFGNIVDEVAYHEKYPTIYHLRKKLVDSTDKADLRLIYLALAHMIKFRGHFLIEGDLNPDNSDVDKLFIQLVQTYNQLFEENPINASGVDAKAILSARLSKSRRLENLIAQLPGEKKNGLFGNLIALSLGLTPNFKSNFDLAEDAKLQLSKDTYDDDLDNLLAQIGDQYADLFLAAKNLSDAILLSDILRVNTEITKAPLSASMIKRYDEHHQDLTLLKALVRQQLPEKYKEIFFDQSKNGYAGYIDGGASQEEFYKFIKPILEKMDGTEELLVKLNREDLLRKQRTFDNGSIPHQIHLGELHAILRRQEDFYPFLKDNREKIEKILTFRIPYYVGPLARGNSRFAWMTRKSEETITPWNFEEVVDKGASAQSFIERMTNFDKNLPNEKVLPKHSLLYEYFTVYNELTKVKYVTEGMRKPAFLSGEQKKAIVDLLFKTNRKVTVKQLKEDYFKKIECFDSVEISGVEDRFNASLGTYHDLLKIIKDKDFLDNEENEDILEDIVLTLTLFEDREMIEERLKTYAHLFDDKVMKQLKRRRYTGWGRLSRKLINGIRDKQSGKTILDFLKSDGFANRNFMQLIHDDSLTFKEDIQKAQVSGQGDSLHEHIANLAGSPAIKKGILQTVKVVDELVKVMGRHKPENIVIEMARENQTTQKGQKNSRERMKRIEEGIKELGSQILKEHPVENTQLQNEKLYLYYLQNGRDMYVDQELDINRLSDYDVDHIVPQSFLKDDSIDNKVLTRSDKARGKSDNVPSEEVVKKMKNYWRQLLNAKLITQRKFDNLTKAERGGLSELDKAGFIKRQLVETRQITKHVAQILDSRMNTKYDENDKLIREVKVITLKSKLVSDFRKDFQFYKVREINNYHHAHDAYLNAVVGTALIKKYPKLESEFVYGDYKVYDVRKMIAKSEQEIGKATAKYFFYSNIMNFFKTEITLANGEIRKRPLIETNGETGEIVWDKGRDFATVRKVLSMPQVNIVKKTEVQTGGFSKESILPKRNSDKLIARKKDWDPKKYGGFDSPTVAYSVLVVAKVEKGKSKKLKSVKELLGITIMERSSFEKNPIDFLEAKGYKEVKKDLIIKLPKYSLFELENGRKRMLASAGELQKGNELALPSKYVNFLYLASHYEKLKGSPEDNEQKQLFVEQHKHYLDEIIEQISEFSKRVILADANLDKVLSAYNKHRDKPIREQAENIIHLFTLTNLGAPAAFKYFDTTIDRKRYTSTKEVLDATLIHQSITGLYETRIDLSQLGGDGGGSSGGGEAAAKGGTLNIEDEYRLHETSKEPDVPLGSTWLSDFPQAWAETGGMGLAVRQAPLIIPLKATSTPVSIKQYPMSQEARLGIKPHIQRLLDQGILVPCQSPWNTPLLPVKKPGTNDYRPVQDLREVNKRVEDIHPTVPNPYNLLSGLPPSHQWYTVLDLKDAFFCLRLHPTSQPLFAFEWRDPEMGISGQLTWTRLPQGFKNSPTLFNEALHRDLADFRIQHPDLILLQYVDDLLLAATSEQDCQRGTRALLQTLGNLGYRASAKKAQICQKQVKYLGYLLKEGQRWLTEARKETVMGQPTPKTPRQLREFLGKAGFCRLFIPGFAEMAAPLYPLTKPGTLFNWGPDQQKAYQEIKQALLTAPALGLPDLTKPFELFVDEKQGYAKGVLTQKLGPWRRPVAYLSKKLDPVAAGWPPCLRMVAAIAVLTKDAGKLTMGQPLVILAPHAVEALVKQPPDRWLSNARMTHYQAMLLDTDRVQFGPVVALNPATLLPLPEKEAPHDCLEILAETHGTRPDLTDQPIPDADYTWYTDGSSFLQEGQRRAGAAVTTETEVIWARALPAGTSAQRAELIALTQALKMAEGKKLNVYTDSRYAFATAHVHGEIYRRRGWLTSEGREIKNKNEILALLKALFLPKRLSIIHCPGHQKGNSAEARGNRMADQAAREAAMKAVLETSTLLAGKRTADGSEFEKRTADGSEFESPKKKAKVE

SEQ ID NO: 1055 - protein, 2094 aa, synthetic construct
MPAAKRVKLDGGDKKYSIGLDIGTNSVGWAVITDEYKVPSKKFKVLGNTDRHSIKKNLIGALLFDSGETAEATRLKRTARRRYTRRKNRICYLQEIFSNEMAKVDDSFFHRLEESFLVEEDKKHERHPIFGNIVDEVAYHEKYPTIYHLRKKLVDSTDKADLRLIYLALAHMIKFRGHFLIEGDLNPDNSDVDKLFIQLVQTYNQLFEENPINASGVDAKAILSARLSKSRRLENLIAQLPGEKKNGLFGNLIALSLGLTPNFKSNFDLAEDAKLQLSKDTYDDDLDNLLAQIGDQYADLFLAAKNLSDAILLSDILRVNTEITKAPLSASMIKRYDEHHQDLTLLKALVRQQLPEKYKEIFFDQSKNGYAGYIDGGASQEEFYKFIKPILEKMDGTEELLVKLNREDLLRKQRTFDNGSIPHQIHLGELHAILRRQEDFYPFLKDNREKIEKILTFRIPYYVGPLARGNSRFAWMTRKSEETITPWNFEEVVDKGASAQSFIERMTNFDKNLPNEKVLPKHSLLYEYFTVYNELTKVKYVTEGMRKPAFLSGEQKKAIVDLLFKTNRKVTVKQLKEDYFKKIECFDSVEISGVEDRFNASLGTYHDLLKIIKDKDFLDNEENEDILEDIVLTLTLFEDREMIEERLKTYAHLFDDKVMKQLKRRRYTGWGRLSRKLINGIRDKQSGKTILDFLKSDGFANRNFMQLIHDDSLTFKEDIQKAQVSGQGDSLHEHIANLAGSPAIKKGILQTVKVVDELVKVMGRHKPENIVIEMARENQTTQKGQKNSRERMKRIEEGIKELGSQILKEHPVENTQLQNEKLYLYYLQNGRDMYVDQELDINRLSDYDVDHIVPQSFLKDDSIDNKVLTRSDKARGKSDNVPSEEVVKKMKNYWRQLLNAKLITQRKFDNLTKAERGGLSELDKAGFIKRQLVETRQITKHVAQILDSRMNTKYDENDKLIREVKVITLKSKLVSDFRKDFQFYKVREINNYHHAHDAYLNAVVGTALIKKYPKLESEFVYGDYKVYDVRKMIAKSEQEIGKATAKYFFYSNIMNFFKTEITLANGEIRKRPLIETNGETGEIVWDKGRDFATVRKVLSMPQVNIVKKTEVQTGGFSKESILPKRNSDKLIARKKDWDPKKYGGFDSPTVAYSVLVVAKVEKGKSKKLKSVKELLGITIMERSSFEKNPIDFLEAKGYKEVKKDLIIKLPKYSLFELENGRKRMLASAGELQKGNELALPSKYVNFLYLASHYEKLKGSPEDNEQKQLFVEQHKHYLDEIIEQISEFSKRVILADANLDKVLSAYNKHRDKPIREQAENIIHLFTLTNLGAPAAFKYFDTTIDRKRYTSTKEVLDATLIHQSITGLYETRIDLSQLGGDGGGGSPAPGGGGGTLNIEDEYRLHETSKEPDVPLGSTWLSDFPQAWAETGGMGLAVRQAPLIIPLKATSTPVSIKQYPMSQEARLGIKPHIQRLLDQGILVPCQSPWNTPLLPVKKPGTNDYRPVQDLREVNKRVEDIHPTVPNPYNLLSGLPPSHQWYTVLDLKDAFFCLRLHPTSQPLFAFEWRDPEMGISGQLTWTRLPQGFKNSPTLFNEALHRDLADFRIQHPDLILLQYVDDLLLAATSEQDCQRGTRALLQTLGNLGYRASAKKAQICQKQVKYLGYLLKEGQRWLTEARKETVMGQPTPKTPRQLREFLGKAGFCRLFIPGFAEMAAPLYPLTKPGTLFNWGPDQQKAYQEIKQALLTAPALGLPDLTKPFELFVDEKQGYAKGVLTQKLGPWRRPVAYLSKKLDPVAAGWPPCLRMVAAIAVLTKDAGKLTMGQPLVILAPHAVEALVKQPPDRWLSNARMTHYQAMLLDTDRVQFGPVVALNPATLLPLPEKEAPHDCLEILAETHGTRPDLTDQPIPDADYTWYTDGSSFLQEGQRRAGAAVTTETEVIWARALPAGTSAQRAELIALTQALKMAEGKKLNVYTDSRYAFATAHVHGEIYRRRGWLTSEGREIKNKNEILALLKALFLPKRLSIIHCPGHQKGNSAEARGNRMADQAAREAAMKAVLETSTLLAGKRTADGSEFEKRTADGSEFESPKKKAKVE

SEQ ID NO: 1056 - protein, 2096 aa, synthetic construct
MPAAKRVKLDGGDKKYSIGLDIGTNSVGWAVITDEYKVPSKKFKVLGNTDRHSIKKNLIGALLFDSGETAEATRLKRTARRRYTRRKNRICYLQEIFSNEMAKVDDSFFHRLEESFLVEEDKKHERHPIFGNIVDEVAYHEKYPTIYHLRKKLVDSTDKADLRLIYLALAHMIKFRGHFLIEGDLNPDNSDVDKLFIQLVQTYNQLFEENPINASGVDAKAILSARLSKSRRLENLIAQLPGEKKNGLFGNLIALSLGLTPNFKSNFDLAEDAKLQLSKDTYDDDLDNLLAQIGDQYADLFLAAKNLSDAILLSDILRVNTEITKAPLSASMIKRYDEHHQDLTLLKALVRQQLPEKYKEIFFDQSKNGYAGYIDGGASQEEFYKFIKPILEKMDGTEELLVKLNREDLLRKQRTFDNGSIPHQIHLGELHAILRRQEDFYPFLKDNREKIEKILTFRIPYYVGPLARGNSRFAWMTRKSEETITPWNFEEVVDKGASAQSFIERMTNFDKNLPNEKVLPKHSLLYEYFTVYNELTKVKYVTEGMRKPAFLSGEQKKAIVDLLFKTNRKVTVKQLKEDYFKKIECFDSVEISGVEDRFNASLGTYHDLLKIIKDKDFLDNEENEDILEDIVLTLTLFEDREMIEERLKTYAHLFDDKVMKQLKRRRYTGWGRLSRKLINGIRDKQSGKTILDFLKSDGFANRNFMQLIHDDSLTFKEDIQKAQVSGQGDSLHEHIANLAGSPAIKKGILQTVKVVDELVKVMGRHKPENIVIEMARENQTTQKGQKNSRERMKRIEEGIKELGSQILKEHPVENTQLQNEKLYLYYLQNGRDMYVDQELDINRLSDYDVDHIVPQSFLKDDSIDNKVLTRSDKARGKSDNVPSEEVVKKMKNYWRQLLNAKLITQRKFDNLTKAERGGLSELDKAGFIKRQLVETRQITKHVAQILDSRMNTKYDENDKLIREVKVITLKSKLVSDFRKDFQFYKVREINNYHHAHDAYLNAVVGTALIKKYPKLESEFVYGDYKVYDVRKMIAKSEQEIGKATAKYFFYSNIMNFFKTEITLANGEIRKRPLIETNGETGEIVWDKGRDFATVRKVLSMPQVNIVKKTEVQTGGFSKESILPKRNSDKLIARKKDWDPKKYGGFDSPTVAYSVLVVAKVEKGKSKKLKSVKELLGITIMERSSFEKNPIDFLEAKGYKEVKKDLIIKLPKYSLFELENGRKRMLASAGELQKGNELALPSKYVNFLYLASHYEKLKGSPEDNEQKQLFVEQHKHYLDEIIEQISEFSKRVILADANLDKVLSAYNKHRDKPIREQAENIIHLFTLTNLGAPAAFKYFDTTIDRKRYTSTKEVLDATLIHQSITGLYETRIDLSQLGGDGGEAAAKGGGGSSGGTLNIEDEYRLHETSKEPDVPLGSTWLSDFPQAWAETGGMGLAVRQAPLIIPLKATSTPVSIKQYPMSQEARLGIKPHIQRLLDQGILVPCQSPWNTPLLPVKKPGTNDYRPVQDLREVNKRVEDIHPTVPNPYNLLSGLPPSHQWYTVLDLKDAFFCLRLHPTSQPLFAFEWRDPEMGISGQLTWTRLPQGFKNSPTLFNEALHRDLADFRIQHPDLILLQYVDDLLLAATSEQDCQRGTRALLQTLGNLGYRASAKKAQICQKQVKYLGYLLKEGQRWLTEARKETVMGQPTPKTPRQLREFLGKAGFCRLFIPGFAEMAAPLYPLTKPGTLFNWGPDQQKAYQEIKQALLTAPALGLPDLTKPFELFVDEKQGYAKGVLTQKLGPWRRPVAYLSKKLDPVAAGWPPCLRMVAAIAVLTKDAGKLTMGQPLVILAPHAVEALVKQPPDRWLSNARMTHYQAMLLDTDRVQFGPVVALNPATLLPLPEKEAPHDCLEILAETHGTRPDLTDQPIPDADYTWYTDGSSFLQEGQRRAGAAVTTETEVIWARALPAGTSAQRAELIALTQALKMAEGKKLNVYTDSRYAFATAHVHGEIYRRRGWLTSEGREIKNKNEILALLKALFLPKRLSIIHCPGHQKGNSAEARGNRMADQAAREAAMKAVLETSTLLAGKRTADGSEFEKRTADGSEFESPKKKAKVE

SEQ ID NO: 1057 - protein, 2089 aa, synthetic construct
MPAAKRVKLDGGDKKYSIGLDIGTNSVGWAVITDEYKVPSKKFKVLGNTDRHSIKKNLIGALLFDSGETAEATRLKRTARRRYTRRKNRICYLQEIFSNEMAKVDDSFFHRLEESFLVEEDKKHERHPIFGNIVDEVAYHEKYPTIYHLRKKLVDSTDKADLRLIYLALAHMIKFRGHFLIEGDLNPDNSDVDKLFIQLVQTYNQLFEENPINASGVDAKAILSARLSKSRRLENLIAQLPGEKKNGLFGNLIALSLGLTPNFKSNFDLAEDAKLQLSKDTYDDDLDNLLAQIGDQYADLFLAAKNLSDAILLSDILRVNTEITKAPLSASMIKRYDEHHQDLTLLKALVRQQLPEKYKEIFFDQSKNGYAGYIDGGASQEEFYKFIKPILEKMDGTEELLVKLNREDLLRKQRTFDNGSIPHQIHLGELHAILRRQEDFYPFLKDNREKIEKILTFRIPYYVGPLARGNSRFAWMTRKSEETITPWNFEEVVDKGASAQSFIERMTNFDKNLPNEKVLPKHSLLYEYFTVYNELTKVKYVTEGMRKPAFLSGEQKKAIVDLLFKTNRKVTVKQLKEDYFKKIECFDSVEISGVEDRFNASLGTYHDLLKIIKDKDFLDNEENEDILEDIVLTLTLFEDREMIEERLKTYAHLFDDKVMKQLKRRRYTGWGRLSRKLINGIRDKQSGKTILDFLKSDGFANRNFMQLIHDDSLTFKEDIQKAQVSGQGDSLHEHIANLAGSPAIKKGILQTVKVVDELVKVMGRHKPENIVIEMARENQTTQKGQKNSRERMKRIEEGIKELGSQILKEHPVENTQLQNEKLYLYYLQNGRDMYVDQELDINRLSDYDVDHIVPQSFLKDDSIDNKVLTRSDKARGKSDNVPSEEVVKKMKNYWRQLLNAKLITQRKFDNLTKAERGGLSELDKAGFIKRQLVETRQITKHVAQILDSRMNTKYDENDKLIREVKVITLKSKLVSDFRKDFQFYKVREINNYHHAHDAYLNAVVGTALIKKYPKLESEFVYGDYKVYDVRKMIAKSEQEIGKATAKYFFYSNIMNFFKTEITLANGEIRKRPLIETNGETGEIVWDKGRDFATVRKVLSMPQVNIVKKTEVQTGGFSKESILPKRNSDKLIARKKDWDPKKYGGFDSPTVAYSVLVVAKVEKGKSKKLKSVKELLGITIMERSSFEKNPIDFLEAKGYKEVKKDLIIKLPKYSLFELENGRKRMLASAGELQKGNELALPSKYVNFLYLASHYEKLKGSPEDNEQKQLFVEQHKHYLDEIIEQISEFSKRVILADANLDKVLSAYNKHRDKPIREQAENIIHLFTLTNLGAPAAFKYFDTTIDRKRYTSTKEVLDATLIHQSITGLYETRIDLSQLGGDGGGGGGGGTLNIEDEYRLHETSKEPDVPLGSTWLSDFPQAWAETGGMGLAVRQAPLIIPLKATSTPVSIKQYPMSQEARLGIKPHIQRLLDQGILVPCQSPWNTPLLPVKKPGTNDYRPVQDLREVNKRVEDIHPTVPNPYNLLSGLPPSHQWYTVLDLKDAFFCLRLHPTSQPLFAFEWRDPEMGISGQLTWTRLPQGFKNSPTLFNEALHRDLADFRIQHPDLILLQYVDDLLLAATSEQDCQRGTRALLQTLGNLGYRASAKKAQICQKQVKYLGYLLKEGQRWLTEARKETVMGQPTPKTPRQLREFLGKAGFCRLFIPGFAEMAAPLYPLTKPGTLFNWGPDQQKAYQEIKQALLTAPALGLPDLTKPFELFVDEKQGYAKGVLTQKLGPWRRPVAYLSKKLDPVAAGWPPCLRMVAAIAVLTKDAGKLTMGQPLVILAPHAVEALVKQPPDRWLSNARMTHYQAMLLDTDRVQFGPVVALNPATLLPLPEKEAPHDCLEILAETHGTRPDLTDQPIPDADYTWYTDGSSFLQEGQRRAGAAVTTETEVIWARALPAGTSAQRAELIALTQALKMAEGKKLNVYTDSRYAFATAHVHGEIYRRRGWLTSEGREIKNKNEILALLKALFLPKRLSIIHCPGHQKGNSAEARGNRMADQAAREAAMKAVLETSTLLAGKRTADGSEFEKRTADGSEFESPKKKAKVE

SEQ ID NO: 1058 - protein, 2096 aa, synthetic construct
MPAAKRVKLDGGDKKYSIGLDIGTNSVGWAVITDEYKVPSKKFKVLGNTDRHSIKKNLIGALLFDSGETAEATRLKRTARRRYTRRKNRICYLQEIFSNEMAKVDDSFFHRLEESFLVEEDKKHERHPIFGNIVDEVAYHEKYPTIYHLRKKLVDSTDKADLRLIYLALAHMIKFRGHFLIEGDLNPDNSDVDKLFIQLVQTYNQLFEENPINASGVDAKAILSARLSKSRRLENLIAQLPGEKKNGLFGNLIALSLGLTPNFKSNFDLAEDAKLQLSKDTYDDDLDNLLAQIGDQYADLFLAAKNLSDAILLSDILRVNTEITKAPLSASMIKRYDEHHQDLTLLKALVRQQLPEKYKEIFFDQSKNGYAGYIDGGASQEEFYKFIKPILEKMDGTEELLVKLNREDLLRKQRTFDNGSIPHQIHLGELHAILRRQEDFYPFLKDNREKIEKILTFRIPYYVGPLARGNSRFAWMTRKSEETITPWNFEEVVDKGASAQSFIERMTNFDKNLPNEKVLPKHSLLYEYFTVYNELTKVKYVTEGMRKPAFLSGEQKKAIVDLLFKTNRKVTVKQLKEDYFKKIECFDSVEISGVEDRFNASLGTYHDLLKIIKDKDFLDNEENEDILEDIVLTLTLFEDREMIEERLKTYAHLFDDKVMKQLKRRRYTGWGRLSRKLINGIRDKQSGKTILDFLKSDGFANRNFMQLIHDDSLTFKEDIQKAQVSGQGDSLHEHIANLAGSPAIKKGILQTVKVVDELVKVMGRHKPENIVIEMARENQTTQKGQKNSRERMKRIEEGIKELGSQILKEHPVENTQLQNEKLYLYYLQNGRDMYVDQELDINRLSDYDVDHIVPQSFLKDDSIDNKVLTRSDKARGKSDNVPSEEVVKKMKNYWRQLLNAKLITQRKFDNLTKAERGGLSELDKAGFIKRQLVETRQITKHVAQILDSRMNTKYDENDKLIREVKVITLKSKLVSDFRKDFQFYKVREINNYHHAHDAYLNAVVGTALIKKYPKLESEFVYGDYKVYDVRKMIAKSEQEIGKATAKYFFYSNIMNFFKTEITLANGEIRKRPLIETNGETGEIVWDKGRDFATVRKVLSMPQVNIVKKTEVQTGGFSKESILPKRNSDKLIARKKDWDPKKYGGFDSPTVAYSVLVVAKVEKGKSKKLKSVKELLGITIMERSSFEKNPIDFLEAKGYKEVKKDLIIKLPKYSLFELENGRKRMLASAGELQKGNELALPSKYVNFLYLASHYEKLKGSPEDNEQKQLFVEQHKHYLDEIIEQISEFSKRVILADANLDKVLSAYNKHRDKPIREQAENIIHLFTLTNLGAPAAFKYFDTTIDRKRYTSTKEVLDATLIHQSITGLYETRIDLSQLGGDGGEAAAKGGGPAPGGTLNIEDEYRLHETSKEPDVPLGSTWLSDFPQAWAETGGMGLAVRQAPLIIPLKATSTPVSIKQYPMSQEARLGIKPHIQRLLDQGILVPCQSPWNTPLLPVKKPGTNDYRPVQDLREVNKRVEDIHPTVPNPYNLLSGLPPSHQWYTVLDLKDAFFCLRLHPTSQPLFAFEWRDPEMGISGQLTWTRLPQGFKNSPTLFNEALHRDLADFRIQHPDLILLQYVDDLLLAATSEQDCQRGTRALLQTLGNLGYRASAKKAQICQKQVKYLGYLLKEGQRWLTEARKETVMGQPTPKTPRQLREFLGKAGFCRLFIPGFAEMAAPLYPLTKPGTLFNWGPDQQKAYQEIKQALLTAPALGLPDLTKPFELFVDEKQGYAKGVLTQKLGPWRRPVAYLSKKLDPVAAGWPPCLRMVAAIAVLTKDAGKLTMGQPLVILAPHAVEALVKQPPDRWLSNARMTHYQAMLLDTDRVQFGPVVALNPATLLPLPEKEAPHDCLEILAETHGTRPDLTDQPIPDADYTWYTDGSSFLQEGQRRAGAAVTTETEVIWARALPAGTSAQRAELIALTQALKMAEGKKLNVYTDSRYAFATAHVHGEIYRRRGWLTSEGREIKNKNEILALLKALFLPKRLSIIHCPGHQKGNSAEARGNRMADQAAREAAMKAVLETSTLLAGKRTADGSEFEKRTADGSEFESPKKKAKVE

SEQ ID NO: 1059 - protein, 2096 aa, synthetic construct
MPAAKRVKLDGGDKKYSIGLDIGTNSVGWAVITDEYKVPSKKFKVLGNTDRHSIKKNLIGALLFDSGETAEATRLKRTARRRYTRRKNRICYLQEIFSNEMAKVDDSFFHRLEESFLVEEDKKHERHPIFGNIVDEVAYHEKYPTIYHLRKKLVDSTDKADLRLIYLALAHMIKFRGHFLIEGDLNPDNSDVDKLFIQLVQTYNQLFEENPINASGVDAKAILSARLSKSRRLENLIAQLPGEKKNGLFGNLIALSLGLTPNFKSNFDLAEDAKLQLSKDTYDDDLDNLLAQIGDQYADLFLAAKNLSDAILLSDILRVNTEITKAPLSASMIKRYDEHHQDLTLLKALVRQQLPEKYKEIFFDQSKNGYAGYIDGGASQEEFYKFIKPILEKMDGTEELLVKLNREDLLRKQRTFDNGSIPHQIHLGELHAILRRQEDFYPFLKDNREKIEKILTFRIPYYVGPLARGNSRFAWMTRKSEETITPWNFEEVVDKGASAQSFIERMTNFDKNLPNEKVLPKHSLLYEYFTVYNELTKVKYVTEGMRKPAFLSGEQKKAIVDLLFKTNRKVTVKQLKEDYFKKIECFDSVEISGVEDRFNASLGTYHDLLKIIKDKDFLDNEENEDILEDIVLTLTLFEDREMIEERLKTYAHLFDDKVMKQLKRRRYTGWGRLSRKLINGIRDKQSGKTILDFLKSDGFANRNFMQLIHDDSLTFKEDIQKAQVSGQGDSLHEHIANLAGSPAIKKGILQTVKVVDELVKVMGRHKPENIVIEMARENQTTQKGQKNSRERMKRIEEGIKELGSQILKEHPVENTQLQNEKLYLYYLQNGRDMYVDQELDINRLSDYDVDHIVPQSFLKDDSIDNKVLTRSDKARGKSDNVPSEEVVKKMKNYWRQLLNAKLITQRKFDNLTKAERGGLSELDKAGFIKRQLVETRQITKHVAQILDSRMNTKYDENDKLIREVKVITLKSKLVSDFRKDFQFYKVREINNYHHAHDAYLNAVVGTALIKKYPKLESEFVYGDYKVYDVRKMIAKSEQEIGKATAKYFFYSNIMNFFKTEITLANGEIRKRPLIETNGETGEIVWDKGRDFATVRKVLSMPQVNIVKKTEVQTGGFSKESILPKRNSDKLIARKKDWDPKKYGGFDSPTVAYSVLVVAKVEKGKSKKLKSVKELLGITIMERSSFEKNPIDFLEAKGYKEVKKDLIIKLPKYSLFELENGRKRMLASAGELQKGNELALPSKYVNFLYLASHYEKLKGSPEDNEQKQLFVEQHKHYLDEIIEQISEFSKRVILADANLDKVLSAYNKHRDKPIREQAENIIHLFTLTNLGAPAAFKYFDTTIDRKRYTSTKEVLDATLIHQSITGLYETRIDLSQLGGDGGGGSGSSEAAAKGGTLNIEDEYRLHETSKEPDVPLGSTWLSDFPQAWAETGGMGLAVRQAPLIIPLKATSTPVSIKQYPMSQEARLGIKPHIQRLLDQGILVPCQSPWNTPLLPVKKPGTNDYRPVQDLREVNKRVEDIHPTVPNPYNLLSGLPPSHQWYTVLDLKDAFFCLRLHPTSQPLFAFEWRDPEMGISGQLTWTRLPQGFKNSPTLFNEALHRDLADFRIQHPDLILLQYVDDLLLAATSEQDCQRGTRALLQTLGNLGYRASAKKAQICQKQVKYLGYLLKEGQRWLTEARKETVMGQPTPKTPRQLREFLGKAGFCRLFIPGFAEMAAPLYPLTKPGTLFNWGPDQQKAYQEIKQALLTAPALGLPDLTKPFELFVDEKQGYAKGVLTQKLGPWRRPVAYLSKKLDPVAAGWPPCLRMVAAIAVLTKDAGKLTMGQPLVILAPHAVEALVKQPPDRWLSNARMTHYQAMLLDTDRVQFGPVVALNPATLLPLPEKEAPHDCLEILAETHGTRPDLTDQPIPDADYTWYTDGSSFLQEGQRRAGAAVTTETEVIWARALPAGTSAQRAELIALTQALKMAEGKKLNVYTDSRYAFATAHVHGEIYRRRGWLTSEGREIKNKNEILALLKALFLPKRLSIIHCPGHQKGNSAEARGNRMADQAAREAAMKAVLETSTLLAGKRTADGSEFEKRTADGSEFESPKKKAKVE

SEQ ID NO: 1060 - protein, 2096 aa, synthetic construct
MPAAKRVKLDGGDKKYSIGLDIGTNSVGWAVITDEYKVPSKKFKVLGNTDRHSIKKNLIGALLFDSGETAEATRLKRTARRRYTRRKNRICYLQEIFSNEMAKVDDSFFHRLEESFLVEEDKKHERHPIFGNIVDEVAYHEKYPTIYHLRKKLVDSTDKADLRLIYLALAHMIKFRGHFLIEGDLNPDNSDVDKLFIQLVQTYNQLFEENPINASGVDAKAILSARLSKSRRLENLIAQLPGEKKNGLFGNLIALSLGLTPNFKSNFDLAEDAKLQLSKDTYDDDLDNLLAQIGDQYADLFLAAKNLSDAILLSDILRVNTEITKAPLSASMIKRYDEHHQDLTLLKALVRQQLPEKYKEIFFDQSKNGYAGYIDGGASQEEFYKFIKPILEKMDGTEELLVKLNREDLLRKQRTFDNGSIPHQIHLGELHAILRRQEDFYPFLKDNREKIEKILTFRIPYYVGPLARGNSRFAWMTRKSEETITPWNFEEVVDKGASAQSFIERMTNFDKNLPNEKVLPKHSLLYEYFTVYNELTKVKYVTEGMRKPAFLSGEQKKAIVDLLFKTNRKVTVKQLKEDYFKKIECFDSVEISGVEDRFNASLGTYHDLLKIIKDKDFLDNEENEDILEDIVLTLTLFEDREMIEERLKTYAHLFDDKVMKQLKRRRYTGWGRLSRKLINGIRDKQSGKTILDFLKSDGFANRNFMQLIHDDSLTFKEDIQKAQVSGQGDSLHEHIANLAGSPAIKKGILQTVKVVDELVKVMGRHKPENIVIEMARENQTTQKGQKNSRERMKRIEEGIKELGSQILKEHPVENTQLQNEKLYLYYLQNGRDMYVDQELDINRLSDYDVDHIVPQSFLKDDSIDNKVLTRSDKARGKSDNVPSEEVVKKMKNYWRQLLNAKLITQRKFDNLTKAERGGLSELDKAGFIKRQLVETRQITKHVAQILDSRMNTKYDENDKLIREVKVITLKSKLVSDFRKDFQFYKVREINNYHHAHDAYLNAVVGTALIKKYPKLESEFVYGDYKVYDVRKMIAKSEQEIGKATAKYFFYSNIMNFFKTEITLANGEIRKRPLIETNGETGEIVWDKGRDFATVRKVLSMPQVNIVKKTEVQTGGFSKESILPKRNSDKLIARKKDWDPKKYGGFDSPTVAYSVLVVAKVEKGKSKKLKSVKELLGITIMERSSFEKNPIDFLEAKGYKEVKKDLIIKLPKYSLFELENGRKRMLASAGELQKGNELALPSKYVNFLYLASHYEKLKGSPEDNEQKQLFVEQHKHYLDEIIEQISEFSKRVILADANLDKVLSAYNKHRDKPIREQAENIIHLFTLTNLGAPAAFKYFDTTIDRKRYTSTKEVLDATLIHQSITGLYETRIDLSQLGGDGGGSSGGSEAAAKGGTLNIEDEYRLHETSKEPDVPLGSTWLSDFPQAWAETGGMGLAVRQAPLIIPLKATSTPVSIKQYPMSQEARLGIKPHIQRLLDQGILVPCQSPWNTPLLPVKKPGTNDYRPVQDLREVNKRVEDIHPTVPNPYNLLSGLPPSHQWYTVLDLKDAFFCLRLHPTSQPLFAFEWRDPEMGISGQLTWTRLPQGFKNSPTLFNEALHRDLADFRIQHPDLILLQYVDDLLLAATSEQDCQRGTRALLQTLGNLGYRASAKKAQICQKQVKYLGYLLKEGQRWLTEARKETVMGQPTPKTPRQLREFLGKAGFCRLFIPGFAEMAAPLYPLTKPGTLFNWGPDQQKAYQEIKQALLTAPALGLPDLTKPFELFVDEKQGYAKGVLTQKLGPWRRPVAYLSKKLDPVAAGWPPCLRMVAAIAVLTKDAGKLTMGQPLVILAPHAVEALVKQPPDRWLSNARMTHYQAMLLDTDRVQFGPVVALNPATLLPLPEKEAPHDCLEILAETHGTRPDLTDQPIPDADYTWYTDGSSFLQEGQRRAGAAVTTETEVIWARALPAGTSAQRAELIALTQALKMAEGKKLNVYTDSRYAFATAHVHGEIYRRRGWLTSEGREIKNKNEILALLKALFLPKRLSIIHCPGHQKGNSAEARGNRMADQAAREAAMKAVLETSTLLAGKRTADGSEFEKRTADGSEFESPKKKAKVE

SEQ ID NO: 1061 - protein, 2094 aa, synthetic construct
MPAAKRVKLDGGDKKYSIGLDIGTNSVGWAVITDEYKVPSKKFKVLGNTDRHSIKKNLIGALLFDSGETAEATRLKRTARRRYTRRKNRICYLQEIFSNEMAKVDDSFFHRLEESFLVEEDKKHERHPIFGNIVDEVAYHEKYPTIYHLRKKLVDSTDKADLRLIYLALAHMIKFRGHFLIEGDLNPDNSDVDKLFIQLVQTYNQLFEENPINASGVDAKAILSARLSKSRRLENLIAQLPGEKKNGLFGNLIALSLGLTPNFKSNFDLAEDAKLQLSKDTYDDDLDNLLAQIGDQYADLFLAAKNLSDAILLSDILRVNTEITKAPLSASMIKRYDEHHQDLTLLKALVRQQLPEKYKEIFFDQSKNGYAGYIDGGASQEEFYKFIKPILEKMDGTEELLVKLNREDLLRKQRTFDNGSIPHQIHLGELHAILRRQEDFYPFLKDNREKIEKILTFRIPYYVGPLARGNSRFAWMTRKSEETITPWNFEEVVDKGASAQSFIERMTNFDKNLPNEKVLPKHSLLYEYFTVYNELTKVKYVTEGMRKPAFLSGEQKKAIVDLLFKTNRKVTVKQLKEDYFKKIECFDSVEISGVEDRFNASLGTYHDLLKIIKDKDFLDNEENEDILEDIVLTLTLFEDREMIEERLKTYAHLFDDKVMKQLKRRRYTGWGRLSRKLINGIRDKQSGKTILDFLKSDGFANRNFMQLIHDDSLTFKEDIQKAQVSGQGDSLHEHIANLAGSPAIKKGILQTVKVVDELVKVMGRHKPENIVIEMARENQTTQKGQKNSRERMKRIEEGIKELGSQILKEHPVENTQLQNEKLYLYYLQNGRDMYVDQELDINRLSDYDVDHIVPQSFLKDDSIDNKVLTRSDKARGKSDNVPSEEVVKKMKNYWRQLLNAKLITQRKFDNLTKAERGGLSELDKAGFIKRQLVETRQITKHVAQILDSRMNTKYDENDKLIREVKVITLKSKLVSDFRKDFQFYKVREINNYHHAHDAYLNAVVGTALIKKYPKLESEFVYGDYKVYDVRKMIAKSEQEIGKATAKYFFYSNIMNFFKTEITLANGEIRKRPLIETNGETGEIVWDKGRDFATVRKVLSMPQVNIVKKTEVQTGGFSKESILPKRNSDKLIARKKDWDPKKYGGFDSPTVAYSVLVVAKVEKGKSKKLKSVKELLGITIMERSSFEKNPIDFLEAKGYKEVKKDLIIKLPKYSLFELENGRKRMLASAGELQKGNELALPSKYVNFLYLASHYEKLKGSPEDNEQKQLFVEQHKHYLDEIIEQISEFSKRVILADANLDKVLSAYNKHRDKPIREQAENIIHLFTLTNLGAPAAFKYFDTTIDRKRYTSTKEVLDATLIHQSITGLYETRIDLSQLGGDGGGSSGGSPAPGGTLNIEDEYRLHETSKEPDVPLGSTWLSDFPQAWAETGGMGLAVRQAPLIIPLKATSTPVSIKQYPMSQEARLGIKPHIQRLLDQGILVPCQSPWNTPLLPVKKPGTNDYRPVQDLREVNKRVEDIHPTVPNPYNLLSGLPPSHQWYTVLDLKDAFFCLRLHPTSQPLFAFEWRDPEMGISGQLTWTRLPQGFKNSPTLFNEALHRDLADFRIQHPDLILLQYVDDLLLAATSEQDCQRGTRALLQTLGNLGYRASAKKAQICQKQVKYLGYLLKEGQRWLTEARKETVMGQPTPKTPRQLREFLGKAGFCRLFIPGFAEMAAPLYPLTKPGTLFNWGPDQQKAYQEIKQALLTAPALGLPDLTKPFELFVDEKQGYAKGVLTQKLGPWRRPVAYLSKKLDPVAAGWPPCLRMVAAIAVLTKDAGKLTMGQPLVILAPHAVEALVKQPPDRWLSNARMTHYQAMLLDTDRVQFGPVVALNPATLLPLPEKEAPHDCLEILAETHGTRPDLTDQPIPDADYTWYTDGSSFLQEGQRRAGAAVTTETEVIWARALPAGTSAQRAELIALTQALKMAEGKKLNVYTDSRYAFATAHVHGEIYRRRGWLTSEGREIKNKNEILALLKALFLPKRLSIIHCPGHQKGNSAEARGNRMADQAAREAAMKAVLETSTLLAGKRTADGSEFEKRTADGSEFESPKKKAKVE

SEQ ID NO: 1062 - protein, 2091 aa, synthetic construct
MPAAKRVKLDGGDKKYSIGLDIGTNSVGWAVITDEYKVPSKKFKVLGNTDRHSIKKNLIGALLFDSGETAEATRLKRTARRRYTRRKNRICYLQEIFSNEMAKVDDSFFHRLEESFLVEEDKKHERHPIFGNIVDEVAYHEKYPTIYHLRKKLVDSTDKADLRLIYLALAHMIKFRGHFLIEGDLNPDNSDVDKLFIQLVQTYNQLFEENPINASGVDAKAILSARLSKSRRLENLIAQLPGEKKNGLFGNLIALSLGLTPNFKSNFDLAEDAKLQLSKDTYDDDLDNLLAQIGDQYADLFLAAKNLSDAILLSDILRVNTEITKAPLSASMIKRYDEHHQDLTLLKALVRQQLPEKYKEIFFDQSKNGYAGYIDGGASQEEFYKFIKPILEKMDGTEELLVKLNREDLLRKQRTFDNGSIPHQIHLGELHAILRRQEDFYPFLKDNREKIEKILTFRIPYYVGPLARGNSRFAWMTRKSEETITPWNFEEVVDKGASAQSFIERMTNFDKNLPNEKVLPKHSLLYEYFTVYNELTKVKYVTEGMRKPAFLSGEQKKAIVDLLFKTNRKVTVKQLKEDYFKKIECFDSVEISGVEDRFNASLGTYHDLLKIIKDKDFLDNEENEDILEDIVLTLTLFEDREMIEERLKTYAHLFDDKVMKQLKRRRYTGWGRLSRKLINGIRDKQSGKTILDFLKSDGFANRNFMQLIHDDSLTFKEDIQKAQVSGQGDSLHEHIANLAGSPAIKKGILQTVKVVDELVKVMGRHKPENIVIEMARENQTTQKGQKNSRERMKRIEEGIKELGSQILKEHPVENTQLQNEKLYLYYLQNGRDMYVDQELDINRLSDYDVDHIVPQSFLKDDSIDNKVLTRSDKARGKSDNVPSEEVVKKMKNYWRQLLNAKLITQRKFDNLTKAERGGLSELDKAGFIKRQLVETRQITKHVAQILDSRMNTKYDENDKLIREVKVITLKSKLVSDFRKDFQFYKVREINNYHHAHDAYLNAVVGTALIKKYPKLESEFVYGDYKVYDVRKMIAKSEQEIGKATAKYFFYSNIMNFFKTEITLANGEIRKRPLIETNGETGEIVWDKGRDFATVRKVLSMPQVNIVKKTEVQTGGFSKESILPKRNSDKLIARKKDWDPKKYGGFDSPTVAYSVLVVAKVEKGKSKKLKSVKELLGITIMERSSFEKNPIDFLEAKGYKEVKKDLIIKLPKYSLFELENGRKRMLASAGELQKGNELALPSKYVNFLYLASHYEKLKGSPEDNEQKQLFVEQHKHYLDEIIEQISEFSKRVILADANLDKVLSAYNKHRDKPIREQAENIIHLFTLTNLGAPAAFKYFDTTIDRKRYTSTKEVLDATLIHQSITGLYETRIDLSQLGGDGGGSSGGSGGTLNIEDEYRLHETSKEPDVPLGSTWLSDFPQAWAETGGMGLAVRQAPLIIPLKATSTPVSIKQYPMSQEARLGIKPHIQRLLDQGILVPCQSPWNTPLLPVKKPGTNDYRPVQDLREVNKRVEDIHPTVPNPYNLLSGLPPSHQWYTVLDLKDAFFCLRLHPTSQPLFAFEWRDPEMGISGQLTWTRLPQGFKNSPTLFNEALHRDLADFRIQHPDLILLQYVDDLLLAATSEQDCQRGTRALLQTLGNLGYRASAKKAQICQKQVKYLGYLLKEGQRWLTEARKETVMGQPTPKTPRQLREFLGKAGFCRLFIPGFAEMAAPLYPLTKPGTLFNWGPDQQKAYQEIKQALLTAPALGLPDLTKPFELFVDEKQGYAKGVLTQKLGPWRRPVAYLSKKLDPVAAGWPPCLRMVAAIAVLTKDAGKLTMGQPLVILAPHAVEALVKQPPDRWLSNARMTHYQAMLLDTDRVQFGPVVALNPATLLPLPEKEAPHDCLEILAETHGTRPDLTDQPIPDADYTWYTDGSSFLQEGQRRAGAAVTTETEVIWARALPAGTSAQRAELIALTQALKMAEGKKLNVYTDSRYAFATAHVHGEIYRRRGWLTSEGREIKNKNEILALLKALFLPKRLSIIHCPGHQKGNSAEARGNRMADQAAREAAMKAVLETSTLLAGKRTADGSEFEKRTADGSEFESPKKKAKVE

SEQ ID NO: 1063 - protein, 2094 aa, synthetic construct
MPAAKRVKLDGGDKKYSIGLDIGTNSVGWAVITDEYKVPSKKFKVLGNTDRHSIKKNLIGALLFDSGETAEATRLKRTARRRYTRRKNRICYLQEIFSNEMAKVDDSFFHRLEESFLVEEDKKHERHPIFGNIVDEVAYHEKYPTIYHLRKKLVDSTDKADLRLIYLALAHMIKFRGHFLIEGDLNPDNSDVDKLFIQLVQTYNQLFEENPINASGVDAKAILSARLSKSRRLENLIAQLPGEKKNGLFGNLIALSLGLTPNFKSNFDLAEDAKLQLSKDTYDDDLDNLLAQIGDQYADLFLAAKNLSDAILLSDILRVNTEITKAPLSASMIKRYDEHHQDLTLLKALVRQQLPEKYKEIFFDQSKNGYAGYIDGGASQEEFYKFIKPILEKMDGTEELLVKLNREDLLRKQRTFDNGSIPHQIHLGELHAILRRQEDFYPFLKDNREKIEKILTFRIPYYVGPLARGNSRFAWMTRKSEETITPWNFEEVVDKGASAQSFIERMTNFDKNLPNEKVLPKHSLLYEYFTVYNELTKVKYVTEGMRKPAFLSGEQKKAIVDLLFKTNRKVTVKQLKEDYFKKIECFDSVEISGVEDRFNASLGTYHDLLKIIKDKDFLDNEENEDILEDIVLTLTLFEDREMIEERLKTYAHLFDDKVMKQLKRRRYTGWGRLSRKLINGIRDKQSGKTILDFLKSDGFANRNFMQLIHDDSLTFKEDIQKAQVSGQGDSLHEHIANLAGSPAIKKGILQTVKVVDELVKVMGRHKPENIVIEMARENQTTQKGQKNSRERMKRIEEGIKELGSQILKEHPVENTQLQNEKLYLYYLQNGRDMYVDQELDINRLSDYDVDHIVPQSFLKDDSIDNKVLTRSDKARGKSDNVPSEEVVKKMKNYWRQLLNAKLITQRKFDNLTKAERGGLSELDKAGFIKRQLVETRQITKHVAQILDSRMNTKYDENDKLIREVKVITLKSKLVSDFRKDFQFYKVREINNYHHAHDAYLNAVVGTALIKKYPKLESEFVYGDYKVYDVRKMIAKSEQEIGKATAKYFFYSNIMNFFKTEITLANGEIRKRPLIETNGETGEIVWDKGRDFATVRKVLSMPQVNIVKKTEVQTGGFSKESILPKRNSDKLIARKKDWDPKKYGGFDSPTVAYSVLVVAKVEKGKSKKLKSVKELLGITIMERSSFEKNPIDFLEAKGYKEVKKDLIIKLPKYSLFELENGRKRMLASAGELQKGNELALPSKYVNFLYLASHYEKLKGSPEDNEQKQLFVEQHKHYLDEIIEQISEFSKRVILADANLDKVLSAYNKHRDKPIREQAENIIHLFTLTNLGAPAAFKYFDTTIDRKRYTSTKEVLDATLIHQSITGLYETRIDLSQLGGDGGGGSGSSPAPGGTLNIEDEYRLHETSKEPDVPLGSTWLSDFPQAWAETGGMGLAVRQAPLIIPLKATSTPVSIKQYPMSQEARLGIKPHIQRLLDQGILVPCQSPWNTPLLPVKKPGTNDYRPVQDLREVNKRVEDIHPTVPNPYNLLSGLPPSHQWYTVLDLKDAFFCLRLHPTSQPLFAFEWRDPEMGISGQLTWTRLPQGFKNSPTLFNEALHRDLADFRIQHPDLILLQYVDDLLLAATSEQDCQRGTRALLQTLGNLGYRASAKKAQICQKQVKYLGYLLKEGQRWLTEARKETVMGQPTPKTPRQLREFLGKAGFCRLFIPGFAEMAAPLYPLTKPGTLFNWGPDQQKAYQEIKQALLTAPALGLPDLTKPFELFVDEKQGYAKGVLTQKLGPWRRPVAYLSKKLDPVAAGWPPCLRMVAAIAVLTKDAGKLTMGQPLVILAPHAVEALVKQPPDRWLSNARMTHYQAMLLDTDRVQFGPVVALNPATLLPLPEKEAPHDCLEILAETHGTRPDLTDQPIPDADYTWYTDGSSFLQEGQRRAGAAVTTETEVIWARALPAGTSAQRAELIALTQALKMAEGKKLNVYTDSRYAFATAHVHGEIYRRRGWLTSEGREIKNKNEILALLKALFLPKRLSIIHCPGHQKGNSAEARGNRMADQAAREAAMKAVLETSTLLAGKRTADGSEFEKRTADGSEFESPKKKAKVE

SEQ ID NO: 1064 - protein, 2096 aa, synthetic construct
MPAAKRVKLDGGDKKYSIGLDIGTNSVGWAVITDEYKVPSKKFKVLGNTDRHSIKKNLIGALLFDSGETAEATRLKRTARRRYTRRKNRICYLQEIFSNEMAKVDDSFFHRLEESFLVEEDKKHERHPIFGNIVDEVAYHEKYPTIYHLRKKLVDSTDKADLRLIYLALAHMIKFRGHFLIEGDLNPDNSDVDKLFIQLVQTYNQLFEENPINASGVDAKAILSARLSKSRRLENLIAQLPGEKKNGLFGNLIALSLGLTPNFKSNFDLAEDAKLQLSKDTYDDDLDNLLAQIGDQYADLFLAAKNLSDAILLSDILRVNTEITKAPLSASMIKRYDEHHQDLTLLKALVRQQLPEKYKEIFFDQSKNGYAGYIDGGASQEEFYKFIKPILEKMDGTEELLVKLNREDLLRKQRTFDNGSIPHQIHLGELHAILRRQEDFYPFLKDNREKIEKILTFRIPYYVGPLARGNSRFAWMTRKSEETITPWNFEEVVDKGASAQSFIERMTNFDKNLPNEKVLPKHSLLYEYFTVYNELTKVKYVTEGMRKPAFLSGEQKKAIVDLLFKTNRKVTVKQLKEDYFKKIECFDSVEISGVEDRFNASLGTYHDLLKIIKDKDFLDNEENEDILEDIVLTLTLFEDREMIEERLKTYAHLFDDKVMKQLKRRRYTGWGRLSRKLINGIRDKQSGKTILDFLKSDGFANRNFMQLIHDDSLTFKEDIQKAQVSGQGDSLHEHIANLAGSPAIKKGILQTVKVVDELVKVMGRHKPENIVIEMARENQTTQKGQKNSRERMKRIEEGIKELGSQILKEHPVENTQLQNEKLYLYYLQNGRDMYVDQELDINRLSDYDVDHIVPQSFLKDDSIDNKVLTRSDKARGKSDNVPSEEVVKKMKNYWRQLLNAKLITQRKFDNLTKAERGGLSELDKAGFIKRQLVETRQITKHVAQILDSRMNTKYDENDKLIREVKVITLKSKLVSDFRKDFQFYKVREINNYHHAHDAYLNAVVGTALIKKYPKLESEFVYGDYKVYDVRKMIAKSEQEIGKATAKYFFYSNIMNFFKTEITLANGEIRKRPLIETNGETGEIVWDKGRDFATVRKVLSMPQVNIVKKTEVQTGGFSKESILPKRNSDKLIARKKDWDPKKYGGFDSPTVAYSVLVVAKVEKGKSKKLKSVKELLGITIMERSSFEKNPIDFLEAKGYKEVKKDLIIKLPKYSLFELENGRKRMLASAGELQKGNELALPSKYVNFLYLASHYEKLKGSPEDNEQKQLFVEQHKHYLDEIIEQISEFSKRVILADANLDKVLSAYNKHRDKPIREQAENIIHLFTLTNLGAPAAFKYFDTTIDRKRYTSTKEVLDATLIHQSITGLYETRIDLSQLGGDGGEAAAKPAPGSSGGTLNIEDEYRLHETSKEPDVPLGSTWLSDFPQAWAETGGMGLAVRQAPLIIPLKATSTPVSIKQYPMSQEARLGIKPHIQRLLDQGILVPCQSPWNTPLLPVKKPGTNDYRPVQDLREVNKRVEDIHPTVPNPYNLLSGLPPSHQWYTVLDLKDAFFCLRLHPTSQPLFAFEWRDPEMGISGQLTWTRLPQGFKNSPTLFNEALHRDLADFRIQHPDLILLQYVDDLLLAATSEQDCQRGTRALLQTLGNLGYRASAKKAQICQKQVKYLGYLLKEGQRWLTEARKETVMGQPTPKTPRQLREFLGKAGFCRLFIPGFAEMAAPLYPLTKPGTLFNWGPDQQKAYQEIKQALLTAPALGLPDLTKPFELFVDEKQGYAKGVLTQKLGPWRRPVAYLSKKLDPVAAGWPPCLRMVAAIAVLTKDAGKLTMGQPLVILAPHAVEALVKQPPDRWLSNARMTHYQAMLLDTDRVQFGPVVALNPATLLPLPEKEAPHDCLEILAETHGTRPDLTDQPIPDADYTWYTDGSSFLQEGQRRAGAAVTTETEVIWARALPAGTSAQRAELIALTQALKMAEGKKLNVYTDSRYAFATAHVHGEIYRRRGWLTSEGREIKNKNEILALLKALFLPKRLSIIHCPGHQKGNSAEARGNRMADQAAREAAMKAVLETSTLLAGKRTADGSEFEKRTADGSEFESPKKKAKVE

SEQ ID NO: 1065 - protein, 2094 aa, synthetic construct
MPAAKRVKLDGGDKKYSIGLDIGTNSVGWAVITDEYKVPSKKFKVLGNTDRHSIKKNLIGALLFDSGETAEATRLKRTARRRYTRRKNRICYLQEIFSNEMAKVDDSFFHRLEESFLVEEDKKHERHPIFGNIVDEVAYHEKYPTIYHLRKKLVDSTDKADLRLIYLALAHMIKFRGHFLIEGDLNPDNSDVDKLFIQLVQTYNQLFEENPINASGVDAKAILSARLSKSRRLENLIAQLPGEKKNGLFGNLIALSLGLTPNFKSNFDLAEDAKLQLSKDTYDDDLDNLLAQIGDQYADLFLAAKNLSDAILLSDILRVNTEITKAPLSASMIKRYDEHHQDLTLLKALVRQQLPEKYKEIFFDQSKNGYAGYIDGGASQEEFYKFIKPILEKMDGTEELLVKLNREDLLRKQRTFDNGSIPHQIHLGELHAILRRQEDFYPFLKDNREKIEKILTFRIPYYVGPLARGNSRFAWMTRKSEETITPWNFEEVVDKGASAQSFIERMTNFDKNLPNEKVLPKHSLLYEYFTVYNELTKVKYVTEGMRKPAFLSGEQKKAIVDLLFKTNRKVTVKQLKEDYFKKIECFDSVEISGVEDRFNASLGTYHDLLKIIKDKDFLDNEENEDILEDIVLTLTLFEDREMIEERLKTYAHLFDDKVMKQLKRRRYTGWGRLSRKLINGIRDKQSGKTILDFLKSDGFANRNFMQLIHDDSLTFKEDIQKAQVSGQGDSLHEHIANLAGSPAIKKGILQTVKVVDELVKVMGRHKPENIVIEMARENQTTQKGQKNSRERMKRIEEGIKELGSQILKEHPVENTQLQNEKLYLYYLQNGRDMYVDQELDINRLSDYDVDHIVPQSFLKDDSIDNKVLTRSDKARGKSDNVPSEEVVKKMKNYWRQLLNAKLITQRKFDNLTKAERGGLSELDKAGFIKRQLVETRQITKHVAQILDSRMNTKYDENDKLIREVKVITLKSKLVSDFRKDFQFYKVREINNYHHAHDAYLNAVVGTALIKKYPKLESEFVYGDYKVYDVRKMIAKSEQEIGKATAKYFFYSNIMNFFKTEITLANGEIRKRPLIETNGETGEIVWDKGRDFATVRKVLSMPQVNIVKKTEVQTGGFSKESILPKRNSDKLIARKKDWDPKKYGGFDSPTVAYSVLVVAKVEKGKSKKLKSVKELLGITIMERSSFEKNPIDFLEAKGYKEVKKDLIIKLPKYSLFELENGRKRMLASAGELQKGNELALPSKYVNFLYLASHYEKLKGSPEDNEQKQLFVEQHKHYLDEIIEQISEFSKRVILADANLDKVLSAYNKHRDKPIREQAENIIHLFTLTNLGAPAAFKYFDTTIDRKRYTSTKEVLDATLIHQSITGLYETRIDLSQLGGDGGGGSGGSGGSGGTLNIEDEYRLHETSKEPDVPLGSTWLSDFPQAWAETGGMGLAVRQAPLIIPLKATSTPVSIKQYPMSQEARLGIKPHIQRLLDQGILVPCQSPWNTPLLPVKKPGTNDYRPVQDLREVNKRVEDIHPTVPNPYNLLSGLPPSHQWYTVLDLKDAFFCLRLHPTSQPLFAFEWRDPEMGISGQLTWTRLPQGFKNSPTLFNEALHRDLADFRIQHPDLILLQYVDDLLLAATSEQDCQRGTRALLQTLGNLGYRASAKKAQICQKQVKYLGYLLKEGQRWLTEARKETVMGQPTPKTPRQLREFLGKAGFCRLFIPGFAEMAAPLYPLTKPGTLFNWGPDQQKAYQEIKQALLTAPALGLPDLTKPFELFVDEKQGYAKGVLTQKLGPWRRPVAYLSKKLDPVAAGWPPCLRMVAAIAVLTKDAGKLTMGQPLVILAPHAVEALVKQPPDRWLSNARMTHYQAMLLDTDRVQFGPVVALNPATLLPLPEKEAPHDCLEILAETHGTRPDLTDQPIPDADYTWYTDGSSFLQEGQRRAGAAVTTETEVIWARALPAGTSAQRAELIALTQALKMAEGKKLNVYTDSRYAFATAHVHGEIYRRRGWLTSEGREIKNKNEILALLKALFLPKRLSIIHCPGHQKGNSAEARGNRMADQAAREAAMKAVLETSTLLAGKRTADGSEFEKRTADGSEFESPKKKAKVE

SEQ ID NO: 1066 - protein, 2096 aa, synthetic construct
MPAAKRVKLDGGDKKYSIGLDIGTNSVGWAVITDEYKVPSKKFKVLGNTDRHSIKKNLIGALLFDSGETAEATRLKRTARRRYTRRKNRICYLQEIFSNEMAKVDDSFFHRLEESFLVEEDKKHERHPIFGNIVDEVAYHEKYPTIYHLRKKLVDSTDKADLRLIYLALAHMIKFRGHFLIEGDLNPDNSDVDKLFIQLVQTYNQLFEENPINASGVDAKAILSARLSKSRRLENLIAQLPGEKKNGLFGNLIALSLGLTPNFKSNFDLAEDAKLQLSKDTYDDDLDNLLAQIGDQYADLFLAAKNLSDAILLSDILRVNTEITKAPLSASMIKRYDEHHQDLTLLKALVRQQLPEKYKEIFFDQSKNGYAGYIDGGASQEEFYKFIKPILEKMDGTEELLVKLNREDLLRKQRTFDNGSIPHQIHLGELHAILRRQEDFYPFLKDNREKIEKILTFRIPYYVGPLARGNSRFAWMTRKSEETITPWNFEEVVDKGASAQSFIERMTNFDKNLPNEKVLPKHSLLYEYFTVYNELTKVKYVTEGMRKPAFLSGEQKKAIVDLLFKTNRKVTVKQLKEDYFKKIECFDSVEISGVEDRFNASLGTYHDLLKIIKDKDFLDNEENEDILEDIVLTLTLFEDREMIEERLKTYAHLFDDKVMKQLKRRRYTGWGRLSRKLINGIRDKQSGKTILDFLKSDGFANRNFMQLIHDDSLTFKEDIQKAQVSGQGDSLHEHIANLAGSPAIKKGILQTVKVVDELVKVMGRHKPENIVIEMARENQTTQKGQKNSRERMKRIEEGIKELGSQILKEHPVENTQLQNEKLYLYYLQNGRDMYVDQELDINRLSDYDVDHIVPQSFLKDDSIDNKVLTRSDKARGKSDNVPSEEVVKKMKNYWRQLLNAKLITQRKFDNLTKAERGGLSELDKAGFIKRQLVETRQITKHVAQILDSRMNTKYDENDKLIREVKVITLKSKLVSDFRKDFQFYKVREINNYHHAHDAYLNAVVGTALIKKYPKLESEFVYGDYKVYDVRKMIAKSEQEIGKATAKYFFYSNIMNFFKTEITLANGEIRKRPLIETNGETGEIVWDKGRDFATVRKVLSMPQVNIVKKTEVQTGGFSKESILPKRNSDKLIARKKDWDPKKYGGFDSPTVAYSVLVVAKVEKGKSKKLKSVKELLGITIMERSSFEKNPIDFLEAKGYKEVKKDLIIKLPKYSLFELENGRKRMLASAGELQKGNELALPSKYVNFLYLASHYEKLKGSPEDNEQKQLFVEQHKHYLDEIIEQISEFSKRVILADANLDKVLSAYNKHRDKPIREQAENIIHLFTLTNLGAPAAFKYFDTTIDRKRYTSTKEVLDATLIHQSITGLYETRIDLSQLGGDGGPAPEAAAKGGSGGTLNIEDEYRLHETSKEPDVPLGSTWLSDFPQAWAETGGMGLAVRQAPLIIPLKATSTPVSIKQYPMSQEARLGIKPHIQRLLDQGILVPCQSPWNTPLLPVKKPGTNDYRPVQDLREVNKRVEDIHPTVPNPYNLLSGLPPSHQWYTVLDLKDAFFCLRLHPTSQPLFAFEWRDPEMGISGQLTWTRLPQGFKNSPTLFNEALHRDLADFRIQHPDLILLQYVDDLLLAATSEQDCQRGTRALLQTLGNLGYRASAKKAQICQKQVKYLGYLLKEGQRWLTEARKETVMGQPTPKTPRQLREFLGKAGFCRLFIPGFAEMAAPLYPLTKPGTLFNWGPDQQKAYQEIKQALLTAPALGLPDLTKPFELFVDEKQGYAKGVLTQKLGPWRRPVAYLSKKLDPVAAGWPPCLRMVAAIAVLTKDAGKLTMGQPLVILAPHAVEALVKQPPDRWLSNARMTHYQAMLLDTDRVQFGPVVALNPATLLPLPEKEAPHDCLEILAETHGTRPDLTDQPIPDADYTWYTDGSSFLQEGQRRAGAAVTTETEVIWARALPAGTSAQRAELIALTQALKMAEGKKLNVYTDSRYAFATAHVHGEIYRRRGWLTSEGREIKNKNEILALLKALFLPKRLSIIHCPGHQKGNSAEARGNRMADQAAREAAMKAVLETSTLLAGKRTADGSEFEKRTADGSEFESPKKKAKVE

SEQ ID NO: 1067 - protein, 2103 aa, synthetic construct
MPAAKRVKLDGGDKKYSIGLDIGTNSVGWAVITDEYKVPSKKFKVLGNTDRHSIKKNLIGALLFDSGETAEATRLKRTARRRYTRRKNRICYLQEIFSNEMAKVDDSFFHRLEESFLVEEDKKHERHPIFGNIVDEVAYHEKYPTIYHLRKKLVDSTDKADLRLIYLALAHMIKFRGHFLIEGDLNPDNSDVDKLFIQLVQTYNQLFEENPINASGVDAKAILSARLSKSRRLENLIAQLPGEKKNGLFGNLIALSLGLTPNFKSNFDLAEDAKLQLSKDTYDDDLDNLLAQIGDQYADLFLAAKNLSDAILLSDILRVNTEITKAPLSASMIKRYDEHHQDLTLLKALVRQQLPEKYKEIFFDQSKNGYAGYIDGGASQEEFYKFIKPILEKMDGTEELLVKLNREDLLRKQRTFDNGSIPHQIHLGELHAILRRQEDFYPFLKDNREKIEKILTFRIPYYVGPLARGNSRFAWMTRKSEETITPWNFEEVVDKGASAQSFIERMTNFDKNLPNEKVLPKHSLLYEYFTVYNELTKVKYVTEGMRKPAFLSGEQKKAIVDLLFKTNRKVTVKQLKEDYFKKIECFDSVEISGVEDRFNASLGTYHDLLKIIKDKDFLDNEENEDILEDIVLTLTLFEDREMIEERLKTYAHLFDDKVMKQLKRRRYTGWGRLSRKLINGIRDKQSGKTILDFLKSDGFANRNFMQLIHDDSLTFKEDIQKAQVSGQGDSLHEHIANLAGSPAIKKGILQTVKVVDELVKVMGRHKPENIVIEMARENQTTQKGQKNSRERMKRIEEGIKELGSQILKEHPVENTQLQNEKLYLYYLQNGRDMYVDQELDINRLSDYDVDHIVPQSFLKDDSIDNKVLTRSDKARGKSDNVPSEEVVKKMKNYWRQLLNAKLITQRKFDNLTKAERGGLSELDKAGFIKRQLVETRQITKHVAQILDSRMNTKYDENDKLIREVKVITLKSKLVSDFRKDFQFYKVREINNYHHAHDAYLNAVVGTALIKKYPKLESEFVYGDYKVYDVRKMIAKSEQEIGKATAKYFFYSNIMNFFKTEITLANGEIRKRPLIETNGETGEIVWDKGRDFATVRKVLSMPQVNIVKKTEVQTGGFSKESILPKRNSDKLIARKKDWDPKKYGGFDSPTVAYSVLVVAKVEKGKSKKLKSVKELLGITIMERSSFEKNPIDFLEAKGYKEVKKDLIIKLPKYSLFELENGRKRMLASAGELQKGNELALPSKYVNFLYLASHYEKLKGSPEDNEQKQLFVEQHKHYLDEIIEQISEFSKRVILADANLDKVLSAYNKHRDKPIREQAENIIHLFTLTNLGAPAAFKYFDTTIDRKRYTSTKEVLDATLIHQSITGLYETRIDLSQLGGDGGGSSGSSGSSGSSGSSGSSGGTLNIEDEYRLHETSKEPDVPLGSTWLSDFPQAWAETGGMGLAVRQAPLIIPLKATSTPVSIKQYPMSQEARLGIKPHIQRLLDQGILVPCQSPWNTPLLPVKKPGTNDYRPVQDLREVNKRVEDIHPTVPNPYNLLSGLPPSHQWYTVLDLKDAFFCLRLHPTSQPLFAFEWRDPEMGISGQLTWTRLPQGFKNSPTLFNEALHRDLADFRIQHPDLILLQYVDDLLLAATSEQDCQRGTRALLQTLGNLGYRASAKKAQICQKQVKYLGYLLKEGQRWLTEARKETVMGQPTPKTPRQLREFLGKAGFCRLFIPGFAEMAAPLYPLTKPGTLFNWGPDQQKAYQEIKQALLTAPALGLPDLTKPFELFVDEKQGYAKGVLTQKLGPWRRPVAYLSKKLDPVAAGWPPCLRMVAAIAVLTKDAGKLTMGQPLVILAPHAVEALVKQPPDRWLSNARMTHYQAMLLDTDRVQFGPVVALNPATLLPLPEKEAPHDCLEILAETHGTRPDLTDQPIPDADYTWYTDGSSFLQEGQRRAGAAVTTETEVIWARALPAGTSAQRAELIALTQALKMAEGKKLNVYTDSRYAFATAHVHGEIYRRRGWLTSEGREIKNKNEILALLKALFLPKRLSIIHCPGHQKGNSAEARGNRMADQAAREAAMKAVLETSTLLAGKRTADGSEFEKRTADGSEFESPKKKAKVE

SEQ ID NO: 1068 - protein, 2096 aa, synthetic construct
MPAAKRVKLDGGDKKYSIGLDIGTNSVGWAVITDEYKVPSKKFKVLGNTDRHSIKKNLIGALLFDSGETAEATRLKRTARRRYTRRKNRICYLQEIFSNEMAKVDDSFFHRLEESFLVEEDKKHERHPIFGNIVDEVAYHEKYPTIYHLRKKLVDSTDKADLRLIYLALAHMIKFRGHFLIEGDLNPDNSDVDKLFIQLVQTYNQLFEENPINASGVDAKAILSARLSKSRRLENLIAQLPGEKKNGLFGNLIALSLGLTPNFKSNFDLAEDAKLQLSKDTYDDDLDNLLAQIGDQYADLFLAAKNLSDAILLSDILRVNTEITKAPLSASMIKRYDEHHQDLTLLKALVRQQLPEKYKEIFFDQSKNGYAGYIDGGASQEEFYKFIKPILEKMDGTEELLVKLNREDLLRKQRTFDNGSIPHQIHLGELHAILRRQEDFYPFLKDNREKIEKILTFRIPYYVGPLARGNSRFAWMTRKSEETITPWNFEEVVDKGASAQSFIERMTNFDKNLPNEKVLPKHSLLYEYFTVYNELTKVKYVTEGMRKPAFLSGEQKKAIVDLLFKTNRKVTVKQLKEDYFKKIECFDSVEISGVEDRFNASLGTYHDLLKIIKDKDFLDNEENEDILEDIVLTLTLFEDREMIEERLKTYAHLFDDKVMKQLKRRRYTGWGRLSRKLINGIRDKQSGKTILDFLKSDGFANRNFMQLIHDDSLTFKEDIQKAQVSGQGDSLHEHIANLAGSPAIKKGILQTVKVVDELVKVMGRHKPENIVIEMARENQTTQKGQKNSRERMKRIEEGIKELGSQILKEHPVENTQLQNEKLYLYYLQNGRDMYVDQELDINRLSDYDVDHIVPQSFLKDDSIDNKVLTRSDKARGKSDNVPSEEVVKKMKNYWRQLLNAKLITQRKFDNLTKAERGGLSELDKAGFIKRQLVETRQITKHVAQILDSRMNTKYDENDKLIREVKVITLKSKLVSDFRKDFQFYKVREINNYHHAHDAYLNAVVGTALIKKYPKLESEFVYGDYKVYDVRKMIAKSEQEIGKATAKYFFYSNIMNFFKTEITLANGEIRKRPLIETNGETGEIVWDKGRDFATVRKVLSMPQVNIVKKTEVQTGGFSKESILPKRNSDKLIARKKDWDPKKYGGFDSPTVAYSVLVVAKVEKGKSKKLKSVKELLGITIMERSSFEKNPIDFLEAKGYKEVKKDLIIKLPKYSLFELENGRKRMLASAGELQKGNELALPSKYVNFLYLASHYEKLKGSPEDNEQKQLFVEQHKHYLDEIIEQISEFSKRVILADANLDKVLSAYNKHRDKPIREQAENIIHLFTLTNLGAPAAFKYFDTTIDRKRYTSTKEVLDATLIHQSITGLYETRIDLSQLGGDGGEAAAKGSSGGSGGTLNIEDEYRLHETSKEPDVPLGSTWLSDFPQAWAETGGMGLAVRQAPLIIPLKATSTPVSIKQYPMSQEARLGIKPHIQRLLDQGILVPCQSPWNTPLLPVKKPGTNDYRPVQDLREVNKRVEDIHPTVPNPYNLLSGLPPSHQWYTVLDLKDAFFCLRLHPTSQPLFAFEWRDPEMGISGQLTWTRLPQGFKNSPTLFNEALHRDLADFRIQHPDLILLQYVDDLLLAATSEQDCQRGTRALLQTLGNLGYRASAKKAQICQKQVKYLGYLLKEGQRWLTEARKETVMGQPTPKTPRQLREFLGKAGFCRLFIPGFAEMAAPLYPLTKPGTLFNWGPDQQKAYQEIKQALLTAPALGLPDLTKPFELFVDEKQGYAKGVLTQKLGPWRRPVAYLSKKLDPVAAGWPPCLRMVAAIAVLTKDAGKLTMGQPLVILAPHAVEALVKQPPDRWLSNARMTHYQAMLLDTDRVQFGPVVALNPATLLPLPEKEAPHDCLEILAETHGTRPDLTDQPIPDADYTWYTDGSSFLQEGQRRAGAAVTTETEVIWARALPAGTSAQRAELIALTQALKMAEGKKLNVYTDSRYAFATAHVHGEIYRRRGWLTSEGREIKNKNEILALLKALFLPKRLSIIHCPGHQKGNSAEARGNRMADQAAREAAMKAVLETSTLLAGKRTADGSEFEKRTADGSEFESPKKKAKVE

SEQ ID NO: 1069 - protein, 2096 aa, synthetic construct
MPAAKRVKLDGGDKKYSIGLDIGTNSVGWAVITDEYKVPSKKFKVLGNTDRHSIKKNLIGALLFDSGETAEATRLKRTARRRYTRRKNRICYLQEIFSNEMAKVDDSFFHRLEESFLVEEDKKHERHPIFGNIVDEVAYHEKYPTIYHLRKKLVDSTDKADLRLIYLALAHMIKFRGHFLIEGDLNPDNSDVDKLFIQLVQTYNQLFEENPINASGVDAKAILSARLSKSRRLENLIAQLPGEKKNGLFGNLIALSLGLTPNFKSNFDLAEDAKLQLSKDTYDDDLDNLLAQIGDQYADLFLAAKNLSDAILLSDILRVNTEITKAPLSASMIKRYDEHHQDLTLLKALVRQQLPEKYKEIFFDQSKNGYAGYIDGGASQEEFYKFIKPILEKMDGTEELLVKLNREDLLRKQRTFDNGSIPHQIHLGELHAILRRQEDFYPFLKDNREKIEKILTFRIPYYVGPLARGNSRFAWMTRKSEETITPWNFEEVVDKGASAQSFIERMTNFDKNLPNEKVLPKHSLLYEYFTVYNELTKVKYVTEGMRKPAFLSGEQKKAIVDLLFKTNRKVTVKQLKEDYFKKIECFDSVEISGVEDRFNASLGTYHDLLKIIKDKDFLDNEENEDILEDIVLTLTLFEDREMIEERLKTYAHLFDDKVMKQLKRRRYTGWGRLSRKLINGIRDKQSGKTILDFLKSDGFANRNFMQLIHDDSLTFKEDIQKAQVSGQGDSLHEHIANLAGSPAIKKGILQTVKVVDELVKVMGRHKPENIVIEMARENQTTQKGQKNSRERMKRIEEGIKELGSQILKEHPVENTQLQNEKLYLYYLQNGRDMYVDQELDINRLSDYDVDHIVPQSFLKDDSIDNKVLTRSDKARGKSDNVPSEEVVKKMKNYWRQLLNAKLITQRKFDNLTKAERGGLSELDKAGFIKRQLVETRQITKHVAQILDSRMNTKYDENDKLIREVKVITLKSKLVSDFRKDFQFYKVREINNYHHAHDAYLNAVVGTALIKKYPKLESEFVYGDYKVYDVRKMIAKSEQEIGKATAKYFFYSNIMNFFKTEITLANGEIRKRPLIETNGETGEIVWDKGRDFATVRKVLSMPQVNIVKKTEVQTGGFSKESILPKRNSDKLIARKKDWDPKKYGGFDSPTVAYSVLVVAKVEKGKSKKLKSVKELLGITIMERSSFEKNPIDFLEAKGYKEVKKDLIIKLPKYSLFELENGRKRMLASAGELQKGNELALPSKYVNFLYLASHYEKLKGSPEDNEQKQLFVEQHKHYLDEIIEQISEFSKRVILADANLDKVLSAYNKHRDKPIREQAENIIHLFTLTNLGAPAAFKYFDTTIDRKRYTSTKEVLDATLIHQSITGLYETRIDLSQLGGDGGPAPAPAPAPAPGGTLNIEDEYRLHETSKEPDVPLGSTWLSDFPQAWAETGGMGLAVRQAPLIIPLKATSTPVSIKQYPMSQEARLGIKPHIQRLLDQGILVPCQSPWNTPLLPVKKPGTNDYRPVQDLREVNKRVEDIHPTVPNPYNLLSGLPPSHQWYTVLDLKDAFFCLRLHPTSQPLFAFEWRDPEMGISGQLTWTRLPQGFKNSPTLFNEALHRDLADFRIQHPDLILLQYVDDLLLAATSEQDCQRGTRALLQTLGNLGYRASAKKAQICQKQVKYLGYLLKEGQRWLTEARKETVMGQPTPKTPRQLREFLGKAGFCRLFIPGFAEMAAPLYPLTKPGTLFNWGPDQQKAYQEIKQALLTAPALGLPDLTKPFELFVDEKQGYAKGVLTQKLGPWRRPVAYLSKKLDPVAAGWPPCLRMVAAIAVLTKDAGKLTMGQPLVILAPHAVEALVKQPPDRWLSNARMTHYQAMLLDTDRVQFGPVVALNPATLLPLPEKEAPHDCLEILAETHGTRPDLTDQPIPDADYTWYTDGSSFLQEGQRRAGAAVTTETEVIWARALPAGTSAQRAELIALTQALKMAEGKKLNVYTDSRYAFATAHVHGEIYRRRGWLTSEGREIKNKNEILALLKALFLPKRLSIIHCPGHQKGNSAEARGNRMADQAAREAAMKAVLETSTLLAGKRTADGSEFEKRTADGSEFESPKKKAKVE

SEQ ID NO: 1070 - protein, 2091 aa, synthetic construct
MPAAKRVKLDGGDKKYSIGLDIGTNSVGWAVITDEYKVPSKKFKVLGNTDRHSIKKNLIGALLFDSGETAEATRLKRTARRRYTRRKNRICYLQEIFSNEMAKVDDSFFHRLEESFLVEEDKKHERHPIFGNIVDEVAYHEKYPTIYHLRKKLVDSTDKADLRLIYLALAHMIKFRGHFLIEGDLNPDNSDVDKLFIQLVQTYNQLFEENPINASGVDAKAILSARLSKSRRLENLIAQLPGEKKNGLFGNLIALSLGLTPNFKSNFDLAEDAKLQLSKDTYDDDLDNLLAQIGDQYADLFLAAKNLSDAILLSDILRVNTEITKAPLSASMIKRYDEHHQDLTLLKALVRQQLPEKYKEIFFDQSKNGYAGYIDGGASQEEFYKFIKPILEKMDGTEELLVKLNREDLLRKQRTFDNGSIPHQIHLGELHAILRRQEDFYPFLKDNREKIEKILTFRIPYYVGPLARGNSRFAWMTRKSEETITPWNFEEVVDKGASAQSFIERMTNFDKNLPNEKVLPKHSLLYEYFTVYNELTKVKYVTEGMRKPAFLSGEQKKAIVDLLFKTNRKVTVKQLKEDYFKKIECFDSVEISGVEDRFNASLGTYHDLLKIIKDKDFLDNEENEDILEDIVLTLTLFEDREMIEERLKTYAHLFDDKVMKQLKRRRYTGWGRLSRKLINGIRDKQSGKTILDFLKSDGFANRNFMQLIHDDSLTFKEDIQKAQVSGQGDSLHEHIANLAGSPAIKKGILQTVKVVDELVKVMGRHKPENIVIEMARENQTTQKGQKNSRERMKRIEEGIKELGSQILKEHPVENTQLQNEKLYLYYLQNGRDMYVDQELDINRLSDYDVDHIVPQSFLKDDSIDNKVLTRSDKARGKSDNVPSEEVVKKMKNYWRQLLNAKLITQRKFDNLTKAERGGLSELDKAGFIKRQLVETRQITKHVAQILDSRMNTKYDENDKLIREVKVITLKSKLVSDFRKDFQFYKVREINNYHHAHDAYLNAVVGTALIKKYPKLESEFVYGDYKVYDVRKMIAKSEQEIGKATAKYFFYSNIMNFFKTEITLANGEIRKRPLIETNGETGEIVWDKGRDFATVRKVLSMPQVNIVKKTEVQTGGFSKESILPKRNSDKLIARKKDWDPKKYGGFDSPTVAYSVLVVAKVEKGKSKKLKSVKELLGITIMERSSFEKNPIDFLEAKGYKEVKKDLIIKLPKYSLFELENGRKRMLASAGELQKGNELALPSKYVNFLYLASHYEKLKGSPEDNEQKQLFVEQHKHYLDEIIEQISEFSKRVILADANLDKVLSAYNKHRDKPIREQAENIIHLFTLTNLGAPAAFKYFDTTIDRKRYTSTKEVLDATLIHQSITGLYETRIDLSQLGGDGGGSSGGGGGTLNIEDEYRLHETSKEPDVPLGSTWLSDFPQAWAETGGMGLAVRQAPLIIPLKATSTPVSIKQYPMSQEARLGIKPHIQRLLDQGILVPCQSPWNTPLLPVKKPGTNDYRPVQDLREVNKRVEDIHPTVPNPYNLLSGLPPSHQWYTVLDLKDAFFCLRLHPTSQPLFAFEWRDPEMGISGQLTWTRLPQGFKNSPTLFNEALHRDLADFRIQHPDLILLQYVDDLLLAATSEQDCQRGTRALLQTLGNLGYRASAKKAQICQKQVKYLGYLLKEGQRWLTEARKETVMGQPTPKTPRQLREFLGKAGFCRLFIPGFAEMAAPLYPLTKPGTLFNWGPDQQKAYQEIKQALLTAPALGLPDLTKPFELFVDEKQGYAKGVLTQKLGPWRRPVAYLSKKLDPVAAGWPPCLRMVAAIAVLTKDAGKLTMGQPLVILAPHAVEALVKQPPDRWLSNARMTHYQAMLLDTDRVQFGPVVALNPATLLPLPEKEAPHDCLEILAETHGTRPDLTDQPIPDADYTWYTDGSSFLQEGQRRAGAAVTTETEVIWARALPAGTSAQRAELIALTQALKMAEGKKLNVYTDSRYAFATAHVHGEIYRRRGWLTSEGREIKNKNEILALLKALFLPKRLSIIHCPGHQKGNSAEARGNRMADQAAREAAMKAVLETSTLLAGKRTADGSEFEKRTADGSEFESPKKKAKVE

SEQ ID NO: 1071 - protein, 2094 aa, synthetic construct
MPAAKRVKLDGGDKKYSIGLDIGTNSVGWAVITDEYKVPSKKFKVLGNTDRHSIKKNLIGALLFDSGETAEATRLKRTARRRYTRRKNRICYLQEIFSNEMAKVDDSFFHRLEESFLVEEDKKHERHPIFGNIVDEVAYHEKYPTIYHLRKKLVDSTDKADLRLIYLALAHMIKFRGHFLIEGDLNPDNSDVDKLFIQLVQTYNQLFEENPINASGVDAKAILSARLSKSRRLENLIAQLPGEKKNGLFGNLIALSLGLTPNFKSNFDLAEDAKLQLSKDTYDDDLDNLLAQIGDQYADLFLAAKNLSDAILLSDILRVNTEITKAPLSASMIKRYDEHHQDLTLLKALVRQQLPEKYKEIFFDQSKNGYAGYIDGGASQEEFYKFIKPILEKMDGTEELLVKLNREDLLRKQRTFDNGSIPHQIHLGELHAILRRQEDFYPFLKDNREKIEKILTFRIPYYVGPLARGNSRFAWMTRKSEETITPWNFEEVVDKGASAQSFIERMTNFDKNLPNEKVLPKHSLLYEYFTVYNELTKVKYVTEGMRKPAFLSGEQKKAIVDLLFKTNRKVTVKQLKEDYFKKIECFDSVEISGVEDRFNASLGTYHDLLKIIKDKDFLDNEENEDILEDIVLTLTLFEDREMIEERLKTYAHLFDDKVMKQLKRRRYTGWGRLSRKLINGIRDKQSGKTILDFLKSDGFANRNFMQLIHDDSLTFKEDIQKAQVSGQGDSLHEHIANLAGSPAIKKGILQTVKVVDELVKVMGRHKPENIVIEMARENQTTQKGQKNSRERMKRIEEGIKELGSQILKEHPVENTQLQNEKLYLYYLQNGRDMYVDQELDINRLSDYDVDHIVPQSFLKDDSIDNKVLTRSDKARGKSDNVPSEEVVKKMKNYWRQLLNAKLITQRKFDNLTKAERGGLSELDKAGFIKRQLVETRQITKHVAQILDSRMNTKYDENDKLIREVKVITLKSKLVSDFRKDFQFYKVREINNYHHAHDAYLNAVVGTALIKKYPKLESEFVYGDYKVYDVRKMIAKSEQEIGKATAKYFFYSNIMNFFKTEITLANGEIRKRPLIETNGETGEIVWDKGRDFATVRKVLSMPQVNIVKKTEVQTGGFSKESILPKRNSDKLIARKKDWDPKKYGGFDSPTVAYSVLVVAKVEKGKSKKLKSVKELLGITIMERSSFEKNPIDFLEAKGYKEVKKDLIIKLPKYSLFELENGRKRMLASAGELQKGNELALPSKYVNFLYLASHYEKLKGSPEDNEQKQLFVEQHKHYLDEIIEQISEFSKRVILADANLDKVLSAYNKHRDKPIREQAENIIHLFTLTNLGAPAAFKYFDTTIDRKRYTSTKEVLDATLIHQSITGLYETRIDLSQLGGDGGPAPGGSGGGGGTLNIEDEYRLHETSKEPDVPLGSTWLSDFPQAWAETGGMGLAVRQAPLIIPLKATSTPVSIKQYPMSQEARLGIKPHIQRLLDQGILVPCQSPWNTPLLPVKKPGTNDYRPVQDLREVNKRVEDIHPTVPNPYNLLSGLPPSHQWYTVLDLKDAFFCLRLHPTSQPLFAFEWRDPEMGISGQLTWTRLPQGFKNSPTLFNEALHRDLADFRIQHPDLILLQYVDDLLLAATSEQDCQRGTRALLQTLGNLGYRASAKKAQICQKQVKYLGYLLKEGQRWLTEARKETVMGQPTPKTPRQLREFLGKAGFCRLFIPGFAEMAAPLYPLTKPGTLFNWGPDQQKAYQEIKQALLTAPALGLPDLTKPFELFVDEKQGYAKGVLTQKLGPWRRPVAYLSKKLDPVAAGWPPCLRMVAAIAVLTKDAGKLTMGQPLVILAPHAVEALVKQPPDRWLSNARMTHYQAMLLDTDRVQFGPVVALNPATLLPLPEKEAPHDCLEILAETHGTRPDLTDQPIPDADYTWYTDGSSFLQEGQRRAGAAVTTETEVIWARALPAGTSAQRAELIALTQALKMAEGKKLNVYTDSRYAFATAHVHGEIYRRRGWLTSEGREIKNKNEILALLKALFLPKRLSIIHCPGHQKGNSAEARGNRMADQAAREAAMKAVLETSTLLAGKRTADGSEFEKRTADGSEFESPKKKAKVE

SEQ ID NO: 1072 - protein, 2097 aa, synthetic construct
MPAAKRVKLDGGDKKYSIGLDIGTNSVGWAVITDEYKVPSKKFKVLGNTDRHSIKKNLIGALLFDSGETAEATRLKRTARRRYTRRKNRICYLQEIFSNEMAKVDDSFFHRLEESFLVEEDKKHERHPIFGNIVDEVAYHEKYPTIYHLRKKLVDSTDKADLRLIYLALAHMIKFRGHFLIEGDLNPDNSDVDKLFIQLVQTYNQLFEENPINASGVDAKAILSARLSKSRRLENLIAQLPGEKKNGLFGNLIALSLGLTPNFKSNFDLAEDAKLQLSKDTYDDDLDNLLAQIGDQYADLFLAAKNLSDAILLSDILRVNTEITKAPLSASMIKRYDEHHQDLTLLKALVRQQLPEKYKEIFFDQSKNGYAGYIDGGASQEEFYKFIKPILEKMDGTEELLVKLNREDLLRKQRTFDNGSIPHQIHLGELHAILRRQEDFYPFLKDNREKIEKILTFRIPYYVGPLARGNSRFAWMTRKSEETITPWNFEEVVDKGASAQSFIERMTNFDKNLPNEKVLPKHSLLYEYFTVYNELTKVKYVTEGMRKPAFLSGEQKKAIVDLLFKTNRKVTVKQLKEDYFKKIECFDSVEISGVEDRFNASLGTYHDLLKIIKDKDFLDNEENEDILEDIVLTLTLFEDREMIEERLKTYAHLFDDKVMKQLKRRRYTGWGRLSRKLINGIRDKQSGKTILDFLKSDGFANRNFMQLIHDDSLTFKEDIQKAQVSGQGDSLHEHIANLAGSPAIKKGILQTVKVVDELVKVMGRHKPENIVIEMARENQTTQKGQKNSRERMKRIEEGIKELGSQILKEHPVENTQLQNEKLYLYYLQNGRDMYVDQELDINRLSDYDVDHIVPQSFLKDDSIDNKVLTRSDKARGKSDNVPSEEVVKKMKNYWRQLLNAKLITQRKFDNLTKAERGGLSELDKAGFIKRQLVETRQITKHVAQILDSRMNTKYDENDKLIREVKVITLKSKLVSDFRKDFQFYKVREINNYHHAHDAYLNAVVGTALIKKYPKLESEFVYGDYKVYDVRKMIAKSEQEIGKATAKYFFYSNIMNFFKTEITLANGEIRKRPLIETNGETGEIVWDKGRDFATVRKVLSMPQVNIVKKTEVQTGGFSKESILPKRNSDKLIARKKDWDPKKYGGFDSPTVAYSVLVVAKVEKGKSKKLKSVKELLGITIMERSSFEKNPIDFLEAKGYKEVKKDLIIKLPKYSLFELENGRKRMLASAGELQKGNELALPSKYVNFLYLASHYEKLKGSPEDNEQKQLFVEQHKHYLDEIIEQISEFSKRVILADANLDKVLSAYNKHRDKPIREQAENIIHLFTLTNLGAPAAFKYFDTTIDRKRYTSTKEVLDATLIHQSITGLYETRIDLSQLGGDGGGSAGSAAGSGEFGGTLNIEDEYRLHETSKEPDVPLGSTWLSDFPQAWAETGGMGLAVRQAPLIIPLKATSTPVSIKQYPMSQEARLGIKPHIQRLLDQGILVPCQSPWNTPLLPVKKPGTNDYRPVQDLREVNKRVEDIHPTVPNPYNLLSGLPPSHQWYTVLDLKDAFFCLRLHPTSQPLFAFEWRDPEMGISGQLTWTRLPQGFKNSPTLFNEALHRDLADFRIQHPDLILLQYVDDLLLAATSEQDCQRGTRALLQTLGNLGYRASAKKAQICQKQVKYLGYLLKEGQRWLTEARKETVMGQPTPKTPRQLREFLGKAGFCRLFIPGFAEMAAPLYPLTKPGTLFNWGPDQQKAYQEIKQALLTAPALGLPDLTKPFELFVDEKQGYAKGVLTQKLGPWRRPVAYLSKKLDPVAAGWPPCLRMVAAIAVLTKDAGKLTMGQPLVILAPHAVEALVKQPPDRWLSNARMTHYQAMLLDTDRVQFGPVVALNPATLLPLPEKEAPHDCLEILAETHGTRPDLTDQPIPDADYTWYTDGSSFLQEGQRRAGAAVTTETEVIWARALPAGTSAQRAELIALTQALKMAEGKKLNVYTDSRYAFATAHVHGEIYRRRGWLTSEGREIKNKNEILALLKALFLPKRLSIIHCPGHQKGNSAEARGNRMADQAAREAAMKAVLETSTLLAGKRTADGSEFEKRTADGSEFESPKKKAKVE

SEQ ID NO: 1073 - protein, 2094 aa, synthetic construct
MPAAKRVKLDGGDKKYSIGLDIGTNSVGWAVITDEYKVPSKKFKVLGNTDRHSIKKNLIGALLFDSGETAEATRLKRTARRRYTRRKNRICYLQEIFSNEMAKVDDSFFHRLEESFLVEEDKKHERHPIFGNIVDEVAYHEKYPTIYHLRKKLVDSTDKADLRLIYLALAHMIKFRGHFLIEGDLNPDNSDVDKLFIQLVQTYNQLFEENPINASGVDAKAILSARLSKSRRLENLIAQLPGEKKNGLFGNLIALSLGLTPNFKSNFDLAEDAKLQLSKDTYDDDLDNLLAQIGDQYADLFLAAKNLSDAILLSDILRVNTEITKAPLSASMIKRYDEHHQDLTLLKALVRQQLPEKYKEIFFDQSKNGYAGYIDGGASQEEFYKFIKPILEKMDGTEELLVKLNREDLLRKQRTFDNGSIPHQIHLGELHAILRRQEDFYPFLKDNREKIEKILTFRIPYYVGPLARGNSRFAWMTRKSEETITPWNFEEVVDKGASAQSFIERMTNFDKNLPNEKVLPKHSLLYEYFTVYNELTKVKYVTEGMRKPAFLSGEQKKAIVDLLFKTNRKVTVKQLKEDYFKKIECFDSVEISGVEDRFNASLGTYHDLLKIIKDKDFLDNEENEDILEDIVLTLTLFEDREMIEERLKTYAHLFDDKVMKQLKRRRYTGWGRLSRKLINGIRDKQSGKTILDFLKSDGFANRNFMQLIHDDSLTFKEDIQKAQVSGQGDSLHEHIANLAGSPAIKKGILQTVKVVDELVKVMGRHKPENIVIEMARENQTTQKGQKNSRERMKRIEEGIKELGSQILKEHPVENTQLQNEKLYLYYLQNGRDMYVDQELDINRLSDYDVDHIVPQSFLKDDSIDNKVLTRSDKARGKSDNVPSEEVVKKMKNYWRQLLNAKLITQRKFDNLTKAERGGLSELDKAGFIKRQLVETRQITKHVAQILDSRMNTKYDENDKLIREVKVITLKSKLVSDFRKDFQFYKVREINNYHHAHDAYLNAVVGTALIKKYPKLESEFVYGDYKVYDVRKMIAKSEQEIGKATAKYFFYSNIMNFFKTEITLANGEIRKRPLIETNGETGEIVWDKGRDFATVRKVLSMPQVNIVKKTEVQTGGFSKESILPKRNSDKLIARKKDWDPKKYGGFDSPTVAYSVLVVAKVEKGKSKKLKSVKELLGITIMERSSFEKNPIDFLEAKGYKEVKKDLIIKLPKYSLFELENGRKRMLASAGELQKGNELALPSKYVNFLYLASHYEKLKGSPEDNEQKQLFVEQHKHYLDEIIEQISEFSKRVILADANLDKVLSAYNKHRDKPIREQAENIIHLFTLTNLGAPAAFKYFDTTIDRKRYTSTKEVLDATLIHQSITGLYETRIDLSQLGGDGGGGGGSSPAPGGTLNIEDEYRLHETSKEPDVPLGSTWLSDFPQAWAETGGMGLAVRQAPLIIPLKATSTPVSIKQYPMSQEARLGIKPHIQRLLDQGILVPCQSPWNTPLLPVKKPGTNDYRPVQDLREVNKRVEDIHPTVPNPYNLLSGLPPSHQWYTVLDLKDAFFCLRLHPTSQPLFAFEWRDPEMGISGQLTWTRLPQGFKNSPTLFNEALHRDLADFRIQHPDLILLQYVDDLLLAATSEQDCQRGTRALLQTLGNLGYRASAKKAQICQKQVKYLGYLLKEGQRWLTEARKETVMGQPTPKTPRQLREFLGKAGFCRLFIPGFAEMAAPLYPLTKPGTLFNWGPDQQKAYQEIKQALLTAPALGLPDLTKPFELFVDEKQGYAKGVLTQKLGPWRRPVAYLSKKLDPVAAGWPPCLRMVAAIAVLTKDAGKLTMGQPLVILAPHAVEALVKQPPDRWLSNARMTHYQAMLLDTDRVQFGPVVALNPATLLPLPEKEAPHDCLEILAETHGTRPDLTDQPIPDADYTWYTDGSSFLQEGQRRAGAAVTTETEVIWARALPAGTSAQRAELIALTQALKMAEGKKLNVYTDSRYAFATAHVHGEIYRRRGWLTSEGREIKNKNEILALLKALFLPKRLSIIHCPGHQKGNSAEARGNRMADQAAREAAMKAVLETSTLLAGKRTADGSEFEKRTADGSEFESPKKKAKVE

SEQ ID NO: 1074 - protein, 2095 aa, synthetic construct
MPAAKRVKLDGGDKKYSIGLDIGTNSVGWAVITDEYKVPSKKFKVLGNTDRHSIKKNLIGALLFDSGETAEATRLKRTARRRYTRRKNRICYLQEIFSNEMAKVDDSFFHRLEESFLVEEDKKHERHPIFGNIVDEVAYHEKYPTIYHLRKKLVDSTDKADLRLIYLALAHMIKFRGHFLIEGDLNPDNSDVDKLFIQLVQTYNQLFEENPINASGVDAKAILSARLSKSRRLENLIAQLPGEKKNGLFGNLIALSLGLTPNFKSNFDLAEDAKLQLSKDTYDDDLDNLLAQIGDQYADLFLAAKNLSDAILLSDILRVNTEITKAPLSASMIKRYDEHHQDLTLLKALVRQQLPEKYKEIFFDQSKNGYAGYIDGGASQEEFYKFIKPILEKMDGTEELLVKLNREDLLRKQRTFDNGSIPHQIHLGELHAILRRQEDFYPFLKDNREKIEKILTFRIPYYVGPLARGNSRFAWMTRKSEETITPWNFEEVVDKGASAQSFIERMTNFDKNLPNEKVLPKHSLLYEYFTVYNELTKVKYVTEGMRKPAFLSGEQKKAIVDLLFKTNRKVTVKQLKEDYFKKIECFDSVEISGVEDRFNASLGTYHDLLKIIKDKDFLDNEENEDILEDIVLTLTLFEDREMIEERLKTYAHLFDDKVMKQLKRRRYTGWGRLSRKLINGIRDKQSGKTILDFLKSDGFANRNFMQLIHDDSLTFKEDIQKAQVSGQGDSLHEHIANLAGSPAIKKGILQTVKVVDELVKVMGRHKPENIVIEMARENQTTQKGQKNSRERMKRIEEGIKELGSQILKEHPVENTQLQNEKLYLYYLQNGRDMYVDQELDINRLSDYDVDHIVPQSFLKDDSIDNKVLTRSDKARGKSDNVPSEEVVKKMKNYWRQLLNAKLITQRKFDNLTKAERGGLSELDKAGFIKRQLVETRQITKHVAQILDSRMNTKYDENDKLIREVKVITLKSKLVSDFRKDFQFYKVREINNYHHAHDAYLNAVVGTALIKKYPKLESEFVYGDYKVYDVRKMIAKSEQEIGKATAKYFFYSNIMNFFKTEITLANGEIRKRPLIETNGETGEIVWDKGRDFATVRKVLSMPQVNIVKKTEVQTGGFSKESILPKRNSDKLIARKKDWDPKKYGGFDSPTVAYSVLVVAKVEKGKSKKLKSVKELLGITIMERSSFEKNPIDFLEAKGYKEVKKDLIIKLPKYSLFELENGRKRMLASAGELQKGNELALPSKYVNFLYLASHYEKLKGSPEDNEQKQLFVEQHKHYLDEIIEQISEFSKRVILADANLDKVLSAYNKHRDKPIREQAENIIHLFTLTNLGAPAAFKYFDTTIDRKRYTSTKEVLDATLIHQSITGLYETRIDLSQLGGDGGGGGGSGGGGSGGTLNIEDEYRLHETSKEPDVPLGSTWLSDFPQAWAETGGMGLAVRQAPLIIPLKATSTPVSIKQYPMSQEARLGIKPHIQRLLDQGILVPCQSPWNTPLLPVKKPGTNDYRPVQDLREVNKRVEDIHPTVPNPYNLLSGLPPSHQWYTVLDLKDAFFCLRLHPTSQPLFAFEWRDPEMGISGQLTWTRLPQGFKNSPTLFNEALHRDLADFRIQHPDLILLQYVDDLLLAATSEQDCQRGTRALLQTLGNLGYRASAKKAQICQKQVKYLGYLLKEGQRWLTEARKETVMGQPTPKTPRQLREFLGKAGFCRLFIPGFAEMAAPLYPLTKPGTLFNWGPDQQKAYQEIKQALLTAPALGLPDLTKPFELFVDEKQGYAKGVLTQKLGPWRRPVAYLSKKLDPVAAGWPPCLRMVAAIAVLTKDAGKLTMGQPLVILAPHAVEALVKQPPDRWLSNARMTHYQAMLLDTDRVQFGPVVALNPATLLPLPEKEAPHDCLEILAETHGTRPDLTDQPIPDADYTWYTDGSSFLQEGQRRAGAAVTTETEVIWARALPAGTSAQRAELIALTQALKMAEGKKLNVYTDSRYAFATAHVHGEIYRRRGWLTSEGREIKNKNEILALLKALFLPKRLSIIHCPGHQKGNSAEARGNRMADQAAREAAMKAVLETSTLLAGKRTADGSEFEKRTADGSEFESPKKKAKVE

SEQ ID NO: 1075 - protein, 2096 aa, synthetic construct
MPAAKRVKLDGGDKKYSIGLDIGTNSVGWAVITDEYKVPSKKFKVLGNTDRHSIKKNLIGALLFDSGETAEATRLKRTARRRYTRRKNRICYLQEIFSNEMAKVDDSFFHRLEESFLVEEDKKHERHPIFGNIVDEVAYHEKYPTIYHLRKKLVDSTDKADLRLIYLALAHMIKFRGHFLIEGDLNPDNSDVDKLFIQLVQTYNQLFEENPINASGVDAKAILSARLSKSRRLENLIAQLPGEKKNGLFGNLIALSLGLTPNFKSNFDLAEDAKLQLSKDTYDDDLDNLLAQIGDQYADLFLAAKNLSDAILLSDILRVNTEITKAPLSASMIKRYDEHHQDLTLLKALVRQQLPEKYKEIFFDQSKNGYAGYIDGGASQEEFYKFIKPILEKMDGTEELLVKLNREDLLRKQRTFDNGSIPHQIHLGELHAILRRQEDFYPFLKDNREKIEKILTFRIPYYVGPLARGNSRFAWMTRKSEETITPWNFEEVVDKGASAQSFIERMTNFDKNLPNEKVLPKHSLLYEYFTVYNELTKVKYVTEGMRKPAFLSGEQKKAIVDLLFKTNRKVTVKQLKEDYFKKIECFDSVEISGVEDRFNASLGTYHDLLKIIKDKDFLDNEENEDILEDIVLTLTLFEDREMIEERLKTYAHLFDDKVMKQLKRRRYTGWGRLSRKLINGIRDKQSGKTILDFLKSDGFANRNFMQLIHDDSLTFKEDIQKAQVSGQGDSLHEHIANLAGSPAIKKGILQTVKVVDELVKVMGRHKPENIVIEMARENQTTQKGQKNSRERMKRIEEGIKELGSQILKEHPVENTQLQNEKLYLYYLQNGRDMYVDQELDINRLSDYDVDHIVPQSFLKDDSIDNKVLTRSDKARGKSDNVPSEEVVKKMKNYWRQLLNAKLITQRKFDNLTKAERGGLSELDKAGFIKRQLVETRQITKHVAQILDSRMNTKYDENDKLIREVKVITLKSKLVSDFRKDFQFYKVREINNYHHAHDAYLNAVVGTALIKKYPKLESEFVYGDYKVYDVRKMIAKSEQEIGKATAKYFFYSNIMNFFKTEITLANGEIRKRPLIETNGETGEIVWDKGRDFATVRKVLSMPQVNIVKKTEVQTGGFSKESILPKRNSDKLIARKKDWDPKKYGGFDSPTVAYSVLVVAKVEKGKSKKLKSVKELLGITIMERSSFEKNPIDFLEAKGYKEVKKDLIIKLPKYSLFELENGRKRMLASAGELQKGNELALPSKYVNFLYLASHYEKLKGSPEDNEQKQLFVEQHKHYLDEIIEQISEFSKRVILADANLDKVLSAYNKHRDKPIREQAENIIHLFTLTNLGAPAAFKYFDTTIDRKRYTSTKEVLDATLIHQSITGLYETRIDLSQLGGDGGGSSEAAAKGGSGGTLNIEDEYRLHETSKEPDVPLGSTWLSDFPQAWAETGGMGLAVRQAPLIIPLKATSTPVSIKQYPMSQEARLGIKPHIQRLLDQGILVPCQSPWNTPLLPVKKPGTNDYRPVQDLREVNKRVEDIHPTVPNPYNLLSGLPPSHQWYTVLDLKDAFFCLRLHPTSQPLFAFEWRDPEMGISGQLTWTRLPQGFKNSPTLFNEALHRDLADFRIQHPDLILLQYVDDLLLAATSEQDCQRGTRALLQTLGNLGYRASAKKAQICQKQVKYLGYLLKEGQRWLTEARKETVMGQPTPKTPRQLREFLGKAGFCRLFIPGFAEMAAPLYPLTKPGTLFNWGPDQQKAYQEIKQALLTAPALGLPDLTKPFELFVDEKQGYAKGVLTQKLGPWRRPVAYLSKKLDPVAAGWPPCLRMVAAIAVLTKDAGKLTMGQPLVILAPHAVEALVKQPPDRWLSNARMTHYQAMLLDTDRVQFGPVVALNPATLLPLPEKEAPHDCLEILAETHGTRPDLTDQPIPDADYTWYTDGSSFLQEGQRRAGAAVTTETEVIWARALPAGTSAQRAELIALTQALKMAEGKKLNVYTDSRYAFATAHVHGEIYRRRGWLTSEGREIKNKNEILALLKALFLPKRLSIIHCPGHQKGNSAEARGNRMADQAAREAAMKAVLETSTLLAGKRTADGSEFEKRTADGSEFESPKKKAKVE

SEQ ID NO: 1076 - protein, 2096 aa, synthetic construct
MPAAKRVKLDGGDKKYSIGLDIGTNSVGWAVITDEYKVPSKKFKVLGNTDRHSIKKNLIGALLFDSGETAEATRLKRTARRRYTRRKNRICYLQEIFSNEMAKVDDSFFHRLEESFLVEEDKKHERHPIFGNIVDEVAYHEKYPTIYHLRKKLVDSTDKADLRLIYLALAHMIKFRGHFLIEGDLNPDNSDVDKLFIQLVQTYNQLFEENPINASGVDAKAILSARLSKSRRLENLIAQLPGEKKNGLFGNLIALSLGLTPNFKSNFDLAEDAKLQLSKDTYDDDLDNLLAQIGDQYADLFLAAKNLSDAILLSDILRVNTEITKAPLSASMIKRYDEHHQDLTLLKALVRQQLPEKYKEIFFDQSKNGYAGYIDGGASQEEFYKFIKPILEKMDGTEELLVKLNREDLLRKQRTFDNGSIPHQIHLGELHAILRRQEDFYPFLKDNREKIEKILTFRIPYYVGPLARGNSRFAWMTRKSEETITPWNFEEVVDKGASAQSFIERMTNFDKNLPNEKVLPKHSLLYEYFTVYNELTKVKYVTEGMRKPAFLSGEQKKAIVDLLFKTNRKVTVKQLKEDYFKKIECFDSVEISGVEDRFNASLGTYHDLLKIIKDKDFLDNEENEDILEDIVLTLTLFEDREMIEERLKTYAHLFDDKVMKQLKRRRYTGWGRLSRKLINGIRDKQSGKTILDFLKSDGFANRNFMQLIHDDSLTFKEDIQKAQVSGQGDSLHEHIANLAGSPAIKKGILQTVKVVDELVKVMGRHKPENIVIEMARENQTTQKGQKNSRERMKRIEEGIKELGSQILKEHPVENTQLQNEKLYLYYLQNGRDMYVDQELDINRLSDYDVDHIVPQSFLKDDSIDNKVLTRSDKARGKSDNVPSEEVVKKMKNYWRQLLNAKLITQRKFDNLTKAERGGLSELDKAGFIKRQLVETRQITKHVAQILDSRMNTKYDENDKLIREVKVITLKSKLVSDFRKDFQFYKVREINNYHHAHDAYLNAVVGTALIKKYPKLESEFVYGDYKVYDVRKMIAKSEQEIGKATAKYFFYSNIMNFFKTEITLANGEIRKRPLIETNGETGEIVWDKGRDFATVRKVLSMPQVNIVKKTEVQTGGFSKESILPKRNSDKLIARKKDWDPKKYGGFDSPTVAYSVLVVAKVEKGKSKKLKSVKELLGITIMERSSFEKNPIDFLEAKGYKEVKKDLIIKLPKYSLFELENGRKRMLASAGELQKGNELALPSKYVNFLYLASHYEKLKGSPEDNEQKQLFVEQHKHYLDEIIEQISEFSKRVILADANLDKVLSAYNKHRDKPIREQAENIIHLFTLTNLGAPAAFKYFDTTIDRKRYTSTKEVLDATLIHQSITGLYETRIDLSQLGGDGGGGGPAPEAAAKGGTLNIEDEYRLHETSKEPDVPLGSTWLSDFPQAWAETGGMGLAVRQAPLIIPLKATSTPVSIKQYPMSQEARLGIKPHIQRLLDQGILVPCQSPWNTPLLPVKKPGTNDYRPVQDLREVNKRVEDIHPTVPNPYNLLSGLPPSHQWYTVLDLKDAFFCLRLHPTSQPLFAFEWRDPEMGISGQLTWTRLPQGFKNSPTLFNEALHRDLADFRIQHPDLILLQYVDDLLLAATSEQDCQRGTRALLQTLGNLGYRASAKKAQICQKQVKYLGYLLKEGQRWLTEARKETVMGQPTPKTPRQLREFLGKAGFCRLFIPGFAEMAAPLYPLTKPGTLFNWGPDQQKAYQEIKQALLTAPALGLPDLTKPFELFVDEKQGYAKGVLTQKLGPWRRPVAYLSKKLDPVAAGWPPCLRMVAAIAVLTKDAGKLTMGQPLVILAPHAVEALVKQPPDRWLSNARMTHYQAMLLDTDRVQFGPVVALNPATLLPLPEKEAPHDCLEILAETHGTRPDLTDQPIPDADYTWYTDGSSFLQEGQRRAGAAVTTETEVIWARALPAGTSAQRAELIALTQALKMAEGKKLNVYTDSRYAFATAHVHGEIYRRRGWLTSEGREIKNKNEILALLKALFLPKRLSIIHCPGHQKGNSAEARGNRMADQAAREAAMKAVLETSTLLAGKRTADGSEFEKRTADGSEFESPKKKAKVE

SEQ ID NO: 1077 - protein, 2097 aa, synthetic construct
MPAAKRVKLDGGDKKYSIGLDIGTNSVGWAVITDEYKVPSKKFKVLGNTDRHSIKKNLIGALLFDSGETAEATRLKRTARRRYTRRKNRICYLQEIFSNEMAKVDDSFFHRLEESFLVEEDKKHERHPIFGNIVDEVAYHEKYPTIYHLRKKLVDSTDKADLRLIYLALAHMIKFRGHFLIEGDLNPDNSDVDKLFIQLVQTYNQLFEENPINASGVDAKAILSARLSKSRRLENLIAQLPGEKKNGLFGNLIALSLGLTPNFKSNFDLAEDAKLQLSKDTYDDDLDNLLAQIGDQYADLFLAAKNLSDAILLSDILRVNTEITKAPLSASMIKRYDEHHQDLTLLKALVRQQLPEKYKEIFFDQSKNGYAGYIDGGASQEEFYKFIKPILEKMDGTEELLVKLNREDLLRKQRTFDNGSIPHQIHLGELHAILRRQEDFYPFLKDNREKIEKILTFRIPYYVGPLARGNSRFAWMTRKSEETITPWNFEEVVDKGASAQSFIERMTNFDKNLPNEKVLPKHSLLYEYFTVYNELTKVKYVTEGMRKPAFLSGEQKKAIVDLLFKTNRKVTVKQLKEDYFKKIECFDSVEISGVEDRFNASLGTYHDLLKIIKDKDFLDNEENEDILEDIVLTLTLFEDREMIEERLKTYAHLFDDKVMKQLKRRRYTGWGRLSRKLINGIRDKQSGKTILDFLKSDGFANRNFMQLIHDDSLTFKEDIQKAQVSGQGDSLHEHIANLAGSPAIKKGILQTVKVVDELVKVMGRHKPENIVIEMARENQTTQKGQKNSRERMKRIEEGIKELGSQILKEHPVENTQLQNEKLYLYYLQNGRDMYVDQELDINRLSDYDVDHIVPQSFLKDDSIDNKVLTRSDKARGKSDNVPSEEVVKKMKNYWRQLLNAKLITQRKFDNLTKAERGGLSELDKAGFIKRQLVETRQITKHVAQILDSRMNTKYDENDKLIREVKVITLKSKLVSDFRKDFQFYKVREINNYHHAHDAYLNAVVGTALIKKYPKLESEFVYGDYKVYDVRKMIAKSEQEIGKATAKYFFYSNIMNFFKTEITLANGEIRKRPLIETNGETGEIVWDKGRDFATVRKVLSMPQVNIVKKTEVQTGGFSKESILPKRNSDKLIARKKDWDPKKYGGFDSPTVAYSVLVVAKVEKGKSKKLKSVKELLGITIMERSSFEKNPIDFLEAKGYKEVKKDLIIKLPKYSLFELENGRKRMLASAGELQKGNELALPSKYVNFLYLASHYEKLKGSPEDNEQKQLFVEQHKHYLDEIIEQISEFSKRVILADANLDKVLSAYNKHRDKPIREQAENIIHLFTLTNLGAPAAFKYFDTTIDRKRYTSTKEVLDATLIHQSITGLYETRIDLSQLGGDGGGSSGSSGSSGSSGGTLNIEDEYRLHETSKEPDVPLGSTWLSDFPQAWAETGGMGLAVRQAPLIIPLKATSTPVSIKQYPMSQEARLGIKPHIQRLLDQGILVPCQSPWNTPLLPVKKPGTNDYRPVQDLREVNKRVEDIHPTVPNPYNLLSGLPPSHQWYTVLDLKDAFFCLRLHPTSQPLFAFEWRDPEMGISGQLTWTRLPQGFKNSPTLFNEALHRDLADFRIQHPDLILLQYVDDLLLAATSEQDCQRGTRALLQTLGNLGYRASAKKAQICQKQVKYLGYLLKEGQRWLTEARKETVMGQPTPKTPRQLREFLGKAGFCRLFIPGFAEMAAPLYPLTKPGTLFNWGPDQQKAYQEIKQALLTAPALGLPDLTKPFELFVDEKQGYAKGVLTQKLGPWRRPVAYLSKKLDPVAAGWPPCLRMVAAIAVLTKDAGKLTMGQPLVILAPHAVEALVKQPPDRWLSNARMTHYQAMLLDTDRVQFGPVVALNPATLLPLPEKEAPHDCLEILAETHGTRPDLTDQPIPDADYTWYTDGSSFLQEGQRRAGAAVTTETEVIWARALPAGTSAQRAELIALTQALKMAEGKKLNVYTDSRYAFATAHVHGEIYRRRGWLTSEGREIKNKNEILALLKALFLPKRLSIIHCPGHQKGNSAEARGNRMADQAAREAAMKAVLETSTLLAGKRTADGSEFEKRTADGSEFESPKKKAKVE

SEQ ID NO: 1078 - protein, 2093 aa, synthetic construct
MPAAKRVKLDGGDKKYSIGLDIGTNSVGWAVITDEYKVPSKKFKVLGNTDRHSIKKNLIGALLFDSGETAEATRLKRTARRRYTRRKNRICYLQEIFSNEMAKVDDSFFHRLEESFLVEEDKKHERHPIFGNIVDEVAYHEKYPTIYHLRKKLVDSTDKADLRLIYLALAHMIKFRGHFLIEGDLNPDNSDVDKLFIQLVQTYNQLFEENPINASGVDAKAILSARLSKSRRLENLIAQLPGEKKNGLFGNLIALSLGLTPNFKSNFDLAEDAKLQLSKDTYDDDLDNLLAQIGDQYADLFLAAKNLSDAILLSDILRVNTEITKAPLSASMIKRYDEHHQDLTLLKALVRQQLPEKYKEIFFDQSKNGYAGYIDGGASQEEFYKFIKPILEKMDGTEELLVKLNREDLLRKQRTFDNGSIPHQIHLGELHAILRRQEDFYPFLKDNREKIEKILTFRIPYYVGPLARGNSRFAWMTRKSEETITPWNFEEVVDKGASAQSFIERMTNFDKNLPNEKVLPKHSLLYEYFTVYNELTKVKYVTEGMRKPAFLSGEQKKAIVDLLFKTNRKVTVKQLKEDYFKKIECFDSVEISGVEDRFNASLGTYHDLLKIIKDKDFLDNEENEDILEDIVLTLTLFEDREMIEERLKTYAHLFDDKVMKQLKRRRYTGWGRLSRKLINGIRDKQSGKTILDFLKSDGFANRNFMQLIHDDSLTFKEDIQKAQVSGQGDSLHEHIANLAGSPAIKKGILQTVKVVDELVKVMGRHKPENIVIEMARENQTTQKGQKNSRERMKRIEEGIKELGSQILKEHPVENTQLQNEKLYLYYLQNGRDMYVDQELDINRLSDYDVDHIVPQSFLKDDSIDNKVLTRSDKARGKSDNVPSEEVVKKMKNYWRQLLNAKLITQRKFDNLTKAERGGLSELDKAGFIKRQLVETRQITKHVAQILDSRMNTKYDENDKLIREVKVITLKSKLVSDFRKDFQFYKVREINNYHHAHDAYLNAVVGTALIKKYPKLESEFVYGDYKVYDVRKMIAKSEQEIGKATAKYFFYSNIMNFFKTEITLANGEIRKRPLIETNGETGEIVWDKGRDFATVRKVLSMPQVNIVKKTEVQTGGFSKESILPKRNSDKLIARKKDWDPKKYGGFDSPTVAYSVLVVAKVEKGKSKKLKSVKELLGITIMERSSFEKNPIDFLEAKGYKEVKKDLIIKLPKYSLFELENGRKRMLASAGELQKGNELALPSKYVNFLYLASHYEKLKGSPEDNEQKQLFVEQHKHYLDEIIEQISEFSKRVILADANLDKVLSAYNKHRDKPIREQAENIIHLFTLTNLGAPAAFKYFDTTIDRKRYTSTKEVLDATLIHQSITGLYETRIDLSQLGGDGGEAAAKGSSGGTLNIEDEYRLHETSKEPDVPLGSTWLSDFPQAWAETGGMGLAVRQAPLIIPLKATSTPVSIKQYPMSQEARLGIKPHIQRLLDQGILVPCQSPWNTPLLPVKKPGTNDYRPVQDLREVNKRVEDIHPTVPNPYNLLSGLPPSHQWYTVLDLKDAFFCLRLHPTSQPLFAFEWRDPEMGISGQLTWTRLPQGFKNSPTLFNEALHRDLADFRIQHPDLILLQYVDDLLLAATSEQDCQRGTRALLQTLGNLGYRASAKKAQICQKQVKYLGYLLKEGQRWLTEARKETVMGQPTPKTPRQLREFLGKAGFCRLFIPGFAEMAAPLYPLTKPGTLFNWGPDQQKAYQEIKQALLTAPALGLPDLTKPFELFVDEKQGYAKGVLTQKLGPWRRPVAYLSKKLDPVAAGWPPCLRMVAAIAVLTKDAGKLTMGQPLVILAPHAVEALVKQPPDRWLSNARMTHYQAMLLDTDRVQFGPVVALNPATLLPLPEKEAPHDCLEILAETHGTRPDLTDQPIPDADYTWYTDGSSFLQEGQRRAGAAVTTETEVIWARALPAGTSAQRAELIALTQALKMAEGKKLNVYTDSRYAFATAHVHGEIYRRRGWLTSEGREIKNKNEILALLKALFLPKRLSIIHCPGHQKGNSAEARGNRMADQAAREAAMKAVLETSTLLAGKRTADGSEFEKRTADGSEFESPKKKAKVE

SEQ ID NO: 1079 - protein, 2100 aa, synthetic construct
MPAAKRVKLDGGDKKYSIGLDIGTNSVGWAVITDEYKVPSKKFKVLGNTDRHSIKKNLIGALLFDSGETAEATRLKRTARRRYTRRKNRICYLQEIFSNEMAKVDDSFFHRLEESFLVEEDKKHERHPIFGNIVDEVAYHEKYPTIYHLRKKLVDSTDKADLRLIYLALAHMIKFRGHFLIEGDLNPDNSDVDKLFIQLVQTYNQLFEENPINASGVDAKAILSARLSKSRRLENLIAQLPGEKKNGLFGNLIALSLGLTPNFKSNFDLAEDAKLQLSKDTYDDDLDNLLAQIGDQYADLFLAAKNLSDAILLSDILRVNTEITKAPLSASMIKRYDEHHQDLTLLKALVRQQLPEKYKEIFFDQSKNGYAGYIDGGASQEEFYKFIKPILEKMDGTEELLVKLNREDLLRKQRTFDNGSIPHQIHLGELHAILRRQEDFYPFLKDNREKIEKILTFRIPYYVGPLARGNSRFAWMTRKSEETITPWNFEEVVDKGASAQSFIERMTNFDKNLPNEKVLPKHSLLYEYFTVYNELTKVKYVTEGMRKPAFLSGEQKKAIVDLLFKTNRKVTVKQLKEDYFKKIECFDSVEISGVEDRFNASLGTYHDLLKIIKDKDFLDNEENEDILEDIVLTLTLFEDREMIEERLKTYAHLFDDKVMKQLKRRRYTGWGRLSRKLINGIRDKQSGKTILDFLKSDGFANRNFMQLIHDDSLTFKEDIQKAQVSGQGDSLHEHIANLAGSPAIKKGILQTVKVVDELVKVMGRHKPENIVIEMARENQTTQKGQKNSRERMKRIEEGIKELGSQILKEHPVENTQLQNEKLYLYYLQNGRDMYVDQELDINRLSDYDVDHIVPQSFLKDDSIDNKVLTRSDKARGKSDNVPSEEVVKKMKNYWRQLLNAKLITQRKFDNLTKAERGGLSELDKAGFIKRQLVETRQITKHVAQILDSRMNTKYDENDKLIREVKVITLKSKLVSDFRKDFQFYKVREINNYHHAHDAYLNAVVGTALIKKYPKLESEFVYGDYKVYDVRKMIAKSEQEIGKATAKYFFYSNIMNFFKTEITLANGEIRKRPLIETNGETGEIVWDKGRDFATVRKVLSMPQVNIVKKTEVQTGGFSKESILPKRNSDKLIARKKDWDPKKYGGFDSPTVAYSVLVVAKVEKGKSKKLKSVKELLGITIMERSSFEKNPIDFLEAKGYKEVKKDLIIKLPKYSLFELENGRKRMLASAGELQKGNELALPSKYVNFLYLASHYEKLKGSPEDNEQKQLFVEQHKHYLDEIIEQISEFSKRVILADANLDKVLSAYNKHRDKPIREQAENIIHLFTLTNLGAPAAFKYFDTTIDRKRYTSTKEVLDATLIHQSITGLYETRIDLSQLGGDGGGGGGSEAAAKGGGGSGGTLNIEDEYRLHETSKEPDVPLGSTWLSDFPQAWAETGGMGLAVRQAPLIIPLKATSTPVSIKQYPMSQEARLGIKPHIQRLLDQGILVPCQSPWNTPLLPVKKPGTNDYRPVQDLREVNKRVEDIHPTVPNPYNLLSGLPPSHQWYTVLDLKDAFFCLRLHPTSQPLFAFEWRDPEMGISGQLTWTRLPQGFKNSPTLFNEALHRDLADFRIQHPDLILLQYVDDLLLAATSEQDCQRGTRALLQTLGNLGYRASAKKAQICQKQVKYLGYLLKEGQRWLTEARKETVMGQPTPKTPRQLREFLGKAGFCRLFIPGFAEMAAPLYPLTKPGTLFNWGPDQQKAYQEIKQALLTAPALGLPDLTKPFELFVDEKQGYAKGVLTQKLGPWRRPVAYLSKKLDPVAAGWPPCLRMVAAIAVLTKDAGKLTMGQPLVILAPHAVEALVKQPPDRWLSNARMTHYQAMLLDTDRVQFGPVVALNPATLLPLPEKEAPHDCLEILAETHGTRPDLTDQPIPDADYTWYTDGSSFLQEGQRRAGAAVTTETEVIWARALPAGTSAQRAELIALTQALKMAEGKKLNVYTDSRYAFATAHVHGEIYRRRGWLTSEGREIKNKNEILALLKALFLPKRLSIIHCPGHQKGNSAEARGNRMADQAAREAAMKAVLETSTLLAGKRTADGSEFEKRTADGSEFESPKKKAKVE

SEQ ID NO: 1080 - protein, 2088 aa, synthetic construct
MPAAKRVKLDGGDKKYSIGLDIGTNSVGWAVITDEYKVPSKKFKVLGNTDRHSIKKNLIGALLFDSGETAEATRLKRTARRRYTRRKNRICYLQEIFSNEMAKVDDSFFHRLEESFLVEEDKKHERHPIFGNIVDEVAYHEKYPTIYHLRKKLVDSTDKADLRLIYLALAHMIKFRGHFLIEGDLNPDNSDVDKLFIQLVQTYNQLFEENPINASGVDAKAILSARLSKSRRLENLIAQLPGEKKNGLFGNLIALSLGLTPNFKSNFDLAEDAKLQLSKDTYDDDLDNLLAQIGDQYADLFLAAKNLSDAILLSDILRVNTEITKAPLSASMIKRYDEHHQDLTLLKALVRQQLPEKYKEIFFDQSKNGYAGYIDGGASQEEFYKFIKPILEKMDGTEELLVKLNREDLLRKQRTFDNGSIPHQIHLGELHAILRRQEDFYPFLKDNREKIEKILTFRIPYYVGPLARGNSRFAWMTRKSEETITPWNFEEVVDKGASAQSFIERMTNFDKNLPNEKVLPKHSLLYEYFTVYNELTKVKYVTEGMRKPAFLSGEQKKAIVDLLFKTNRKVTVKQLKEDYFKKIECFDSVEISGVEDRFNASLGTYHDLLKIIKDKDFLDNEENEDILEDIVLTLTLFEDREMIEERLKTYAHLFDDKVMKQLKRRRYTGWGRLSRKLINGIRDKQSGKTILDFLKSDGFANRNFMQLIHDDSLTFKEDIQKAQVSGQGDSLHEHIANLAGSPAIKKGILQTVKVVDELVKVMGRHKPENIVIEMARENQTTQKGQKNSRERMKRIEEGIKELGSQILKEHPVENTQLQNEKLYLYYLQNGRDMYVDQELDINRLSDYDVDHIVPQSFLKDDSIDNKVLTRSDKARGKSDNVPSEEVVKKMKNYWRQLLNAKLITQRKFDNLTKAERGGLSELDKAGFIKRQLVETRQITKHVAQILDSRMNTKYDENDKLIREVKVITLKSKLVSDFRKDFQFYKVREINNYHHAHDAYLNAVVGTALIKKYPKLESEFVYGDYKVYDVRKMIAKSEQEIGKATAKYFFYSNIMNFFKTEITLANGEIRKRPLIETNGETGEIVWDKGRDFATVRKVLSMPQVNIVKKTEVQTGGFSKESILPKRNSDKLIARKKDWDPKKYGGFDSPTVAYSVLVVAKVEKGKSKKLKSVKELLGITIMERSSFEKNPIDFLEAKGYKEVKKDLIIKLPKYSLFELENGRKRMLASAGELQKGNELALPSKYVNFLYLASHYEKLKGSPEDNEQKQLFVEQHKHYLDEIIEQISEFSKRVILADANLDKVLSAYNKHRDKPIREQAENIIHLFTLTNLGAPAAFKYFDTTIDRKRYTSTKEVLDATLIHQSITGLYETRIDLSQLGGDGGGGGGGTLNIEDEYRLHETSKEPDVPLGSTWLSDFPQAWAETGGMGLAVRQAPLIIPLKATSTPVSIKQYPMSQEARLGIKPHIQRLLDQGILVPCQSPWNTPLLPVKKPGTNDYRPVQDLREVNKRVEDIHPTVPNPYNLLSGLPPSHQWYTVLDLKDAFFCLRLHPTSQPLFAFEWRDPEMGISGQLTWTRLPQGFKNSPTLFNEALHRDLADFRIQHPDLILLQYVDDLLLAATSEQDCQRGTRALLQTLGNLGYRASAKKAQICQKQVKYLGYLLKEGQRWLTEARKETVMGQPTPKTPRQLREFLGKAGFCRLFIPGFAEMAAPLYPLTKPGTLFNWGPDQQKAYQEIKQALLTAPALGLPDLTKPFELFVDEKQGYAKGVLTQKLGPWRRPVAYLSKKLDPVAAGWPPCLRMVAAIAVLTKDAGKLTMGQPLVILAPHAVEALVKQPPDRWLSNARMTHYQAMLLDTDRVQFGPVVALNPATLLPLPEKEAPHDCLEILAETHGTRPDLTDQPIPDADYTWYTDGSSFLQEGQRRAGAAVTTETEVIWARALPAGTSAQRAELIALTQALKMAEGKKLNVYTDSRYAFATAHVHGEIYRRRGWLTSEGREIKNKNEILALLKALFLPKRLSIIHCPGHQKGNSAEARGNRMADQAAREAAMKAVLETSTLLAGKRTADGSEFEKRTADGSEFESPKKKAKVE

SEQ ID NO: 1081 - protein, 2096 aa, synthetic construct
MPAAKRVKLDGGDKKYSIGLDIGTNSVGWAVITDEYKVPSKKFKVLGNTDRHSIKKNLIGALLFDSGETAEATRLKRTARRRYTRRKNRICYLQEIFSNEMAKVDDSFFHRLEESFLVEEDKKHERHPIFGNIVDEVAYHEKYPTIYHLRKKLVDSTDKADLRLIYLALAHMIKFRGHFLIEGDLNPDNSDVDKLFIQLVQTYNQLFEENPINASGVDAKAILSARLSKSRRLENLIAQLPGEKKNGLFGNLIALSLGLTPNFKSNFDLAEDAKLQLSKDTYDDDLDNLLAQIGDQYADLFLAAKNLSDAILLSDILRVNTEITKAPLSASMIKRYDEHHQDLTLLKALVRQQLPEKYKEIFFDQSKNGYAGYIDGGASQEEFYKFIKPILEKMDGTEELLVKLNREDLLRKQRTFDNGSIPHQIHLGELHAILRRQEDFYPFLKDNREKIEKILTFRIPYYVGPLARGNSRFAWMTRKSEETITPWNFEEVVDKGASAQSFIERMTNFDKNLPNEKVLPKHSLLYEYFTVYNELTKVKYVTEGMRKPAFLSGEQKKAIVDLLFKTNRKVTVKQLKEDYFKKIECFDSVEISGVEDRFNASLGTYHDLLKIIKDKDFLDNEENEDILEDIVLTLTLFEDREMIEERLKTYAHLFDDKVMKQLKRRRYTGWGRLSRKLINGIRDKQSGKTILDFLKSDGFANRNFMQLIHDDSLTFKEDIQKAQVSGQGDSLHEHIANLAGSPAIKKGILQTVKVVDELVKVMGRHKPENIVIEMARENQTTQKGQKNSRERMKRIEEGIKELGSQILKEHPVENTQLQNEKLYLYYLQNGRDMYVDQELDINRLSDYDVDHIVPQSFLKDDSIDNKVLTRSDKARGKSDNVPSEEVVKKMKNYWRQLLNAKLITQRKFDNLTKAERGGLSELDKAGFIKRQLVETRQITKHVAQILDSRMNTKYDENDKLIREVKVITLKSKLVSDFRKDFQFYKVREINNYHHAHDAYLNAVVGTALIKKYPKLESEFVYGDYKVYDVRKMIAKSEQEIGKATAKYFFYSNIMNFFKTEITLANGEIRKRPLIETNGETGEIVWDKGRDFATVRKVLSMPQVNIVKKTEVQTGGFSKESILPKRNSDKLIARKKDWDPKKYGGFDSPTVAYSVLVVAKVEKGKSKKLKSVKELLGITIMERSSFEKNPIDFLEAKGYKEVKKDLIIKLPKYSLFELENGRKRMLASAGELQKGNELALPSKYVNFLYLASHYEKLKGSPEDNEQKQLFVEQHKHYLDEIIEQISEFSKRVILADANLDKVLSAYNKHRDKPIREQAENIIHLFTLTNLGAPAAFKYFDTTIDRKRYTSTKEVLDATLIHQSITGLYETRIDLSQLGGDGGGGSEAAAKGGGGGTLNIEDEYRLHETSKEPDVPLGSTWLSDFPQAWAETGGMGLAVRQAPLIIPLKATSTPVSIKQYPMSQEARLGIKPHIQRLLDQGILVPCQSPWNTPLLPVKKPGTNDYRPVQDLREVNKRVEDIHPTVPNPYNLLSGLPPSHQWYTVLDLKDAFFCLRLHPTSQPLFAFEWRDPEMGISGQLTWTRLPQGFKNSPTLFNEALHRDLADFRIQHPDLILLQYVDDLLLAATSEQDCQRGTRALLQTLGNLGYRASAKKAQICQKQVKYLGYLLKEGQRWLTEARKETVMGQPTPKTPRQLREFLGKAGFCRLFIPGFAEMAAPLYPLTKPGTLFNWGPDQQKAYQEIKQALLTAPALGLPDLTKPFELFVDEKQGYAKGVLTQKLGPWRRPVAYLSKKLDPVAAGWPPCLRMVAAIAVLTKDAGKLTMGQPLVILAPHAVEALVKQPPDRWLSNARMTHYQAMLLDTDRVQFGPVVALNPATLLPLPEKEAPHDCLEILAETHGTRPDLTDQPIPDADYTWYTDGSSFLQEGQRRAGAAVTTETEVIWARALPAGTSAQRAELIALTQALKMAEGKKLNVYTDSRYAFATAHVHGEIYRRRGWLTSEGREIKNKNEILALLKALFLPKRLSIIHCPGHQKGNSAEARGNRMADQAAREAAMKAVLETSTLLAGKRTADGSEFEKRTADGSEFESPKKKAKVE

SEQ ID NO: 1082 - protein, 2094 aa, synthetic construct
MPAAKRVKLDGGDKKYSIGLDIGTNSVGWAVITDEYKVPSKKFKVLGNTDRHSIKKNLIGALLFDSGETAEATRLKRTARRRYTRRKNRICYLQEIFSNEMAKVDDSFFHRLEESFLVEEDKKHERHPIFGNIVDEVAYHEKYPTIYHLRKKLVDSTDKADLRLIYLALAHMIKFRGHFLIEGDLNPDNSDVDKLFIQLVQTYNQLFEENPINASGVDAKAILSARLSKSRRLENLIAQLPGEKKNGLFGNLIALSLGLTPNFKSNFDLAEDAKLQLSKDTYDDDLDNLLAQIGDQYADLFLAAKNLSDAILLSDILRVNTEITKAPLSASMIKRYDEHHQDLTLLKALVRQQLPEKYKEIFFDQSKNGYAGYIDGGASQEEFYKFIKPILEKMDGTEELLVKLNREDLLRKQRTFDNGSIPHQIHLGELHAILRRQEDFYPFLKDNREKIEKILTFRIPYYVGPLARGNSRFAWMTRKSEETITPWNFEEVVDKGASAQSFIERMTNFDKNLPNEKVLPKHSLLYEYFTVYNELTKVKYVTEGMRKPAFLSGEQKKAIVDLLFKTNRKVTVKQLKEDYFKKIECFDSVEISGVEDRFNASLGTYHDLLKIIKDKDFLDNEENEDILEDIVLTLTLFEDREMIEERLKTYAHLFDDKVMKQLKRRRYTGWGRLSRKLINGIRDKQSGKTILDFLKSDGFANRNFMQLIHDDSLTFKEDIQKAQVSGQGDSLHEHIANLAGSPAIKKGILQTVKVVDELVKVMGRHKPENIVIEMARENQTTQKGQKNSRERMKRIEEGIKELGSQILKEHPVENTQLQNEKLYLYYLQNGRDMYVDQELDINRLSDYDVDHIVPQSFLKDDSIDNKVLTRSDKARGKSDNVPSEEVVKKMKNYWRQLLNAKLITQRKFDNLTKAERGGLSELDKAGFIKRQLVETRQITKHVAQILDSRMNTKYDENDKLIREVKVITLKSKLVSDFRKDFQFYKVREINNYHHAHDAYLNAVVGTALIKKYPKLESEFVYGDYKVYDVRKMIAKSEQEIGKATAKYFFYSNIMNFFKTEITLANGEIRKRPLIETNGETGEIVWDKGRDFATVRKVLSMPQVNIVKKTEVQTGGFSKESILPKRNSDKLIARKKDWDPKKYGGFDSPTVAYSVLVVAKVEKGKSKKLKSVKELLGITIMERSSFEKNPIDFLEAKGYKEVKKDLIIKLPKYSLFELENGRKRMLASAGELQKGNELALPSKYVNFLYLASHYEKLKGSPEDNEQKQLFVEQHKHYLDEIIEQISEFSKRVILADANLDKVLSAYNKHRDKPIREQAENIIHLFTLTNLGAPAAFKYFDTTIDRKRYTSTKEVLDATLIHQSITGLYETRIDLSQLGGDGGGSSGGSGGGGGTLNIEDEYRLHETSKEPDVPLGSTWLSDFPQAWAETGGMGLAVRQAPLIIPLKATSTPVSIKQYPMSQEARLGIKPHIQRLLDQGILVPCQSPWNTPLLPVKKPGTNDYRPVQDLREVNKRVEDIHPTVPNPYNLLSGLPPSHQWYTVLDLKDAFFCLRLHPTSQPLFAFEWRDPEMGISGQLTWTRLPQGFKNSPTLFNEALHRDLADFRIQHPDLILLQYVDDLLLAATSEQDCQRGTRALLQTLGNLGYRASAKKAQICQKQVKYLGYLLKEGQRWLTEARKETVMGQPTPKTPRQLREFLGKAGFCRLFIPGFAEMAAPLYPLTKPGTLFNWGPDQQKAYQEIKQALLTAPALGLPDLTKPFELFVDEKQGYAKGVLTQKLGPWRRPVAYLSKKLDPVAAGWPPCLRMVAAIAVLTKDAGKLTMGQPLVILAPHAVEALVKQPPDRWLSNARMTHYQAMLLDTDRVQFGPVVALNPATLLPLPEKEAPHDCLEILAETHGTRPDLTDQPIPDADYTWYTDGSSFLQEGQRRAGAAVTTETEVIWARALPAGTSAQRAELIALTQALKMAEGKKLNVYTDSRYAFATAHVHGEIYRRRGWLTSEGREIKNKNEILALLKALFLPKRLSIIHCPGHQKGNSAEARGNRMADQAAREAAMKAVLETSTLLAGKRTADGSEFEKRTADGSEFESPKKKAKVE

SEQ ID NO: 1083 - protein, 2093 aa, synthetic construct
MPAAKRVKLDGGDKKYSIGLDIGTNSVGWAVITDEYKVPSKKFKVLGNTDRHSIKKNLIGALLFDSGETAEATRLKRTARRRYTRRKNRICYLQEIFSNEMAKVDDSFFHRLEESFLVEEDKKHERHPIFGNIVDEVAYHEKYPTIYHLRKKLVDSTDKADLRLIYLALAHMIKFRGHFLIEGDLNPDNSDVDKLFIQLVQTYNQLFEENPINASGVDAKAILSARLSKSRRLENLIAQLPGEKKNGLFGNLIALSLGLTPNFKSNFDLAEDAKLQLSKDTYDDDLDNLLAQIGDQYADLFLAAKNLSDAILLSDILRVNTEITKAPLSASMIKRYDEHHQDLTLLKALVRQQLPEKYKEIFFDQSKNGYAGYIDGGASQEEFYKFIKPILEKMDGTEELLVKLNREDLLRKQRTFDNGSIPHQIHLGELHAILRRQEDFYPFLKDNREKIEKILTFRIPYYVGPLARGNSRFAWMTRKSEETITPWNFEEVVDKGASAQSFIERMTNFDKNLPNEKVLPKHSLLYEYFTVYNELTKVKYVTEGMRKPAFLSGEQKKAIVDLLFKTNRKVTVKQLKEDYFKKIECFDSVEISGVEDRFNASLGTYHDLLKIIKDKDFLDNEENEDILEDIVLTLTLFEDREMIEERLKTYAHLFDDKVMKQLKRRRYTGWGRLSRKLINGIRDKQSGKTILDFLKSDGFANRNFMQLIHDDSLTFKEDIQKAQVSGQGDSLHEHIANLAGSPAIKKGILQTVKVVDELVKVMGRHKPENIVIEMARENQTTQKGQKNSRERMKRIEEGIKELGSQILKEHPVENTQLQNEKLYLYYLQNGRDMYVDQELDINRLSDYDVDHIVPQSFLKDDSIDNKVLTRSDKARGKSDNVPSEEVVKKMKNYWRQLLNAKLITQRKFDNLTKAERGGLSELDKAGFIKRQLVETRQITKHVAQILDSRMNTKYDENDKLIREVKVITLKSKLVSDFRKDFQFYKVREINNYHHAHDAYLNAVVGTALIKKYPKLESEFVYGDYKVYDVRKMIAKSEQEIGKATAKYFFYSNIMNFFKTEITLANGEIRKRPLIETNGETGEIVWDKGRDFATVRKVLSMPQVNIVKKTEVQTGGFSKESILPKRNSDKLIARKKDWDPKKYGGFDSPTVAYSVLVVAKVEKGKSKKLKSVKELLGITIMERSSFEKNPIDFLEAKGYKEVKKDLIIKLPKYSLFELENGRKRMLASAGELQKGNELALPSKYVNFLYLASHYEKLKGSPEDNEQKQLFVEQHKHYLDEIIEQISEFSKRVILADANLDKVLSAYNKHRDKPIREQAENIIHLFTLTNLGAPAAFKYFDTTIDRKRYTSTKEVLDATLIHQSITGLYETRIDLSQLGGDGGGGSEAAAKGGTLNIEDEYRLHETSKEPDVPLGSTWLSDFPQAWAETGGMGLAVRQAPLIIPLKATSTPVSIKQYPMSQEARLGIKPHIQRLLDQGILVPCQSPWNTPLLPVKKPGTNDYRPVQDLREVNKRVEDIHPTVPNPYNLLSGLPPSHQWYTVLDLKDAFFCLRLHPTSQPLFAFEWRDPEMGISGQLTWTRLPQGFKNSPTLFNEALHRDLADFRIQHPDLILLQYVDDLLLAATSEQDCQRGTRALLQTLGNLGYRASAKKAQICQKQVKYLGYLLKEGQRWLTEARKETVMGQPTPKTPRQLREFLGKAGFCRLFIPGFAEMAAPLYPLTKPGTLFNWGPDQQKAYQEIKQALLTAPALGLPDLTKPFELFVDEKQGYAKGVLTQKLGPWRRPVAYLSKKLDPVAAGWPPCLRMVAAIAVLTKDAGKLTMGQPLVILAPHAVEALVKQPPDRWLSNARMTHYQAMLLDTDRVQFGPVVALNPATLLPLPEKEAPHDCLEILAETHGTRPDLTDQPIPDADYTWYTDGSSFLQEGQRRAGAAVTTETEVIWARALPAGTSAQRAELIALTQALKMAEGKKLNVYTDSRYAFATAHVHGEIYRRRGWLTSEGREIKNKNEILALLKALFLPKRLSIIHCPGHQKGNSAEARGNRMADQAAREAAMKAVLETSTLLAGKRTADGSEFEKRTADGSEFESPKKKAKVE

SEQ ID NO: 1084 - protein, 2094 aa, synthetic construct
MPAAKRVKLDGGDKKYSIGLDIGTNSVGWAVITDEYKVPSKKFKVLGNTDRHSIKKNLIGALLFDSGETAEATRLKRTARRRYTRRKNRICYLQEIFSNEMAKVDDSFFHRLEESFLVEEDKKHERHPIFGNIVDEVAYHEKYPTIYHLRKKLVDSTDKADLRLIYLALAHMIKFRGHFLIEGDLNPDNSDVDKLFIQLVQTYNQLFEENPINASGVDAKAILSARLSKSRRLENLIAQLPGEKKNGLFGNLIALSLGLTPNFKSNFDLAEDAKLQLSKDTYDDDLDNLLAQIGDQYADLFLAAKNLSDAILLSDILRVNTEITKAPLSASMIKRYDEHHQDLTLLKALVRQQLPEKYKEIFFDQSKNGYAGYIDGGASQEEFYKFIKPILEKMDGTEELLVKLNREDLLRKQRTFDNGSIPHQIHLGELHAILRRQEDFYPFLKDNREKIEKILTFRIPYYVGPLARGNSRFAWMTRKSEETITPWNFEEVVDKGASAQSFIERMTNFDKNLPNEKVLPKHSLLYEYFTVYNELTKVKYVTEGMRKPAFLSGEQKKAIVDLLFKTNRKVTVKQLKEDYFKKIECFDSVEISGVEDRFNASLGTYHDLLKIIKDKDFLDNEENEDILEDIVLTLTLFEDREMIEERLKTYAHLFDDKVMKQLKRRRYTGWGRLSRKLINGIRDKQSGKTILDFLKSDGFANRNFMQLIHDDSLTFKEDIQKAQVSGQGDSLHEHIANLAGSPAIKKGILQTVKVVDELVKVMGRHKPENIVIEMARENQTTQKGQKNSRERMKRIEEGIKELGSQILKEHPVENTQLQNEKLYLYYLQNGRDMYVDQELDINRLSDYDVDHIVPQSFLKDDSIDNKVLTRSDKARGKSDNVPSEEVVKKMKNYWRQLLNAKLITQRKFDNLTKAERGGLSELDKAGFIKRQLVETRQITKHVAQILDSRMNTKYDENDKLIREVKVITLKSKLVSDFRKDFQFYKVREINNYHHAHDAYLNAVVGTALIKKYPKLESEFVYGDYKVYDVRKMIAKSEQEIGKATAKYFFYSNIMNFFKTEITLANGEIRKRPLIETNGETGEIVWDKGRDFATVRKVLSMPQVNIVKKTEVQTGGFSKESILPKRNSDKLIARKKDWDPKKYGGFDSPTVAYSVLVVAKVEKGKSKKLKSVKELLGITIMERSSFEKNPIDFLEAKGYKEVKKDLIIKLPKYSLFELENGRKRMLASAGELQKGNELALPSKYVNFLYLASHYEKLKGSPEDNEQKQLFVEQHKHYLDEIIEQISEFSKRVILADANLDKVLSAYNKHRDKPIREQAENIIHLFTLTNLGAPAAFKYFDTTIDRKRYTSTKEVLDATLIHQSITGLYETRIDLSQLGGDGGGSSGGGPAPGGTLNIEDEYRLHETSKEPDVPLGSTWLSDFPQAWAETGGMGLAVRQAPLIIPLKATSTPVSIKQYPMSQEARLGIKPHIQRLLDQGILVPCQSPWNTPLLPVKKPGTNDYRPVQDLREVNKRVEDIHPTVPNPYNLLSGLPPSHQWYTVLDLKDAFFCLRLHPTSQPLFAFEWRDPEMGISGQLTWTRLPQGFKNSPTLFNEALHRDLADFRIQHPDLILLQYVDDLLLAATSEQDCQRGTRALLQTLGNLGYRASAKKAQICQKQVKYLGYLLKEGQRWLTEARKETVMGQPTPKTPRQLREFLGKAGFCRLFIPGFAEMAAPLYPLTKPGTLFNWGPDQQKAYQEIKQALLTAPALGLPDLTKPFELFVDEKQGYAKGVLTQKLGPWRRPVAYLSKKLDPVAAGWPPCLRMVAAIAVLTKDAGKLTMGQPLVILAPHAVEALVKQPPDRWLSNARMTHYQAMLLDTDRVQFGPVVALNPATLLPLPEKEAPHDCLEILAETHGTRPDLTDQPIPDADYTWYTDGSSFLQEGQRRAGAAVTTETEVIWARALPAGTSAQRAELIALTQALKMAEGKKLNVYTDSRYAFATAHVHGEIYRRRGWLTSEGREIKNKNEILALLKALFLPKRLSIIHCPGHQKGNSAEARGNRMADQAAREAAMKAVLETSTLLAGKRTADGSEFEKRTADGSEFESPKKKAKVE

SEQ ID NO: 1085 - protein, 2094 aa, synthetic construct
MPAAKRVKLDGGDKKYSIGLDIGTNSVGWAVITDEYKVPSKKFKVLGNTDRHSIKKNLIGALLFDSGETAEATRLKRTARRRYTRRKNRICYLQEIFSNEMAKVDDSFFHRLEESFLVEEDKKHERHPIFGNIVDEVAYHEKYPTIYHLRKKLVDSTDKADLRLIYLALAHMIKFRGHFLIEGDLNPDNSDVDKLFIQLVQTYNQLFEENPINASGVDAKAILSARLSKSRRLENLIAQLPGEKKNGLFGNLIALSLGLTPNFKSNFDLAEDAKLQLSKDTYDDDLDNLLAQIGDQYADLFLAAKNLSDAILLSDILRVNTEITKAPLSASMIKRYDEHHQDLTLLKALVRQQLPEKYKEIFFDQSKNGYAGYIDGGASQEEFYKFIKPILEKMDGTEELLVKLNREDLLRKQRTFDNGSIPHQIHLGELHAILRRQEDFYPFLKDNREKIEKILTFRIPYYVGPLARGNSRFAWMTRKSEETITPWNFEEVVDKGASAQSFIERMTNFDKNLPNEKVLPKHSLLYEYFTVYNELTKVKYVTEGMRKPAFLSGEQKKAIVDLLFKTNRKVTVKQLKEDYFKKIECFDSVEISGVEDRFNASLGTYHDLLKIIKDKDFLDNEENEDILEDIVLTLTLFEDREMIEERLKTYAHLFDDKVMKQLKRRRYTGWGRLSRKLINGIRDKQSGKTILDFLKSDGFANRNFMQLIHDDSLTFKEDIQKAQVSGQGDSLHEHIANLAGSPAIKKGILQTVKVVDELVKVMGRHKPENIVIEMARENQTTQKGQKNSRERMKRIEEGIKELGSQILKEHPVENTQLQNEKLYLYYLQNGRDMYVDQELDINRLSDYDVDHIVPQSFLKDDSIDNKVLTRSDKARGKSDNVPSEEVVKKMKNYWRQLLNAKLITQRKFDNLTKAERGGLSELDKAGFIKRQLVETRQITKHVAQILDSRMNTKYDENDKLIREVKVITLKSKLVSDFRKDFQFYKVREINNYHHAHDAYLNAVVGTALIKKYPKLESEFVYGDYKVYDVRKMIAKSEQEIGKATAKYFFYSNIMNFFKTEITLANGEIRKRPLIETNGETGEIVWDKGRDFATVRKVLSMPQVNIVKKTEVQTGGFSKESILPKRNSDKLIARKKDWDPKKYGGFDSPTVAYSVLVVAKVEKGKSKKLKSVKELLGITIMERSSFEKNPIDFLEAKGYKEVKKDLIIKLPKYSLFELENGRKRMLASAGELQKGNELALPSKYVNFLYLASHYEKLKGSPEDNEQKQLFVEQHKHYLDEIIEQISEFSKRVILADANLDKVLSAYNKHRDKPIREQAENIIHLFTLTNLGAPAAFKYFDTTIDRKRYTSTKEVLDATLIHQSITGLYETRIDLSQLGGDGGGGSGGGPAPGGTLNIEDEYRLHETSKEPDVPLGSTWLSDFPQAWAETGGMGLAVRQAPLIIPLKATSTPVSIKQYPMSQEARLGIKPHIQRLLDQGILVPCQSPWNTPLLPVKKPGTNDYRPVQDLREVNKRVEDIHPTVPNPYNLLSGLPPSHQWYTVLDLKDAFFCLRLHPTSQPLFAFEWRDPEMGISGQLTWTRLPQGFKNSPTLFNEALHRDLADFRIQHPDLILLQYVDDLLLAATSEQDCQRGTRALLQTLGNLGYRASAKKAQICQKQVKYLGYLLKEGQRWLTEARKETVMGQPTPKTPRQLREFLGKAGFCRLFIPGFAEMAAPLYPLTKPGTLFNWGPDQQKAYQEIKQALLTAPALGLPDLTKPFELFVDEKQGYAKGVLTQKLGPWRRPVAYLSKKLDPVAAGWPPCLRMVAAIAVLTKDAGKLTMGQPLVILAPHAVEALVKQPPDRWLSNARMTHYQAMLLDTDRVQFGPVVALNPATLLPLPEKEAPHDCLEILAETHGTRPDLTDQPIPDADYTWYTDGSSFLQEGQRRAGAAVTTETEVIWARALPAGTSAQRAELIALTQALKMAEGKKLNVYTDSRYAFATAHVHGEIYRRRGWLTSEGREIKNKNEILALLKALFLPKRLSIIHCPGHQKGNSAEARGNRMADQAAREAAMKAVLETSTLLAGKRTADGSEFEKRTADGSEFESPKKKAKVE

SEQ ID NO: 1086 - protein, 2091 aa, synthetic construct
MPAAKRVKLDGGDKKYSIGLDIGTNSVGWAVITDEYKVPSKKFKVLGNTDRHSIKKNLIGALLFDSGETAEATRLKRTARRRYTRRKNRICYLQEIFSNEMAKVDDSFFHRLEESFLVEEDKKHERHPIFGNIVDEVAYHEKYPTIYHLRKKLVDSTDKADLRLIYLALAHMIKFRGHFLIEGDLNPDNSDVDKLFIQLVQTYNQLFEENPINASGVDAKAILSARLSKSRRLENLIAQLPGEKKNGLFGNLIALSLGLTPNFKSNFDLAEDAKLQLSKDTYDDDLDNLLAQIGDQYADLFLAAKNLSDAILLSDILRVNTEITKAPLSASMIKRYDEHHQDLTLLKALVRQQLPEKYKEIFFDQSKNGYAGYIDGGASQEEFYKFIKPILEKMDGTEELLVKLNREDLLRKQRTFDNGSIPHQIHLGELHAILRRQEDFYPFLKDNREKIEKILTFRIPYYVGPLARGNSRFAWMTRKSEETITPWNFEEVVDKGASAQSFIERMTNFDKNLPNEKVLPKHSLLYEYFTVYNELTKVKYVTEGMRKPAFLSGEQKKAIVDLLFKTNRKVTVKQLKEDYFKKIECFDSVEISGVEDRFNASLGTYHDLLKIIKDKDFLDNEENEDILEDIVLTLTLFEDREMIEERLKTYAHLFDDKVMKQLKRRRYTGWGRLSRKLINGIRDKQSGKTILDFLKSDGFANRNFMQLIHDDSLTFKEDIQKAQVSGQGDSLHEHIANLAGSPAIKKGILQTVKVVDELVKVMGRHKPENIVIEMARENQTTQKGQKNSRERMKRIEEGIKELGSQILKEHPVENTQLQNEKLYLYYLQNGRDMYVDQELDINRLSDYDVDHIVPQSFLKDDSIDNKVLTRSDKARGKSDNVPSEEVVKKMKNYWRQLLNAKLITQRKFDNLTKAERGGLSELDKAGFIKRQLVETRQITKHVAQILDSRMNTKYDENDKLIREVKVITLKSKLVSDFRKDFQFYKVREINNYHHAHDAYLNAVVGTALIKKYPKLESEFVYGDYKVYDVRKMIAKSEQEIGKATAKYFFYSNIMNFFKTEITLANGEIRKRPLIETNGETGEIVWDKGRDFATVRKVLSMPQVNIVKKTEVQTGGFSKESILPKRNSDKLIARKKDWDPKKYGGFDSPTVAYSVLVVAKVEKGKSKKLKSVKELLGITIMERSSFEKNPIDFLEAKGYKEVKKDLIIKLPKYSLFELENGRKRMLASAGELQKGNELALPSKYVNFLYLASHYEKLKGSPEDNEQKQLFVEQHKHYLDEIIEQISEFSKRVILADANLDKVLSAYNKHRDKPIREQAENIIHLFTLTNLGAPAAFKYFDTTIDRKRYTSTKEVLDATLIHQSITGLYETRIDLSQLGGDGGGSSPAPGGTLNIEDEYRLHETSKEPDVPLGSTWLSDFPQAWAETGGMGLAVRQAPLIIPLKATSTPVSIKQYPMSQEARLGIKPHIQRLLDQGILVPCQSPWNTPLLPVKKPGTNDYRPVQDLREVNKRVEDIHPTVPNPYNLLSGLPPSHQWYTVLDLKDAFFCLRLHPTSQPLFAFEWRDPEMGISGQLTWTRLPQGFKNSPTLFNEALHRDLADFRIQHPDLILLQYVDDLLLAATSEQDCQRGTRALLQTLGNLGYRASAKKAQICQKQVKYLGYLLKEGQRWLTEARKETVMGQPTPKTPRQLREFLGKAGFCRLFIPGFAEMAAPLYPLTKPGTLFNWGPDQQKAYQEIKQALLTAPALGLPDLTKPFELFVDEKQGYAKGVLTQKLGPWRRPVAYLSKKLDPVAAGWPPCLRMVAAIAVLTKDAGKLTMGQPLVILAPHAVEALVKQPPDRWLSNARMTHYQAMLLDTDRVQFGPVVALNPATLLPLPEKEAPHDCLEILAETHGTRPDLTDQPIPDADYTWYTDGSSFLQEGQRRAGAAVTTETEVIWARALPAGTSAQRAELIALTQALKMAEGKKLNVYTDSRYAFATAHVHGEIYRRRGWLTSEGREIKNKNEILALLKALFLPKRLSIIHCPGHQKGNSAEARGNRMADQAAREAAMKAVLETSTLLAGKRTADGSEFEKRTADGSEFESPKKKAKVE

SEQ ID NO: 1087 - protein, 2094 aa, synthetic construct
MPAAKRVKLDGGDKKYSIGLDIGTNSVGWAVITDEYKVPSKKFKVLGNTDRHSIKKNLIGALLFDSGETAEATRLKRTARRRYTRRKNRICYLQEIFSNEMAKVDDSFFHRLEESFLVEEDKKHERHPIFGNIVDEVAYHEKYPTIYHLRKKLVDSTDKADLRLIYLALAHMIKFRGHFLIEGDLNPDNSDVDKLFIQLVQTYNQLFEENPINASGVDAKAILSARLSKSRRLENLIAQLPGEKKNGLFGNLIALSLGLTPNFKSNFDLAEDAKLQLSKDTYDDDLDNLLAQIGDQYADLFLAAKNLSDAILLSDILRVNTEITKAPLSASMIKRYDEHHQDLTLLKALVRQQLPEKYKEIFFDQSKNGYAGYIDGGASQEEFYKFIKPILEKMDGTEELLVKLNREDLLRKQRTFDNGSIPHQIHLGELHAILRRQEDFYPFLKDNREKIEKILTFRIPYYVGPLARGNSRFAWMTRKSEETITPWNFEEVVDKGASAQSFIERMTNFDKNLPNEKVLPKHSLLYEYFTVYNELTKVKYVTEGMRKPAFLSGEQKKAIVDLLFKTNRKVTVKQLKEDYFKKIECFDSVEISGVEDRFNASLGTYHDLLKIIKDKDFLDNEENEDILEDIVLTLTLFEDREMIEERLKTYAHLFDDKVMKQLKRRRYTGWGRLSRKLINGIRDKQSGKTILDFLKSDGFANRNFMQLIHDDSLTFKEDIQKAQVSGQGDSLHEHIANLAGSPAIKKGILQTVKVVDELVKVMGRHKPENIVIEMARENQTTQKGQKNSRERMKRIEEGIKELGSQILKEHPVENTQLQNEKLYLYYLQNGRDMYVDQELDINRLSDYDVDHIVPQSFLKDDSIDNKVLTRSDKARGKSDNVPSEEVVKKMKNYWRQLLNAKLITQRKFDNLTKAERGGLSELDKAGFIKRQLVETRQITKHVAQILDSRMNTKYDENDKLIREVKVITLKSKLVSDFRKDFQFYKVREINNYHHAHDAYLNAVVGTALIKKYPKLESEFVYGDYKVYDVRKMIAKSEQEIGKATAKYFFYSNIMNFFKTEITLANGEIRKRPLIETNGETGEIVWDKGRDFATVRKVLSMPQVNIVKKTEVQTGGFSKESILPKRNSDKLIARKKDWDPKKYGGFDSPTVAYSVLVVAKVEKGKSKKLKSVKELLGITIMERSSFEKNPIDFLEAKGYKEVKKDLIIKLPKYSLFELENGRKRMLASAGELQKGNELALPSKYVNFLYLASHYEKLKGSPEDNEQKQLFVEQHKHYLDEIIEQISEFSKRVILADANLDKVLSAYNKHRDKPIREQAENIIHLFTLTNLGAPAAFKYFDTTIDRKRYTSTKEVLDATLIHQSITGLYETRIDLSQLGGDGGGGGGSSGGSGGTLNIEDEYRLHETSKEPDVPLGSTWLSDFPQAWAETGGMGLAVRQAPLIIPLKATSTPVSIKQYPMSQEARLGIKPHIQRLLDQGILVPCQSPWNTPLLPVKKPGTNDYRPVQDLREVNKRVEDIHPTVPNPYNLLSGLPPSHQWYTVLDLKDAFFCLRLHPTSQPLFAFEWRDPEMGISGQLTWTRLPQGFKNSPTLFNEALHRDLADFRIQHPDLILLQYVDDLLLAATSEQDCQRGTRALLQTLGNLGYRASAKKAQICQKQVKYLGYLLKEGQRWLTEARKETVMGQPTPKTPRQLREFLGKAGFCRLFIPGFAEMAAPLYPLTKPGTLFNWGPDQQKAYQEIKQALLTAPALGLPDLTKPFELFVDEKQGYAKGVLTQKLGPWRRPVAYLSKKLDPVAAGWPPCLRMVAAIAVLTKDAGKLTMGQPLVILAPHAVEALVKQPPDRWLSNARMTHYQAMLLDTDRVQFGPVVALNPATLLPLPEKEAPHDCLEILAETHGTRPDLTDQPIPDADYTWYTDGSSFLQEGQRRAGAAVTTETEVIWARALPAGTSAQRAELIALTQALKMAEGKKLNVYTDSRYAFATAHVHGEIYRRRGWLTSEGREIKNKNEILALLKALFLPKRLSIIHCPGHQKGNSAEARGNRMADQAAREAAMKAVLETSTLLAGKRTADGSEFEKRTADGSEFESPKKKAKVE

SEQ ID NO: 1088 - protein, 2096 aa, synthetic construct
MPAAKRVKLDGGDKKYSIGLDIGTNSVGWAVITDEYKVPSKKFKVLGNTDRHSIKKNLIGALLFDSGETAEATRLKRTARRRYTRRKNRICYLQEIFSNEMAKVDDSFFHRLEESFLVEEDKKHERHPIFGNIVDEVAYHEKYPTIYHLRKKLVDSTDKADLRLIYLALAHMIKFRGHFLIEGDLNPDNSDVDKLFIQLVQTYNQLFEENPINASGVDAKAILSARLSKSRRLENLIAQLPGEKKNGLFGNLIALSLGLTPNFKSNFDLAEDAKLQLSKDTYDDDLDNLLAQIGDQYADLFLAAKNLSDAILLSDILRVNTEITKAPLSASMIKRYDEHHQDLTLLKALVRQQLPEKYKEIFFDQSKNGYAGYIDGGASQEEFYKFIKPILEKMDGTEELLVKLNREDLLRKQRTFDNGSIPHQIHLGELHAILRRQEDFYPFLKDNREKIEKILTFRIPYYVGPLARGNSRFAWMTRKSEETITPWNFEEVVDKGASAQSFIERMTNFDKNLPNEKVLPKHSLLYEYFTVYNELTKVKYVTEGMRKPAFLSGEQKKAIVDLLFKTNRKVTVKQLKEDYFKKIECFDSVEISGVEDRFNASLGTYHDLLKIIKDKDFLDNEENEDILEDIVLTLTLFEDREMIEERLKTYAHLFDDKVMKQLKRRRYTGWGRLSRKLINGIRDKQSGKTILDFLKSDGFANRNFMQLIHDDSLTFKEDIQKAQVSGQGDSLHEHIANLAGSPAIKKGILQTVKVVDELVKVMGRHKPENIVIEMARENQTTQKGQKNSRERMKRIEEGIKELGSQILKEHPVENTQLQNEKLYLYYLQNGRDMYVDQELDINRLSDYDVDHIVPQSFLKDDSIDNKVLTRSDKARGKSDNVPSEEVVKKMKNYWRQLLNAKLITQRKFDNLTKAERGGLSELDKAGFIKRQLVETRQITKHVAQILDSRMNTKYDENDKLIREVKVITLKSKLVSDFRKDFQFYKVREINNYHHAHDAYLNAVVGTALIKKYPKLESEFVYGDYKVYDVRKMIAKSEQEIGKATAKYFFYSNIMNFFKTEITLANGEIRKRPLIETNGETGEIVWDKGRDFATVRKVLSMPQVNIVKKTEVQTGGFSKESILPKRNSDKLIARKKDWDPKKYGGFDSPTVAYSVLVVAKVEKGKSKKLKSVKELLGITIMERSSFEKNPIDFLEAKGYKEVKKDLIIKLPKYSLFELENGRKRMLASAGELQKGNELALPSKYVNFLYLASHYEKLKGSPEDNEQKQLFVEQHKHYLDEIIEQISEFSKRVILADANLDKVLSAYNKHRDKPIREQAENIIHLFTLTNLGAPAAFKYFDTTIDRKRYTSTKEVLDATLIHQSITGLYETRIDLSQLGGDGGGGGEAAAKGSSGGTLNIEDEYRLHETSKEPDVPLGSTWLSDFPQAWAETGGMGLAVRQAPLIIPLKATSTPVSIKQYPMSQEARLGIKPHIQRLLDQGILVPCQSPWNTPLLPVKKPGTNDYRPVQDLREVNKRVEDIHPTVPNPYNLLSGLPPSHQWYTVLDLKDAFFCLRLHPTSQPLFAFEWRDPEMGISGQLTWTRLPQGFKNSPTLFNEALHRDLADFRIQHPDLILLQYVDDLLLAATSEQDCQRGTRALLQTLGNLGYRASAKKAQICQKQVKYLGYLLKEGQRWLTEARKETVMGQPTPKTPRQLREFLGKAGFCRLFIPGFAEMAAPLYPLTKPGTLFNWGPDQQKAYQEIKQALLTAPALGLPDLTKPFELFVDEKQGYAKGVLTQKLGPWRRPVAYLSKKLDPVAAGWPPCLRMVAAIAVLTKDAGKLTMGQPLVILAPHAVEALVKQPPDRWLSNARMTHYQAMLLDTDRVQFGPVVALNPATLLPLPEKEAPHDCLEILAETHGTRPDLTDQPIPDADYTWYTDGSSFLQEGQRRAGAAVTTETEVIWARALPAGTSAQRAELIALTQALKMAEGKKLNVYTDSRYAFATAHVHGEIYRRRGWLTSEGREIKNKNEILALLKALFLPKRLSIIHCPGHQKGNSAEARGNRMADQAAREAAMKAVLETSTLLAGKRTADGSEFEKRTADGSEFESPKKKAKVE

SEQ ID NO: 1089 - protein, 2094 aa, synthetic construct
MPAAKRVKLDGGDKKYSIGLDIGTNSVGWAVITDEYKVPSKKFKVLGNTDRHSIKKNLIGALLFDSGETAEATRLKRTARRRYTRRKNRICYLQEIFSNEMAKVDDSFFHRLEESFLVEEDKKHERHPIFGNIVDEVAYHEKYPTIYHLRKKLVDSTDKADLRLIYLALAHMIKFRGHFLIEGDLNPDNSDVDKLFIQLVQTYNQLFEENPINASGVDAKAILSARLSKSRRLENLIAQLPGEKKNGLFGNLIALSLGLTPNFKSNFDLAEDAKLQLSKDTYDDDLDNLLAQIGDQYADLFLAAKNLSDAILLSDILRVNTEITKAPLSASMIKRYDEHHQDLTLLKALVRQQLPEKYKEIFFDQSKNGYAGYIDGGASQEEFYKFIKPILEKMDGTEELLVKLNREDLLRKQRTFDNGSIPHQIHLGELHAILRRQEDFYPFLKDNREKIEKILTFRIPYYVGPLARGNSRFAWMTRKSEETITPWNFEEVVDKGASAQSFIERMTNFDKNLPNEKVLPKHSLLYEYFTVYNELTKVKYVTEGMRKPAFLSGEQKKAIVDLLFKTNRKVTVKQLKEDYFKKIECFDSVEISGVEDRFNASLGTYHDLLKIIKDKDFLDNEENEDILEDIVLTLTLFEDREMIEERLKTYAHLFDDKVMKQLKRRRYTGWGRLSRKLINGIRDKQSGKTILDFLKSDGFANRNFMQLIHDDSLTFKEDIQKAQVSGQGDSLHEHIANLAGSPAIKKGILQTVKVVDELVKVMGRHKPENIVIEMARENQTTQKGQKNSRERMKRIEEGIKELGSQILKEHPVENTQLQNEKLYLYYLQNGRDMYVDQELDINRLSDYDVDHIVPQSFLKDDSIDNKVLTRSDKARGKSDNVPSEEVVKKMKNYWRQLLNAKLITQRKFDNLTKAERGGLSELDKAGFIKRQLVETRQITKHVAQILDSRMNTKYDENDKLIREVKVITLKSKLVSDFRKDFQFYKVREINNYHHAHDAYLNAVVGTALIKKYPKLESEFVYGDYKVYDVRKMIAKSEQEIGKATAKYFFYSNIMNFFKTEITLANGEIRKRPLIETNGETGEIVWDKGRDFATVRKVLSMPQVNIVKKTEVQTGGFSKESILPKRNSDKLIARKKDWDPKKYGGFDSPTVAYSVLVVAKVEKGKSKKLKSVKELLGITIMERSSFEKNPIDFLEAKGYKEVKKDLIIKLPKYSLFELENGRKRMLASAGELQKGNELALPSKYVNFLYLASHYEKLKGSPEDNEQKQLFVEQHKHYLDEIIEQISEFSKRVILADANLDKVLSAYNKHRDKPIREQAENIIHLFTLTNLGAPAAFKYFDTTIDRKRYTSTKEVLDATLIHQSITGLYETRIDLSQLGGDGGGSSGSSGSSGGTLNIEDEYRLHETSKEPDVPLGSTWLSDFPQAWAETGGMGLAVRQAPLIIPLKATSTPVSIKQYPMSQEARLGIKPHIQRLLDQGILVPCQSPWNTPLLPVKKPGTNDYRPVQDLREVNKRVEDIHPTVPNPYNLLSGLPPSHQWYTVLDLKDAFFCLRLHPTSQPLFAFEWRDPEMGISGQLTWTRLPQGFKNSPTLFNEALHRDLADFRIQHPDLILLQYVDDLLLAATSEQDCQRGTRALLQTLGNLGYRASAKKAQICQKQVKYLGYLLKEGQRWLTEARKETVMGQPTPKTPRQLREFLGKAGFCRLFIPGFAEMAAPLYPLTKPGTLFNWGPDQQKAYQEIKQALLTAPALGLPDLTKPFELFVDEKQGYAKGVLTQKLGPWRRPVAYLSKKLDPVAAGWPPCLRMVAAIAVLTKDAGKLTMGQPLVILAPHAVEALVKQPPDRWLSNARMTHYQAMLLDTDRVQFGPVVALNPATLLPLPEKEAPHDCLEILAETHGTRPDLTDQPIPDADYTWYTDGSSFLQEGQRRAGAAVTTETEVIWARALPAGTSAQRAELIALTQALKMAEGKKLNVYTDSRYAFATAHVHGEIYRRRGWLTSEGREIKNKNEILALLKALFLPKRLSIIHCPGHQKGNSAEARGNRMADQAAREAAMKAVLETSTLLAGKRTADGSEFEKRTADGSEFESPKKKAKVE

SEQ ID NO: 1090 - protein, 2096 aa, synthetic construct
MPAAKRVKLDGGDKKYSIGLDIGTNSVGWAVITDEYKVPSKKFKVLGNTDRHSIKKNLIGALLFDSGETAEATRLKRTARRRYTRRKNRICYLQEIFSNEMAKVDDSFFHRLEESFLVEEDKKHERHPIFGNIVDEVAYHEKYPTIYHLRKKLVDSTDKADLRLIYLALAHMIKFRGHFLIEGDLNPDNSDVDKLFIQLVQTYNQLFEENPINASGVDAKAILSARLSKSRRLENLIAQLPGEKKNGLFGNLIALSLGLTPNFKSNFDLAEDAKLQLSKDTYDDDLDNLLAQIGDQYADLFLAAKNLSDAILLSDILRVNTEITKAPLSASMIKRYDEHHQDLTLLKALVRQQLPEKYKEIFFDQSKNGYAGYIDGGASQEEFYKFIKPILEKMDGTEELLVKLNREDLLRKQRTFDNGSIPHQIHLGELHAILRRQEDFYPFLKDNREKIEKILTFRIPYYVGPLARGNSRFAWMTRKSEETITPWNFEEVVDKGASAQSFIERMTNFDKNLPNEKVLPKHSLLYEYFTVYNELTKVKYVTEGMRKPAFLSGEQKKAIVDLLFKTNRKVTVKQLKEDYFKKIECFDSVEISGVEDRFNASLGTYHDLLKIIKDKDFLDNEENEDILEDIVLTLTLFEDREMIEERLKTYAHLFDDKVMKQLKRRRYTGWGRLSRKLINGIRDKQSGKTILDFLKSDGFANRNFMQLIHDDSLTFKEDIQKAQVSGQGDSLHEHIANLAGSPAIKKGILQTVKVVDELVKVMGRHKPENIVIEMARENQTTQKGQKNSRERMKRIEEGIKELGSQILKEHPVENTQLQNEKLYLYYLQNGRDMYVDQELDINRLSDYDVDHIVPQSFLKDDSIDNKVLTRSDKARGKSDNVPSEEVVKKMKNYWRQLLNAKLITQRKFDNLTKAERGGLSELDKAGFIKRQLVETRQITKHVAQILDSRMNTKYDENDKLIREVKVITLKSKLVSDFRKDFQFYKVREINNYHHAHDAYLNAVVGTALIKKYPKLESEFVYGDYKVYDVRKMIAKSEQEIGKATAKYFFYSNIMNFFKTEITLANGEIRKRPLIETNGETGEIVWDKGRDFATVRKVLSMPQVNIVKKTEVQTGGFSKESILPKRNSDKLIARKKDWDPKKYGGFDSPTVAYSVLVVAKVEKGKSKKLKSVKELLGITIMERSSFEKNPIDFLEAKGYKEVKKDLIIKLPKYSLFELENGRKRMLASAGELQKGNELALPSKYVNFLYLASHYEKLKGSPEDNEQKQLFVEQHKHYLDEIIEQISEFSKRVILADANLDKVLSAYNKHRDKPIREQAENIIHLFTLTNLGAPAAFKYFDTTIDRKRYTSTKEVLDATLIHQSITGLYETRIDLSQLGGDGGGGSPAPEAAAKGGTLNIEDEYRLHETSKEPDVPLGSTWLSDFPQAWAETGGMGLAVRQAPLIIPLKATSTPVSIKQYPMSQEARLGIKPHIQRLLDQGILVPCQSPWNTPLLPVKKPGTNDYRPVQDLREVNKRVEDIHPTVPNPYNLLSGLPPSHQWYTVLDLKDAFFCLRLHPTSQPLFAFEWRDPEMGISGQLTWTRLPQGFKNSPTLFNEALHRDLADFRIQHPDLILLQYVDDLLLAATSEQDCQRGTRALLQTLGNLGYRASAKKAQICQKQVKYLGYLLKEGQRWLTEARKETVMGQPTPKTPRQLREFLGKAGFCRLFIPGFAEMAAPLYPLTKPGTLFNWGPDQQKAYQEIKQALLTAPALGLPDLTKPFELFVDEKQGYAKGVLTQKLGPWRRPVAYLSKKLDPVAAGWPPCLRMVAAIAVLTKDAGKLTMGQPLVILAPHAVEALVKQPPDRWLSNARMTHYQAMLLDTDRVQFGPVVALNPATLLPLPEKEAPHDCLEILAETHGTRPDLTDQPIPDADYTWYTDGSSFLQEGQRRAGAAVTTETEVIWARALPAGTSAQRAELIALTQALKMAEGKKLNVYTDSRYAFATAHVHGEIYRRRGWLTSEGREIKNKNEILALLKALFLPKRLSIIHCPGHQKGNSAEARGNRMADQAAREAAMKAVLETSTLLAGKRTADGSEFEKRTADGSEFESPKKKAKVE

SEQ ID NO: 1091 - protein, 2096 aa, synthetic construct
MPAAKRVKLDGGDKKYSIGLDIGTNSVGWAVITDEYKVPSKKFKVLGNTDRHSIKKNLIGALLFDSGETAEATRLKRTARRRYTRRKNRICYLQEIFSNEMAKVDDSFFHRLEESFLVEEDKKHERHPIFGNIVDEVAYHEKYPTIYHLRKKLVDSTDKADLRLIYLALAHMIKFRGHFLIEGDLNPDNSDVDKLFIQLVQTYNQLFEENPINASGVDAKAILSARLSKSRRLENLIAQLPGEKKNGLFGNLIALSLGLTPNFKSNFDLAEDAKLQLSKDTYDDDLDNLLAQIGDQYADLFLAAKNLSDAILLSDILRVNTEITKAPLSASMIKRYDEHHQDLTLLKALVRQQLPEKYKEIFFDQSKNGYAGYIDGGASQEEFYKFIKPILEKMDGTEELLVKLNREDLLRKQRTFDNGSIPHQIHLGELHAILRRQEDFYPFLKDNREKIEKILTFRIPYYVGPLARGNSRFAWMTRKSEETITPWNFEEVVDKGASAQSFIERMTNFDKNLPNEKVLPKHSLLYEYFTVYNELTKVKYVTEGMRKPAFLSGEQKKAIVDLLFKTNRKVTVKQLKEDYFKKIECFDSVEISGVEDRFNASLGTYHDLLKIIKDKDFLDNEENEDILEDIVLTLTLFEDREMIEERLKTYAHLFDDKVMKQLKRRRYTGWGRLSRKLINGIRDKQSGKTILDFLKSDGFANRNFMQLIHDDSLTFKEDIQKAQVSGQGDSLHEHIANLAGSPAIKKGILQTVKVVDELVKVMGRHKPENIVIEMARENQTTQKGQKNSRERMKRIEEGIKELGSQILKEHPVENTQLQNEKLYLYYLQNGRDMYVDQELDINRLSDYDVDHIVPQSFLKDDSIDNKVLTRSDKARGKSDNVPSEEVVKKMKNYWRQLLNAKLITQRKFDNLTKAERGGLSELDKAGFIKRQLVETRQITKHVAQILDSRMNTKYDENDKLIREVKVITLKSKLVSDFRKDFQFYKVREINNYHHAHDAYLNAVVGTALIKKYPKLESEFVYGDYKVYDVRKMIAKSEQEIGKATAKYFFYSNIMNFFKTEITLANGEIRKRPLIETNGETGEIVWDKGRDFATVRKVLSMPQVNIVKKTEVQTGGFSKESILPKRNSDKLIARKKDWDPKKYGGFDSPTVAYSVLVVAKVEKGKSKKLKSVKELLGITIMERSSFEKNPIDFLEAKGYKEVKKDLIIKLPKYSLFELENGRKRMLASAGELQKGNELALPSKYVNFLYLASHYEKLKGSPEDNEQKQLFVEQHKHYLDEIIEQISEFSKRVILADANLDKVLSAYNKHRDKPIREQAENIIHLFTLTNLGAPAAFKYFDTTIDRKRYTSTKEVLDATLIHQSITGLYETRIDLSQLGGDGGEAAAKGGGGGSGGTLNIEDEYRLHETSKEPDVPLGSTWLSDFPQAWAETGGMGLAVRQAPLIIPLKATSTPVSIKQYPMSQEARLGIKPHIQRLLDQGILVPCQSPWNTPLLPVKKPGTNDYRPVQDLREVNKRVEDIHPTVPNPYNLLSGLPPSHQWYTVLDLKDAFFCLRLHPTSQPLFAFEWRDPEMGISGQLTWTRLPQGFKNSPTLFNEALHRDLADFRIQHPDLILLQYVDDLLLAATSEQDCQRGTRALLQTLGNLGYRASAKKAQICQKQVKYLGYLLKEGQRWLTEARKETVMGQPTPKTPRQLREFLGKAGFCRLFIPGFAEMAAPLYPLTKPGTLFNWGPDQQKAYQEIKQALLTAPALGLPDLTKPFELFVDEKQGYAKGVLTQKLGPWRRPVAYLSKKLDPVAAGWPPCLRMVAAIAVLTKDAGKLTMGQPLVILAPHAVEALVKQPPDRWLSNARMTHYQAMLLDTDRVQFGPVVALNPATLLPLPEKEAPHDCLEILAETHGTRPDLTDQPIPDADYTWYTDGSSFLQEGQRRAGAAVTTETEVIWARALPAGTSAQRAELIALTQALKMAEGKKLNVYTDSRYAFATAHVHGEIYRRRGWLTSEGREIKNKNEILALLKALFLPKRLSIIHCPGHQKGNSAEARGNRMADQAAREAAMKAVLETSTLLAGKRTADGSEFEKRTADGSEFESPKKKAKVE

SEQ ID NO: 1092 - protein, 2109 aa, synthetic construct
MPAAKRVKLDGGDKKYSIGLDIGTNSVGWAVITDEYKVPSKKFKVLGNTDRHSIKKNLIGALLFDSGETAEATRLKRTARRRYTRRKNRICYLQEIFSNEMAKVDDSFFHRLEESFLVEEDKKHERHPIFGNIVDEVAYHEKYPTIYHLRKKLVDSTDKADLRLIYLALAHMIKFRGHFLIEGDLNPDNSDVDKLFIQLVQTYNQLFEENPINASGVDAKAILSARLSKSRRLENLIAQLPGEKKNGLFGNLIALSLGLTPNFKSNFDLAEDAKLQLSKDTYDDDLDNLLAQIGDQYADLFLAAKNLSDAILLSDILRVNTEITKAPLSASMIKRYDEHHQDLTLLKALVRQQLPEKYKEIFFDQSKNGYAGYIDGGASQEEFYKFIKPILEKMDGTEELLVKLNREDLLRKQRTFDNGSIPHQIHLGELHAILRRQEDFYPFLKDNREKIEKILTFRIPYYVGPLARGNSRFAWMTRKSEETITPWNFEEVVDKGASAQSFIERMTNFDKNLPNEKVLPKHSLLYEYFTVYNELTKVKYVTEGMRKPAFLSGEQKKAIVDLLFKTNRKVTVKQLKEDYFKKIECFDSVEISGVEDRFNASLGTYHDLLKIIKDKDFLDNEENEDILEDIVLTLTLFEDREMIEERLKTYAHLFDDKVMKQLKRRRYTGWGRLSRKLINGIRDKQSGKTILDFLKSDGFANRNFMQLIHDDSLTFKEDIQKAQVSGQGDSLHEHIANLAGSPAIKKGILQTVKVVDELVKVMGRHKPENIVIEMARENQTTQKGQKNSRERMKRIEEGIKELGSQILKEHPVENTQLQNEKLYLYYLQNGRDMYVDQELDINRLSDYDVDHIVPQSFLKDDSIDNKVLTRSDKARGKSDNVPSEEVVKKMKNYWRQLLNAKLITQRKFDNLTKAERGGLSELDKAGFIKRQLVETRQITKHVAQILDSRMNTKYDENDKLIREVKVITLKSKLVSDFRKDFQFYKVREINNYHHAHDAYLNAVVGTALIKKYPKLESEFVYGDYKVYDVRKMIAKSEQEIGKATAKYFFYSNIMNFFKTEITLANGEIRKRPLIETNGETGEIVWDKGRDFATVRKVLSMPQVNIVKKTEVQTGGFSKESILPKRNSDKLIARKKDWDPKKYGGFDSPTVAYSVLVVAKVEKGKSKKLKSVKELLGITIMERSSFEKNPIDFLEAKGYKEVKKDLIIKLPKYSLFELENGRKRMLASAGELQKGNELALPSKYVNFLYLASHYEKLKGSPEDNEQKQLFVEQHKHYLDEIIEQISEFSKRVILADANLDKVLSAYNKHRDKPIREQAENIIHLFTLTNLGAPAAFKYFDTTIDRKRYTSTKEVLDATLIHQSITGLYETRIDLSQLGGDGGSGGSSGGSSGSETPGTSESATPESSGGSSGGSSGGVPWILKKPLELTIKLDLEEQQGTLLNNSILSKKGKEELKQLFEKYSALWQSWENQVGHRRIRPHKIATGTVKPTPQKQYHINPKAKPDIQIVINDLLKQGVLIQKESTMNTPVYPVPKPNGRWRMVLDYRAVNKVTPLIAVQNQHSYGILGSLFKGRYKTTIDLSNGFWAHPIVPEDYWITAFTWQGKQYCWTVLPQGFLNSPGLFNGDVVDLLQGIPNVEVYVDDVYISHDSEKEHLEYLDILFNRLKEAGYIISLKKSNIANSIVDFLGFQITNEGRGLTDTFKEKLENITAPTTLKQLQSILGLLNFARNFIPDFTELIAPLYALIPKSPKNYVPWQIEHSTTLETLITKLNGAEYLQGRKGDKTLIMKVNASYTTGYIRYYNEGEKKPISYVSIVFSKTELKFTELEKLLTTVHKGLLKALDLSMGQNIHVYSPIVSMQNIQKTPQTAKKALASRWLSWLSYLEDPRIRFFYDPQMPALKDLPAVDTGKDNKKHPSNFQHIFYTDGSAITSPTKEGHLNAGMGIVYFINKDGNLQKQQEWSISLGNHTAQFAEIAAFEFALKKCLPLGGNILVVTDSNYVAKAYNEELDVWASNGFVNNRKKPLKHISKWKSVADLKRLRPDVVVTHEPGHQKLDSSPHAYGNNLADQLATQASFKVHAGKRTADGSEFEKRTADGSEFESPKKKAKVE

SEQ ID NO: 1093 - protein, 2122 aa, synthetic construct
MPAAKRVKLDGGDKKYSIGLDIGTNSVGWAVITDEYKVPSKKFKVLGNTDRHSIKKNLIGALLFDSGETAEATRLKRTARRRYTRRKNRICYLQEIFSNEMAKVDDSFFHRLEESFLVEEDKKHERHPIFGNIVDEVAYHEKYPTIYHLRKKLVDSTDKADLRLIYLALAHMIKFRGHFLIEGDLNPDNSDVDKLFIQLVQTYNQLFEENPINASGVDAKAILSARLSKSRRLENLIAQLPGEKKNGLFGNLIALSLGLTPNFKSNFDLAEDAKLQLSKDTYDDDLDNLLAQIGDQYADLFLAAKNLSDAILLSDILRVNTEITKAPLSASMIKRYDEHHQDLTLLKALVRQQLPEKYKEIFFDQSKNGYAGYIDGGASQEEFYKFIKPILEKMDGTEELLVKLNREDLLRKQRTFDNGSIPHQIHLGELHAILRRQEDFYPFLKDNREKIEKILTFRIPYYVGPLARGNSRFAWMTRKSEETITPWNFEEVVDKGASAQSFIERMTNFDKNLPNEKVLPKHSLLYEYFTVYNELTKVKYVTEGMRKPAFLSGEQKKAIVDLLFKTNRKVTVKQLKEDYFKKIECFDSVEISGVEDRFNASLGTYHDLLKIIKDKDFLDNEENEDILEDIVLTLTLFEDREMIEERLKTYAHLFDDKVMKQLKRRRYTGWGRLSRKLINGIRDKQSGKTILDFLKSDGFANRNFMQLIHDDSLTFKEDIQKAQVSGQGDSLHEHIANLAGSPAIKKGILQTVKVVDELVKVMGRHKPENIVIEMARENQTTQKGQKNSRERMKRIEEGIKELGSQILKEHPVENTQLQNEKLYLYYLQNGRDMYVDQELDINRLSDYDVDHIVPQSFLKDDSIDNKVLTRSDKARGKSDNVPSEEVVKKMKNYWRQLLNAKLITQRKFDNLTKAERGGLSELDKAGFIKRQLVETRQITKHVAQILDSRMNTKYDENDKLIREVKVITLKSKLVSDFRKDFQFYKVREINNYHHAHDAYLNAVVGTALIKKYPKLESEFVYGDYKVYDVRKMIAKSEQEIGKATAKYFFYSNIMNFFKTEITLANGEIRKRPLIETNGETGEIVWDKGRDFATVRKVLSMPQVNIVKKTEVQTGGFSKESILPKRNSDKLIARKKDWDPKKYGGFDSPTVAYSVLVVAKVEKGKSKKLKSVKELLGITIMERSSFEKNPIDFLEAKGYKEVKKDLIIKLPKYSLFELENGRKRMLASAGELQKGNELALPSKYVNFLYLASHYEKLKGSPEDNEQKQLFVEQHKHYLDEIIEQISEFSKRVILADANLDKVLSAYNKHRDKPIREQAENIIHLFTLTNLGAPAAFKYFDTTIDRKRYTSTKEVLDATLIHQSITGLYETRIDLSQLGGDGGAEAAAKEAAAKEAAAKEAAAKALEAEAAAKEAAAKEAAAKEAAAKAGGVPWILKKPLELTIKLDLEEQQGTLLNNSILSKKGKEELKQLFEKYSALWQSWENQVGHRRIRPHKIATGTVKPTPQKQYHINPKAKPDIQIVINDLLKQGVLIQKESTMNTPVYPVPKPNGRWRMVLDYRAVNKVTPLIAVQNQHSYGILGSLFKGRYKTTIDLSNGFWAHPIVPEDYWITAFTWQGKQYCWTVLPQGFLNSPGLFNGDVVDLLQGIPNVEVYVDDVYISHDSEKEHLEYLDILFNRLKEAGYIISLKKSNIANSIVDFLGFQITNEGRGLTDTFKEKLENITAPTTLKQLQSILGLLNFARNFIPDFTELIAPLYALIPKSPKNYVPWQIEHSTTLETLITKLNGAEYLQGRKGDKTLIMKVNASYTTGYIRYYNEGEKKPISYVSIVFSKTELKFTELEKLLTTVHKGLLKALDLSMGQNIHVYSPIVSMQNIQKTPQTAKKALASRWLSWLSYLEDPRIRFFYDPQMPALKDLPAVDTGKDNKKHPSNFQHIFYTDGSAITSPTKEGHLNAGMGIVYFINKDGNLQKQQEWSISLGNHTAQFAEIAAFEFALKKCLPLGGNILVVTDSNYVAKAYNEELDVWASNGFVNNRKKPLKHISKWKSVADLKRLRPDVVVTHEPGHQKLDSSPHAYGNNLADQLATQASFKVHAGKRTADGSEFEKRTADGSEFESPKKKAKVE

SEQ ID NO: 1094 - protein, 2106 aa, synthetic construct
MPAAKRVKLDGGDKKYSIGLDIGTNSVGWAVITDEYKVPSKKFKVLGNTDRHSIKKNLIGALLFDSGETAEATRLKRTARRRYTRRKNRICYLQEIFSNEMAKVDDSFFHRLEESFLVEEDKKHERHPIFGNIVDEVAYHEKYPTIYHLRKKLVDSTDKADLRLIYLALAHMIKFRGHFLIEGDLNPDNSDVDKLFIQLVQTYNQLFEENPINASGVDAKAILSARLSKSRRLENLIAQLPGEKKNGLFGNLIALSLGLTPNFKSNFDLAEDAKLQLSKDTYDDDLDNLLAQIGDQYADLFLAAKNLSDAILLSDILRVNTEITKAPLSASMIKRYDEHHQDLTLLKALVRQQLPEKYKEIFFDQSKNGYAGYIDGGASQEEFYKFIKPILEKMDGTEELLVKLNREDLLRKQRTFDNGSIPHQIHLGELHAILRRQEDFYPFLKDNREKIEKILTFRIPYYVGPLARGNSRFAWMTRKSEETITPWNFEEVVDKGASAQSFIERMTNFDKNLPNEKVLPKHSLLYEYFTVYNELTKVKYVTEGMRKPAFLSGEQKKAIVDLLFKTNRKVTVKQLKEDYFKKIECFDSVEISGVEDRFNASLGTYHDLLKIIKDKDFLDNEENEDILEDIVLTLTLFEDREMIEERLKTYAHLFDDKVMKQLKRRRYTGWGRLSRKLINGIRDKQSGKTILDFLKSDGFANRNFMQLIHDDSLTFKEDIQKAQVSGQGDSLHEHIANLAGSPAIKKGILQTVKVVDELVKVMGRHKPENIVIEMARENQTTQKGQKNSRERMKRIEEGIKELGSQILKEHPVENTQLQNEKLYLYYLQNGRDMYVDQELDINRLSDYDVDHIVPQSFLKDDSIDNKVLTRSDKARGKSDNVPSEEVVKKMKNYWRQLLNAKLITQRKFDNLTKAERGGLSELDKAGFIKRQLVETRQITKHVAQILDSRMNTKYDENDKLIREVKVITLKSKLVSDFRKDFQFYKVREINNYHHAHDAYLNAVVGTALIKKYPKLESEFVYGDYKVYDVRKMIAKSEQEIGKATAKYFFYSNIMNFFKTEITLANGEIRKRPLIETNGETGEIVWDKGRDFATVRKVLSMPQVNIVKKTEVQTGGFSKESILPKRNSDKLIARKKDWDPKKYGGFDSPTVAYSVLVVAKVEKGKSKKLKSVKELLGITIMERSSFEKNPIDFLEAKGYKEVKKDLIIKLPKYSLFELENGRKRMLASAGELQKGNELALPSKYVNFLYLASHYEKLKGSPEDNEQKQLFVEQHKHYLDEIIEQISEFSKRVILADANLDKVLSAYNKHRDKPIREQAENIIHLFTLTNLGAPAAFKYFDTTIDRKRYTSTKEVLDATLIHQSITGLYETRIDLSQLGGDGGEAAAKEAAAKEAAAKEAAAKEAAAKEAAAKGGVPWILKKPLELTIKLDLEEQQGTLLNNSILSKKGKEELKQLFEKYSALWQSWENQVGHRRIRPHKIATGTVKPTPQKQYHINPKAKPDIQIVINDLLKQGVLIQKESTMNTPVYPVPKPNGRWRMVLDYRAVNKVTPLIAVQNQHSYGILGSLFKGRYKTTIDLSNGFWAHPIVPEDYWITAFTWQGKQYCWTVLPQGFLNSPGLFNGDVVDLLQGIPNVEVYVDDVYISHDSEKEHLEYLDILFNRLKEAGYIISLKKSNIANSIVDFLGFQITNEGRGLTDTFKEKLENITAPTTLKQLQSILGLLNFARNFIPDFTELIAPLYALIPKSPKNYVPWQIEHSTTLETLITKLNGAEYLQGRKGDKTLIMKVNASYTTGYIRYYNEGEKKPISYVSIVFSKTELKFTELEKLLTTVHKGLLKALDLSMGQNIHVYSPIVSMQNIQKTPQTAKKALASRWLSWLSYLEDPRIRFFYDPQMPALKDLPAVDTGKDNKKHPSNFQHIFYTDGSAITSPTKEGHLNAGMGIVYFINKDGNLQKQQEWSISLGNHTAQFAEIAAFEFALKKCLPLGGNILVVTDSNYVAKAYNEELDVWASNGFVNNRKKPLKHISKWKSVADLKRLRPDVVVTHEPGHQKLDSSPHAYGNNLADQLATQASFKVHAGKRTADGSEFEKRTADGSEFESPKKKAKVE

SEQ ID NO: 1095 - protein, 2094 aa, synthetic construct
MPAAKRVKLDGGDKKYSIGLDIGTNSVGWAVITDEYKVPSKKFKVLGNTDRHSIKKNLIGALLFDSGETAEATRLKRTARRRYTRRKNRICYLQEIFSNEMAKVDDSFFHRLEESFLVEEDKKHERHPIFGNIVDEVAYHEKYPTIYHLRKKLVDSTDKADLRLIYLALAHMIKFRGHFLIEGDLNPDNSDVDKLFIQLVQTYNQLFEENPINASGVDAKAILSARLSKSRRLENLIAQLPGEKKNGLFGNLIALSLGLTPNFKSNFDLAEDAKLQLSKDTYDDDLDNLLAQIGDQYADLFLAAKNLSDAILLSDILRVNTEITKAPLSASMIKRYDEHHQDLTLLKALVRQQLPEKYKEIFFDQSKNGYAGYIDGGASQEEFYKFIKPILEKMDGTEELLVKLNREDLLRKQRTFDNGSIPHQIHLGELHAILRRQEDFYPFLKDNREKIEKILTFRIPYYVGPLARGNSRFAWMTRKSEETITPWNFEEVVDKGASAQSFIERMTNFDKNLPNEKVLPKHSLLYEYFTVYNELTKVKYVTEGMRKPAFLSGEQKKAIVDLLFKTNRKVTVKQLKEDYFKKIECFDSVEISGVEDRFNASLGTYHDLLKIIKDKDFLDNEENEDILEDIVLTLTLFEDREMIEERLKTYAHLFDDKVMKQLKRRRYTGWGRLSRKLINGIRDKQSGKTILDFLKSDGFANRNFMQLIHDDSLTFKEDIQKAQVSGQGDSLHEHIANLAGSPAIKKGILQTVKVVDELVKVMGRHKPENIVIEMARENQTTQKGQKNSRERMKRIEEGIKELGSQILKEHPVENTQLQNEKLYLYYLQNGRDMYVDQELDINRLSDYDVDHIVPQSFLKDDSIDNKVLTRSDKARGKSDNVPSEEVVKKMKNYWRQLLNAKLITQRKFDNLTKAERGGLSELDKAGFIKRQLVETRQITKHVAQILDSRMNTKYDENDKLIREVKVITLKSKLVSDFRKDFQFYKVREINNYHHAHDAYLNAVVGTALIKKYPKLESEFVYGDYKVYDVRKMIAKSEQEIGKATAKYFFYSNIMNFFKTEITLANGEIRKRPLIETNGETGEIVWDKGRDFATVRKVLSMPQVNIVKKTEVQTGGFSKESILPKRNSDKLIARKKDWDPKKYGGFDSPTVAYSVLVVAKVEKGKSKKLKSVKELLGITIMERSSFEKNPIDFLEAKGYKEVKKDLIIKLPKYSLFELENGRKRMLASAGELQKGNELALPSKYVNFLYLASHYEKLKGSPEDNEQKQLFVEQHKHYLDEIIEQISEFSKRVILADANLDKVLSAYNKHRDKPIREQAENIIHLFTLTNLGAPAAFKYFDTTIDRKRYTSTKEVLDATLIHQSITGLYETRIDLSQLGGDGGGSSGSSGSSGSSGSSGSSGGVPWILKKPLELTIKLDLEEQQGTLLNNSILSKKGKEELKQLFEKYSALWQSWENQVGHRRIRPHKIATGTVKPTPQKQYHINPKAKPDIQIVINDLLKQGVLIQKESTMNTPVYPVPKPNGRWRMVLDYRAVNKVTPLIAVQNQHSYGILGSLFKGRYKTTIDLSNGFWAHPIVPEDYWITAFTWQGKQYCWTVLPQGFLNSPGLFNGDVVDLLQGIPNVEVYVDDVYISHDSEKEHLEYLDILFNRLKEAGYIISLKKSNIANSIVDFLGFQITNEGRGLTDTFKEKLENITAPTTLKQLQSILGLLNFARNFIPDFTELIAPLYALIPKSPKNYVPWQIEHSTTLETLITKLNGAEYLQGRKGDKTLIMKVNASYTTGYIRYYNEGEKKPISYVSIVFSKTELKFTELEKLLTTVHKGLLKALDLSMGQNIHVYSPIVSMQNIQKTPQTAKKALASRWLSWLSYLEDPRIRFFYDPQMPALKDLPAVDTGKDNKKHPSNFQHIFYTDGSAITSPTKEGHLNAGMGIVYFINKDGNLQKQQEWSISLGNHTAQFAEIAAFEFALKKCLPLGGNILVVTDSNYVAKAYNEELDVWASNGFVNNRKKPLKHISKWKSVADLKRLRPDVVVTHEPGHQKLDSSPHAYGNNLADQLATQASFKVHAGKRTADGSEFEKRTADGSEFESPKKKAKVE

SEQ ID NO: 1096 - protein, 2087 aa, synthetic construct
MPAAKRVKLDGGDKKYSIGLDIGTNSVGWAVITDEYKVPSKKFKVLGNTDRHSIKKNLIGALLFDSGETAEATRLKRTARRRYTRRKNRICYLQEIFSNEMAKVDDSFFHRLEESFLVEEDKKHERHPIFGNIVDEVAYHEKYPTIYHLRKKLVDSTDKADLRLIYLALAHMIKFRGHFLIEGDLNPDNSDVDKLFIQLVQTYNQLFEENPINASGVDAKAILSARLSKSRRLENLIAQLPGEKKNGLFGNLIALSLGLTPNFKSNFDLAEDAKLQLSKDTYDDDLDNLLAQIGDQYADLFLAAKNLSDAILLSDILRVNTEITKAPLSASMIKRYDEHHQDLTLLKALVRQQLPEKYKEIFFDQSKNGYAGYIDGGASQEEFYKFIKPILEKMDGTEELLVKLNREDLLRKQRTFDNGSIPHQIHLGELHAILRRQEDFYPFLKDNREKIEKILTFRIPYYVGPLARGNSRFAWMTRKSEETITPWNFEEVVDKGASAQSFIERMTNFDKNLPNEKVLPKHSLLYEYFTVYNELTKVKYVTEGMRKPAFLSGEQKKAIVDLLFKTNRKVTVKQLKEDYFKKIECFDSVEISGVEDRFNASLGTYHDLLKIIKDKDFLDNEENEDILEDIVLTLTLFEDREMIEERLKTYAHLFDDKVMKQLKRRRYTGWGRLSRKLINGIRDKQSGKTILDFLKSDGFANRNFMQLIHDDSLTFKEDIQKAQVSGQGDSLHEHIANLAGSPAIKKGILQTVKVVDELVKVMGRHKPENIVIEMARENQTTQKGQKNSRERMKRIEEGIKELGSQILKEHPVENTQLQNEKLYLYYLQNGRDMYVDQELDINRLSDYDVDHIVPQSFLKDDSIDNKVLTRSDKARGKSDNVPSEEVVKKMKNYWRQLLNAKLITQRKFDNLTKAERGGLSELDKAGFIKRQLVETRQITKHVAQILDSRMNTKYDENDKLIREVKVITLKSKLVSDFRKDFQFYKVREINNYHHAHDAYLNAVVGTALIKKYPKLESEFVYGDYKVYDVRKMIAKSEQEIGKATAKYFFYSNIMNFFKTEITLANGEIRKRPLIETNGETGEIVWDKGRDFATVRKVLSMPQVNIVKKTEVQTGGFSKESILPKRNSDKLIARKKDWDPKKYGGFDSPTVAYSVLVVAKVEKGKSKKLKSVKELLGITIMERSSFEKNPIDFLEAKGYKEVKKDLIIKLPKYSLFELENGRKRMLASAGELQKGNELALPSKYVNFLYLASHYEKLKGSPEDNEQKQLFVEQHKHYLDEIIEQISEFSKRVILADANLDKVLSAYNKHRDKPIREQAENIIHLFTLTNLGAPAAFKYFDTTIDRKRYTSTKEVLDATLIHQSITGLYETRIDLSQLGGDGGPAPGGGEAAAKGGVPWILKKPLELTIKLDLEEQQGTLLNNSILSKKGKEELKQLFEKYSALWQSWENQVGHRRIRPHKIATGTVKPTPQKQYHINPKAKPDIQIVINDLLKQGVLIQKESTMNTPVYPVPKPNGRWRMVLDYRAVNKVTPLIAVQNQHSYGILGSLFKGRYKTTIDLSNGFWAHPIVPEDYWITAFTWQGKQYCWTVLPQGFLNSPGLFNGDVVDLLQGIPNVEVYVDDVYISHDSEKEHLEYLDILFNRLKEAGYIISLKKSNIANSIVDFLGFQITNEGRGLTDTFKEKLENITAPTTLKQLQSILGLLNFARNFIPDFTELIAPLYALIPKSPKNYVPWQIEHSTTLETLITKLNGAEYLQGRKGDKTLIMKVNASYTTGYIRYYNEGEKKPISYVSIVFSKTELKFTELEKLLTTVHKGLLKALDLSMGQNIHVYSPIVSMQNIQKTPQTAKKALASRWLSWLSYLEDPRIRFFYDPQMPALKDLPAVDTGKDNKKHPSNFQHIFYTDGSAITSPTKEGHLNAGMGIVYFINKDGNLQKQQEWSISLGNHTAQFAEIAAFEFALKKCLPLGGNILVVTDSNYVAKAYNEELDVWASNGFVNNRKKPLKHISKWKSVADLKRLRPDVVVTHEPGHQKLDSSPHAYGNNLADQLATQASFKVHAGKRTADGSEFEKRTADGSEFESPKKKAKVE

SEQ ID NO: 1097 - protein, 2087 aa, synthetic construct
MPAAKRVKLDGGDKKYSIGLDIGTNSVGWAVITDEYKVPSKKFKVLGNTDRHSIKKNLIGALLFDSGETAEATRLKRTARRRYTRRKNRICYLQEIFSNEMAKVDDSFFHRLEESFLVEEDKKHERHPIFGNIVDEVAYHEKYPTIYHLRKKLVDSTDKADLRLIYLALAHMIKFRGHFLIEGDLNPDNSDVDKLFIQLVQTYNQLFEENPINASGVDAKAILSARLSKSRRLENLIAQLPGEKKNGLFGNLIALSLGLTPNFKSNFDLAEDAKLQLSKDTYDDDLDNLLAQIGDQYADLFLAAKNLSDAILLSDILRVNTEITKAPLSASMIKRYDEHHQDLTLLKALVRQQLPEKYKEIFFDQSKNGYAGYIDGGASQEEFYKFIKPILEKMDGTEELLVKLNREDLLRKQRTFDNGSIPHQIHLGELHAILRRQEDFYPFLKDNREKIEKILTFRIPYYVGPLARGNSRFAWMTRKSEETITPWNFEEVVDKGASAQSFIERMTNFDKNLPNEKVLPKHSLLYEYFTVYNELTKVKYVTEGMRKPAFLSGEQKKAIVDLLFKTNRKVTVKQLKEDYFKKIECFDSVEISGVEDRFNASLGTYHDLLKIIKDKDFLDNEENEDILEDIVLTLTLFEDREMIEERLKTYAHLFDDKVMKQLKRRRYTGWGRLSRKLINGIRDKQSGKTILDFLKSDGFANRNFMQLIHDDSLTFKEDIQKAQVSGQGDSLHEHIANLAGSPAIKKGILQTVKVVDELVKVMGRHKPENIVIEMARENQTTQKGQKNSRERMKRIEEGIKELGSQILKEHPVENTQLQNEKLYLYYLQNGRDMYVDQELDINRLSDYDVDHIVPQSFLKDDSIDNKVLTRSDKARGKSDNVPSEEVVKKMKNYWRQLLNAKLITQRKFDNLTKAERGGLSELDKAGFIKRQLVETRQITKHVAQILDSRMNTKYDENDKLIREVKVITLKSKLVSDFRKDFQFYKVREINNYHHAHDAYLNAVVGTALIKKYPKLESEFVYGDYKVYDVRKMIAKSEQEIGKATAKYFFYSNIMNFFKTEITLANGEIRKRPLIETNGETGEIVWDKGRDFATVRKVLSMPQVNIVKKTEVQTGGFSKESILPKRNSDKLIARKKDWDPKKYGGFDSPTVAYSVLVVAKVEKGKSKKLKSVKELLGITIMERSSFEKNPIDFLEAKGYKEVKKDLIIKLPKYSLFELENGRKRMLASAGELQKGNELALPSKYVNFLYLASHYEKLKGSPEDNEQKQLFVEQHKHYLDEIIEQISEFSKRVILADANLDKVLSAYNKHRDKPIREQAENIIHLFTLTNLGAPAAFKYFDTTIDRKRYTSTKEVLDATLIHQSITGLYETRIDLSQLGGDGGGGSEAAAKPAPGGVPWILKKPLELTIKLDLEEQQGTLLNNSILSKKGKEELKQLFEKYSALWQSWENQVGHRRIRPHKIATGTVKPTPQKQYHINPKAKPDIQIVINDLLKQGVLIQKESTMNTPVYPVPKPNGRWRMVLDYRAVNKVTPLIAVQNQHSYGILGSLFKGRYKTTIDLSNGFWAHPIVPEDYWITAFTWQGKQYCWTVLPQGFLNSPGLFNGDVVDLLQGIPNVEVYVDDVYISHDSEKEHLEYLDILFNRLKEAGYIISLKKSNIANSIVDFLGFQITNEGRGLTDTFKEKLENITAPTTLKQLQSILGLLNFARNFIPDFTELIAPLYALIPKSPKNYVPWQIEHSTTLETLITKLNGAEYLQGRKGDKTLIMKVNASYTTGYIRYYNEGEKKPISYVSIVFSKTELKFTELEKLLTTVHKGLLKALDLSMGQNIHVYSPIVSMQNIQKTPQTAKKALASRWLSWLSYLEDPRIRFFYDPQMPALKDLPAVDTGKDNKKHPSNFQHIFYTDGSAITSPTKEGHLNAGMGIVYFINKDGNLQKQQEWSISLGNHTAQFAEIAAFEFALKKCLPLGGNILVVTDSNYVAKAYNEELDVWASNGFVNNRKKPLKHISKWKSVADLKRLRPDVVVTHEPGHQKLDSSPHAYGNNLADQLATQASFKVHAGKRTADGSEFEKRTADGSEFESPKKKAKVE

SEQ ID NO: 1098 - protein, 2085 aa, synthetic construct
MPAAKRVKLDGGDKKYSIGLDIGTNSVGWAVITDEYKVPSKKFKVLGNTDRHSIKKNLIGALLFDSGETAEATRLKRTARRRYTRRKNRICYLQEIFSNEMAKVDDSFFHRLEESFLVEEDKKHERHPIFGNIVDEVAYHEKYPTIYHLRKKLVDSTDKADLRLIYLALAHMIKFRGHFLIEGDLNPDNSDVDKLFIQLVQTYNQLFEENPINASGVDAKAILSARLSKSRRLENLIAQLPGEKKNGLFGNLIALSLGLTPNFKSNFDLAEDAKLQLSKDTYDDDLDNLLAQIGDQYADLFLAAKNLSDAILLSDILRVNTEITKAPLSASMIKRYDEHHQDLTLLKALVRQQLPEKYKEIFFDQSKNGYAGYIDGGASQEEFYKFIKPILEKMDGTEELLVKLNREDLLRKQRTFDNGSIPHQIHLGELHAILRRQEDFYPFLKDNREKIEKILTFRIPYYVGPLARGNSRFAWMTRKSEETITPWNFEEVVDKGASAQSFIERMTNFDKNLPNEKVLPKHSLLYEYFTVYNELTKVKYVTEGMRKPAFLSGEQKKAIVDLLFKTNRKVTVKQLKEDYFKKIECFDSVEISGVEDRFNASLGTYHDLLKIIKDKDFLDNEENEDILEDIVLTLTLFEDREMIEERLKTYAHLFDDKVMKQLKRRRYTGWGRLSRKLINGIRDKQSGKTILDFLKSDGFANRNFMQLIHDDSLTFKEDIQKAQVSGQGDSLHEHIANLAGSPAIKKGILQTVKVVDELVKVMGRHKPENIVIEMARENQTTQKGQKNSRERMKRIEEGIKELGSQILKEHPVENTQLQNEKLYLYYLQNGRDMYVDQELDINRLSDYDVDHIVPQSFLKDDSIDNKVLTRSDKARGKSDNVPSEEVVKKMKNYWRQLLNAKLITQRKFDNLTKAERGGLSELDKAGFIKRQLVETRQITKHVAQILDSRMNTKYDENDKLIREVKVITLKSKLVSDFRKDFQFYKVREINNYHHAHDAYLNAVVGTALIKKYPKLESEFVYGDYKVYDVRKMIAKSEQEIGKATAKYFFYSNIMNFFKTEITLANGEIRKRPLIETNGETGEIVWDKGRDFATVRKVLSMPQVNIVKKTEVQTGGFSKESILPKRNSDKLIARKKDWDPKKYGGFDSPTVAYSVLVVAKVEKGKSKKLKSVKELLGITIMERSSFEKNPIDFLEAKGYKEVKKDLIIKLPKYSLFELENGRKRMLASAGELQKGNELALPSKYVNFLYLASHYEKLKGSPEDNEQKQLFVEQHKHYLDEIIEQISEFSKRVILADANLDKVLSAYNKHRDKPIREQAENIIHLFTLTNLGAPAAFKYFDTTIDRKRYTSTKEVLDATLIHQSITGLYETRIDLSQLGGDGGPAPGGSGGGGGVPWILKKPLELTIKLDLEEQQGTLLNNSILSKKGKEELKQLFEKYSALWQSWENQVGHRRIRPHKIATGTVKPTPQKQYHINPKAKPDIQIVINDLLKQGVLIQKESTMNTPVYPVPKPNGRWRMVLDYRAVNKVTPLIAVQNQHSYGILGSLFKGRYKTTIDLSNGFWAHPIVPEDYWITAFTWQGKQYCWTVLPQGFLNSPGLFNGDVVDLLQGIPNVEVYVDDVYISHDSEKEHLEYLDILFNRLKEAGYIISLKKSNIANSIVDFLGFQITNEGRGLTDTFKEKLENITAPTTLKQLQSILGLLNFARNFIPDFTELIAPLYALIPKSPKNYVPWQIEHSTTLETLITKLNGAEYLQGRKGDKTLIMKVNASYTTGYIRYYNEGEKKPISYVSIVFSKTELKFTELEKLLTTVHKGLLKALDLSMGQNIHVYSPIVSMQNIQKTPQTAKKALASRWLSWLSYLEDPRIRFFYDPQMPALKDLPAVDTGKDNKKHPSNFQHIFYTDGSAITSPTKEGHLNAGMGIVYFINKDGNLQKQQEWSISLGNHTAQFAEIAAFEFALKKCLPLGGNILVVTDSNYVAKAYNEELDVWASNGFVNNRKKPLKHISKWKSVADLKRLRPDVVVTHEPGHQKLDSSPHAYGNNLADQLATQASFKVHAGKRTADGSEFEKRTADGSEFESPKKKAKVE

SEQ ID NO: 1099 - protein, 2087 aa, synthetic construct
MPAAKRVKLDGGDKKYSIGLDIGTNSVGWAVITDEYKVPSKKFKVLGNTDRHSIKKNLIGALLFDSGETAEATRLKRTARRRYTRRKNRICYLQEIFSNEMAKVDDSFFHRLEESFLVEEDKKHERHPIFGNIVDEVAYHEKYPTIYHLRKKLVDSTDKADLRLIYLALAHMIKFRGHFLIEGDLNPDNSDVDKLFIQLVQTYNQLFEENPINASGVDAKAILSARLSKSRRLENLIAQLPGEKKNGLFGNLIALSLGLTPNFKSNFDLAEDAKLQLSKDTYDDDLDNLLAQIGDQYADLFLAAKNLSDAILLSDILRVNTEITKAPLSASMIKRYDEHHQDLTLLKALVRQQLPEKYKEIFFDQSKNGYAGYIDGGASQEEFYKFIKPILEKMDGTEELLVKLNREDLLRKQRTFDNGSIPHQIHLGELHAILRRQEDFYPFLKDNREKIEKILTFRIPYYVGPLARGNSRFAWMTRKSEETITPWNFEEVVDKGASAQSFIERMTNFDKNLPNEKVLPKHSLLYEYFTVYNELTKVKYVTEGMRKPAFLSGEQKKAIVDLLFKTNRKVTVKQLKEDYFKKIECFDSVEISGVEDRFNASLGTYHDLLKIIKDKDFLDNEENEDILEDIVLTLTLFEDREMIEERLKTYAHLFDDKVMKQLKRRRYTGWGRLSRKLINGIRDKQSGKTILDFLKSDGFANRNFMQLIHDDSLTFKEDIQKAQVSGQGDSLHEHIANLAGSPAIKKGILQTVKVVDELVKVMGRHKPENIVIEMARENQTTQKGQKNSRERMKRIEEGIKELGSQILKEHPVENTQLQNEKLYLYYLQNGRDMYVDQELDINRLSDYDVDHIVPQSFLKDDSIDNKVLTRSDKARGKSDNVPSEEVVKKMKNYWRQLLNAKLITQRKFDNLTKAERGGLSELDKAGFIKRQLVETRQITKHVAQILDSRMNTKYDENDKLIREVKVITLKSKLVSDFRKDFQFYKVREINNYHHAHDAYLNAVVGTALIKKYPKLESEFVYGDYKVYDVRKMIAKSEQEIGKATAKYFFYSNIMNFFKTEITLANGEIRKRPLIETNGETGEIVWDKGRDFATVRKVLSMPQVNIVKKTEVQTGGFSKESILPKRNSDKLIARKKDWDPKKYGGFDSPTVAYSVLVVAKVEKGKSKKLKSVKELLGITIMERSSFEKNPIDFLEAKGYKEVKKDLIIKLPKYSLFELENGRKRMLASAGELQKGNELALPSKYVNFLYLASHYEKLKGSPEDNEQKQLFVEQHKHYLDEIIEQISEFSKRVILADANLDKVLSAYNKHRDKPIREQAENIIHLFTLTNLGAPAAFKYFDTTIDRKRYTSTKEVLDATLIHQSITGLYETRIDLSQLGGDGGGGSPAPEAAAKGGVPWILKKPLELTIKLDLEEQQGTLLNNSILSKKGKEELKQLFEKYSALWQSWENQVGHRRIRPHKIATGTVKPTPQKQYHINPKAKPDIQIVINDLLKQGVLIQKESTMNTPVYPVPKPNGRWRMVLDYRAVNKVTPLIAVQNQHSYGILGSLFKGRYKTTIDLSNGFWAHPIVPEDYWITAFTWQGKQYCWTVLPQGFLNSPGLFNGDVVDLLQGIPNVEVYVDDVYISHDSEKEHLEYLDILFNRLKEAGYIISLKKSNIANSIVDFLGFQITNEGRGLTDTFKEKLENITAPTTLKQLQSILGLLNFARNFIPDFTELIAPLYALIPKSPKNYVPWQIEHSTTLETLITKLNGAEYLQGRKGDKTLIMKVNASYTTGYIRYYNEGEKKPISYVSIVFSKTELKFTELEKLLTTVHKGLLKALDLSMGQNIHVYSPIVSMQNIQKTPQTAKKALASRWLSWLSYLEDPRIRFFYDPQMPALKDLPAVDTGKDNKKHPSNFQHIFYTDGSAITSPTKEGHLNAGMGIVYFINKDGNLQKQQEWSISLGNHTAQFAEIAAFEFALKKCLPLGGNILVVTDSNYVAKAYNEELDVWASNGFVNNRKKPLKHISKWKSVADLKRLRPDVVVTHEPGHQKLDSSPHAYGNNLADQLATQASFKVHAGKRTADGSEFEKRTADGSEFESPKKKAKVE

SEQ ID NO: 1100 - protein, 2087 aa, synthetic construct
MPAAKRVKLDGGDKKYSIGLDIGTNSVGWAVITDEYKVPSKKFKVLGNTDRHSIKKNLIGALLFDSGETAEATRLKRTARRRYTRRKNRICYLQEIFSNEMAKVDDSFFHRLEESFLVEEDKKHERHPIFGNIVDEVAYHEKYPTIYHLRKKLVDSTDKADLRLIYLALAHMIKFRGHFLIEGDLNPDNSDVDKLFIQLVQTYNQLFEENPINASGVDAKAILSARLSKSRRLENLIAQLPGEKKNGLFGNLIALSLGLTPNFKSNFDLAEDAKLQLSKDTYDDDLDNLLAQIGDQYADLFLAAKNLSDAILLSDILRVNTEITKAPLSASMIKRYDEHHQDLTLLKALVRQQLPEKYKEIFFDQSKNGYAGYIDGGASQEEFYKFIKPILEKMDGTEELLVKLNREDLLRKQRTFDNGSIPHQIHLGELHAILRRQEDFYPFLKDNREKIEKILTFRIPYYVGPLARGNSRFAWMTRKSEETITPWNFEEVVDKGASAQSFIERMTNFDKNLPNEKVLPKHSLLYEYFTVYNELTKVKYVTEGMRKPAFLSGEQKKAIVDLLFKTNRKVTVKQLKEDYFKKIECFDSVEISGVEDRFNASLGTYHDLLKIIKDKDFLDNEENEDILEDIVLTLTLFEDREMIEERLKTYAHLFDDKVMKQLKRRRYTGWGRLSRKLINGIRDKQSGKTILDFLKSDGFANRNFMQLIHDDSLTFKEDIQKAQVSGQGDSLHEHIANLAGSPAIKKGILQTVKVVDELVKVMGRHKPENIVIEMARENQTTQKGQKNSRERMKRIEEGIKELGSQILKEHPVENTQLQNEKLYLYYLQNGRDMYVDQELDINRLSDYDVDHIVPQSFLKDDSIDNKVLTRSDKARGKSDNVPSEEVVKKMKNYWRQLLNAKLITQRKFDNLTKAERGGLSELDKAGFIKRQLVETRQITKHVAQILDSRMNTKYDENDKLIREVKVITLKSKLVSDFRKDFQFYKVREINNYHHAHDAYLNAVVGTALIKKYPKLESEFVYGDYKVYDVRKMIAKSEQEIGKATAKYFFYSNIMNFFKTEITLANGEIRKRPLIETNGETGEIVWDKGRDFATVRKVLSMPQVNIVKKTEVQTGGFSKESILPKRNSDKLIARKKDWDPKKYGGFDSPTVAYSVLVVAKVEKGKSKKLKSVKELLGITIMERSSFEKNPIDFLEAKGYKEVKKDLIIKLPKYSLFELENGRKRMLASAGELQKGNELALPSKYVNFLYLASHYEKLKGSPEDNEQKQLFVEQHKHYLDEIIEQISEFSKRVILADANLDKVLSAYNKHRDKPIREQAENIIHLFTLTNLGAPAAFKYFDTTIDRKRYTSTKEVLDATLIHQSITGLYETRIDLSQLGGDGGGSSEAAAKGGGGGVPWILKKPLELTIKLDLEEQQGTLLNNSILSKKGKEELKQLFEKYSALWQSWENQVGHRRIRPHKIATGTVKPTPQKQYHINPKAKPDIQIVINDLLKQGVLIQKESTMNTPVYPVPKPNGRWRMVLDYRAVNKVTPLIAVQNQHSYGILGSLFKGRYKTTIDLSNGFWAHPIVPEDYWITAFTWQGKQYCWTVLPQGFLNSPGLFNGDVVDLLQGIPNVEVYVDDVYISHDSEKEHLEYLDILFNRLKEAGYIISLKKSNIANSIVDFLGFQITNEGRGLTDTFKEKLENITAPTTLKQLQSILGLLNFARNFIPDFTELIAPLYALIPKSPKNYVPWQIEHSTTLETLITKLNGAEYLQGRKGDKTLIMKVNASYTTGYIRYYNEGEKKPISYVSIVFSKTELKFTELEKLLTTVHKGLLKALDLSMGQNIHVYSPIVSMQNIQKTPQTAKKALASRWLSWLSYLEDPRIRFFYDPQMPALKDLPAVDTGKDNKKHPSNFQHIFYTDGSAITSPTKEGHLNAGMGIVYFINKDGNLQKQQEWSISLGNHTAQFAEIAAFEFALKKCLPLGGNILVVTDSNYVAKAYNEELDVWASNGFVNNRKKPLKHISKWKSVADLKRLRPDVVVTHEPGHQKLDSSPHAYGNNLADQLATQASFKVHAGKRTADGSEFEKRTADGSEFESPKKKAKVE

SEQ ID NO: 1101 - protein, 2091 aa, synthetic construct
MPAAKRVKLDGGDKKYSIGLDIGTNSVGWAVITDEYKVPSKKFKVLGNTDRHSIKKNLIGALLFDSGETAEATRLKRTARRRYTRRKNRICYLQEIFSNEMAKVDDSFFHRLEESFLVEEDKKHERHPIFGNIVDEVAYHEKYPTIYHLRKKLVDSTDKADLRLIYLALAHMIKFRGHFLIEGDLNPDNSDVDKLFIQLVQTYNQLFEENPINASGVDAKAILSARLSKSRRLENLIAQLPGEKKNGLFGNLIALSLGLTPNFKSNFDLAEDAKLQLSKDTYDDDLDNLLAQIGDQYADLFLAAKNLSDAILLSDILRVNTEITKAPLSASMIKRYDEHHQDLTLLKALVRQQLPEKYKEIFFDQSKNGYAGYIDGGASQEEFYKFIKPILEKMDGTEELLVKLNREDLLRKQRTFDNGSIPHQIHLGELHAILRRQEDFYPFLKDNREKIEKILTFRIPYYVGPLARGNSRFAWMTRKSEETITPWNFEEVVDKGASAQSFIERMTNFDKNLPNEKVLPKHSLLYEYFTVYNELTKVKYVTEGMRKPAFLSGEQKKAIVDLLFKTNRKVTVKQLKEDYFKKIECFDSVEISGVEDRFNASLGTYHDLLKIIKDKDFLDNEENEDILEDIVLTLTLFEDREMIEERLKTYAHLFDDKVMKQLKRRRYTGWGRLSRKLINGIRDKQSGKTILDFLKSDGFANRNFMQLIHDDSLTFKEDIQKAQVSGQGDSLHEHIANLAGSPAIKKGILQTVKVVDELVKVMGRHKPENIVIEMARENQTTQKGQKNSRERMKRIEEGIKELGSQILKEHPVENTQLQNEKLYLYYLQNGRDMYVDQELDINRLSDYDVDHIVPQSFLKDDSIDNKVLTRSDKARGKSDNVPSEEVVKKMKNYWRQLLNAKLITQRKFDNLTKAERGGLSELDKAGFIKRQLVETRQITKHVAQILDSRMNTKYDENDKLIREVKVITLKSKLVSDFRKDFQFYKVREINNYHHAHDAYLNAVVGTALIKKYPKLESEFVYGDYKVYDVRKMIAKSEQEIGKATAKYFFYSNIMNFFKTEITLANGEIRKRPLIETNGETGEIVWDKGRDFATVRKVLSMPQVNIVKKTEVQTGGFSKESILPKRNSDKLIARKKDWDPKKYGGFDSPTVAYSVLVVAKVEKGKSKKLKSVKELLGITIMERSSFEKNPIDFLEAKGYKEVKKDLIIKLPKYSLFELENGRKRMLASAGELQKGNELALPSKYVNFLYLASHYEKLKGSPEDNEQKQLFVEQHKHYLDEIIEQISEFSKRVILADANLDKVLSAYNKHRDKPIREQAENIIHLFTLTNLGAPAAFKYFDTTIDRKRYTSTKEVLDATLIHQSITGLYETRIDLSQLGGDGGGSSGSSGSSGSSGSSGGVPWILKKPLELTIKLDLEEQQGTLLNNSILSKKGKEELKQLFEKYSALWQSWENQVGHRRIRPHKIATGTVKPTPQKQYHINPKAKPDIQIVINDLLKQGVLIQKESTMNTPVYPVPKPNGRWRMVLDYRAVNKVTPLIAVQNQHSYGILGSLFKGRYKTTIDLSNGFWAHPIVPEDYWITAFTWQGKQYCWTVLPQGFLNSPGLFNGDVVDLLQGIPNVEVYVDDVYISHDSEKEHLEYLDILFNRLKEAGYIISLKKSNIANSIVDFLGFQITNEGRGLTDTFKEKLENITAPTTLKQLQSILGLLNFARNFIPDFTELIAPLYALIPKSPKNYVPWQIEHSTTLETLITKLNGAEYLQGRKGDKTLIMKVNASYTTGYIRYYNEGEKKPISYVSIVFSKTELKFTELEKLLTTVHKGLLKALDLSMGQNIHVYSPIVSMQNIQKTPQTAKKALASRWLSWLSYLEDPRIRFFYDPQMPALKDLPAVDTGKDNKKHPSNFQHIFYTDGSAITSPTKEGHLNAGMGIVYFINKDGNLQKQQEWSISLGNHTAQFAEIAAFEFALKKCLPLGGNILVVTDSNYVAKAYNEELDVWASNGFVNNRKKPLKHISKWKSVADLKRLRPDVVVTHEPGHQKLDSSPHAYGNNLADQLATQASFKVHAGKRTADGSEFEKRTADGSEFESPKKKAKVE

SEQ ID NO: 1102 - protein, 2081 aa, synthetic construct
MPAAKRVKLDGGDKKYSIGLDIGTNSVGWAVITDEYKVPSKKFKVLGNTDRHSIKKNLIGALLFDSGETAEATRLKRTARRRYTRRKNRICYLQEIFSNEMAKVDDSFFHRLEESFLVEEDKKHERHPIFGNIVDEVAYHEKYPTIYHLRKKLVDSTDKADLRLIYLALAHMIKFRGHFLIEGDLNPDNSDVDKLFIQLVQTYNQLFEENPINASGVDAKAILSARLSKSRRLENLIAQLPGEKKNGLFGNLIALSLGLTPNFKSNFDLAEDAKLQLSKDTYDDDLDNLLAQIGDQYADLFLAAKNLSDAILLSDILRVNTEITKAPLSASMIKRYDEHHQDLTLLKALVRQQLPEKYKEIFFDQSKNGYAGYIDGGASQEEFYKFIKPILEKMDGTEELLVKLNREDLLRKQRTFDNGSIPHQIHLGELHAILRRQEDFYPFLKDNREKIEKILTFRIPYYVGPLARGNSRFAWMTRKSEETITPWNFEEVVDKGASAQSFIERMTNFDKNLPNEKVLPKHSLLYEYFTVYNELTKVKYVTEGMRKPAFLSGEQKKAIVDLLFKTNRKVTVKQLKEDYFKKIECFDSVEISGVEDRFNASLGTYHDLLKIIKDKDFLDNEENEDILEDIVLTLTLFEDREMIEERLKTYAHLFDDKVMKQLKRRRYTGWGRLSRKLINGIRDKQSGKTILDFLKSDGFANRNFMQLIHDDSLTFKEDIQKAQVSGQGDSLHEHIANLAGSPAIKKGILQTVKVVDELVKVMGRHKPENIVIEMARENQTTQKGQKNSRERMKRIEEGIKELGSQILKEHPVENTQLQNEKLYLYYLQNGRDMYVDQELDINRLSDYDVDHIVPQSFLKDDSIDNKVLTRSDKARGKSDNVPSEEVVKKMKNYWRQLLNAKLITQRKFDNLTKAERGGLSELDKAGFIKRQLVETRQITKHVAQILDSRMNTKYDENDKLIREVKVITLKSKLVSDFRKDFQFYKVREINNYHHAHDAYLNAVVGTALIKKYPKLESEFVYGDYKVYDVRKMIAKSEQEIGKATAKYFFYSNIMNFFKTEITLANGEIRKRPLIETNGETGEIVWDKGRDFATVRKVLSMPQVNIVKKTEVQTGGFSKESILPKRNSDKLIARKKDWDPKKYGGFDSPTVAYSVLVVAKVEKGKSKKLKSVKELLGITIMERSSFEKNPIDFLEAKGYKEVKKDLIIKLPKYSLFELENGRKRMLASAGELQKGNELALPSKYVNFLYLASHYEKLKGSPEDNEQKQLFVEQHKHYLDEIIEQISEFSKRVILADANLDKVLSAYNKHRDKPIREQAENIIHLFTLTNLGAPAAFKYFDTTIDRKRYTSTKEVLDATLIHQSITGLYETRIDLSQLGGDGGPAPAPGGVPWILKKPLELTIKLDLEEQQGTLLNNSILSKKGKEELKQLFEKYSALWQSWENQVGHRRIRPHKIATGTVKPTPQKQYHINPKAKPDIQIVINDLLKQGVLIQKESTMNTPVYPVPKPNGRWRMVLDYRAVNKVTPLIAVQNQHSYGILGSLFKGRYKTTIDLSNGFWAHPIVPEDYWITAFTWQGKQYCWTVLPQGFLNSPGLFNGDVVDLLQGIPNVEVYVDDVYISHDSEKEHLEYLDILFNRLKEAGYIISLKKSNIANSIVDFLGFQITNEGRGLTDTFKEKLENITAPTTLKQLQSILGLLNFARNFIPDFTELIAPLYALIPKSPKNYVPWQIEHSTTLETLITKLNGAEYLQGRKGDKTLIMKVNASYTTGYIRYYNEGEKKPISYVSIVFSKTELKFTELEKLLTTVHKGLLKALDLSMGQNIHVYSPIVSMQNIQKTPQTAKKALASRWLSWLSYLEDPRIRFFYDPQMPALKDLPAVDTGKDNKKHPSNFQHIFYTDGSAITSPTKEGHLNAGMGIVYFINKDGNLQKQQEWSISLGNHTAQFAEIAAFEFALKKCLPLGGNILVVTDSNYVAKAYNEELDVWASNGFVNNRKKPLKHISKWKSVADLKRLRPDVVVTHEPGHQKLDSSPHAYGNNLADQLATQASFKVHAGKRTADGSEFEKRTADGSEFESPKKKAKVE

SEQ ID NO: 1103 - protein, 2085 aa, synthetic construct
MPAAKRVKLDGGDKKYSIGLDIGTNSVGWAVITDEYKVPSKKFKVLGNTDRHSIKKNLIGALLFDSGETAEATRLKRTARRRYTRRKNRICYLQEIFSNEMAKVDDSFFHRLEESFLVEEDKKHERHPIFGNIVDEVAYHEKYPTIYHLRKKLVDSTDKADLRLIYLALAHMIKFRGHFLIEGDLNPDNSDVDKLFIQLVQTYNQLFEENPINASGVDAKAILSARLSKSRRLENLIAQLPGEKKNGLFGNLIALSLGLTPNFKSNFDLAEDAKLQLSKDTYDDDLDNLLAQIGDQYADLFLAAKNLSDAILLSDILRVNTEITKAPLSASMIKRYDEHHQDLTLLKALVRQQLPEKYKEIFFDQSKNGYAGYIDGGASQEEFYKFIKPILEKMDGTEELLVKLNREDLLRKQRTFDNGSIPHQIHLGELHAILRRQEDFYPFLKDNREKIEKILTFRIPYYVGPLARGNSRFAWMTRKSEETITPWNFEEVVDKGASAQSFIERMTNFDKNLPNEKVLPKHSLLYEYFTVYNELTKVKYVTEGMRKPAFLSGEQKKAIVDLLFKTNRKVTVKQLKEDYFKKIECFDSVEISGVEDRFNASLGTYHDLLKIIKDKDFLDNEENEDILEDIVLTLTLFEDREMIEERLKTYAHLFDDKVMKQLKRRRYTGWGRLSRKLINGIRDKQSGKTILDFLKSDGFANRNFMQLIHDDSLTFKEDIQKAQVSGQGDSLHEHIANLAGSPAIKKGILQTVKVVDELVKVMGRHKPENIVIEMARENQTTQKGQKNSRERMKRIEEGIKELGSQILKEHPVENTQLQNEKLYLYYLQNGRDMYVDQELDINRLSDYDVDHIVPQSFLKDDSIDNKVLTRSDKARGKSDNVPSEEVVKKMKNYWRQLLNAKLITQRKFDNLTKAERGGLSELDKAGFIKRQLVETRQITKHVAQILDSRMNTKYDENDKLIREVKVITLKSKLVSDFRKDFQFYKVREINNYHHAHDAYLNAVVGTALIKKYPKLESEFVYGDYKVYDVRKMIAKSEQEIGKATAKYFFYSNIMNFFKTEITLANGEIRKRPLIETNGETGEIVWDKGRDFATVRKVLSMPQVNIVKKTEVQTGGFSKESILPKRNSDKLIARKKDWDPKKYGGFDSPTVAYSVLVVAKVEKGKSKKLKSVKELLGITIMERSSFEKNPIDFLEAKGYKEVKKDLIIKLPKYSLFELENGRKRMLASAGELQKGNELALPSKYVNFLYLASHYEKLKGSPEDNEQKQLFVEQHKHYLDEIIEQISEFSKRVILADANLDKVLSAYNKHRDKPIREQAENIIHLFTLTNLGAPAAFKYFDTTIDRKRYTSTKEVLDATLIHQSITGLYETRIDLSQLGGDGGGSSGSSGSSGGVPWILKKPLELTIKLDLEEQQGTLLNNSILSKKGKEELKQLFEKYSALWQSWENQVGHRRIRPHKIATGTVKPTPQKQYHINPKAKPDIQIVINDLLKQGVLIQKESTMNTPVYPVPKPNGRWRMVLDYRAVNKVTPLIAVQNQHSYGILGSLFKGRYKTTIDLSNGFWAHPIVPEDYWITAFTWQGKQYCWTVLPQGFLNSPGLFNGDVVDLLQGIPNVEVYVDDVYISHDSEKEHLEYLDILFNRLKEAGYIISLKKSNIANSIVDFLGFQITNEGRGLTDTFKEKLENITAPTTLKQLQSILGLLNFARNFIPDFTELIAPLYALIPKSPKNYVPWQIEHSTTLETLITKLNGAEYLQGRKGDKTLIMKVNASYTTGYIRYYNEGEKKPISYVSIVFSKTELKFTELEKLLTTVHKGLLKALDLSMGQNIHVYSPIVSMQNIQKTPQTAKKALASRWLSWLSYLEDPRIRFFYDPQMPALKDLPAVDTGKDNKKHPSNFQHIFYTDGSAITSPTKEGHLNAGMGIVYFINKDGNLQKQQEWSISLGNHTAQFAEIAAFEFALKKCLPLGGNILVVTDSNYVAKAYNEELDVWASNGFVNNRKKPLKHISKWKSVADLKRLRPDVVVTHEPGHQKLDSSPHAYGNNLADQLATQASFKVHAGKRTADGSEFEKRTADGSEFESPKKKAKVE

SEQ ID NO: 1104 - protein, 2087 aa, synthetic construct
MPAAKRVKLDGGDKKYSIGLDIGTNSVGWAVITDEYKVPSKKFKVLGNTDRHSIKKNLIGALLFDSGETAEATRLKRTARRRYTRRKNRICYLQEIFSNEMAKVDDSFFHRLEESFLVEEDKKHERHPIFGNIVDEVAYHEKYPTIYHLRKKLVDSTDKADLRLIYLALAHMIKFRGHFLIEGDLNPDNSDVDKLFIQLVQTYNQLFEENPINASGVDAKAILSARLSKSRRLENLIAQLPGEKKNGLFGNLIALSLGLTPNFKSNFDLAEDAKLQLSKDTYDDDLDNLLAQIGDQYADLFLAAKNLSDAILLSDILRVNTEITKAPLSASMIKRYDEHHQDLTLLKALVRQQLPEKYKEIFFDQSKNGYAGYIDGGASQEEFYKFIKPILEKMDGTEELLVKLNREDLLRKQRTFDNGSIPHQIHLGELHAILRRQEDFYPFLKDNREKIEKILTFRIPYYVGPLARGNSRFAWMTRKSEETITPWNFEEVVDKGASAQSFIERMTNFDKNLPNEKVLPKHSLLYEYFTVYNELTKVKYVTEGMRKPAFLSGEQKKAIVDLLFKTNRKVTVKQLKEDYFKKIECFDSVEISGVEDRFNASLGTYHDLLKIIKDKDFLDNEENEDILEDIVLTLTLFEDREMIEERLKTYAHLFDDKVMKQLKRRRYTGWGRLSRKLINGIRDKQSGKTILDFLKSDGFANRNFMQLIHDDSLTFKEDIQKAQVSGQGDSLHEHIANLAGSPAIKKGILQTVKVVDELVKVMGRHKPENIVIEMARENQTTQKGQKNSRERMKRIEEGIKELGSQILKEHPVENTQLQNEKLYLYYLQNGRDMYVDQELDINRLSDYDVDHIVPQSFLKDDSIDNKVLTRSDKARGKSDNVPSEEVVKKMKNYWRQLLNAKLITQRKFDNLTKAERGGLSELDKAGFIKRQLVETRQITKHVAQILDSRMNTKYDENDKLIREVKVITLKSKLVSDFRKDFQFYKVREINNYHHAHDAYLNAVVGTALIKKYPKLESEFVYGDYKVYDVRKMIAKSEQEIGKATAKYFFYSNIMNFFKTEITLANGEIRKRPLIETNGETGEIVWDKGRDFATVRKVLSMPQVNIVKKTEVQTGGFSKESILPKRNSDKLIARKKDWDPKKYGGFDSPTVAYSVLVVAKVEKGKSKKLKSVKELLGITIMERSSFEKNPIDFLEAKGYKEVKKDLIIKLPKYSLFELENGRKRMLASAGELQKGNELALPSKYVNFLYLASHYEKLKGSPEDNEQKQLFVEQHKHYLDEIIEQISEFSKRVILADANLDKVLSAYNKHRDKPIREQAENIIHLFTLTNLGAPAAFKYFDTTIDRKRYTSTKEVLDATLIHQSITGLYETRIDLSQLGGDGGPAPGSSEAAAKGGVPWILKKPLELTIKLDLEEQQGTLLNNSILSKKGKEELKQLFEKYSALWQSWENQVGHRRIRPHKIATGTVKPTPQKQYHINPKAKPDIQIVINDLLKQGVLIQKESTMNTPVYPVPKPNGRWRMVLDYRAVNKVTPLIAVQNQHSYGILGSLFKGRYKTTIDLSNGFWAHPIVPEDYWITAFTWQGKQYCWTVLPQGFLNSPGLFNGDVVDLLQGIPNVEVYVDDVYISHDSEKEHLEYLDILFNRLKEAGYIISLKKSNIANSIVDFLGFQITNEGRGLTDTFKEKLENITAPTTLKQLQSILGLLNFARNFIPDFTELIAPLYALIPKSPKNYVPWQIEHSTTLETLITKLNGAEYLQGRKGDKTLIMKVNASYTTGYIRYYNEGEKKPISYVSIVFSKTELKFTELEKLLTTVHKGLLKALDLSMGQNIHVYSPIVSMQNIQKTPQTAKKALASRWLSWLSYLEDPRIRFFYDPQMPALKDLPAVDTGKDNKKHPSNFQHIFYTDGSAITSPTKEGHLNAGMGIVYFINKDGNLQKQQEWSISLGNHTAQFAEIAAFEFALKKCLPLGGNILVVTDSNYVAKAYNEELDVWASNGFVNNRKKPLKHISKWKSVADLKRLRPDVVVTHEPGHQKLDSSPHAYGNNLADQLATQASFKVHAGKRTADGSEFEKRTADGSEFESPKKKAKVE

SEQ ID NO: 1105 - protein, 2087 aa, synthetic construct
MPAAKRVKLDGGDKKYSIGLDIGTNSVGWAVITDEYKVPSKKFKVLGNTDRHSIKKNLIGALLFDSGETAEATRLKRTARRRYTRRKNRICYLQEIFSNEMAKVDDSFFHRLEESFLVEEDKKHERHPIFGNIVDEVAYHEKYPTIYHLRKKLVDSTDKADLRLIYLALAHMIKFRGHFLIEGDLNPDNSDVDKLFIQLVQTYNQLFEENPINASGVDAKAILSARLSKSRRLENLIAQLPGEKKNGLFGNLIALSLGLTPNFKSNFDLAEDAKLQLSKDTYDDDLDNLLAQIGDQYADLFLAAKNLSDAILLSDILRVNTEITKAPLSASMIKRYDEHHQDLTLLKALVRQQLPEKYKEIFFDQSKNGYAGYIDGGASQEEFYKFIKPILEKMDGTEELLVKLNREDLLRKQRTFDNGSIPHQIHLGELHAILRRQEDFYPFLKDNREKIEKILTFRIPYYVGPLARGNSRFAWMTRKSEETITPWNFEEVVDKGASAQSFIERMTNFDKNLPNEKVLPKHSLLYEYFTVYNELTKVKYVTEGMRKPAFLSGEQKKAIVDLLFKTNRKVTVKQLKEDYFKKIECFDSVEISGVEDRFNASLGTYHDLLKIIKDKDFLDNEENEDILEDIVLTLTLFEDREMIEERLKTYAHLFDDKVMKQLKRRRYTGWGRLSRKLINGIRDKQSGKTILDFLKSDGFANRNFMQLIHDDSLTFKEDIQKAQVSGQGDSLHEHIANLAGSPAIKKGILQTVKVVDELVKVMGRHKPENIVIEMARENQTTQKGQKNSRERMKRIEEGIKELGSQILKEHPVENTQLQNEKLYLYYLQNGRDMYVDQELDINRLSDYDVDHIVPQSFLKDDSIDNKVLTRSDKARGKSDNVPSEEVVKKMKNYWRQLLNAKLITQRKFDNLTKAERGGLSELDKAGFIKRQLVETRQITKHVAQILDSRMNTKYDENDKLIREVKVITLKSKLVSDFRKDFQFYKVREINNYHHAHDAYLNAVVGTALIKKYPKLESEFVYGDYKVYDVRKMIAKSEQEIGKATAKYFFYSNIMNFFKTEITLANGEIRKRPLIETNGETGEIVWDKGRDFATVRKVLSMPQVNIVKKTEVQTGGFSKESILPKRNSDKLIARKKDWDPKKYGGFDSPTVAYSVLVVAKVEKGKSKKLKSVKELLGITIMERSSFEKNPIDFLEAKGYKEVKKDLIIKLPKYSLFELENGRKRMLASAGELQKGNELALPSKYVNFLYLASHYEKLKGSPEDNEQKQLFVEQHKHYLDEIIEQISEFSKRVILADANLDKVLSAYNKHRDKPIREQAENIIHLFTLTNLGAPAAFKYFDTTIDRKRYTSTKEVLDATLIHQSITGLYETRIDLSQLGGDGGEAAAKPAPGGGGGVPWILKKPLELTIKLDLEEQQGTLLNNSILSKKGKEELKQLFEKYSALWQSWENQVGHRRIRPHKIATGTVKPTPQKQYHINPKAKPDIQIVINDLLKQGVLIQKESTMNTPVYPVPKPNGRWRMVLDYRAVNKVTPLIAVQNQHSYGILGSLFKGRYKTTIDLSNGFWAHPIVPEDYWITAFTWQGKQYCWTVLPQGFLNSPGLFNGDVVDLLQGIPNVEVYVDDVYISHDSEKEHLEYLDILFNRLKEAGYIISLKKSNIANSIVDFLGFQITNEGRGLTDTFKEKLENITAPTTLKQLQSILGLLNFARNFIPDFTELIAPLYALIPKSPKNYVPWQIEHSTTLETLITKLNGAEYLQGRKGDKTLIMKVNASYTTGYIRYYNEGEKKPISYVSIVFSKTELKFTELEKLLTTVHKGLLKALDLSMGQNIHVYSPIVSMQNIQKTPQTAKKALASRWLSWLSYLEDPRIRFFYDPQMPALKDLPAVDTGKDNKKHPSNFQHIFYTDGSAITSPTKEGHLNAGMGIVYFINKDGNLQKQQEWSISLGNHTAQFAEIAAFEFALKKCLPLGGNILVVTDSNYVAKAYNEELDVWASNGFVNNRKKPLKHISKWKSVADLKRLRPDVVVTHEPGHQKLDSSPHAYGNNLADQLATQASFKVHAGKRTADGSEFEKRTADGSEFESPKKKAKVE

SEQ ID NO: 1106 - protein, 2087 aa, synthetic construct
MPAAKRVKLDGGDKKYSIGLDIGTNSVGWAVITDEYKVPSKKFKVLGNTDRHSIKKNLIGALLFDSGETAEATRLKRTARRRYTRRKNRICYLQEIFSNEMAKVDDSFFHRLEESFLVEEDKKHERHPIFGNIVDEVAYHEKYPTIYHLRKKLVDSTDKADLRLIYLALAHMIKFRGHFLIEGDLNPDNSDVDKLFIQLVQTYNQLFEENPINASGVDAKAILSARLSKSRRLENLIAQLPGEKKNGLFGNLIALSLGLTPNFKSNFDLAEDAKLQLSKDTYDDDLDNLLAQIGDQYADLFLAAKNLSDAILLSDILRVNTEITKAPLSASMIKRYDEHHQDLTLLKALVRQQLPEKYKEIFFDQSKNGYAGYIDGGASQEEFYKFIKPILEKMDGTEELLVKLNREDLLRKQRTFDNGSIPHQIHLGELHAILRRQEDFYPFLKDNREKIEKILTFRIPYYVGPLARGNSRFAWMTRKSEETITPWNFEEVVDKGASAQSFIERMTNFDKNLPNEKVLPKHSLLYEYFTVYNELTKVKYVTEGMRKPAFLSGEQKKAIVDLLFKTNRKVTVKQLKEDYFKKIECFDSVEISGVEDRFNASLGTYHDLLKIIKDKDFLDNEENEDILEDIVLTLTLFEDREMIEERLKTYAHLFDDKVMKQLKRRRYTGWGRLSRKLINGIRDKQSGKTILDFLKSDGFANRNFMQLIHDDSLTFKEDIQKAQVSGQGDSLHEHIANLAGSPAIKKGILQTVKVVDELVKVMGRHKPENIVIEMARENQTTQKGQKNSRERMKRIEEGIKELGSQILKEHPVENTQLQNEKLYLYYLQNGRDMYVDQELDINRLSDYDVDHIVPQSFLKDDSIDNKVLTRSDKARGKSDNVPSEEVVKKMKNYWRQLLNAKLITQRKFDNLTKAERGGLSELDKAGFIKRQLVETRQITKHVAQILDSRMNTKYDENDKLIREVKVITLKSKLVSDFRKDFQFYKVREINNYHHAHDAYLNAVVGTALIKKYPKLESEFVYGDYKVYDVRKMIAKSEQEIGKATAKYFFYSNIMNFFKTEITLANGEIRKRPLIETNGETGEIVWDKGRDFATVRKVLSMPQVNIVKKTEVQTGGFSKESILPKRNSDKLIARKKDWDPKKYGGFDSPTVAYSVLVVAKVEKGKSKKLKSVKELLGITIMERSSFEKNPIDFLEAKGYKEVKKDLIIKLPKYSLFELENGRKRMLASAGELQKGNELALPSKYVNFLYLASHYEKLKGSPEDNEQKQLFVEQHKHYLDEIIEQISEFSKRVILADANLDKVLSAYNKHRDKPIREQAENIIHLFTLTNLGAPAAFKYFDTTIDRKRYTSTKEVLDATLIHQSITGLYETRIDLSQLGGDGGGGSGGGEAAAKGGVPWILKKPLELTIKLDLEEQQGTLLNNSILSKKGKEELKQLFEKYSALWQSWENQVGHRRIRPHKIATGTVKPTPQKQYHINPKAKPDIQIVINDLLKQGVLIQKESTMNTPVYPVPKPNGRWRMVLDYRAVNKVTPLIAVQNQHSYGILGSLFKGRYKTTIDLSNGFWAHPIVPEDYWITAFTWQGKQYCWTVLPQGFLNSPGLFNGDVVDLLQGIPNVEVYVDDVYISHDSEKEHLEYLDILFNRLKEAGYIISLKKSNIANSIVDFLGFQITNEGRGLTDTFKEKLENITAPTTLKQLQSILGLLNFARNFIPDFTELIAPLYALIPKSPKNYVPWQIEHSTTLETLITKLNGAEYLQGRKGDKTLIMKVNASYTTGYIRYYNEGEKKPISYVSIVFSKTELKFTELEKLLTTVHKGLLKALDLSMGQNIHVYSPIVSMQNIQKTPQTAKKALASRWLSWLSYLEDPRIRFFYDPQMPALKDLPAVDTGKDNKKHPSNFQHIFYTDGSAITSPTKEGHLNAGMGIVYFINKDGNLQKQQEWSISLGNHTAQFAEIAAFEFALKKCLPLGGNILVVTDSNYVAKAYNEELDVWASNGFVNNRKKPLKHISKWKSVADLKRLRPDVVVTHEPGHQKLDSSPHAYGNNLADQLATQASFKVHAGKRTADGSEFEKRTADGSEFESPKKKAKVE

SEQ ID NO: 1107 - protein, 2082 aa, synthetic construct
MPAAKRVKLDGGDKKYSIGLDIGTNSVGWAVITDEYKVPSKKFKVLGNTDRHSIKKNLIGALLFDSGETAEATRLKRTARRRYTRRKNRICYLQEIFSNEMAKVDDSFFHRLEESFLVEEDKKHERHPIFGNIVDEVAYHEKYPTIYHLRKKLVDSTDKADLRLIYLALAHMIKFRGHFLIEGDLNPDNSDVDKLFIQLVQTYNQLFEENPINASGVDAKAILSARLSKSRRLENLIAQLPGEKKNGLFGNLIALSLGLTPNFKSNFDLAEDAKLQLSKDTYDDDLDNLLAQIGDQYADLFLAAKNLSDAILLSDILRVNTEITKAPLSASMIKRYDEHHQDLTLLKALVRQQLPEKYKEIFFDQSKNGYAGYIDGGASQEEFYKFIKPILEKMDGTEELLVKLNREDLLRKQRTFDNGSIPHQIHLGELHAILRRQEDFYPFLKDNREKIEKILTFRIPYYVGPLARGNSRFAWMTRKSEETITPWNFEEVVDKGASAQSFIERMTNFDKNLPNEKVLPKHSLLYEYFTVYNELTKVKYVTEGMRKPAFLSGEQKKAIVDLLFKTNRKVTVKQLKEDYFKKIECFDSVEISGVEDRFNASLGTYHDLLKIIKDKDFLDNEENEDILEDIVLTLTLFEDREMIEERLKTYAHLFDDKVMKQLKRRRYTGWGRLSRKLINGIRDKQSGKTILDFLKSDGFANRNFMQLIHDDSLTFKEDIQKAQVSGQGDSLHEHIANLAGSPAIKKGILQTVKVVDELVKVMGRHKPENIVIEMARENQTTQKGQKNSRERMKRIEEGIKELGSQILKEHPVENTQLQNEKLYLYYLQNGRDMYVDQELDINRLSDYDVDHIVPQSFLKDDSIDNKVLTRSDKARGKSDNVPSEEVVKKMKNYWRQLLNAKLITQRKFDNLTKAERGGLSELDKAGFIKRQLVETRQITKHVAQILDSRMNTKYDENDKLIREVKVITLKSKLVSDFRKDFQFYKVREINNYHHAHDAYLNAVVGTALIKKYPKLESEFVYGDYKVYDVRKMIAKSEQEIGKATAKYFFYSNIMNFFKTEITLANGEIRKRPLIETNGETGEIVWDKGRDFATVRKVLSMPQVNIVKKTEVQTGGFSKESILPKRNSDKLIARKKDWDPKKYGGFDSPTVAYSVLVVAKVEKGKSKKLKSVKELLGITIMERSSFEKNPIDFLEAKGYKEVKKDLIIKLPKYSLFELENGRKRMLASAGELQKGNELALPSKYVNFLYLASHYEKLKGSPEDNEQKQLFVEQHKHYLDEIIEQISEFSKRVILADANLDKVLSAYNKHRDKPIREQAENIIHLFTLTNLGAPAAFKYFDTTIDRKRYTSTKEVLDATLIHQSITGLYETRIDLSQLGGDGGPAPGGSGGVPWILKKPLELTIKLDLEEQQGTLLNNSILSKKGKEELKQLFEKYSALWQSWENQVGHRRIRPHKIATGTVKPTPQKQYHINPKAKPDIQIVINDLLKQGVLIQKESTMNTPVYPVPKPNGRWRMVLDYRAVNKVTPLIAVQNQHSYGILGSLFKGRYKTTIDLSNGFWAHPIVPEDYWITAFTWQGKQYCWTVLPQGFLNSPGLFNGDVVDLLQGIPNVEVYVDDVYISHDSEKEHLEYLDILFNRLKEAGYIISLKKSNIANSIVDFLGFQITNEGRGLTDTFKEKLENITAPTTLKQLQSILGLLNFARNFIPDFTELIAPLYALIPKSPKNYVPWQIEHSTTLETLITKLNGAEYLQGRKGDKTLIMKVNASYTTGYIRYYNEGEKKPISYVSIVFSKTELKFTELEKLLTTVHKGLLKALDLSMGQNIHVYSPIVSMQNIQKTPQTAKKALASRWLSWLSYLEDPRIRFFYDPQMPALKDLPAVDTGKDNKKHPSNFQHIFYTDGSAITSPTKEGHLNAGMGIVYFINKDGNLQKQQEWSISLGNHTAQFAEIAAFEFALKKCLPLGGNILVVTDSNYVAKAYNEELDVWASNGFVNNRKKPLKHISKWKSVADLKRLRPDVVVTHEPGHQKLDSSPHAYGNNLADQLATQASFKVHAGKRTADGSEFEKRTADGSEFESPKKKAKVE

SEQ ID NO: 1108 - protein, 2084 aa, synthetic construct
MPAAKRVKLDGGDKKYSIGLDIGTNSVGWAVITDEYKVPSKKFKVLGNTDRHSIKKNLIGALLFDSGETAEATRLKRTARRRYTRRKNRICYLQEIFSNEMAKVDDSFFHRLEESFLVEEDKKHERHPIFGNIVDEVAYHEKYPTIYHLRKKLVDSTDKADLRLIYLALAHMIKFRGHFLIEGDLNPDNSDVDKLFIQLVQTYNQLFEENPINASGVDAKAILSARLSKSRRLENLIAQLPGEKKNGLFGNLIALSLGLTPNFKSNFDLAEDAKLQLSKDTYDDDLDNLLAQIGDQYADLFLAAKNLSDAILLSDILRVNTEITKAPLSASMIKRYDEHHQDLTLLKALVRQQLPEKYKEIFFDQSKNGYAGYIDGGASQEEFYKFIKPILEKMDGTEELLVKLNREDLLRKQRTFDNGSIPHQIHLGELHAILRRQEDFYPFLKDNREKIEKILTFRIPYYVGPLARGNSRFAWMTRKSEETITPWNFEEVVDKGASAQSFIERMTNFDKNLPNEKVLPKHSLLYEYFTVYNELTKVKYVTEGMRKPAFLSGEQKKAIVDLLFKTNRKVTVKQLKEDYFKKIECFDSVEISGVEDRFNASLGTYHDLLKIIKDKDFLDNEENEDILEDIVLTLTLFEDREMIEERLKTYAHLFDDKVMKQLKRRRYTGWGRLSRKLINGIRDKQSGKTILDFLKSDGFANRNFMQLIHDDSLTFKEDIQKAQVSGQGDSLHEHIANLAGSPAIKKGILQTVKVVDELVKVMGRHKPENIVIEMARENQTTQKGQKNSRERMKRIEEGIKELGSQILKEHPVENTQLQNEKLYLYYLQNGRDMYVDQELDINRLSDYDVDHIVPQSFLKDDSIDNKVLTRSDKARGKSDNVPSEEVVKKMKNYWRQLLNAKLITQRKFDNLTKAERGGLSELDKAGFIKRQLVETRQITKHVAQILDSRMNTKYDENDKLIREVKVITLKSKLVSDFRKDFQFYKVREINNYHHAHDAYLNAVVGTALIKKYPKLESEFVYGDYKVYDVRKMIAKSEQEIGKATAKYFFYSNIMNFFKTEITLANGEIRKRPLIETNGETGEIVWDKGRDFATVRKVLSMPQVNIVKKTEVQTGGFSKESILPKRNSDKLIARKKDWDPKKYGGFDSPTVAYSVLVVAKVEKGKSKKLKSVKELLGITIMERSSFEKNPIDFLEAKGYKEVKKDLIIKLPKYSLFELENGRKRMLASAGELQKGNELALPSKYVNFLYLASHYEKLKGSPEDNEQKQLFVEQHKHYLDEIIEQISEFSKRVILADANLDKVLSAYNKHRDKPIREQAENIIHLFTLTNLGAPAAFKYFDTTIDRKRYTSTKEVLDATLIHQSITGLYETRIDLSQLGGDGGGGGEAAAKGGVPWILKKPLELTIKLDLEEQQGTLLNNSILSKKGKEELKQLFEKYSALWQSWENQVGHRRIRPHKIATGTVKPTPQKQYHINPKAKPDIQIVINDLLKQGVLIQKESTMNTPVYPVPKPNGRWRMVLDYRAVNKVTPLIAVQNQHSYGILGSLFKGRYKTTIDLSNGFWAHPIVPEDYWITAFTWQGKQYCWTVLPQGFLNSPGLFNGDVVDLLQGIPNVEVYVDDVYISHDSEKEHLEYLDILFNRLKEAGYIISLKKSNIANSIVDFLGFQITNEGRGLTDTFKEKLENITAPTTLKQLQSILGLLNFARNFIPDFTELIAPLYALIPKSPKNYVPWQIEHSTTLETLITKLNGAEYLQGRKGDKTLIMKVNASYTTGYIRYYNEGEKKPISYVSIVFSKTELKFTELEKLLTTVHKGLLKALDLSMGQNIHVYSPIVSMQNIQKTPQTAKKALASRWLSWLSYLEDPRIRFFYDPQMPALKDLPAVDTGKDNKKHPSNFQHIFYTDGSAITSPTKEGHLNAGMGIVYFINKDGNLQKQQEWSISLGNHTAQFAEIAAFEFALKKCLPLGGNILVVTDSNYVAKAYNEELDVWASNGFVNNRKKPLKHISKWKSVADLKRLRPDVVVTHEPGHQKLDSSPHAYGNNLADQLATQASFKVHAGKRTADGSEFEKRTADGSEFESPKKKAKVE

SEQ ID NO: 1109 - protein, 2085 aa, synthetic construct
MPAAKRVKLDGGDKKYSIGLDIGTNSVGWAVITDEYKVPSKKFKVLGNTDRHSIKKNLIGALLFDSGETAEATRLKRTARRRYTRRKNRICYLQEIFSNEMAKVDDSFFHRLEESFLVEEDKKHERHPIFGNIVDEVAYHEKYPTIYHLRKKLVDSTDKADLRLIYLALAHMIKFRGHFLIEGDLNPDNSDVDKLFIQLVQTYNQLFEENPINASGVDAKAILSARLSKSRRLENLIAQLPGEKKNGLFGNLIALSLGLTPNFKSNFDLAEDAKLQLSKDTYDDDLDNLLAQIGDQYADLFLAAKNLSDAILLSDILRVNTEITKAPLSASMIKRYDEHHQDLTLLKALVRQQLPEKYKEIFFDQSKNGYAGYIDGGASQEEFYKFIKPILEKMDGTEELLVKLNREDLLRKQRTFDNGSIPHQIHLGELHAILRRQEDFYPFLKDNREKIEKILTFRIPYYVGPLARGNSRFAWMTRKSEETITPWNFEEVVDKGASAQSFIERMTNFDKNLPNEKVLPKHSLLYEYFTVYNELTKVKYVTEGMRKPAFLSGEQKKAIVDLLFKTNRKVTVKQLKEDYFKKIECFDSVEISGVEDRFNASLGTYHDLLKIIKDKDFLDNEENEDILEDIVLTLTLFEDREMIEERLKTYAHLFDDKVMKQLKRRRYTGWGRLSRKLINGIRDKQSGKTILDFLKSDGFANRNFMQLIHDDSLTFKEDIQKAQVSGQGDSLHEHIANLAGSPAIKKGILQTVKVVDELVKVMGRHKPENIVIEMARENQTTQKGQKNSRERMKRIEEGIKELGSQILKEHPVENTQLQNEKLYLYYLQNGRDMYVDQELDINRLSDYDVDHIVPQSFLKDDSIDNKVLTRSDKARGKSDNVPSEEVVKKMKNYWRQLLNAKLITQRKFDNLTKAERGGLSELDKAGFIKRQLVETRQITKHVAQILDSRMNTKYDENDKLIREVKVITLKSKLVSDFRKDFQFYKVREINNYHHAHDAYLNAVVGTALIKKYPKLESEFVYGDYKVYDVRKMIAKSEQEIGKATAKYFFYSNIMNFFKTEITLANGEIRKRPLIETNGETGEIVWDKGRDFATVRKVLSMPQVNIVKKTEVQTGGFSKESILPKRNSDKLIARKKDWDPKKYGGFDSPTVAYSVLVVAKVEKGKSKKLKSVKELLGITIMERSSFEKNPIDFLEAKGYKEVKKDLIIKLPKYSLFELENGRKRMLASAGELQKGNELALPSKYVNFLYLASHYEKLKGSPEDNEQKQLFVEQHKHYLDEIIEQISEFSKRVILADANLDKVLSAYNKHRDKPIREQAENIIHLFTLTNLGAPAAFKYFDTTIDRKRYTSTKEVLDATLIHQSITGLYETRIDLSQLGGDGGGGGGSSPAPGGVPWILKKPLELTIKLDLEEQQGTLLNNSILSKKGKEELKQLFEKYSALWQSWENQVGHRRIRPHKIATGTVKPTPQKQYHINPKAKPDIQIVINDLLKQGVLIQKESTMNTPVYPVPKPNGRWRMVLDYRAVNKVTPLIAVQNQHSYGILGSLFKGRYKTTIDLSNGFWAHPIVPEDYWITAFTWQGKQYCWTVLPQGFLNSPGLFNGDVVDLLQGIPNVEVYVDDVYISHDSEKEHLEYLDILFNRLKEAGYIISLKKSNIANSIVDFLGFQITNEGRGLTDTFKEKLENITAPTTLKQLQSILGLLNFARNFIPDFTELIAPLYALIPKSPKNYVPWQIEHSTTLETLITKLNGAEYLQGRKGDKTLIMKVNASYTTGYIRYYNEGEKKPISYVSIVFSKTELKFTELEKLLTTVHKGLLKALDLSMGQNIHVYSPIVSMQNIQKTPQTAKKALASRWLSWLSYLEDPRIRFFYDPQMPALKDLPAVDTGKDNKKHPSNFQHIFYTDGSAITSPTKEGHLNAGMGIVYFINKDGNLQKQQEWSISLGNHTAQFAEIAAFEFALKKCLPLGGNILVVTDSNYVAKAYNEELDVWASNGFVNNRKKPLKHISKWKSVADLKRLRPDVVVTHEPGHQKLDSSPHAYGNNLADQLATQASFKVHAGKRTADGSEFEKRTADGSEFESPKKKAKVE

SEQ ID NO: 1110 - protein, 2085 aa, synthetic construct
MPAAKRVKLDGGDKKYSIGLDIGTNSVGWAVITDEYKVPSKKFKVLGNTDRHSIKKNLIGALLFDSGETAEATRLKRTARRRYTRRKNRICYLQEIFSNEMAKVDDSFFHRLEESFLVEEDKKHERHPIFGNIVDEVAYHEKYPTIYHLRKKLVDSTDKADLRLIYLALAHMIKFRGHFLIEGDLNPDNSDVDKLFIQLVQTYNQLFEENPINASGVDAKAILSARLSKSRRLENLIAQLPGEKKNGLFGNLIALSLGLTPNFKSNFDLAEDAKLQLSKDTYDDDLDNLLAQIGDQYADLFLAAKNLSDAILLSDILRVNTEITKAPLSASMIKRYDEHHQDLTLLKALVRQQLPEKYKEIFFDQSKNGYAGYIDGGASQEEFYKFIKPILEKMDGTEELLVKLNREDLLRKQRTFDNGSIPHQIHLGELHAILRRQEDFYPFLKDNREKIEKILTFRIPYYVGPLARGNSRFAWMTRKSEETITPWNFEEVVDKGASAQSFIERMTNFDKNLPNEKVLPKHSLLYEYFTVYNELTKVKYVTEGMRKPAFLSGEQKKAIVDLLFKTNRKVTVKQLKEDYFKKIECFDSVEISGVEDRFNASLGTYHDLLKIIKDKDFLDNEENEDILEDIVLTLTLFEDREMIEERLKTYAHLFDDKVMKQLKRRRYTGWGRLSRKLINGIRDKQSGKTILDFLKSDGFANRNFMQLIHDDSLTFKEDIQKAQVSGQGDSLHEHIANLAGSPAIKKGILQTVKVVDELVKVMGRHKPENIVIEMARENQTTQKGQKNSRERMKRIEEGIKELGSQILKEHPVENTQLQNEKLYLYYLQNGRDMYVDQELDINRLSDYDVDHIVPQSFLKDDSIDNKVLTRSDKARGKSDNVPSEEVVKKMKNYWRQLLNAKLITQRKFDNLTKAERGGLSELDKAGFIKRQLVETRQITKHVAQILDSRMNTKYDENDKLIREVKVITLKSKLVSDFRKDFQFYKVREINNYHHAHDAYLNAVVGTALIKKYPKLESEFVYGDYKVYDVRKMIAKSEQEIGKATAKYFFYSNIMNFFKTEITLANGEIRKRPLIETNGETGEIVWDKGRDFATVRKVLSMPQVNIVKKTEVQTGGFSKESILPKRNSDKLIARKKDWDPKKYGGFDSPTVAYSVLVVAKVEKGKSKKLKSVKELLGITIMERSSFEKNPIDFLEAKGYKEVKKDLIIKLPKYSLFELENGRKRMLASAGELQKGNELALPSKYVNFLYLASHYEKLKGSPEDNEQKQLFVEQHKHYLDEIIEQISEFSKRVILADANLDKVLSAYNKHRDKPIREQAENIIHLFTLTNLGAPAAFKYFDTTIDRKRYTSTKEVLDATLIHQSITGLYETRIDLSQLGGDGGPAPGGSGSSGGVPWILKKPLELTIKLDLEEQQGTLLNNSILSKKGKEELKQLFEKYSALWQSWENQVGHRRIRPHKIATGTVKPTPQKQYHINPKAKPDIQIVINDLLKQGVLIQKESTMNTPVYPVPKPNGRWRMVLDYRAVNKVTPLIAVQNQHSYGILGSLFKGRYKTTIDLSNGFWAHPIVPEDYWITAFTWQGKQYCWTVLPQGFLNSPGLFNGDVVDLLQGIPNVEVYVDDVYISHDSEKEHLEYLDILFNRLKEAGYIISLKKSNIANSIVDFLGFQITNEGRGLTDTFKEKLENITAPTTLKQLQSILGKLNFARNFIPDFTELIAPLYALIPKSPKNYVPWQIEHSTTLETLITKLNGAEYLQGRKGDKTLIMKVNASYTTGYIRYYNEGEKKPISYVSIVFSKTELKFTELEKLLTTVHKGLLKALDLSMGQNIHVYSPIVSMQNIQKTPQTAKKALASRWLSWLSYLEDPRIRFFYDPQMPALKDLPAVDTGKDNKKHPSNFQHIFYTDGSAITSPTKEGHLNAGMGIVYFINKDGNLQKQQEWSISLGNHTAQFAEIAAFEFALKKCLPLGGNILVVTDSNYVAKAYNEELDVWASNGFVNNRKKPLKHISKWKSVADLKRLRPDVVVTHEPGHQKLDSSPHAYGNNLADQLATQASFKVHAGKRTADGSEFEKRTADGSEFESPKKKAKVE

SEQ ID NO: 1111 - protein, 2087 aa, synthetic construct
MPAAKRVKLDGGDKKYSIGLDIGTNSVGWAVITDEYKVPSKKFKVLGNTDRHSIKKNLIGALLFDSGETAEATRLKRTARRRYTRRKNRICYLQEIFSNEMAKVDDSFFHRLEESFLVEEDKKHERHPIFGNIVDEVAYHEKYPTIYHLRKKLVDSTDKADLRLIYLALAHMIKFRGHFLIEGDLNPDNSDVDKLFIQLVQTYNQLFEENPINASGVDAKAILSARLSKSRRLENLIAQLPGEKKNGLFGNLIALSLGLTPNFKSNFDLAEDAKLQLSKDTYDDDLDNLLAQIGDQYADLFLAAKNLSDAILLSDILRVNTEITKAPLSASMIKRYDEHHQDLTLLKALVRQQLPEKYKEIFFDQSKNGYAGYIDGGASQEEFYKFIKPILEKMDGTEELLVKLNREDLLRKQRTFDNGSIPHQIHLGELHAILRRQEDFYPFLKDNREKIEKILTFRIPYYVGPLARGNSRFAWMTRKSEETITPWNFEEVVDKGASAQSFIERMTNFDKNLPNEKVLPKHSLLYEYFTVYNELTKVKYVTEGMRKPAFLSGEQKKAIVDLLFKTNRKVTVKQLKEDYFKKIECFDSVEISGVEDRFNASLGTYHDLLKIIKDKDFLDNEENEDILEDIVLTLTLFEDREMIEERLKTYAHLFDDKVMKQLKRRRYTGWGRLSRKLINGIRDKQSGKTILDFLKSDGFANRNFMQLIHDDSLTFKEDIQKAQVSGQGDSLHEHIANLAGSPAIKKGILQTVKVVDELVKVMGRHKPENIVIEMARENQTTQKGQKNSRERMKRIEEGIKELGSQILKEHPVENTQLQNEKLYLYYLQNGRDMYVDQELDINRLSDYDVDHIVPQSFLKDDSIDNKVLTRSDKARGKSDNVPSEEVVKKMKNYWRQLLNAKLITQRKFDNLTKAERGGLSELDKAGFIKRQLVETRQITKHVAQILDSRMNTKYDENDKLIREVKVITLKSKLVSDFRKDFQFYKVREINNYHHAHDAYLNAVVGTALIKKYPKLESEFVYGDYKVYDVRKMIAKSEQEIGKATAKYFFYSNIMNFFKTEITLANGEIRKRPLIETNGETGEIVWDKGRDFATVRKVLSMPQVNIVKKTEVQTGGFSKESILPKRNSDKLIARKKDWDPKKYGGFDSPTVAYSVLVVAKVEKGKSKKLKSVKELLGITIMERSSFEKNPIDFLEAKGYKEVKKDLIIKLPKYSLFELENGRKRMLASAGELQKGNELALPSKYVNFLYLASHYEKLKGSPEDNEQKQLFVEQHKHYLDEIIEQISEFSKRVILADANLDKVLSAYNKHRDKPIREQAENIIHLFTLTNLGAPAAFKYFDTTIDRKRYTSTKEVLDATLIHQSITGLYETRIDLSQLGGDGGGSSEAAAKGGGGGVPWILKKPLELTIKLDLEEQQGTLLNNSILSKKGKEELKQLFEKYSALWQSWENQVGHRRIRPHKIATGTVKPTPQKQYHINPKAKPDIQIVINDLLKQGVLIQKESTMNTPVYPVPKPNGRWRMVLDYRAVNKVTPLIAVQNQHSYGILGSLFKGRYKTTIDLSNGFWAHPIVPEDYWITAFTWQGKQYCWTVLPQGFLNSPGLFNGDVVDLLQGIPNVEVYVDDVYISHDSEKEHLEYLDILFNRLKEAGYIISLKKSNIANSIVDFLGFQITNEGRGLTDTFKEKLENITAPTTLKQLQSILGKLNFARNFIPDFTELIAPLYALIPKSPKNYVPWQIEHSTTLETLITKLNGAEYLQGRKGDKTLIMKVNASYTTGYIRYYNEGEKKPISYVSIVFSKTELKFTELEKLLTTVHKGLLKALDLSMGQNIHVYSPIVSMQNIQKTPQTAKKALASRWLSWLSYLEDPRIRFFYDPQMPALKDLPAVDTGKDNKKHPSNFQHIFYTDGSAITSPTKEGHLNAGMGIVYFINKDGNLQKQQEWSISLGNHTAQFAEIAAFEFALKKCLPLGGNILVVTDSNYVAKAYNEELDVWASNGFVNNRKKPLKHISKWKSVADLKRLRPDVVVTHEPGHQKLDSSPHAYGNNLADQLATQASFKVHAGKRTADGSEFEKRTADGSEFESPKKKAKVE

SEQ ID NO: 1112 - protein, 2091 aa, synthetic construct
MPAAKRVKLDGGDKKYSIGLDIGTNSVGWAVITDEYKVPSKKFKVLGNTDRHSIKKNLIGALLFDSGETAEATRLKRTARRRYTRRKNRICYLQEIFSNEMAKVDDSFFHRLEESFLVEEDKKHERHPIFGNIVDEVAYHEKYPTIYHLRKKLVDSTDKADLRLIYLALAHMIKFRGHFLIEGDLNPDNSDVDKLFIQLVQTYNQLFEENPINASGVDAKAILSARLSKSRRLENLIAQLPGEKKNGLFGNLIALSLGLTPNFKSNFDLAEDAKLQLSKDTYDDDLDNLLAQIGDQYADLFLAAKNLSDAILLSDILRVNTEITKAPLSASMIKRYDEHHQDLTLLKALVRQQLPEKYKEIFFDQSKNGYAGYIDGGASQEEFYKFIKPILEKMDGTEELLVKLNREDLLRKQRTFDNGSIPHQIHLGELHAILRRQEDFYPFLKDNREKIEKILTFRIPYYVGPLARGNSRFAWMTRKSEETITPWNFEEVVDKGASAQSFIERMTNFDKNLPNEKVLPKHSLLYEYFTVYNELTKVKYVTEGMRKPAFLSGEQKKAIVDLLFKTNRKVTVKQLKEDYFKKIECFDSVEISGVEDRFNASLGTYHDLLKIIKDKDFLDNEENEDILEDIVLTLTLFEDREMIEERLKTYAHLFDDKVMKQLKRRRYTGWGRLSRKLINGIRDKQSGKTILDFLKSDGFANRNFMQLIHDDSLTFKEDIQKAQVSGQGDSLHEHIANLAGSPAIKKGILQTVKVVDELVKVMGRHKPENIVIEMARENQTTQKGQKNSRERMKRIEEGIKELGSQILKEHPVENTQLQNEKLYLYYLQNGRDMYVDQELDINRLSDYDVDHIVPQSFLKDDSIDNKVLTRSDKARGKSDNVPSEEVVKKMKNYWRQLLNAKLITQRKFDNLTKAERGGLSELDKAGFIKRQLVETRQITKHVAQILDSRMNTKYDENDKLIREVKVITLKSKLVSDFRKDFQFYKVREINNYHHAHDAYLNAVVGTALIKKYPKLESEFVYGDYKVYDVRKMIAKSEQEIGKATAKYFFYSNIMNFFKTEITLANGEIRKRPLIETNGETGEIVWDKGRDFATVRKVLSMPQVNIVKKTEVQTGGFSKESILPKRNSDKLIARKKDWDPKKYGGFDSPTVAYSVLVVAKVEKGKSKKLKSVKELLGITIMERSSFEKNPIDFLEAKGYKEVKKDLIIKLPKYSLFELENGRKRMLASAGELQKGNELALPSKYVNFLYLASHYEKLKGSPEDNEQKQLFVEQHKHYLDEIIEQISEFSKRVILADANLDKVLSAYNKHRDKPIREQAENIIHLFTLTNLGAPAAFKYFDTTIDRKRYTSTKEVLDATLIHQSITGLYETRIDLSQLGGDGGGSSGSSGSSGSSGSSGGVPWILKKPLELTIKLDLEEQQGTLLNNSILSKKGKEELKQLFEKYSALWQSWENQVGHRRIRPHKIATGTVKPTPQKQYHINPKAKPDIQIVINDLLKQGVLIQKESTMNTPVYPVPKPNGRWRMVLDYRAVNKVTPLIAVQNQHSYGILGSLFKGRYKTTIDLSNGFWAHPIVPEDYWITAFTWQGKQYCWTVLPQGFLNSPGLFNGDVVDLLQGIPNVEVYVDDVYISHDSEKEHLEYLDILFNRLKEAGYIISLKKSNIANSIVDFLGFQITNEGRGLTDTFKEKLENITAPTTLKQLQSILGKLNFARNFIPDFTELIAPLYALIPKSPKNYVPWQIEHSTTLETLITKLNGAEYLQGRKGDKTLIMKVNASYTTGYIRYYNEGEKKPISYVSIVFSKTELKFTELEKLLTTVHKGLLKALDLSMGQNIHVYSPIVSMQNIQKTPQTAKKALASRWLSWLSYLEDPRIRFFYDPQMPALKDLPAVDTGKDNKKHPSNFQHIFYTDGSAITSPTKEGHLNAGMGIVYFINKDGNLQKQQEWSISLGNHTAQFAEIAAFEFALKKCLPLGGNILVVTDSNYVAKAYNEELDVWASNGFVNNRKKPLKHISKWKSVADLKRLRPDVVVTHEPGHQKLDSSPHAYGNNLADQLATQASFKVHAGKRTADGSEFEKRTADGSEFESPKKKAKVE

SEQ ID NO: 1113 - protein, 2087 aa, synthetic construct
MPAAKRVKLDGGDKKYSIGLDIGTNSVGWAVITDEYKVPSKKFKVLGNTDRHSIKKNLIGALLFDSGETAEATRLKRTARRRYTRRKNRICYLQEIFSNEMAKVDDSFFHRLEESFLVEEDKKHERHPIFGNIVDEVAYHEKYPTIYHLRKKLVDSTDKADLRLIYLALAHMIKFRGHFLIEGDLNPDNSDVDKLFIQLVQTYNQLFEENPINASGVDAKAILSARLSKSRRLENLIAQLPGEKKNGLFGNLIALSLGLTPNFKSNFDLAEDAKLQLSKDTYDDDLDNLLAQIGDQYADLFLAAKNLSDAILLSDILRVNTEITKAPLSASMIKRYDEHHQDLTLLKALVRQQLPEKYKEIFFDQSKNGYAGYIDGGASQEEFYKFIKPILEKMDGTEELLVKLNREDLLRKQRTFDNGSIPHQIHLGELHAILRRQEDFYPFLKDNREKIEKILTFRIPYYVGPLARGNSRFAWMTRKSEETITPWNFEEVVDKGASAQSFIERMTNFDKNLPNEKVLPKHSLLYEYFTVYNELTKVKYVTEGMRKPAFLSGEQKKAIVDLLFKTNRKVTVKQLKEDYFKKIECFDSVEISGVEDRFNASLGTYHDLLKIIKDKDFLDNEENEDILEDIVLTLTLFEDREMIEERLKTYAHLFDDKVMKQLKRRRYTGWGRLSRKLINGIRDKQSGKTILDFLKSDGFANRNFMQLIHDDSLTFKEDIQKAQVSGQGDSLHEHIANLAGSPAIKKGILQTVKVVDELVKVMGRHKPENIVIEMARENQTTQKGQKNSRERMKRIEEGIKELGSQILKEHPVENTQLQNEKLYLYYLQNGRDMYVDQELDINRLSDYDVDHIVPQSFLKDDSIDNKVLTRSDKARGKSDNVPSEEVVKKMKNYWRQLLNAKLITQRKFDNLTKAERGGLSELDKAGFIKRQLVETRQITKHVAQILDSRMNTKYDENDKLIREVKVITLKSKLVSDFRKDFQFYKVREINNYHHAHDAYLNAVVGTALIKKYPKLESEFVYGDYKVYDVRKMIAKSEQEIGKATAKYFFYSNIMNFFKTEITLANGEIRKRPLIETNGETGEIVWDKGRDFATVRKVLSMPQVNIVKKTEVQTGGFSKESILPKRNSDKLIARKKDWDPKKYGGFDSPTVAYSVLVVAKVEKGKSKKLKSVKELLGITIMERSSFEKNPIDFLEAKGYKEVKKDLIIKLPKYSLFELENGRKRMLASAGELQKGNELALPSKYVNFLYLASHYEKLKGSPEDNEQKQLFVEQHKHYLDEIIEQISEFSKRVILADANLDKVLSAYNKHRDKPIREQAENIIHLFTLTNLGAPAAFKYFDTTIDRKRYTSTKEVLDATLIHQSITGLYETRIDLSQLGGDGGGGSEAAAKGGGGGVPWILKKPLELTIKLDLEEQQGTLLNNSILSKKGKEELKQLFEKYSALWQSWENQVGHRRIRPHKIATGTVKPTPQKQYHINPKAKPDIQIVINDLLKQGVLIQKESTMNTPVYPVPKPNGRWRMVLDYRAVNKVTPLIAVQNQHSYGILGSLFKGRYKTTIDLSNGFWAHPIVPEDYWITAFTWQGKQYCWTVLPQGFLNSPGLFNGDVVDLLQGIPNVEVYVDDVYISHDSEKEHLEYLDILFNRLKEAGYIISLKKSNIANSIVDFLGFQITNEGRGLTDTFKEKLENITAPTTLKQLQSILGKLNFARNFIPDFTELIAPLYALIPKSPKNYVPWQIEHSTTLETLITKLNGAEYLQGRKGDKTLIMKVNASYTTGYIRYYNEGEKKPISYVSIVFSKTELKFTELEKLLTTVHKGLLKALDLSMGQNIHVYSPIVSMQNIQKTPQTAKKALASRWLSWLSYLEDPRIRFFYDPQMPALKDLPAVDTGKDNKKHPSNFQHIFYTDGSAITSPTKEGHLNAGMGIVYFINKDGNLQKQQEWSISLGNHTAQFAEIAAFEFALKKCLPLGGNILVVTDSNYVAKAYNEELDVWASNGFVNNRKKPLKHISKWKSVADLKRLRPDVVVTHEPGHQKLDSSPHAYGNNLADQLATQASFKVHAGKRTADGSEFEKRTADGSEFESPKKKAKVE

SEQ ID NO: 1114 - protein, 2087 aa, synthetic construct
MPAAKRVKLDGGDKKYSIGLDIGTNSVGWAVITDEYKVPSKKFKVLGNTDRHSIKKNLIGALLFDSGETAEATRLKRTARRRYTRRKNRICYLQEIFSNEMAKVDDSFFHRLEESFLVEEDKKHERHPIFGNIVDEVAYHEKYPTIYHLRKKLVDSTDKADLRLIYLALAHMIKFRGHFLIEGDLNPDNSDVDKLFIQLVQTYNQLFEENPINASGVDAKAILSARLSKSRRLENLIAQLPGEKKNGLFGNLIALSLGLTPNFKSNFDLAEDAKLQLSKDTYDDDLDNLLAQIGDQYADLFLAAKNLSDAILLSDILRVNTEITKAPLSASMIKRYDEHHQDLTLLKALVRQQLPEKYKEIFFDQSKNGYAGYIDGGASQEEFYKFIKPILEKMDGTEELLVKLNREDLLRKQRTFDNGSIPHQIHLGELHAILRRQEDFYPFLKDNREKIEKILTFRIPYYVGPLARGNSRFAWMTRKSEETITPWNFEEVVDKGASAQSFIERMTNFDKNLPNEKVLPKHSLLYEYFTVYNELTKVKYVTEGMRKPAFLSGEQKKAIVDLLFKTNRKVTVKQLKEDYFKKIECFDSVEISGVEDRFNASLGTYHDLLKIIKDKDFLDNEENEDILEDIVLTLTLFEDREMIEERLKTYAHLFDDKVMKQLKRRRYTGWGRLSRKLINGIRDKQSGKTILDFLKSDGFANRNFMQLIHDDSLTFKEDIQKAQVSGQGDSLHEHIANLAGSPAIKKGILQTVKVVDELVKVMGRHKPENIVIEMARENQTTQKGQKNSRERMKRIEEGIKELGSQILKEHPVENTQLQNEKLYLYYLQNGRDMYVDQELDINRLSDYDVDHIVPQSFLKDDSIDNKVLTRSDKARGKSDNVPSEEVVKKMKNYWRQLLNAKLITQRKFDNLTKAERGGLSELDKAGFIKRQLVETRQITKHVAQILDSRMNTKYDENDKLIREVKVITLKSKLVSDFRKDFQFYKVREINNYHHAHDAYLNAVVGTALIKKYPKLESEFVYGDYKVYDVRKMIAKSEQEIGKATAKYFFYSNIMNFFKTEITLANGEIRKRPLIETNGETGEIVWDKGRDFATVRKVLSMPQVNIVKKTEVQTGGFSKESILPKRNSDKLIARKKDWDPKKYGGFDSPTVAYSVLVVAKVEKGKSKKLKSVKELLGITIMERSSFEKNPIDFLEAKGYKEVKKDLIIKLPKYSLFELENGRKRMLASAGELQKGNELALPSKYVNFLYLASHYEKLKGSPEDNEQKQLFVEQHKHYLDEIIEQISEFSKRVILADANLDKVLSAYNKHRDKPIREQAENIIHLFTLTNLGAPAAFKYFDTTIDRKRYTSTKEVLDATLIHQSITGLYETRIDLSQLGGDGGGGGEAAAKGGSGGVPWILKKPLELTIKLDLEEQQGTLLNNSILSKKGKEELKQLFEKYSALWQSWENQVGHRRIRPHKIATGTVKPTPQKQYHINPKAKPDIQIVINDLLKQGVLIQKESTMNTPVYPVPKPNGRWRMVLDYRAVNKVTPLIAVQNQHSYGILGSLFKGRYKTTIDLSNGFWAHPIVPEDYWITAFTWQGKQYCWTVLPQGFLNSPGLFNGDVVDLLQGIPNVEVYVDDVYISHDSEKEHLEYLDILFNRLKEAGYIISLKKSNIANSIVDFLGFQITNEGRGLTDTFKEKLENITAPTTLKQLQSILGKLNFARNFIPDFTELIAPLYALIPKSPKNYVPWQIEHSTTLETLITKLNGAEYLQGRKGDKTLIMKVNASYTTGYIRYYNEGEKKPISYVSIVFSKTELKFTELEKLLTTVHKGLLKALDLSMGQNIHVYSPIVSMQNIQKTPQTAKKALASRWLSWLSYLEDPRIRFFYDPQMPALKDLPAVDTGKDNKKHPSNFQHIFYTDGSAITSPTKEGHLNAGMGIVYFINKDGNLQKQQEWSISLGNHTAQFAEIAAFEFALKKCLPLGGNILVVTDSNYVAKAYNEELDVWASNGFVNNRKKPLKHISKWKSVADLKRLRPDVVVTHEPGHQKLDSSPHAYGNNLADQLATQASFKVHAGKRTADGSEFEKRTADGSEFESPKKKAKVE

SEQ ID NO: 1115 - protein, 2208 aa, synthetic construct
MPAAKRVKLDGGDKKYSIGLDIGTNSVGWAVITDEYKVPSKKFKVLGNTDRHSIKKNLIGALLFDSGETAEATRLKRTARRRYTRRKNRICYLQEIFSNEMAKVDDSFFHRLEESFLVEEDKKHERHPIFGNIVDEVAYHEKYPTIYHLRKKLVDSTDKADLRLIYLALAHMIKFRGHFLIEGDLNPDNSDVDKLFIQLVQTYNQLFEENPINASGVDAKAILSARLSKSRRLENLIAQLPGEKKNGLFGNLIALSLGLTPNFKSNFDLAEDAKLQLSKDTYDDDLDNLLAQIGDQYADLFLAAKNLSDAILLSDILRVNTEITKAPLSASMIKRYDEHHQDLTLLKALVRQQLPEKYKEIFFDQSKNGYAGYIDGGASQEEFYKFIKPILEKMDGTEELLVKLNREDLLRKQRTFDNGSIPHQIHLGELHAILRRQEDFYPFLKDNREKIEKILTFRIPYYVGPLARGNSRFAWMTRKSEETITPWNFEEVVDKGASAQSFIERMTNFDKNLPNEKVLPKHSLLYEYFTVYNELTKVKYVTEGMRKPAFLSGEQKKAIVDLLFKTNRKVTVKQLKEDYFKKIECFDSVEISGVEDRFNASLGTYHDLLKIIKDKDFLDNEENEDILEDIVLTLTLFEDREMIEERLKTYAHLFDDKVMKQLKRRRYTGWGRLSRKLINGIRDKQSGKTILDFLKSDGFANRNFMQLIHDDSLTFKEDIQKAQVSGQGDSLHEHIANLAGSPAIKKGILQTVKVVDELVKVMGRHKPENIVIEMARENQTTQKGQKNSRERMKRIEEGIKELGSQILKEHPVENTQLQNEKLYLYYLQNGRDMYVDQELDINRLSDYDVDHIVPQSFLKDDSIDNKVLTRSDKARGKSDNVPSEEVVKKMKNYWRQLLNAKLITQRKFDNLTKAERGGLSELDKAGFIKRQLVETRQITKHVAQILDSRMNTKYDENDKLIREVKVITLKSKLVSDFRKDFQFYKVREINNYHHAHDAYLNAVVGTALIKKYPKLESEFVYGDYKVYDVRKMIAKSEQEIGKATAKYFFYSNIMNFFKTEITLANGEIRKRPLIETNGETGEIVWDKGRDFATVRKVLSMPQVNIVKKTEVQTGGFSKESILPKRNSDKLIARKKDWDPKKYGGFDSPTVAYSVLVVAKVEKGKSKKLKSVKELLGITIMERSSFEKNPIDFLEAKGYKEVKKDLIIKLPKYSLFELENGRKRMLASAGELQKGNELALPSKYVNFLYLASHYEKLKGSPEDNEQKQLFVEQHKHYLDEIIEQISEFSKRVILADANLDKVLSAYNKHRDKPIREQAENIIHLFTLTNLGAPAAFKYFDTTIDRKRYTSTKEVLDATLIHQSITGLYETRIDLSQLGGDGGAEAAAKEAAAKEAAAKEAAAKALEAEAAAKEAAAKEAAAKEAAAKAGGMDLLKPLTVERKGVKIKGYWNSQADITCVPKDLLQGEEPVRQQNVTTIHGTQEGDVYYVNLKIDGRRINTEVIGTTLDYAIITPGDVPWILKKPLELTIKLDLEEQQGTLLNNSILSKKGKEELKQLFEKYSALWQSWENQVGHRRIRPHKIATGTVKPTPQKQYHINPKAKPDIQIVINDLLKQGVLIQKESTMNTPVYPVPKPNGRWRMVLDYRAVNKVTPLIAVQNQHSYGILGSLFKGRYKTTIDLSNGFWAHPIVPEDYWITAFTWQGKQYCWTVLPQGFLNSPGLFNGDVVDLLQGIPNVEVYVDDVYISHDSEKEHLEYLDILFNRLKEAGYIISLKKSNIANSIVDFLGFQITNEGRGLTDTFKEKLENITAPTTLKQLQSILGLLNFARNFIPDFTELIAPLYALIPKSPKNYVPWQIEHSTTLETLITKLNGAEYLQGRKGDKTLIMKVNASYTTGYIRYYNEGEKKPISYVSIVFSKTELKFTELEKLLTTVHKGLLKALDLSMGQNIHVYSPIVSMQNIQKTPQTAKKALASRWLSWLSYLEDPRIRFFYDPQMPALKDLPAVDTGKDNKKHPSNFQHIFYTDGSAITSPTKEGHLNAGMGIVYFINKDGNLQKQQEWSISLGNHTAQFAEIAAFEFALKKCLPLGGNILVVTDSNYVAKAYNEELDVWASNGFVNNRKKPLKHISKWKSVADLKRLRPDVVVTHEPGHQKLDSSPHAYGNNLADQLATQASFKVHAGKRTADGSEFEKRTADGSEFESPKKKAKVE

SEQ ID NO: 1116 - protein, 2182 aa, synthetic construct
MPAAKRVKLDGGDKKYSIGLDIGTNSVGWAVITDEYKVPSKKFKVLGNTDRHSIKKNLIGALLFDSGETAEATRLKRTARRRYTRRKNRICYLQEIFSNEMAKVDDSFFHRLEESFLVEEDKKHERHPIFGNIVDEVAYHEKYPTIYHLRKKLVDSTDKADLRLIYLALAHMIKFRGHFLIEGDLNPDNSDVDKLFIQLVQTYNQLFEENPINASGVDAKAILSARLSKSRRLENLIAQLPGEKKNGLFGNLIALSLGLTPNFKSNFDLAEDAKLQLSKDTYDDDLDNLLAQIGDQYADLFLAAKNLSDAILLSDILRVNTEITKAPLSASMIKRYDEHHQDLTLLKALVRQQLPEKYKEIFFDQSKNGYAGYIDGGASQEEFYKFIKPILEKMDGTEELLVKLNREDLLRKQRTFDNGSIPHQIHLGELHAILRRQEDFYPFLKDNREKIEKILTFRIPYYVGPLARGNSRFAWMTRKSEETITPWNFEEVVDKGASAQSFIERMTNFDKNLPNEKVLPKHSLLYEYFTVYNELTKVKYVTEGMRKPAFLSGEQKKAIVDLLFKTNRKVTVKQLKEDYFKKIECFDSVEISGVEDRFNASLGTYHDLLKIIKDKDFLDNEENEDILEDIVLTLTLFEDREMIEERLKTYAHLFDDKVMKQLKRRRYTGWGRLSRKLINGIRDKQSGKTILDFLKSDGFANRNFMQLIHDDSLTFKEDIQKAQVSGQGDSLHEHIANLAGSPAIKKGILQTVKVVDELVKVMGRHKPENIVIEMARENQTTQKGQKNSRERMKRIEEGIKELGSQILKEHPVENTQLQNEKLYLYYLQNGRDMYVDQELDINRLSDYDVDHIVPQSFLKDDSIDNKVLTRSDKARGKSDNVPSEEVVKKMKNYWRQLLNAKLITQRKFDNLTKAERGGLSELDKAGFIKRQLVETRQITKHVAQILDSRMNTKYDENDKLIREVKVITLKSKLVSDFRKDFQFYKVREINNYHHAHDAYLNAVVGTALIKKYPKLESEFVYGDYKVYDVRKMIAKSEQEIGKATAKYFFYSNIMNFFKTEITLANGEIRKRPLIETNGETGEIVWDKGRDFATVRKVLSMPQVNIVKKTEVQTGGFSKESILPKRNSDKLIARKKDWDPKKYGGFDSPTVAYSVLVVAKVEKGKSKKLKSVKELLGITIMERSSFEKNPIDFLEAKGYKEVKKDLIIKLPKYSLFELENGRKRMLASAGELQKGNELALPSKYVNFLYLASHYEKLKGSPEDNEQKQLFVEQHKHYLDEIIEQISEFSKRVILADANLDKVLSAYNKHRDKPIREQAENIIHLFTLTNLGAPAAFKYFDTTIDRKRYTSTKEVLDATLIHQSITGLYETRIDLSQLGGDGGEAAAKEAAAKEAAAKEAAAKGGMDLLKPLTVERKGVKIKGYWNSQADITCVPKDLLQGEEPVRQQNVTTIHGTQEGDVYYVNLKIDGRRINTEVIGTTLDYAIITPGDVPWILKKPLELTIKLDLEEQQGTLLNNSILSKKGKEELKQLFEKYSALWQSWENQVGHRRIRPHKIATGTVKPTPQKQYHINPKAKPDIQIVINDLLKQGVLIQKESTMNTPVYPVPKPNGRWRMVLDYRAVNKVTPLIAVQNQHSYGILGSLFKGRYKTTIDLSNGFWAHPIVPEDYWITAFTWQGKQYCWTVLPQGFLNSPGLFNGDVVDLLQGIPNVEVYVDDVYISHDSEKEHLEYLDILFNRLKEAGYIISLKKSNIANSIVDFLGFQITNEGRGLTDTFKEKLENITAPTTLKQLQSILGLLNFARNFIPDFTELIAPLYALIPKSPKNYVPWQIEHSTTLETLITKLNGAEYLQGRKGDKTLIMKVNASYTTGYIRYYNEGEKKPISYVSIVFSKTELKFTELEKLLTTVHKGLLKALDLSMGQNIHVYSPIVSMQNIQKTPQTAKKALASRWLSWLSYLEDPRIRFFYDPQMPALKDLPAVDTGKDNKKHPSNFQHIFYTDGSAITSPTKEGHLNAGMGIVYFINKDGNLQKQQEWSISLGNHTAQFAEIAAFEFALKKCLPLGGNILVVTDSNYVAKAYNEELDVWASNGFVNNRKKPLKHISKWKSVADLKRLRPDVVVTHEPGHQKLDSSPHAYGNNLADQLATQASFKVHAGKRTADGSEFEKRTADGSEFESPKKKAKVE

SEQ ID NO: 1117 - protein, 2171 aa, synthetic construct
MPAAKRVKLDGGDKKYSIGLDIGTNSVGWAVITDEYKVPSKKFKVLGNTDRHSIKKNLIGALLFDSGETAEATRLKRTARRRYTRRKNRICYLQEIFSNEMAKVDDSFFHRLEESFLVEEDKKHERHPIFGNIVDEVAYHEKYPTIYHLRKKLVDSTDKADLRLIYLALAHMIKFRGHFLIEGDLNPDNSDVDKLFIQLVQTYNQLFEENPINASGVDAKAILSARLSKSRRLENLIAQLPGEKKNGLFGNLIALSLGLTPNFKSNFDLAEDAKLQLSKDTYDDDLDNLLAQIGDQYADLFLAAKNLSDAILLSDILRVNTEITKAPLSASMIKRYDEHHQDLTLLKALVRQQLPEKYKEIFFDQSKNGYAGYIDGGASQEEFYKFIKPILEKMDGTEELLVKLNREDLLRKQRTFDNGSIPHQIHLGELHAILRRQEDFYPFLKDNREKIEKILTFRIPYYVGPLARGNSRFAWMTRKSEETITPWNFEEVVDKGASAQSFIERMTNFDKNLPNEKVLPKHSLLYEYFTVYNELTKVKYVTEGMRKPAFLSGEQKKAIVDLLFKTNRKVTVKQLKEDYFKKIECFDSVEISGVEDRFNASLGTYHDLLKIIKDKDFLDNEENEDILEDIVLTLTLFEDREMIEERLKTYAHLFDDKVMKQLKRRRYTGWGRLSRKLINGIRDKQSGKTILDFLKSDGFANRNFMQLIHDDSLTFKEDIQKAQVSGQGDSLHEHIANLAGSPAIKKGILQTVKVVDELVKVMGRHKPENIVIEMARENQTTQKGQKNSRERMKRIEEGIKELGSQILKEHPVENTQLQNEKLYLYYLQNGRDMYVDQELDINRLSDYDVDHIVPQSFLKDDSIDNKVLTRSDKARGKSDNVPSEEVVKKMKNYWRQLLNAKLITQRKFDNLTKAERGGLSELDKAGFIKRQLVETRQITKHVAQILDSRMNTKYDENDKLIREVKVITLKSKLVSDFRKDFQFYKVREINNYHHAHDAYLNAVVGTALIKKYPKLESEFVYGDYKVYDVRKMIAKSEQEIGKATAKYFFYSNIMNFFKTEITLANGEIRKRPLIETNGETGEIVWDKGRDFATVRKVLSMPQVNIVKKTEVQTGGFSKESILPKRNSDKLIARKKDWDPKKYGGFDSPTVAYSVLVVAKVEKGKSKKLKSVKELLGITIMERSSFEKNPIDFLEAKGYKEVKKDLIIKLPKYSLFELENGRKRMLASAGELQKGNELALPSKYVNFLYLASHYEKLKGSPEDNEQKQLFVEQHKHYLDEIIEQISEFSKRVILADANLDKVLSAYNKHRDKPIREQAENIIHLFTLTNLGAPAAFKYFDTTIDRKRYTSTKEVLDATLIHQSITGLYETRIDLSQLGGDGGGSSPAPGGGGGMDLLKPLTVERKGVKIKGYWNSQADITCVPKDLLQGEEPVRQQNVTTIHGTQEGDVYYVNLKIDGRRINTEVIGTTLDYAIITPGDVPWILKKPLELTIKLDLEEQQGTLLNNSILSKKGKEELKQLFEKYSALWQSWENQVGHRRIRPHKIATGTVKPTPQKQYHINPKAKPDIQIVINDLLKQGVLIQKESTMNTPVYPVPKPNGRWRMVLDYRAVNKVTPLIAVQNQHSYGILGSLFKGRYKTTIDLSNGFWAHPIVPEDYWITAFTWQGKQYCWTVLPQGFLNSPGLFNGDVVDLLQGIPNVEVYVDDVYISHDSEKEHLEYLDILFNRLKEAGYIISLKKSNIANSIVDFLGFQITNEGRGLTDTFKEKLENITAPTTLKQLQSILGLLNFARNFIPDFTELIAPLYALIPKSPKNYVPWQIEHSTTLETLITKLNGAEYLQGRKGDKTLIMKVNASYTTGYIRYYNEGEKKPISYVSIVFSKTELKFTELEKLLTTVHKGLLKALDLSMGQNIHVYSPIVSMQNIQKTPQTAKKALASRWLSWLSYLEDPRIRFFYDPQMPALKDLPAVDTGKDNKKHPSNFQHIFYTDGSAITSPTKEGHLNAGMGIVYFINKDGNLQKQQEWSISLGNHTAQFAEIAAFEFALKKCLPLGGNILVVTDSNYVAKAYNEELDVWASNGFVNNRKKPLKHISKWKSVADLKRLRPDVVVTHEPGHQKLDSSPHAYGNNLADQLATQASFKVHAGKRTADGSEFEKRTADGSEFESPKKKAKVE

SEQ ID NO: 1118 - protein, 2173 aa, synthetic construct
MPAAKRVKLDGGDKKYSIGLDIGTNSVGWAVITDEYKVPSKKFKVLGNTDRHSIKKNLIGALLFDSGETAEATRLKRTARRRYTRRKNRICYLQEIFSNEMAKVDDSFFHRLEESFLVEEDKKHERHPIFGNIVDEVAYHEKYPTIYHLRKKLVDSTDKADLRLIYLALAHMIKFRGHFLIEGDLNPDNSDVDKLFIQLVQTYNQLFEENPINASGVDAKAILSARLSKSRRLENLIAQLPGEKKNGLFGNLIALSLGLTPNFKSNFDLAEDAKLQLSKDTYDDDLDNLLAQIGDQYADLFLAAKNLSDAILLSDILRVNTEITKAPLSASMIKRYDEHHQDLTLLKALVRQQLPEKYKEIFFDQSKNGYAGYIDGGASQEEFYKFIKPILEKMDGTEELLVKLNREDLLRKQRTFDNGSIPHQIHLGELHAILRRQEDFYPFLKDNREKIEKILTFRIPYYVGPLARGNSRFAWMTRKSEETITPWNFEEVVDKGASAQSFIERMTNFDKNLPNEKVLPKHSLLYEYFTVYNELTKVKYVTEGMRKPAFLSGEQKKAIVDLLFKTNRKVTVKQLKEDYFKKIECFDSVEISGVEDRFNASLGTYHDLLKIIKDKDFLDNEENEDILEDIVLTLTLFEDREMIEERLKTYAHLFDDKVMKQLKRRRYTGWGRLSRKLINGIRDKQSGKTILDFLKSDGFANRNFMQLIHDDSLTFKEDIQKAQVSGQGDSLHEHIANLAGSPAIKKGILQTVKVVDELVKVMGRHKPENIVIEMARENQTTQKGQKNSRERMKRIEEGIKELGSQILKEHPVENTQLQNEKLYLYYLQNGRDMYVDQELDINRLSDYDVDHIVPQSFLKDDSIDNKVLTRSDKARGKSDNVPSEEVVKKMKNYWRQLLNAKLITQRKFDNLTKAERGGLSELDKAGFIKRQLVETRQITKHVAQILDSRMNTKYDENDKLIREVKVITLKSKLVSDFRKDFQFYKVREINNYHHAHDAYLNAVVGTALIKKYPKLESEFVYGDYKVYDVRKMIAKSEQEIGKATAKYFFYSNIMNFFKTEITLANGEIRKRPLIETNGETGEIVWDKGRDFATVRKVLSMPQVNIVKKTEVQTGGFSKESILPKRNSDKLIARKKDWDPKKYGGFDSPTVAYSVLVVAKVEKGKSKKLKSVKELLGITIMERSSFEKNPIDFLEAKGYKEVKKDLIIKLPKYSLFELENGRKRMLASAGELQKGNELALPSKYVNFLYLASHYEKLKGSPEDNEQKQLFVEQHKHYLDEIIEQISEFSKRVILADANLDKVLSAYNKHRDKPIREQAENIIHLFTLTNLGAPAAFKYFDTTIDRKRYTSTKEVLDATLIHQSITGLYETRIDLSQLGGDGGPAPEAAAKGGGGGMDLLKPLTVERKGVKIKGYWNSQADITCVPKDLLQGEEPVRQQNVTTIHGTQEGDVYYVNLKIDGRRINTEVIGTTLDYAIITPGDVPWILKKPLELTIKLDLEEQQGTLLNNSILSKKGKEELKQLFEKYSALWQSWENQVGHRRIRPHKIATGTVKPTPQKQYHINPKAKPDIQIVINDLLKQGVLIQKESTMNTPVYPVPKPNGRWRMVLDYRAVNKVTPLIAVQNQHSYGILGSLFKGRYKTTIDLSNGFWAHPIVPEDYWITAFTWQGKQYCWTVLPQGFLNSPGLFNGDVVDLLQGIPNVEVYVDDVYISHDSEKEHLEYLDILFNRLKEAGYIISLKKSNIANSIVDFLGFQITNEGRGLTDTFKEKLENITAPTTLKQLQSILGLLNFARNFIPDFTELIAPLYALIPKSPKNYVPWQIEHSTTLETLITKLNGAEYLQGRKGDKTLIMKVNASYTTGYIRYYNEGEKKPISYVSIVFSKTELKFTELEKLLTTVHKGLLKALDLSMGQNIHVYSPIVSMQNIQKTPQTAKKALASRWLSWLSYLEDPRIRFFYDPQMPALKDLPAVDTGKDNKKHPSNFQHIFYTDGSAITSPTKEGHLNAGMGIVYFINKDGNLQKQQEWSISLGNHTAQFAEIAAFEFALKKCLPLGGNILVVTDSNYVAKAYNEELDVWASNGFVNNRKKPLKHISKWKSVADLKRLRPDVVVTHEPGHQKLDSSPHAYGNNLADQLATQASFKVHAGKRTADGSEFEKRTADGSEFESPKKKAKVE

SEQ ID NO: 1119 - protein, 2182 aa, synthetic construct
MPAAKRVKLDGGDKKYSIGLDIGTNSVGWAVITDEYKVPSKKFKVLGNTDRHSIKKNLIGALLFDSGETAEATRLKRTARRRYTRRKNRICYLQEIFSNEMAKVDDSFFHRLEESFLVEEDKKHERHPIFGNIVDEVAYHEKYPTIYHLRKKLVDSTDKADLRLIYLALAHMIKFRGHFLIEGDLNPDNSDVDKLFIQLVQTYNQLFEENPINASGVDAKAILSARLSKSRRLENLIAQLPGEKKNGLFGNLIALSLGLTPNFKSNFDLAEDAKLQLSKDTYDDDLDNLLAQIGDQYADLFLAAKNLSDAILLSDILRVNTEITKAPLSASMIKRYDEHHQDLTLLKALVRQQLPEKYKEIFFDQSKNGYAGYIDGGASQEEFYKFIKPILEKMDGTEELLVKLNREDLLRKQRTFDNGSIPHQIHLGELHAILRRQEDFYPFLKDNREKIEKILTFRIPYYVGPLARGNSRFAWMTRKSEETITPWNFEEVVDKGASAQSFIERMTNFDKNLPNEKVLPKHSLLYEYFTVYNELTKVKYVTEGMRKPAFLSGEQKKAIVDLLFKTNRKVTVKQLKEDYFKKIECFDSVEISGVEDRFNASLGTYHDLLKIIKDKDFLDNEENEDILEDIVLTLTLFEDREMIEERLKTYAHLFDDKVMKQLKRRRYTGWGRLSRKLINGIRDKQSGKTILDFLKSDGFANRNFMQLIHDDSLTFKEDIQKAQVSGQGDSLHEHIANLAGSPAIKKGILQTVKVVDELVKVMGRHKPENIVIEMARENQTTQKGQKNSRERMKRIEEGIKELGSQILKEHPVENTQLQNEKLYLYYLQNGRDMYVDQELDINRLSDYDVDHIVPQSFLKDDSIDNKVLTRSDKARGKSDNVPSEEVVKKMKNYWRQLLNAKLITQRKFDNLTKAERGGLSELDKAGFIKRQLVETRQITKHVAQILDSRMNTKYDENDKLIREVKVITLKSKLVSDFRKDFQFYKVREINNYHHAHDAYLNAVVGTALIKKYPKLESEFVYGDYKVYDVRKMIAKSEQEIGKATAKYFFYSNIMNFFKTEITLANGEIRKRPLIETNGETGEIVWDKGRDFATVRKVLSMPQVNIVKKTEVQTGGFSKESILPKRNSDKLIARKKDWDPKKYGGFDSPTVAYSVLVVAKVEKGKSKKLKSVKELLGITIMERSSFEKNPIDFLEAKGYKEVKKDLIIKLPKYSLFELENGRKRMLASAGELQKGNELALPSKYVNFLYLASHYEKLKGSPEDNEQKQLFVEQHKHYLDEIIEQISEFSKRVILADANLDKVLSAYNKHRDKPIREQAENIIHLFTLTNLGAPAAFKYFDTTIDRKRYTSTKEVLDATLIHQSITGLYETRIDLSQLGGDGGGGGGSGGGGSGGGGSGGGGSGGMDLLKPLTVERKGVKIKGYWNSQADITCVPKDLLQGEEPVRQQNVTTIHGTQEGDVYYVNLKIDGRRINTEVIGTTLDYAIITPGDVPWILKKPLELTIKLDLEEQQGTLLNNSILSKKGKEELKQLFEKYSALWQSWENQVGHRRIRPHKIATGTVKPTPQKQYHINPKAKPDIQIVINDLLKQGVLIQKESTMNTPVYPVPKPNGRWRMVLDYRAVNKVTPLIAVQNQHSYGILGSLFKGRYKTTIDLSNGFWAHPIVPEDYWITAFTWQGKQYCWTVLPQGFLNSPGLFNGDVVDLLQGIPNVEVYVDDVYISHDSEKEHLEYLDILFNRLKEAGYIISLKKSNIANSIVDFLGFQITNEGRGLTDTFKEKLENITAPTTLKQLQSILGLLNFARNFIPDFTELIAPLYALIPKSPKNYVPWQIEHSTTLETLITKLNGAEYLQGRKGDKTLIMKVNASYTTGYIRYYNEGEKKPISYVSIVFSKTELKFTELEKLLTTVHKGLLKALDLSMGQNIHVYSPIVSMQNIQKTPQTAKKALASRWLSWLSYLEDPRIRFFYDPQMPALKDLPAVDTGKDNKKHPSNFQHIFYTDGSAITSPTKEGHLNAGMGIVYFINKDGNLQKQQEWSISLGNHTAQFAEIAAFEFALKKCLPLGGNILVVTDSNYVAKAYNEELDVWASNGFVNNRKKPLKHISKWKSVADLKRLRPDVVVTHEPGHQKLDSSPHAYGNNLADQLATQASFKVHAGKRTADGSEFEKRTADGSEFESPKKKAKVE

SEQ ID NO: 1120 - protein, 2171 aa, synthetic construct
MPAAKRVKLDGGDKKYSIGLDIGTNSVGWAVITDEYKVPSKKFKVLGNTDRHSIKKNLIGALLFDSGETAEATRLKRTARRRYTRRKNRICYLQEIFSNEMAKVDDSFFHRLEESFLVEEDKKHERHPIFGNIVDEVAYHEKYPTIYHLRKKLVDSTDKADLRLIYLALAHMIKFRGHFLIEGDLNPDNSDVDKLFIQLVQTYNQLFEENPINASGVDAKAILSARLSKSRRLENLIAQLPGEKKNGLFGNLIALSLGLTPNFKSNFDLAEDAKLQLSKDTYDDDLDNLLAQIGDQYADLFLAAKNLSDAILLSDILRVNTEITKAPLSASMIKRYDEHHQDLTLLKALVRQQLPEKYKEIFFDQSKNGYAGYIDGGASQEEFYKFIKPILEKMDGTEELLVKLNREDLLRKQRTFDNGSIPHQIHLGELHAILRRQEDFYPFLKDNREKIEKILTFRIPYYVGPLARGNSRFAWMTRKSEETITPWNFEEVVDKGASAQSFIERMTNFDKNLPNEKVLPKHSLLYEYFTVYNELTKVKYVTEGMRKPAFLSGEQKKAIVDLLFKTNRKVTVKQLKEDYFKKIECFDSVEISGVEDRFNASLGTYHDLLKIIKDKDFLDNEENEDILEDIVLTLTLFEDREMIEERLKTYAHLFDDKVMKQLKRRRYTGWGRLSRKLINGIRDKQSGKTILDFLKSDGFANRNFMQLIHDDSLTFKEDIQKAQVSGQGDSLHEHIANLAGSPAIKKGILQTVKVVDELVKVMGRHKPENIVIEMARENQTTQKGQKNSRERMKRIEEGIKELGSQILKEHPVENTQLQNEKLYLYYLQNGRDMYVDQELDINRLSDYDVDHIVPQSFLKDDSIDNKVLTRSDKARGKSDNVPSEEVVKKMKNYWRQLLNAKLITQRKFDNLTKAERGGLSELDKAGFIKRQLVETRQITKHVAQILDSRMNTKYDENDKLIREVKVITLKSKLVSDFRKDFQFYKVREINNYHHAHDAYLNAVVGTALIKKYPKLESEFVYGDYKVYDVRKMIAKSEQEIGKATAKYFFYSNIMNFFKTEITLANGEIRKRPLIETNGETGEIVWDKGRDFATVRKVLSMPQVNIVKKTEVQTGGFSKESILPKRNSDKLIARKKDWDPKKYGGFDSPTVAYSVLVVAKVEKGKSKKLKSVKELLGITIMERSSFEKNPIDFLEAKGYKEVKKDLIIKLPKYSLFELENGRKRMLASAGELQKGNELALPSKYVNFLYLASHYEKLKGSPEDNEQKQLFVEQHKHYLDEIIEQISEFSKRVILADANLDKVLSAYNKHRDKPIREQAENIIHLFTLTNLGAPAAFKYFDTTIDRKRYTSTKEVLDATLIHQSITGLYETRIDLSQLGGDGGPAPGGSGSSGGMDLLKPLTVERKGVKIKGYWNSQADITCVPKDLLQGEEPVRQQNVTTIHGTQEGDVYYVNLKIDGRRINTEVIGTTLDYAIITPGDVPWILKKPLELTIKLDLEEQQGTLLNNSILSKKGKEELKQLFEKYSALWQSWENQVGHRRIRPHKIATGTVKPTPQKQYHINPKAKPDIQIVINDLLKQGVLIQKESTMNTPVYPVPKPNGRWRMVLDYRAVNKVTPLIAVQNQHSYGILGSLFKGRYKTTIDLSNGFWAHPIVPEDYWITAFTWQGKQYCWTVLPQGFLNSPGLFNGDVVDLLQGIPNVEVYVDDVYISHDSEKEHLEYLDILFNRLKEAGYIISLKKSNIANSIVDFLGFQITNEGRGLTDTFKEKLENITAPTTLKQLQSILGLLNFARNFIPDFTELIAPLYALIPKSPKNYVPWQIEHSTTLETLITKLNGAEYLQGRKGDKTLIMKVNASYTTGYIRYYNEGEKKPISYVSIVFSKTELKFTELEKLLTTVHKGLLKALDLSMGQNIHVYSPIVSMQNIQKTPQTAKKALASRWLSWLSYLEDPRIRFFYDPQMPALKDLPAVDTGKDNKKHPSNFQHIFYTDGSAITSPTKEGHLNAGMGIVYFINKDGNLQKQQEWSISLGNHTAQFAEIAAFEFALKKCLPLGGNILVVTDSNYVAKAYNEELDVWASNGFVNNRKKPLKHISKWKSVADLKRLRPDVVVTHEPGHQKLDSSPHAYGNNLADQLATQASFKVHAGKRTADGSEFEKRTADGSEFESPKKKAKVE

SEQ ID NO: 1121 - protein, 2173 aa, synthetic construct
MPAAKRVKLDGGDKKYSIGLDIGTNSVGWAVITDEYKVPSKKFKVLGNTDRHSIKKNLIGALLFDSGETAEATRLKRTARRRYTRRKNRICYLQEIFSNEMAKVDDSFFHRLEESFLVEEDKKHERHPIFGNIVDEVAYHEKYPTIYHLRKKLVDSTDKADLRLIYLALAHMIKFRGHFLIEGDLNPDNSDVDKLFIQLVQTYNQLFEENPINASGVDAKAILSARLSKSRRLENLIAQLPGEKKNGLFGNLIALSLGLTPNFKSNFDLAEDAKLQLSKDTYDDDLDNLLAQIGDQYADLFLAAKNLSDAILLSDILRVNTEITKAPLSASMIKRYDEHHQDLTLLKALVRQQLPEKYKEIFFDQSKNGYAGYIDGGASQEEFYKFIKPILEKMDGTEELLVKLNREDLLRKQRTFDNGSIPHQIHLGELHAILRRQEDFYPFLKDNREKIEKILTFRIPYYVGPLARGNSRFAWMTRKSEETITPWNFEEVVDKGASAQSFIERMTNFDKNLPNEKVLPKHSLLYEYFTVYNELTKVKYVTEGMRKPAFLSGEQKKAIVDLLFKTNRKVTVKQLKEDYFKKIECFDSVEISGVEDRFNASLGTYHDLLKIIKDKDFLDNEENEDILEDIVLTLTLFEDREMIEERLKTYAHLFDDKVMKQLKRRRYTGWGRLSRKLINGIRDKQSGKTILDFLKSDGFANRNFMQLIHDDSLTFKEDIQKAQVSGQGDSLHEHIANLAGSPAIKKGILQTVKVVDELVKVMGRHKPENIVIEMARENQTTQKGQKNSRERMKRIEEGIKELGSQILKEHPVENTQLQNEKLYLYYLQNGRDMYVDQELDINRLSDYDVDHIVPQSFLKDDSIDNKVLTRSDKARGKSDNVPSEEVVKKMKNYWRQLLNAKLITQRKFDNLTKAERGGLSELDKAGFIKRQLVETRQITKHVAQILDSRMNTKYDENDKLIREVKVITLKSKLVSDFRKDFQFYKVREINNYHHAHDAYLNAVVGTALIKKYPKLESEFVYGDYKVYDVRKMIAKSEQEIGKATAKYFFYSNIMNFFKTEITLANGEIRKRPLIETNGETGEIVWDKGRDFATVRKVLSMPQVNIVKKTEVQTGGFSKESILPKRNSDKLIARKKDWDPKKYGGFDSPTVAYSVLVVAKVEKGKSKKLKSVKELLGITIMERSSFEKNPIDFLEAKGYKEVKKDLIIKLPKYSLFELENGRKRMLASAGELQKGNELALPSKYVNFLYLASHYEKLKGSPEDNEQKQLFVEQHKHYLDEIIEQISEFSKRVILADANLDKVLSAYNKHRDKPIREQAENIIHLFTLTNLGAPAAFKYFDTTIDRKRYTSTKEVLDATLIHQSITGLYETRIDLSQLGGDGGEAAAKPAPGSSGGMDLLKPLTVERKGVKIKGYWNSQADITCVPKDLLQGEEPVRQQNVTTIHGTQEGDVYYVNLKIDGRRINTEVIGTTLDYAIITPGDVPWILKKPLELTIKLDLEEQQGTLLNNSILSKKGKEELKQLFEKYSALWQSWENQVGHRRIRPHKIATGTVKPTPQKQYHINPKAKPDIQIVINDLLKQGVLIQKESTMNTPVYPVPKPNGRWRMVLDYRAVNKVTPLIAVQNQHSYGILGSLFKGRYKTTIDLSNGFWAHPIVPEDYWITAFTWQGKQYCWTVLPQGFLNSPGLFNGDVVDLLQGIPNVEVYVDDVYISHDSEKEHLEYLDILFNRLKEAGYIISLKKSNIANSIVDFLGFQITNEGRGLTDTFKEKLENITAPTTLKQLQSILGLLNFARNFIPDFTELIAPLYALIPKSPKNYVPWQIEHSTTLETLITKLNGAEYLQGRKGDKTLIMKVNASYTTGYIRYYNEGEKKPISYVSIVFSKTELKFTELEKLLTTVHKGLLKALDLSMGQNIHVYSPIVSMQNIQKTPQTAKKALASRWLSWLSYLEDPRIRFFYDPQMPALKDLPAVDTGKDNKKHPSNFQHIFYTDGSAITSPTKEGHLNAGMGIVYFINKDGNLQKQQEWSISLGNHTAQFAEIAAFEFALKKCLPLGGNILVVTDSNYVAKAYNEELDVWASNGFVNNRKKPLKHISKWKSVADLKRLRPDVVVTHEPGHQKLDSSPHAYGNNLADQLATQASFKVHAGKRTADGSEFEKRTADGSEFESPKKKAKVE

SEQ ID NO: 1122 - protein, 2172 aa, synthetic construct
MPAAKRVKLDGGDKKYSIGLDIGTNSVGWAVITDEYKVPSKKFKVLGNTDRHSIKKNLIGALLFDSGETAEATRLKRTARRRYTRRKNRICYLQEIFSNEMAKVDDSFFHRLEESFLVEEDKKHERHPIFGNIVDEVAYHEKYPTIYHLRKKLVDSTDKADLRLIYLALAHMIKFRGHFLIEGDLNPDNSDVDKLFIQLVQTYNQLFEENPINASGVDAKAILSARLSKSRRLENLIAQLPGEKKNGLFGNLIALSLGLTPNFKSNFDLAEDAKLQLSKDTYDDDLDNLLAQIGDQYADLFLAAKNLSDAILLSDILRVNTEITKAPLSASMIKRYDEHHQDLTLLKALVRQQLPEKYKEIFFDQSKNGYAGYIDGGASQEEFYKFIKPILEKMDGTEELLVKLNREDLLRKQRTFDNGSIPHQIHLGELHAILRRQEDFYPFLKDNREKIEKILTFRIPYYVGPLARGNSRFAWMTRKSEETITPWNFEEVVDKGASAQSFIERMTNFDKNLPNEKVLPKHSLLYEYFTVYNELTKVKYVTEGMRKPAFLSGEQKKAIVDLLFKTNRKVTVKQLKEDYFKKIECFDSVEISGVEDRFNASLGTYHDLLKIIKDKDFLDNEENEDILEDIVLTLTLFEDREMIEERLKTYAHLFDDKVMKQLKRRRYTGWGRLSRKLINGIRDKQSGKTILDFLKSDGFANRNFMQLIHDDSLTFKEDIQKAQVSGQGDSLHEHIANLAGSPAIKKGILQTVKVVDELVKVMGRHKPENIVIEMARENQTTQKGQKNSRERMKRIEEGIKELGSQILKEHPVENTQLQNEKLYLYYLQNGRDMYVDQELDINRLSDYDVDHIVPQSFLKDDSIDNKVLTRSDKARGKSDNVPSEEVVKKMKNYWRQLLNAKLITQRKFDNLTKAERGGLSELDKAGFIKRQLVETRQITKHVAQILDSRMNTKYDENDKLIREVKVITLKSKLVSDFRKDFQFYKVREINNYHHAHDAYLNAVVGTALIKKYPKLESEFVYGDYKVYDVRKMIAKSEQEIGKATAKYFFYSNIMNFFKTEITLANGEIRKRPLIETNGETGEIVWDKGRDFATVRKVLSMPQVNIVKKTEVQTGGFSKESILPKRNSDKLIARKKDWDPKKYGGFDSPTVAYSVLVVAKVEKGKSKKLKSVKELLGITIMERSSFEKNPIDFLEAKGYKEVKKDLIIKLPKYSLFELENGRKRMLASAGELQKGNELALPSKYVNFLYLASHYEKLKGSPEDNEQKQLFVEQHKHYLDEIIEQISEFSKRVILADANLDKVLSAYNKHRDKPIREQAENIIHLFTLTNLGAPAAFKYFDTTIDRKRYTSTKEVLDATLIHQSITGLYETRIDLSQLGGDGGGGGGSGGGGSGGMDLLKPLTVERKGVKIKGYWNSQADITCVPKDLLQGEEPVRQQNVTTIHGTQEGDVYYVNLKIDGRRINTEVIGTTLDYAIITPGDVPWILKKPLELTIKLDLEEQQGTLLNNSILSKKGKEELKQLFEKYSALWQSWENQVGHRRIRPHKIATGTVKPTPQKQYHINPKAKPDIQIVINDLLKQGVLIQKESTMNTPVYPVPKPNGRWRMVLDYRAVNKVTPLIAVQNQHSYGILGSLFKGRYKTTIDLSNGFWAHPIVPEDYWITAFTWQGKQYCWTVLPQGFLNSPGLFNGDVVDLLQGIPNVEVYVDDVYISHDSEKEHLEYLDILFNRLKEAGYIISLKKSNIANSIVDFLGFQITNEGRGLTDTFKEKLENITAPTTLKQLQSILGLLNFARNFIPDFTELIAPLYALIPKSPKNYVPWQIEHSTTLETLITKLNGAEYLQGRKGDKTLIMKVNASYTTGYIRYYNEGEKKPISYVSIVFSKTELKFTELEKLLTTVHKGLLKALDLSMGQNIHVYSPIVSMQNIQKTPQTAKKALASRWLSWLSYLEDPRIRFFYDPQMPALKDLPAVDTGKDNKKHPSNFQHIFYTDGSAITSPTKEGHLNAGMGIVYFINKDGNLQKQQEWSISLGNHTAQFAEIAAFEFALKKCLPLGGNILVVTDSNYVAKAYNEELDVWASNGFVNNRKKPLKHISKWKSVADLKRLRPDVVVTHEPGHQKLDSSPHAYGNNLADQLATQASFKVHAGKRTADGSEFEKRTADGSEFESPKKKAKVE

SEQ ID NO: 1123 - protein, 2173 aa, synthetic construct
MPAAKRVKLDGGDKKYSIGLDIGTNSVGWAVITDEYKVPSKKFKVLGNTDRHSIKKNLIGALLFDSGETAEATRLKRTARRRYTRRKNRICYLQEIFSNEMAKVDDSFFHRLEESFLVEEDKKHERHPIFGNIVDEVAYHEKYPTIYHLRKKLVDSTDKADLRLIYLALAHMIKFRGHFLIEGDLNPDNSDVDKLFIQLVQTYNQLFEENPINASGVDAKAILSARLSKSRRLENLIAQLPGEKKNGLFGNLIALSLGLTPNFKSNFDLAEDAKLQLSKDTYDDDLDNLLAQIGDQYADLFLAAKNLSDAILLSDILRVNTEITKAPLSASMIKRYDEHHQDLTLLKALVRQQLPEKYKEIFFDQSKNGYAGYIDGGASQEEFYKFIKPILEKMDGTEELLVKLNREDLLRKQRTFDNGSIPHQIHLGELHAILRRQEDFYPFLKDNREKIEKILTFRIPYYVGPLARGNSRFAWMTRKSEETITPWNFEEVVDKGASAQSFIERMTNFDKNLPNEKVLPKHSLLYEYFTVYNELTKVKYVTEGMRKPAFLSGEQKKAIVDLLFKTNRKVTVKQLKEDYFKKIECFDSVEISGVEDRFNASLGTYHDLLKIIKDKDFLDNEENEDILEDIVLTLTLFEDREMIEERLKTYAHLFDDKVMKQLKRRRYTGWGRLSRKLINGIRDKQSGKTILDFLKSDGFANRNFMQLIHDDSLTFKEDIQKAQVSGQGDSLHEHIANLAGSPAIKKGILQTVKVVDELVKVMGRHKPENIVIEMARENQTTQKGQKNSRERMKRIEEGIKELGSQILKEHPVENTQLQNEKLYLYYLQNGRDMYVDQELDINRLSDYDVDHIVPQSFLKDDSIDNKVLTRSDKARGKSDNVPSEEVVKKMKNYWRQLLNAKLITQRKFDNLTKAERGGLSELDKAGFIKRQLVETRQITKHVAQILDSRMNTKYDENDKLIREVKVITLKSKLVSDFRKDFQFYKVREINNYHHAHDAYLNAVVGTALIKKYPKLESEFVYGDYKVYDVRKMIAKSEQEIGKATAKYFFYSNIMNFFKTEITLANGEIRKRPLIETNGETGEIVWDKGRDFATVRKVLSMPQVNIVKKTEVQTGGFSKESILPKRNSDKLIARKKDWDPKKYGGFDSPTVAYSVLVVAKVEKGKSKKLKSVKELLGITIMERSSFEKNPIDFLEAKGYKEVKKDLIIKLPKYSLFELENGRKRMLASAGELQKGNELALPSKYVNFLYLASHYEKLKGSPEDNEQKQLFVEQHKHYLDEIIEQISEFSKRVILADANLDKVLSAYNKHRDKPIREQAENIIHLFTLTNLGAPAAFKYFDTTIDRKRYTSTKEVLDATLIHQSITGLYETRIDLSQLGGDGGGGSEAAAKPAPGGMDLLKPLTVERKGVKIKGYWNSQADITCVPKDLLQGEEPVRQQNVTTIHGTQEGDVYYVNLKIDGRRINTEVIGTTLDYAIITPGDVPWILKKPLELTIKLDLEEQQGTLLNNSILSKKGKEELKQLFEKYSALWQSWENQVGHRRIRPHKIATGTVKPTPQKQYHINPKAKPDIQIVINDLLKQGVLIQKESTMNTPVYPVPKPNGRWRMVLDYRAVNKVTPLIAVQNQHSYGILGSLFKGRYKTTIDLSNGFWAHPIVPEDYWITAFTWQGKQYCWTVLPQGFLNSPGLFNGDVVDLLQGIPNVEVYVDDVYISHDSEKEHLEYLDILFNRLKEAGYIISLKKSNIANSIVDFLGFQITNEGRGLTDTFKEKLENITAPTTLKQLQSILGLLNFARNFIPDFTELIAPLYALIPKSPKNYVPWQIEHSTTLETLITKLNGAEYLQGRKGDKTLIMKVNASYTTGYIRYYNEGEKKPISYVSIVFSKTELKFTELEKLLTTVHKGLLKALDLSMGQNIHVYSPIVSMQNIQKTPQTAKKALASRWLSWLSYLEDPRIRFFYDPQMPALKDLPAVDTGKDNKKHPSNFQHIFYTDGSAITSPTKEGHLNAGMGIVYFINKDGNLQKQQEWSISLGNHTAQFAEIAAFEFALKKCLPLGGNILVVTDSNYVAKAYNEELDVWASNGFVNNRKKPLKHISKWKSVADLKRLRPDVVVTHEPGHQKLDSSPHAYGNNLADQLATQASFKVHAGKRTADGSEFEKRTADGSEFESPKKKAKVE

SEQ ID NO: 1124 - protein, 2171 aa, synthetic construct
MPAAKRVKLDGGDKKYSIGLDIGTNSVGWAVITDEYKVPSKKFKVLGNTDRHSIKKNLIGALLFDSGETAEATRLKRTARRRYTRRKNRICYLQEIFSNEMAKVDDSFFHRLEESFLVEEDKKHERHPIFGNIVDEVAYHEKYPTIYHLRKKLVDSTDKADLRLIYLALAHMIKFRGHFLIEGDLNPDNSDVDKLFIQLVQTYNQLFEENPINASGVDAKAILSARLSKSRRLENLIAQLPGEKKNGLFGNLIALSLGLTPNFKSNFDLAEDAKLQLSKDTYDDDLDNLLAQIGDQYADLFLAAKNLSDAILLSDILRVNTEITKAPLSASMIKRYDEHHQDLTLLKALVRQQLPEKYKEIFFDQSKNGYAGYIDGGASQEEFYKFIKPILEKMDGTEELLVKLNREDLLRKQRTFDNGSIPHQIHLGELHAILRRQEDFYPFLKDNREKIEKILTFRIPYYVGPLARGNSRFAWMTRKSEETITPWNFEEVVDKGASAQSFIERMTNFDKNLPNEKVLPKHSLLYEYFTVYNELTKVKYVTEGMRKPAFLSGEQKKAIVDLLFKTNRKVTVKQLKEDYFKKIECFDSVEISGVEDRFNASLGTYHDLLKIIKDKDFLDNEENEDILEDIVLTLTLFEDREMIEERLKTYAHLFDDKVMKQLKRRRYTGWGRLSRKLINGIRDKQSGKTILDFLKSDGFANRNFMQLIHDDSLTFKEDIQKAQVSGQGDSLHEHIANLAGSPAIKKGILQTVKVVDELVKVMGRHKPENIVIEMARENQTTQKGQKNSRERMKRIEEGIKELGSQILKEHPVENTQLQNEKLYLYYLQNGRDMYVDQELDINRLSDYDVDHIVPQSFLKDDSIDNKVLTRSDKARGKSDNVPSEEVVKKMKNYWRQLLNAKLITQRKFDNLTKAERGGLSELDKAGFIKRQLVETRQITKHVAQILDSRMNTKYDENDKLIREVKVITLKSKLVSDFRKDFQFYKVREINNYHHAHDAYLNAVVGTALIKKYPKLESEFVYGDYKVYDVRKMIAKSEQEIGKATAKYFFYSNIMNFFKTEITLANGEIRKRPLIETNGETGEIVWDKGRDFATVRKVLSMPQVNIVKKTEVQTGGFSKESILPKRNSDKLIARKKDWDPKKYGGFDSPTVAYSVLVVAKVEKGKSKKLKSVKELLGITIMERSSFEKNPIDFLEAKGYKEVKKDLIIKLPKYSLFELENGRKRMLASAGELQKGNELALPSKYVNFLYLASHYEKLKGSPEDNEQKQLFVEQHKHYLDEIIEQISEFSKRVILADANLDKVLSAYNKHRDKPIREQAENIIHLFTLTNLGAPAAFKYFDTTIDRKRYTSTKEVLDATLIHQSITGLYETRIDLSQLGGDGGGGGGSSPAPGGMDLLKPLTVERKGVKIKGYWNSQADITCVPKDLLQGEEPVRQQNVTTIHGTQEGDVYYVNLKIDGRRINTEVIGTTLDYAIITPGDVPWILKKPLELTIKLDLEEQQGTLLNNSILSKKGKEELKQLFEKYSALWQSWENQVGHRRIRPHKIATGTVKPTPQKQYHINPKAKPDIQIVINDLLKQGVLIQKESTMNTPVYPVPKPNGRWRMVLDYRAVNKVTPLIAVQNQHSYGILGSLFKGRYKTTIDLSNGFWAHPIVPEDYWITAFTWQGKQYCWTVLPQGFLNSPGLFNGDVVDLLQGIPNVEVYVDDVYISHDSEKEHLEYLDILFNRLKEAGYIISLKKSNIANSIVDFLGFQITNEGRGLTDTFKEKLENITAPTTLKQLQSILGLLNFARNFIPDFTELIAPLYALIPKSPKNYVPWQIEHSTTLETLITKLNGAEYLQGRKGDKTLIMKVNASYTTGYIRYYNEGEKKPISYVSIVFSKTELKFTELEKLLTTVHKGLLKALDLSMGQNIHVYSPIVSMQNIQKTPQTAKKALASRWLSWLSYLEDPRIRFFYDPQMPALKDLPAVDTGKDNKKHPSNFQHIFYTDGSAITSPTKEGHLNAGMGIVYFINKDGNLQKQQEWSISLGNHTAQFAEIAAFEFALKKCLPLGGNILVVTDSNYVAKAYNEELDVWASNGFVNNRKKPLKHISKWKSVADLKRLRPDVVVTHEPGHQKLDSSPHAYGNNLADQLATQASFKVHAGKRTADGSEFEKRTADGSEFESPKKKAKVE

SEQ ID NO: 1125 - protein, 2177 aa, synthetic construct
MPAAKRVKLDGGDKKYSIGLDIGTNSVGWAVITDEYKVPSKKFKVLGNTDRHSIKKNLIGALLFDSGETAEATRLKRTARRRYTRRKNRICYLQEIFSNEMAKVDDSFFHRLEESFLVEEDKKHERHPIFGNIVDEVAYHEKYPTIYHLRKKLVDSTDKADLRLIYLALAHMIKFRGHFLIEGDLNPDNSDVDKLFIQLVQTYNQLFEENPINASGVDAKAILSARLSKSRRLENLIAQLPGEKKNGLFGNLIALSLGLTPNFKSNFDLAEDAKLQLSKDTYDDDLDNLLAQIGDQYADLFLAAKNLSDAILLSDILRVNTEITKAPLSASMIKRYDEHHQDLTLLKALVRQQLPEKYKEIFFDQSKNGYAGYIDGGASQEEFYKFIKPILEKMDGTEELLVKLNREDLLRKQRTFDNGSIPHQIHLGELHAILRRQEDFYPFLKDNREKIEKILTFRIPYYVGPLARGNSRFAWMTRKSEETITPWNFEEVVDKGASAQSFIERMTNFDKNLPNEKVLPKHSLLYEYFTVYNELTKVKYVTEGMRKPAFLSGEQKKAIVDLLFKTNRKVTVKQLKEDYFKKIECFDSVEISGVEDRFNASLGTYHDLLKIIKDKDFLDNEENEDILEDIVLTLTLFEDREMIEERLKTYAHLFDDKVMKQLKRRRYTGWGRLSRKLINGIRDKQSGKTILDFLKSDGFANRNFMQLIHDDSLTFKEDIQKAQVSGQGDSLHEHIANLAGSPAIKKGILQTVKVVDELVKVMGRHKPENIVIEMARENQTTQKGQKNSRERMKRIEEGIKELGSQILKEHPVENTQLQNEKLYLYYLQNGRDMYVDQELDINRLSDYDVDHIVPQSFLKDDSIDNKVLTRSDKARGKSDNVPSEEVVKKMKNYWRQLLNAKLITQRKFDNLTKAERGGLSELDKAGFIKRQLVETRQITKHVAQILDSRMNTKYDENDKLIREVKVITLKSKLVSDFRKDFQFYKVREINNYHHAHDAYLNAVVGTALIKKYPKLESEFVYGDYKVYDVRKMIAKSEQEIGKATAKYFFYSNIMNFFKTEITLANGEIRKRPLIETNGETGEIVWDKGRDFATVRKVLSMPQVNIVKKTEVQTGGFSKESILPKRNSDKLIARKKDWDPKKYGGFDSPTVAYSVLVVAKVEKGKSKKLKSVKELLGITIMERSSFEKNPIDFLEAKGYKEVKKDLIIKLPKYSLFELENGRKRMLASAGELQKGNELALPSKYVNFLYLASHYEKLKGSPEDNEQKQLFVEQHKHYLDEIIEQISEFSKRVILADANLDKVLSAYNKHRDKPIREQAENIIHLFTLTNLGAPAAFKYFDTTIDRKRYTSTKEVLDATLIHQSITGLYETRIDLSQLGGDGGGGGGSGGGGSGGGGSGGMDLLKPLTVERKGVKIKGYWNSQADITCVPKDLLQGEEPVRQQNVTTIHGTQEGDVYYVNLKIDGRRINTEVIGTTLDYAIITPGDVPWILKKPLELTIKLDLEEQQGTLLNNSILSKKGKEELKQLFEKYSALWQSWENQVGHRRIRPHKIATGTVKPTPQKQYHINPKAKPDIQIVINDLLKQGVLIQKESTMNTPVYPVPKPNGRWRMVLDYRAVNKVTPLIAVQNQHSYGILGSLFKGRYKTTIDLSNGFWAHPIVPEDYWITAFTWQGKQYCWTVLPQGFLNSPGLFNGDVVDLLQGIPNVEVYVDDVYISHDSEKEHLEYLDILFNRLKEAGYIISLKKSNIANSIVDFLGFQITNEGRGLTDTFKEKLENITAPTTLKQLQSILGLLNFARNFIPDFTELIAPLYALIPKSPKNYVPWQIEHSTTLETLITKLNGAEYLQGRKGDKTLIMKVNASYTTGYIRYYNEGEKKPISYVSIVFSKTELKFTELEKLLTTVHKGLLKALDLSMGQNIHVYSPIVSMQNIQKTPQTAKKALASRWLSWLSYLEDPRIRFFYDPQMPALKDLPAVDTGKDNKKHPSNFQHIFYTDGSAITSPTKEGHLNAGMGIVYFINKDGNLQKQQEWSISLGNHTAQFAEIAAFEFALKKCLPLGGNILVVTDSNYVAKAYNEELDVWASNGFVNNRKKPLKHISKWKSVADLKRLRPDVVVTHEPGHQKLDSSPHAYGNNLADQLATQASFKVHAGKRTADGSEFEKRTADGSEFESPKKKAKVE

SEQ ID NO: 1126 - protein, 2177 aa, synthetic construct
MPAAKRVKLDGGDKKYSIGLDIGTNSVGWAVITDEYKVPSKKFKVLGNTDRHSIKKNLIGALLFDSGETAEATRLKRTARRRYTRRKNRICYLQEIFSNEMAKVDDSFFHRLEESFLVEEDKKHERHPIFGNIVDEVAYHEKYPTIYHLRKKLVDSTDKADLRLIYLALAHMIKFRGHFLIEGDLNPDNSDVDKLFIQLVQTYNQLFEENPINASGVDAKAILSARLSKSRRLENLIAQLPGEKKNGLFGNLIALSLGLTPNFKSNFDLAEDAKLQLSKDTYDDDLDNLLAQIGDQYADLFLAAKNLSDAILLSDILRVNTEITKAPLSASMIKRYDEHHQDLTLLKALVRQQLPEKYKEIFFDQSKNGYAGYIDGGASQEEFYKFIKPILEKMDGTEELLVKLNREDLLRKQRTFDNGSIPHQIHLGELHAILRRQEDFYPFLKDNREKIEKILTFRIPYYVGPLARGNSRFAWMTRKSEETITPWNFEEVVDKGASAQSFIERMTNFDKNLPNEKVLPKHSLLYEYFTVYNELTKVKYVTEGMRKPAFLSGEQKKAIVDLLFKTNRKVTVKQLKEDYFKKIECFDSVEISGVEDRFNASLGTYHDLLKIIKDKDFLDNEENEDILEDIVLTLTLFEDREMIEERLKTYAHLFDDKVMKQLKRRRYTGWGRLSRKLINGIRDKQSGKTILDFLKSDGFANRNFMQLIHDDSLTFKEDIQKAQVSGQGDSLHEHIANLAGSPAIKKGILQTVKVVDELVKVMGRHKPENIVIEMARENQTTQKGQKNSRERMKRIEEGIKELGSQILKEHPVENTQLQNEKLYLYYLQNGRDMYVDQELDINRLSDYDVDHIVPQSFLKDDSIDNKVLTRSDKARGKSDNVPSEEVVKKMKNYWRQLLNAKLITQRKFDNLTKAERGGLSELDKAGFIKRQLVETRQITKHVAQILDSRMNTKYDENDKLIREVKVITLKSKLVSDFRKDFQFYKVREINNYHHAHDAYLNAVVGTALIKKYPKLESEFVYGDYKVYDVRKMIAKSEQEIGKATAKYFFYSNIMNFFKTEITLANGEIRKRPLIETNGETGEIVWDKGRDFATVRKVLSMPQVNIVKKTEVQTGGFSKESILPKRNSDKLIARKKDWDPKKYGGFDSPTVAYSVLVVAKVEKGKSKKLKSVKELLGITIMERSSFEKNPIDFLEAKGYKEVKKDLIIKLPKYSLFELENGRKRMLASAGELQKGNELALPSKYVNFLYLASHYEKLKGSPEDNEQKQLFVEQHKHYLDEIIEQISEFSKRVILADANLDKVLSAYNKHRDKPIREQAENIIHLFTLTNLGAPAAFKYFDTTIDRKRYTSTKEVLDATLIHQSITGLYETRIDLSQLGGDGGEAAAKEAAAKEAAAKGGMDLLKPLTVERKGVKIKGYWNSQADITCVPKDLLQGEEPVRQQNVTTIHGTQEGDVYYVNLKIDGRRINTEVIGTTLDYAIITPGDVPWILKKPLELTIKLDLEEQQGTLLNNSILSKKGKEELKQLFEKYSALWQSWENQVGHRRIRPHKIATGTVKPTPQKQYHINPKAKPDIQIVINDLLKQGVLIQKESTMNTPVYPVPKPNGRWRMVLDYRAVNKVTPLIAVQNQHSYGILGSLFKGRYKTTIDLSNGFWAHPIVPEDYWITAFTWQGKQYCWTVLPQGFLNSPGLFNGDVVDLLQGIPNVEVYVDDVYISHDSEKEHLEYLDILFNRLKEAGYIISLKKSNIANSIVDFLGFQITNEGRGLTDTFKEKLENITAPTTLKQLQSILGLLNFARNFIPDFTELIAPLYALIPKSPKNYVPWQIEHSTTLETLITKLNGAEYLQGRKGDKTLIMKVNASYTTGYIRYYNEGEKKPISYVSIVFSKTELKFTELEKLLTTVHKGLLKALDLSMGQNIHVYSPIVSMQNIQKTPQTAKKALASRWLSWLSYLEDPRIRFFYDPQMPALKDLPAVDTGKDNKKHPSNFQHIFYTDGSAITSPTKEGHLNAGMGIVYFINKDGNLQKQQEWSISLGNHTAQFAEIAAFEFALKKCLPLGGNILVVTDSNYVAKAYNEELDVWASNGFVNNRKKPLKHISKWKSVADLKRLRPDVVVTHEPGHQKLDSSPHAYGNNLADQLATQASFKVHAGKRTADGSEFEKRTADGSEFESPKKKAKVE

SEQ ID NO: 1127 - protein, 2173 aa, synthetic construct
MPAAKRVKLDGGDKKYSIGLDIGTNSVGWAVITDEYKVPSKKFKVLGNTDRHSIKKNLIGALLFDSGETAEATRLKRTARRRYTRRKNRICYLQEIFSNEMAKVDDSFFHRLEESFLVEEDKKHERHPIFGNIVDEVAYHEKYPTIYHLRKKLVDSTDKADLRLIYLALAHMIKFRGHFLIEGDLNPDNSDVDKLFIQLVQTYNQLFEENPINASGVDAKAILSARLSKSRRLENLIAQLPGEKKNGLFGNLIALSLGLTPNFKSNFDLAEDAKLQLSKDTYDDDLDNLLAQIGDQYADLFLAAKNLSDAILLSDILRVNTEITKAPLSASMIKRYDEHHQDLTLLKALVRQQLPEKYKEIFFDQSKNGYAGYIDGGASQEEFYKFIKPILEKMDGTEELLVKLNREDLLRKQRTFDNGSIPHQIHLGELHAILRRQEDFYPFLKDNREKIEKILTFRIPYYVGPLARGNSRFAWMTRKSEETITPWNFEEVVDKGASAQSFIERMTNFDKNLPNEKVLPKHSLLYEYFTVYNELTKVKYVTEGMRKPAFLSGEQKKAIVDLLFKTNRKVTVKQLKEDYFKKIECFDSVEISGVEDRFNASLGTYHDLLKIIKDKDFLDNEENEDILEDIVLTLTLFEDREMIEERLKTYAHLFDDKVMKQLKRRRYTGWGRLSRKLINGIRDKQSGKTILDFLKSDGFANRNFMQLIHDDSLTFKEDIQKAQVSGQGDSLHEHIANLAGSPAIKKGILQTVKVVDELVKVMGRHKPENIVIEMARENQTTQKGQKNSRERMKRIEEGIKELGSQILKEHPVENTQLQNEKLYLYYLQNGRDMYVDQELDINRLSDYDVDHIVPQSFLKDDSIDNKVLTRSDKARGKSDNVPSEEVVKKMKNYWRQLLNAKLITQRKFDNLTKAERGGLSELDKAGFIKRQLVETRQITKHVAQILDSRMNTKYDENDKLIREVKVITLKSKLVSDFRKDFQFYKVREINNYHHAHDAYLNAVVGTALIKKYPKLESEFVYGDYKVYDVRKMIAKSEQEIGKATAKYFFYSNIMNFFKTEITLANGEIRKRPLIETNGETGEIVWDKGRDFATVRKVLSMPQVNIVKKTEVQTGGFSKESILPKRNSDKLIARKKDWDPKKYGGFDSPTVAYSVLVVAKVEKGKSKKLKSVKELLGITIMERSSFEKNPIDFLEAKGYKEVKKDLIIKLPKYSLFELENGRKRMLASAGELQKGNELALPSKYVNFLYLASHYEKLKGSPEDNEQKQLFVEQHKHYLDEIIEQISEFSKRVILADANLDKVLSAYNKHRDKPIREQAENIIHLFTLTNLGAPAAFKYFDTTIDRKRYTSTKEVLDATLIHQSITGLYETRIDLSQLGGDGGEAAAKGSSGGSGGMDLLKPLTVERKGVKIKGYWNSQADITCVPKDLLQGEEPVRQQNVTTIHGTQEGDVYYVNLKIDGRRINTEVIGTTLDYAIITPGDVPWILKKPLELTIKLDLEEQQGTLLNNSILSKKGKEELKQLFEKYSALWQSWENQVGHRRIRPHKIATGTVKPTPQKQYHINPKAKPDIQIVINDLLKQGVLIQKESTMNTPVYPVPKPNGRWRMVLDYRAVNKVTPLIAVQNQHSYGILGSLFKGRYKTTIDLSNGFWAHPIVPEDYWITAFTWQGKQYCWTVLPQGFLNSPGLFNGDVVDLLQGIPNVEVYVDDVYISHDSEKEHLEYLDILFNRLKEAGYIISLKKSNIANSIVDFLGFQITNEGRGLTDTFKEKLENITAPTTLKQLQSILGLLNFARNFIPDFTELIAPLYALIPKSPKNYVPWQIEHSTTLETLITKLNGAEYLQGRKGDKTLIMKVNASYTTGYIRYYNEGEKKPISYVSIVFSKTELKFTELEKLLTTVHKGLLKALDLSMGQNIHVYSPIVSMQNIQKTPQTAKKALASRWLSWLSYLEDPRIRFFYDPQMPALKDLPAVDTGKDNKKHPSNFQHIFYTDGSAITSPTKEGHLNAGMGIVYFINKDGNLQKQQEWSISLGNHTAQFAEIAAFEFALKKCLPLGGNILVVTDSNYVAKAYNEELDVWASNGFVNNRKKPLKHISKWKSVADLKRLRPDVVVTHEPGHQKLDSSPHAYGNNLADQLATQASFKVHAGKRTADGSEFEKRTADGSEFESPKKKAKVE

SEQ ID NO: 1128 - protein, 2171 aa, synthetic construct
MPAAKRVKLDGGDKKYSIGLDIGTNSVGWAVITDEYKVPSKKFKVLGNTDRHSIKKNLIGALLFDSGETAEATRLKRTARRRYTRRKNRICYLQEIFSNEMAKVDDSFFHRLEESFLVEEDKKHERHPIFGNIVDEVAYHEKYPTIYHLRKKLVDSTDKADLRLIYLALAHMIKFRGHFLIEGDLNPDNSDVDKLFIQLVQTYNQLFEENPINASGVDAKAILSARLSKSRRLENLIAQLPGEKKNGLFGNLIALSLGLTPNFKSNFDLAEDAKLQLSKDTYDDDLDNLLAQIGDQYADLFLAAKNLSDAILLSDILRVNTEITKAPLSASMIKRYDEHHQDLTLLKALVRQQLPEKYKEIFFDQSKNGYAGYIDGGASQEEFYKFIKPILEKMDGTEELLVKLNREDLLRKQRTFDNGSIPHQIHLGELHAILRRQEDFYPFLKDNREKIEKILTFRIPYYVGPLARGNSRFAWMTRKSEETITPWNFEEVVDKGASAQSFIERMTNFDKNLPNEKVLPKHSLLYEYFTVYNELTKVKYVTEGMRKPAFLSGEQKKAIVDLLFKTNRKVTVKQLKEDYFKKIECFDSVEISGVEDRFNASLGTYHDLLKIIKDKDFLDNEENEDILEDIVLTLTLFEDREMIEERLKTYAHLFDDKVMKQLKRRRYTGWGRLSRKLINGIRDKQSGKTILDFLKSDGFANRNFMQLIHDDSLTFKEDIQKAQVSGQGDSLHEHIANLAGSPAIKKGILQTVKVVDELVKVMGRHKPENIVIEMARENQTTQKGQKNSRERMKRIEEGIKELGSQILKEHPVENTQLQNEKLYLYYLQNGRDMYVDQELDINRLSDYDVDHIVPQSFLKDDSIDNKVLTRSDKARGKSDNVPSEEVVKKMKNYWRQLLNAKLITQRKFDNLTKAERGGLSELDKAGFIKRQLVETRQITKHVAQILDSRMNTKYDENDKLIREVKVITLKSKLVSDFRKDFQFYKVREINNYHHAHDAYLNAVVGTALIKKYPKLESEFVYGDYKVYDVRKMIAKSEQEIGKATAKYFFYSNIMNFFKTEITLANGEIRKRPLIETNGETGEIVWDKGRDFATVRKVLSMPQVNIVKKTEVQTGGFSKESILPKRNSDKLIARKKDWDPKKYGGFDSPTVAYSVLVVAKVEKGKSKKLKSVKELLGITIMERSSFEKNPIDFLEAKGYKEVKKDLIIKLPKYSLFELENGRKRMLASAGELQKGNELALPSKYVNFLYLASHYEKLKGSPEDNEQKQLFVEQHKHYLDEIIEQISEFSKRVILADANLDKVLSAYNKHRDKPIREQAENIIHLFTLTNLGAPAAFKYFDTTIDRKRYTSTKEVLDATLIHQSITGLYETRIDLSQLGGDGGGGSGGGPAPGGMDLLKPLTVERKGVKIKGYWNSQADITCVPKDLLQGEEPVRQQNVTTIHGTQEGDVYYVNLKIDGRRINTEVIGTTLDYAIITPGDVPWILKKPLELTIKLDLEEQQGTLLNNSILSKKGKEELKQLFEKYSALWQSWENQVGHRRIRPHKIATGTVKPTPQKQYHINPKAKPDIQIVINDLLKQGVLIQKESTMNTPVYPVPKPNGRWRMVLDYRAVNKVTPLIAVQNQHSYGILGSLFKGRYKTTIDLSNGFWAHPIVPEDYWITAFTWQGKQYCWTVLPQGFLNSPGLFNGDVVDLLQGIPNVEVYVDDVYISHDSEKEHLEYLDILFNRLKEAGYIISLKKSNIANSIVDFLGFQITNEGRGLTDTFKEKLENITAPTTLKQLQSILGLLNFARNFIPDFTELIAPLYALIPKSPKNYVPWQIEHSTTLETLITKLNGAEYLQGRKGDKTLIMKVNASYTTGYIRYYNEGEKKPISYVSIVFSKTELKFTELEKLLTTVHKGLLKALDLSMGQNIHVYSPIVSMQNIQKTPQTAKKALASRWLSWLSYLEDPRIRFFYDPQMPALKDLPAVDTGKDNKKHPSNFQHIFYTDGSAITSPTKEGHLNAGMGIVYFINKDGNLQKQQEWSISLGNHTAQFAEIAAFEFALKKCLPLGGNILVVTDSNYVAKAYNEELDVWASNGFVNNRKKPLKHISKWKSVADLKRLRPDVVVTHEPGHQKLDSSPHAYGNNLADQLATQASFKVHAGKRTADGSEFEKRTADGSEFESPKKKAKVE

SEQ ID NO: 1129 - protein, 2208 aa, synthetic construct
MPAAKRVKLDGGDKKYSIGLDIGTNSVGWAVITDEYKVPSKKFKVLGNTDRHSIKKNLIGALLFDSGETAEATRLKRTARRRYTRRKNRICYLQEIFSNEMAKVDDSFFHRLEESFLVEEDKKHERHPIFGNIVDEVAYHEKYPTIYHLRKKLVDSTDKADLRLIYLALAHMIKFRGHFLIEGDLNPDNSDVDKLFIQLVQTYNQLFEENPINASGVDAKAILSARLSKSRRLENLIAQLPGEKKNGLFGNLIALSLGLTPNFKSNFDLAEDAKLQLSKDTYDDDLDNLLAQIGDQYADLFLAAKNLSDAILLSDILRVNTEITKAPLSASMIKRYDEHHQDLTLLKALVRQQLPEKYKEIFFDQSKNGYAGYIDGGASQEEFYKFIKPILEKMDGTEELLVKLNREDLLRKQRTFDNGSIPHQIHLGELHAILRRQEDFYPFLKDNREKIEKILTFRIPYYVGPLARGNSRFAWMTRKSEETITPWNFEEVVDKGASAQSFIERMTNFDKNLPNEKVLPKHSLLYEYFTVYNELTKVKYVTEGMRKPAFLSGEQKKAIVDLLFKTNRKVTVKQLKEDYFKKIECFDSVEISGVEDRFNASLGTYHDLLKIIKDKDFLDNEENEDILEDIVLTLTLFEDREMIEERLKTYAHLFDDKVMKQLKRRRYTGWGRLSRKLINGIRDKQSGKTILDFLKSDGFANRNFMQLIHDDSLTFKEDIQKAQVSGQGDSLHEHIANLAGSPAIKKGILQTVKVVDELVKVMGRHKPENIVIEMARENQTTQKGQKNSRERMKRIEEGIKELGSQILKEHPVENTQLQNEKLYLYYLQNGRDMYVDQELDINRLSDYDVDHIVPQSFLKDDSIDNKVLTRSDKARGKSDNVPSEEVVKKMKNYWRQLLNAKLITQRKFDNLTKAERGGLSELDKAGFIKRQLVETRQITKHVAQILDSRMNTKYDENDKLIREVKVITLKSKLVSDFRKDFQFYKVREINNYHHAHDAYLNAVVGTALIKKYPKLESEFVYGDYKVYDVRKMIAKSEQEIGKATAKYFFYSNIMNFFKTEITLANGEIRKRPLIETNGETGEIVWDKGRDFATVRKVLSMPQVNIVKKTEVQTGGFSKESILPKRNSDKLIARKKDWDPKKYGGFDSPTVAYSVLVVAKVEKGKSKKLKSVKELLGITIMERSSFEKNPIDFLEAKGYKEVKKDLIIKLPKYSLFELENGRKRMLASAGELQKGNELALPSKYVNFLYLASHYEKLKGSPEDNEQKQLFVEQHKHYLDEIIEQISEFSKRVILADANLDKVLSAYNKHRDKPIREQAENIIHLFTLTNLGAPAAFKYFDTTIDRKRYTSTKEVLDATLIHQSITGLYETRIDLSQLGGDGGAEAAAKEAAAKEAAAKEAAAKALEAEAAAKEAAAKEAAAKEAAAKAGGMDLLKPLTVERKGVKIKGYWNSQADITCVPKDLLQGEEPVRQQNVTTIHGTQEGDVYYVNLKIDGRRINTEVIGTTLDYAIITPGDVPWILKKPLELTIKLDLEEQQGTLLNNSILSKKGKEELKQLFEKYSALWQSWENQVGHRRIRPHKIATGTVKPTPQKQYHINPKAKPDIQIVINDLLKQGVLIQKESTMNTPVYPVPKPNGRWRMVLDYRAVNKVTPLIAVQNQHSYGILGSLFKGRYKTTIDLSNGFWAHPIVPEDYWITAFTWQGKQYCWTVLPQGFLNSPGLFNGDVVDLLQGIPNVEVYVDDVYISHDSEKEHLEYLDILFNRLKEAGYIISLKKSNIANSIVDFLGFQITNEGRGLTDTFKEKLENITAPTTLKQLQSILGKLNFARNFIPDFTELIAPLYALIPKSPKNYVPWQIEHSTTLETLITKLNGAEYLQGRKGDKTLIMKVNASYTTGYIRYYNEGEKKPISYVSIVFSKTELKFTELEKLLTTVHKGLLKALDLSMGQNIHVYSPIVSMQNIQKTPQTAKKALASRWLSWLSYLEDPRIRFFYDPQMPALKDLPAVDTGKDNKKHPSNFQHIFYTDGSAITSPTKEGHLNAGMGIVYFINKDGNLQKQQEWSISLGNHTAQFAEIAAFEFALKKCLPLGGNILVVTDSNYVAKAYNEELDVWASNGFVNNRKKPLKHISKWKSVADLKRLRPDVVVTHEPGHQKLDSSPHAYGNNLADQLATQASFKVHAGKRTADGSEFEKRTADGSEFESPKKKAKVE

SEQ ID NO: 1130 - protein, 2171 aa, synthetic construct
MPAAKRVKLDGGDKKYSIGLDIGTNSVGWAVITDEYKVPSKKFKVLGNTDRHSIKKNLIGALLFDSGETAEATRLKRTARRRYTRRKNRICYLQEIFSNEMAKVDDSFFHRLEESFLVEEDKKHERHPIFGNIVDEVAYHEKYPTIYHLRKKLVDSTDKADLRLIYLALAHMIKFRGHFLIEGDLNPDNSDVDKLFIQLVQTYNQLFEENPINASGVDAKAILSARLSKSRRLENLIAQLPGEKKNGLFGNLIALSLGLTPNFKSNFDLAEDAKLQLSKDTYDDDLDNLLAQIGDQYADLFLAAKNLSDAILLSDILRVNTEITKAPLSASMIKRYDEHHQDLTLLKALVRQQLPEKYKEIFFDQSKNGYAGYIDGGASQEEFYKFIKPILEKMDGTEELLVKLNREDLLRKQRTFDNGSIPHQIHLGELHAILRRQEDFYPFLKDNREKIEKILTFRIPYYVGPLARGNSRFAWMTRKSEETITPWNFEEVVDKGASAQSFIERMTNFDKNLPNEKVLPKHSLLYEYFTVYNELTKVKYVTEGMRKPAFLSGEQKKAIVDLLFKTNRKVTVKQLKEDYFKKIECFDSVEISGVEDRFNASLGTYHDLLKIIKDKDFLDNEENEDILEDIVLTLTLFEDREMIEERLKTYAHLFDDKVMKQLKRRRYTGWGRLSRKLINGIRDKQSGKTILDFLKSDGFANRNFMQLIHDDSLTFKEDIQKAQVSGQGDSLHEHIANLAGSPAIKKGILQTVKVVDELVKVMGRHKPENIVIEMARENQTTQKGQKNSRERMKRIEEGIKELGSQILKEHPVENTQLQNEKLYLYYLQNGRDMYVDQELDINRLSDYDVDHIVPQSFLKDDSIDNKVLTRSDKARGKSDNVPSEEVVKKMKNYWRQLLNAKLITQRKFDNLTKAERGGLSELDKAGFIKRQLVETRQITKHVAQILDSRMNTKYDENDKLIREVKVITLKSKLVSDFRKDFQFYKVREINNYHHAHDAYLNAVVGTALIKKYPKLESEFVYGDYKVYDVRKMIAKSEQEIGKATAKYFFYSNIMNFFKTEITLANGEIRKRPLIETNGETGEIVWDKGRDFATVRKVLSMPQVNIVKKTEVQTGGFSKESILPKRNSDKLIARKKDWDPKKYGGFDSPTVAYSVLVVAKVEKGKSKKLKSVKELLGITIMERSSFEKNPIDFLEAKGYKEVKKDLIIKLPKYSLFELENGRKRMLASAGELQKGNELALPSKYVNFLYLASHYEKLKGSPEDNEQKQLFVEQHKHYLDEIIEQISEFSKRVILADANLDKVLSAYNKHRDKPIREQAENIIHLFTLTNLGAPAAFKYFDTTIDRKRYTSTKEVLDATLIHQSITGLYETRIDLSQLGGDGGGSSPAPGGSGGMDLLKPLTVERKGVKIKGYWNSQADITCVPKDLLQGEEPVRQQNVTTIHGTQEGDVYYVNLKIDGRRINTEVIGTTLDYAIITPGDVPWILKKPLELTIKLDLEEQQGTLLNNSILSKKGKEELKQLFEKYSALWQSWENQVGHRRIRPHKIATGTVKPTPQKQYHINPKAKPDIQIVINDLLKQGVLIQKESTMNTPVYPVPKPNGRWRMVLDYRAVNKVTPLIAVQNQHSYGILGSLFKGRYKTTIDLSNGFWAHPIVPEDYWITAFTWQGKQYCWTVLPQGFLNSPGLFNGDVVDLLQGIPNVEVYVDDVYISHDSEKEHLEYLDILFNRLKEAGYIISLKKSNIANSIVDFLGFQITNEGRGLTDTFKEKLENITAPTTLKQLQSILGKLNFARNFIPDFTELIAPLYALIPKSPKNYVPWQIEHSTTLETLITKLNGAEYLQGRKGDKTLIMKVNASYTTGYIRYYNEGEKKPISYVSIVFSKTELKFTELEKLLTTVHKGLLKALDLSMGQNIHVYSPIVSMQNIQKTPQTAKKALASRWLSWLSYLEDPRIRFFYDPQMPALKDLPAVDTGKDNKKHPSNFQHIFYTDGSAITSPTKEGHLNAGMGIVYFINKDGNLQKQQEWSISLGNHTAQFAEIAAFEFALKKCLPLGGNILVVTDSNYVAKAYNEELDVWASNGFVNNRKKPLKHISKWKSVADLKRLRPDVVVTHEPGHQKLDSSPHAYGNNLADQLATQASFKVHAGKRTADGSEFEKRTADGSEFESPKKKAKVE

SEQ ID NO: 1131 - protein, 2182 aa, synthetic construct
MPAAKRVKLDGGDKKYSIGLDIGTNSVGWAVITDEYKVPSKKFKVLGNTDRHSIKKNLIGALLFDSGETAEATRLKRTARRRYTRRKNRICYLQEIFSNEMAKVDDSFFHRLEESFLVEEDKKHERHPIFGNIVDEVAYHEKYPTIYHLRKKLVDSTDKADLRLIYLALAHMIKFRGHFLIEGDLNPDNSDVDKLFIQLVQTYNQLFEENPINASGVDAKAILSARLSKSRRLENLIAQLPGEKKNGLFGNLIALSLGLTPNFKSNFDLAEDAKLQLSKDTYDDDLDNLLAQIGDQYADLFLAAKNLSDAILLSDILRVNTEITKAPLSASMIKRYDEHHQDLTLLKALVRQQLPEKYKEIFFDQSKNGYAGYIDGGASQEEFYKFIKPILEKMDGTEELLVKLNREDLLRKQRTFDNGSIPHQIHLGELHAILRRQEDFYPFLKDNREKIEKILTFRIPYYVGPLARGNSRFAWMTRKSEETITPWNFEEVVDKGASAQSFIERMTNFDKNLPNEKVLPKHSLLYEYFTVYNELTKVKYVTEGMRKPAFLSGEQKKAIVDLLFKTNRKVTVKQLKEDYFKKIECFDSVEISGVEDRFNASLGTYHDLLKIIKDKDFLDNEENEDILEDIVLTLTLFEDREMIEERLKTYAHLFDDKVMKQLKRRRYTGWGRLSRKLINGIRDKQSGKTILDFLKSDGFANRNFMQLIHDDSLTFKEDIQKAQVSGQGDSLHEHIANLAGSPAIKKGILQTVKVVDELVKVMGRHKPENIVIEMARENQTTQKGQKNSRERMKRIEEGIKELGSQILKEHPVENTQLQNEKLYLYYLQNGRDMYVDQELDINRLSDYDVDHIVPQSFLKDDSIDNKVLTRSDKARGKSDNVPSEEVVKKMKNYWRQLLNAKLITQRKFDNLTKAERGGLSELDKAGFIKRQLVETRQITKHVAQILDSRMNTKYDENDKLIREVKVITLKSKLVSDFRKDFQFYKVREINNYHHAHDAYLNAVVGTALIKKYPKLESEFVYGDYKVYDVRKMIAKSEQEIGKATAKYFFYSNIMNFFKTEITLANGEIRKRPLIETNGETGEIVWDKGRDFATVRKVLSMPQVNIVKKTEVQTGGFSKESILPKRNSDKLIARKKDWDPKKYGGFDSPTVAYSVLVVAKVEKGKSKKLKSVKELLGITIMERSSFEKNPIDFLEAKGYKEVKKDLIIKLPKYSLFELENGRKRMLASAGELQKGNELALPSKYVNFLYLASHYEKLKGSPEDNEQKQLFVEQHKHYLDEIIEQISEFSKRVILADANLDKVLSAYNKHRDKPIREQAENIIHLFTLTNLGAPAAFKYFDTTIDRKRYTSTKEVLDATLIHQSITGLYETRIDLSQLGGDGGGGGGSGGGGSGGGGSGGGGSGGMDLLKPLTVERKGVKIKGYWNSQADITCVPKDLLQGEEPVRQQNVTTIHGTQEGDVYYVNLKIDGRRINTEVIGTTLDYAIITPGDVPWILKKPLELTIKLDLEEQQGTLLNNSILSKKGKEELKQLFEKYSALWQSWENQVGHRRIRPHKIATGTVKPTPQKQYHINPKAKPDIQIVINDLLKQGVLIQKESTMNTPVYPVPKPNGRWRMVLDYRAVNKVTPLIAVQNQHSYGILGSLFKGRYKTTIDLSNGFWAHPIVPEDYWITAFTWQGKQYCWTVLPQGFLNSPGLFNGDVVDLLQGIPNVEVYVDDVYISHDSEKEHLEYLDILFNRLKEAGYIISLKKSNIANSIVDFLGFQITNEGRGLTDTFKEKLENITAPTTLKQLQSILGKLNFARNFIPDFTELIAPLYALIPKSPKNYVPWQIEHSTTLETLITKLNGAEYLQGRKGDKTLIMKVNASYTTGYIRYYNEGEKKPISYVSIVFSKTELKFTELEKLLTTVHKGLLKALDLSMGQNIHVYSPIVSMQNIQKTPQTAKKALASRWLSWLSYLEDPRIRFFYDPQMPALKDLPAVDTGKDNKKHPSNFQHIFYTDGSAITSPTKEGHLNAGMGIVYFINKDGNLQKQQEWSISLGNHTAQFAEIAAFEFALKKCLPLGGNILVVTDSNYVAKAYNEELDVWASNGFVNNRKKPLKHISKWKSVADLKRLRPDVVVTHEPGHQKLDSSPHAYGNNLADQLATQASFKVHAGKRTADGSEFEKRTADGSEFESPKKKAKVE

SEQ ID NO: 1132 - protein, 2167 aa, synthetic construct
MPAAKRVKLDGGDKKYSIGLDIGTNSVGWAVITDEYKVPSKKFKVLGNTDRHSIKKNLIGALLFDSGETAEATRLKRTARRRYTRRKNRICYLQEIFSNEMAKVDDSFFHRLEESFLVEEDKKHERHPIFGNIVDEVAYHEKYPTIYHLRKKLVDSTDKADLRLIYLALAHMIKFRGHFLIEGDLNPDNSDVDKLFIQLVQTYNQLFEENPINASGVDAKAILSARLSKSRRLENLIAQLPGEKKNGLFGNLIALSLGLTPNFKSNFDLAEDAKLQLSKDTYDDDLDNLLAQIGDQYADLFLAAKNLSDAILLSDILRVNTEITKAPLSASMIKRYDEHHQDLTLLKALVRQQLPEKYKEIFFDQSKNGYAGYIDGGASQEEFYKFIKPILEKMDGTEELLVKLNREDLLRKQRTFDNGSIPHQIHLGELHAILRRQEDFYPFLKDNREKIEKILTFRIPYYVGPLARGNSRFAWMTRKSEETITPWNFEEVVDKGASAQSFIERMTNFDKNLPNEKVLPKHSLLYEYFTVYNELTKVKYVTEGMRKPAFLSGEQKKAIVDLLFKTNRKVTVKQLKEDYFKKIECFDSVEISGVEDRFNASLGTYHDLLKIIKDKDFLDNEENEDILEDIVLTLTLFEDREMIEERLKTYAHLFDDKVMKQLKRRRYTGWGRLSRKLINGIRDKQSGKTILDFLKSDGFANRNFMQLIHDDSLTFKEDIQKAQVSGQGDSLHEHIANLAGSPAIKKGILQTVKVVDELVKVMGRHKPENIVIEMARENQTTQKGQKNSRERMKRIEEGIKELGSQILKEHPVENTQLQNEKLYLYYLQNGRDMYVDQELDINRLSDYDVDHIVPQSFLKDDSIDNKVLTRSDKARGKSDNVPSEEVVKKMKNYWRQLLNAKLITQRKFDNLTKAERGGLSELDKAGFIKRQLVETRQITKHVAQILDSRMNTKYDENDKLIREVKVITLKSKLVSDFRKDFQFYKVREINNYHHAHDAYLNAVVGTALIKKYPKLESEFVYGDYKVYDVRKMIAKSEQEIGKATAKYFFYSNIMNFFKTEITLANGEIRKRPLIETNGETGEIVWDKGRDFATVRKVLSMPQVNIVKKTEVQTGGFSKESILPKRNSDKLIARKKDWDPKKYGGFDSPTVAYSVLVVAKVEKGKSKKLKSVKELLGITIMERSSFEKNPIDFLEAKGYKEVKKDLIIKLPKYSLFELENGRKRMLASAGELQKGNELALPSKYVNFLYLASHYEKLKGSPEDNEQKQLFVEQHKHYLDEIIEQISEFSKRVILADANLDKVLSAYNKHRDKPIREQAENIIHLFTLTNLGAPAAFKYFDTTIDRKRYTSTKEVLDATLIHQSITGLYETRIDLSQLGGDGGEAAAKGGMDLLKPLTVERKGVKIKGYWNSQADITCVPKDLLQGEEPVRQQNVTTIHGTQEGDVYYVNLKIDGRRINTEVIGTTLDYAIITPGDVPWILKKPLELTIKLDLEEQQGTLLNNSILSKKGKEELKQLFEKYSALWQSWENQVGHRRIRPHKIATGTVKPTPQKQYHINPKAKPDIQIVINDLLKQGVLIQKESTMNTPVYPVPKPNGRWRMVLDYRAVNKVTPLIAVQNQHSYGILGSLFKGRYKTTIDLSNGFWAHPIVPEDYWITAFTWQGKQYCWTVLPQGFLNSPGLFNGDVVDLLQGIPNVEVYVDDVYISHDSEKEHLEYLDILFNRLKEAGYIISLKKSNIANSIVDFLGFQITNEGRGLTDTFKEKLENITAPTTLKQLQSILGKLNFARNFIPDFTELIAPLYALIPKSPKNYVPWQIEHSTTLETLITKLNGAEYLQGRKGDKTLIMKVNASYTTGYIRYYNEGEKKPISYVSIVFSKTELKFTELEKLLTTVHKGLLKALDLSMGQNIHVYSPIVSMQNIQKTPQTAKKALASRWLSWLSYLEDPRIRFFYDPQMPALKDLPAVDTGKDNKKHPSNFQHIFYTDGSAITSPTKEGHLNAGMGIVYFINKDGNLQKQQEWSISLGNHTAQFAEIAAFEFALKKCLPLGGNILVVTDSNYVAKAYNEELDVWASNGFVNNRKKPLKHISKWKSVADLKRLRPDVVVTHEPGHQKLDSSPHAYGNNLADQLATQASFKVHAGKRTADGSEFEKRTADGSEFESPKKKAKVE

SEQ ID NO: 1133 - protein, 2174 aa, synthetic construct
MPAAKRVKLDGGDKKYSIGLDIGTNSVGWAVITDEYKVPSKKFKVLGNTDRHSIKKNLIGALLFDSGETAEATRLKRTARRRYTRRKNRICYLQEIFSNEMAKVDDSFFHRLEESFLVEEDKKHERHPIFGNIVDEVAYHEKYPTIYHLRKKLVDSTDKADLRLIYLALAHMIKFRGHFLIEGDLNPDNSDVDKLFIQLVQTYNQLFEENPINASGVDAKAILSARLSKSRRLENLIAQLPGEKKNGLFGNLIALSLGLTPNFKSNFDLAEDAKLQLSKDTYDDDLDNLLAQIGDQYADLFLAAKNLSDAILLSDILRVNTEITKAPLSASMIKRYDEHHQDLTLLKALVRQQLPEKYKEIFFDQSKNGYAGYIDGGASQEEFYKFIKPILEKMDGTEELLVKLNREDLLRKQRTFDNGSIPHQIHLGELHAILRRQEDFYPFLKDNREKIEKILTFRIPYYVGPLARGNSRFAWMTRKSEETITPWNFEEVVDKGASAQSFIERMTNFDKNLPNEKVLPKHSLLYEYFTVYNELTKVKYVTEGMRKPAFLSGEQKKAIVDLLFKTNRKVTVKQLKEDYFKKIECFDSVEISGVEDRFNASLGTYHDLLKIIKDKDFLDNEENEDILEDIVLTLTLFEDREMIEERLKTYAHLFDDKVMKQLKRRRYTGWGRLSRKLINGIRDKQSGKTILDFLKSDGFANRNFMQLIHDDSLTFKEDIQKAQVSGQGDSLHEHIANLAGSPAIKKGILQTVKVVDELVKVMGRHKPENIVIEMARENQTTQKGQKNSRERMKRIEEGIKELGSQILKEHPVENTQLQNEKLYLYYLQNGRDMYVDQELDINRLSDYDVDHIVPQSFLKDDSIDNKVLTRSDKARGKSDNVPSEEVVKKMKNYWRQLLNAKLITQRKFDNLTKAERGGLSELDKAGFIKRQLVETRQITKHVAQILDSRMNTKYDENDKLIREVKVITLKSKLVSDFRKDFQFYKVREINNYHHAHDAYLNAVVGTALIKKYPKLESEFVYGDYKVYDVRKMIAKSEQEIGKATAKYFFYSNIMNFFKTEITLANGEIRKRPLIETNGETGEIVWDKGRDFATVRKVLSMPQVNIVKKTEVQTGGFSKESILPKRNSDKLIARKKDWDPKKYGGFDSPTVAYSVLVVAKVEKGKSKKLKSVKELLGITIMERSSFEKNPIDFLEAKGYKEVKKDLIIKLPKYSLFELENGRKRMLASAGELQKGNELALPSKYVNFLYLASHYEKLKGSPEDNEQKQLFVEQHKHYLDEIIEQISEFSKRVILADANLDKVLSAYNKHRDKPIREQAENIIHLFTLTNLGAPAAFKYFDTTIDRKRYTSTKEVLDATLIHQSITGLYETRIDLSQLGGDGGGSAGSAAGSGEFGGMDLLKPLTVERKGVKIKGYWNSQADITCVPKDLLQGEEPVRQQNVTTIHGTQEGDVYYVNLKIDGRRINTEVIGTTLDYAIITPGDVPWILKKPLELTIKLDLEEQQGTLLNNSILSKKGKEELKQLFEKYSALWQSWENQVGHRRIRPHKIATGTVKPTPQKQYHINPKAKPDIQIVINDLLKQGVLIQKESTMNTPVYPVPKPNGRWRMVLDYRAVNKVTPLIAVQNQHSYGILGSLFKGRYKTTIDLSNGFWAHPIVPEDYWITAFTWQGKQYCWTVLPQGFLNSPGLFNGDVVDLLQGIPNVEVYVDDVYISHDSEKEHLEYLDILFNRLKEAGYIISLKKSNIANSIVDFLGFQITNEGRGLTDTFKEKLENITAPTTLKQLQSILGKLNFARNFIPDFTELIAPLYALIPKSPKNYVPWQIEHSTTLETLITKLNGAEYLQGRKGDKTLIMKVNASYTTGYIRYYNEGEKKPISYVSIVFSKTELKFTELEKLLTTVHKGLLKALDLSMGQNIHVYSPIVSMQNIQKTPQTAKKALASRWLSWLSYLEDPRIRFFYDPQMPALKDLPAVDTGKDNKKHPSNFQHIFYTDGSAITSPTKEGHLNAGMGIVYFINKDGNLQKQQEWSISLGNHTAQFAEIAAFEFALKKCLPLGGNILVVTDSNYVAKAYNEELDVWASNGFVNNRKKPLKHISKWKSVADLKRLRPDVVVTHEPGHQKLDSSPHAYGNNLADQLATQASFKVHAGKRTADGSEFEKRTADGSEFESPKKKAKVE

SEQ ID NO: 1134 - protein, 2109 aa, synthetic construct
MPAAKRVKLDGGDKKYSIGLDIGTNSVGWAVITDEYKVPSKKFKVLGNTDRHSIKKNLIGALLFDSGETAEATRLKRTARRRYTRRKNRICYLQEIFSNEMAKVDDSFFHRLEESFLVEEDKKHERHPIFGNIVDEVAYHEKYPTIYHLRKKLVDSTDKADLRLIYLALAHMIKFRGHFLIEGDLNPDNSDVDKLFIQLVQTYNQLFEENPINASGVDAKAILSARLSKSRRLENLIAQLPGEKKNGLFGNLIALSLGLTPNFKSNFDLAEDAKLQLSKDTYDDDLDNLLAQIGDQYADLFLAAKNLSDAILLSDILRVNTEITKAPLSASMIKRYDEHHQDLTLLKALVRQQLPEKYKEIFFDQSKNGYAGYIDGGASQEEFYKFIKPILEKMDGTEELLVKLNREDLLRKQRTFDNGSIPHQIHLGELHAILRRQEDFYPFLKDNREKIEKILTFRIPYYVGPLARGNSRFAWMTRKSEETITPWNFEEVVDKGASAQSFIERMTNFDKNLPNEKVLPKHSLLYEYFTVYNELTKVKYVTEGMRKPAFLSGEQKKAIVDLLFKTNRKVTVKQLKEDYFKKIECFDSVEISGVEDRFNASLGTYHDLLKIIKDKDFLDNEENEDILEDIVLTLTLFEDREMIEERLKTYAHLFDDKVMKQLKRRRYTGWGRLSRKLINGIRDKQSGKTILDFLKSDGFANRNFMQLIHDDSLTFKEDIQKAQVSGQGDSLHEHIANLAGSPAIKKGILQTVKVVDELVKVMGRHKPENIVIEMARENQTTQKGQKNSRERMKRIEEGIKELGSQILKEHPVENTQLQNEKLYLYYLQNGRDMYVDQELDINRLSDYDVDHIVPQSFLKDDSIDNKVLTRSDKARGKSDNVPSEEVVKKMKNYWRQLLNAKLITQRKFDNLTKAERGGLSELDKAGFIKRQLVETRQITKHVAQILDSRMNTKYDENDKLIREVKVITLKSKLVSDFRKDFQFYKVREINNYHHAHDAYLNAVVGTALIKKYPKLESEFVYGDYKVYDVRKMIAKSEQEIGKATAKYFFYSNIMNFFKTEITLANGEIRKRPLIETNGETGEIVWDKGRDFATVRKVLSMPQVNIVKKTEVQTGGFSKESILPKRNSDKLIARKKDWDPKKYGGFDSPTVAYSVLVVAKVEKGKSKKLKSVKELLGITIMERSSFEKNPIDFLEAKGYKEVKKDLIIKLPKYSLFELENGRKRMLASAGELQKGNELALPSKYVNFLYLASHYEKLKGSPEDNEQKQLFVEQHKHYLDEIIEQISEFSKRVILADANLDKVLSAYNKHRDKPIREQAENIIHLFTLTNLGAPAAFKYFDTTIDRKRYTSTKEVLDATLIHQSITGLYETRIDLSQLGGDGGEAAAKEAAAKEAAAKEAAAKEAAAKGGTLQLEEEYRLFEPESTQKQEMDIWLKNFPQAWAETGGMGTAHCQAPVLIQLKATATPISIRQYPMPHEAYQGIKPHIRRMLDQGILKPCQSPWNTPLLPVKKPGTEDYRPVQDLREVNKRVEDIHPTVPNPYNLLSTLPPSHPWYTVLDLKDAFFCLRLHSESQLLFAFEWRDPEIGLSGQLTWTRLPQGFKNSPTLFDEALHSDLADFRVRYPALVLLQYVDDLLLAAATRTECLEGTKALLETLGNKGYRASAKKAQICLQEVTYLGYSLKDGQRWLTKARKEAILSIPVPKNSRQVREFLGTAGYCRLWIPGFAELAAPLYPLTRPGTLFQWGTEQQLAFEDIKKALLSSPALGLPDITKPFELFIDENSGFAKGVLVQKLGPWKRPVAYLSKKLDTVASGWPPCLRMVAAIAILVKDAGKLTLGQPLTILTSHPVEALVRQPPNKWLSNARMTHYQAMLLDAERVHFGPTVSLNPATLLPLPSGGNHHDCLQILAETHGTRPDLTDQPLPDADLTWYTDGSSFIRNGEREAGAAVTTESEVIWAAPLPPGTSAQRAELIALTQALKMAEGKKLTVYTDSRYAFATTHVHGEIYRRRGLLTSEGKEIKNKNEILALLEALFLPKRLSIIHCPGHQKGDSPQAKGNRLADDTAKKAATETHSSLTVLPAGKRTADGSEFEKRTADGSEFESPKKKAKVE

SEQ ID NO: 1135 - protein, 2095 aa, synthetic construct
MPAAKRVKLDGGDKKYSIGLDIGTNSVGWAVITDEYKVPSKKFKVLGNTDRHSIKKNLIGALLFDSGETAEATRLKRTARRRYTRRKNRICYLQEIFSNEMAKVDDSFFHRLEESFLVEEDKKHERHPIFGNIVDEVAYHEKYPTIYHLRKKLVDSTDKADLRLIYLALAHMIKFRGHFLIEGDLNPDNSDVDKLFIQLVQTYNQLFEENPINASGVDAKAILSARLSKSRRLENLIAQLPGEKKNGLFGNLIALSLGLTPNFKSNFDLAEDAKLQLSKDTYDDDLDNLLAQIGDQYADLFLAAKNLSDAILLSDILRVNTEITKAPLSASMIKRYDEHHQDLTLLKALVRQQLPEKYKEIFFDQSKNGYAGYIDGGASQEEFYKFIKPILEKMDGTEELLVKLNREDLLRKQRTFDNGSIPHQIHLGELHAILRRQEDFYPFLKDNREKIEKILTFRIPYYVGPLARGNSRFAWMTRKSEETITPWNFEEVVDKGASAQSFIERMTNFDKNLPNEKVLPKHSLLYEYFTVYNELTKVKYVTEGMRKPAFLSGEQKKAIVDLLFKTNRKVTVKQLKEDYFKKIECFDSVEISGVEDRFNASLGTYHDLLKIIKDKDFLDNEENEDILEDIVLTLTLFEDREMIEERLKTYAHLFDDKVMKQLKRRRYTGWGRLSRKLINGIRDKQSGKTILDFLKSDGFANRNFMQLIHDDSLTFKEDIQKAQVSGQGDSLHEHIANLAGSPAIKKGILQTVKVVDELVKVMGRHKPENIVIEMARENQTTQKGQKNSRERMKRIEEGIKELGSQILKEHPVENTQLQNEKLYLYYLQNGRDMYVDQELDINRLSDYDVDHIVPQSFLKDDSIDNKVLTRSDKARGKSDNVPSEEVVKKMKNYWRQLLNAKLITQRKFDNLTKAERGGLSELDKAGFIKRQLVETRQITKHVAQILDSRMNTKYDENDKLIREVKVITLKSKLVSDFRKDFQFYKVREINNYHHAHDAYLNAVVGTALIKKYPKLESEFVYGDYKVYDVRKMIAKSEQEIGKATAKYFFYSNIMNFFKTEITLANGEIRKRPLIETNGETGEIVWDKGRDFATVRKVLSMPQVNIVKKTEVQTGGFSKESILPKRNSDKLIARKKDWDPKKYGGFDSPTVAYSVLVVAKVEKGKSKKLKSVKELLGITIMERSSFEKNPIDFLEAKGYKEVKKDLIIKLPKYSLFELENGRKRMLASAGELQKGNELALPSKYVNFLYLASHYEKLKGSPEDNEQKQLFVEQHKHYLDEIIEQISEFSKRVILADANLDKVLSAYNKHRDKPIREQAENIIHLFTLTNLGAPAAFKYFDTTIDRKRYTSTKEVLDATLIHQSITGLYETRIDLSQLGGDGGGGSEAAAKPAPGGTLQLEEEYRLFEPESTQKQEMDIWLKNFPQAWAETGGMGTAHCQAPVLIQLKATATPISIRQYPMPHEAYQGIKPHIRRMLDQGILKPCQSPWNTPLLPVKKPGTEDYRPVQDLREVNKRVEDIHPTVPNPYNLLSTLPPSHPWYTVLDLKDAFFCLRLHSESQLLFAFEWRDPEIGLSGQLTWTRLPQGFKNSPTLFDEALHSDLADFRVRYPALVLLQYVDDLLLAAATRTECLEGTKALLETLGNKGYRASAKKAQICLQEVTYLGYSLKDGQRWLTKARKEAILSIPVPKNSRQVREFLGTAGYCRLWIPGFAELAAPLYPLTRPGTLFQWGTEQQLAFEDIKKALLSSPALGLPDITKPFELFIDENSGFAKGVLVQKLGPWKRPVAYLSKKLDTVASGWPPCLRMVAAIAILVKDAGKLTLGQPLTILTSHPVEALVRQPPNKWLSNARMTHYQAMLLDAERVHFGPTVSLNPATLLPLPSGGNHHDCLQILAETHGTRPDLTDQPLPDADLTWYTDGSSFIRNGEREAGAAVTTESEVIWAAPLPPGTSAQRAELIALTQALKMAEGKKLTVYTDSRYAFATTHVHGEIYRRRGLLTSEGKEIKNKNEILALLEALFLPKRLSIIHCPGHQKGDSPQAKGNRLADDTAKKAATETHSSLTVLPAGKRTADGSEFEKRTADGSEFESPKKKAKVE

SEQ ID NO: 1136 - protein, 2093 aa, synthetic construct
MPAAKRVKLDGGDKKYSIGLDIGTNSVGWAVITDEYKVPSKKFKVLGNTDRHSIKKNLIGALLFDSGETAEATRLKRTARRRYTRRKNRICYLQEIFSNEMAKVDDSFFHRLEESFLVEEDKKHERHPIFGNIVDEVAYHEKYPTIYHLRKKLVDSTDKADLRLIYLALAHMIKFRGHFLIEGDLNPDNSDVDKLFIQLVQTYNQLFEENPINASGVDAKAILSARLSKSRRLENLIAQLPGEKKNGLFGNLIALSLGLTPNFKSNFDLAEDAKLQLSKDTYDDDLDNLLAQIGDQYADLFLAAKNLSDAILLSDILRVNTEITKAPLSASMIKRYDEHHQDLTLLKALVRQQLPEKYKEIFFDQSKNGYAGYIDGGASQEEFYKFIKPILEKMDGTEELLVKLNREDLLRKQRTFDNGSIPHQIHLGELHAILRRQEDFYPFLKDNREKIEKILTFRIPYYVGPLARGNSRFAWMTRKSEETITPWNFEEVVDKGASAQSFIERMTNFDKNLPNEKVLPKHSLLYEYFTVYNELTKVKYVTEGMRKPAFLSGEQKKAIVDLLFKTNRKVTVKQLKEDYFKKIECFDSVEISGVEDRFNASLGTYHDLLKIIKDKDFLDNEENEDILEDIVLTLTLFEDREMIEERLKTYAHLFDDKVMKQLKRRRYTGWGRLSRKLINGIRDKQSGKTILDFLKSDGFANRNFMQLIHDDSLTFKEDIQKAQVSGQGDSLHEHIANLAGSPAIKKGILQTVKVVDELVKVMGRHKPENIVIEMARENQTTQKGQKNSRERMKRIEEGIKELGSQILKEHPVENTQLQNEKLYLYYLQNGRDMYVDQELDINRLSDYDVDHIVPQSFLKDDSIDNKVLTRSDKARGKSDNVPSEEVVKKMKNYWRQLLNAKLITQRKFDNLTKAERGGLSELDKAGFIKRQLVETRQITKHVAQILDSRMNTKYDENDKLIREVKVITLKSKLVSDFRKDFQFYKVREINNYHHAHDAYLNAVVGTALIKKYPKLESEFVYGDYKVYDVRKMIAKSEQEIGKATAKYFFYSNIMNFFKTEITLANGEIRKRPLIETNGETGEIVWDKGRDFATVRKVLSMPQVNIVKKTEVQTGGFSKESILPKRNSDKLIARKKDWDPKKYGGFDSPTVAYSVLVVAKVEKGKSKKLKSVKELLGITIMERSSFEKNPIDFLEAKGYKEVKKDLIIKLPKYSLFELENGRKRMLASAGELQKGNELALPSKYVNFLYLASHYEKLKGSPEDNEQKQLFVEQHKHYLDEIIEQISEFSKRVILADANLDKVLSAYNKHRDKPIREQAENIIHLFTLTNLGAPAAFKYFDTTIDRKRYTSTKEVLDATLIHQSITGLYETRIDLSQLGGDGGPAPGSSGGGGGTLQLEEEYRLFEPESTQKQEMDIWLKNFPQAWAETGGMGTAHCQAPVLIQLKATATPISIRQYPMPHEAYQGIKPHIRRMLDQGILKPCQSPWNTPLLPVKKPGTEDYRPVQDLREVNKRVEDIHPTVPNPYNLLSTLPPSHPWYTVLDLKDAFFCLRLHSESQLLFAFEWRDPEIGLSGQLTWTRLPQGFKNSPTLFDEALHSDLADFRVRYPALVLLQYVDDLLLAAATRTECLEGTKALLETLGNKGYRASAKKAQICLQEVTYLGYSLKDGQRWLTKARKEAILSIPVPKNSRQVREFLGTAGYCRLWIPGFAELAAPLYPLTRPGTLFQWGTEQQLAFEDIKKALLSSPALGLPDITKPFELFIDENSGFAKGVLVQKLGPWKRPVAYLSKKLDTVASGWPPCLRMVAAIAILVKDAGKLTLGQPLTILTSHPVEALVRQPPNKWLSNARMTHYQAMLLDAERVHFGPTVSLNPATLLPLPSGGNHHDCLQILAETHGTRPDLTDQPLPDADLTWYTDGSSFIRNGEREAGAAVTTESEVIWAAPLPPGTSAQRAELIALTQALKMAEGKKLTVYTDSRYAFATTHVHGEIYRRRGLLTSEGKEIKNKNEILALLEALFLPKRLSIIHCPGHQKGDSPQAKGNRLADDTAKKAATETHSSLTVLPAGKRTADGSEFEKRTADGSEFESPKKKAKVE

SEQ ID NO: 1137 - protein, 2107 aa, synthetic construct
MPAAKRVKLDGGDKKYSIGLDIGTNSVGWAVITDEYKVPSKKFKVLGNTDRHSIKKNLIGALLFDSGETAEATRLKRTARRRYTRRKNRICYLQEIFSNEMAKVDDSFFHRLEESFLVEEDKKHERHPIFGNIVDEVAYHEKYPTIYHLRKKLVDSTDKADLRLIYLALAHMIKFRGHFLIEGDLNPDNSDVDKLFIQLVQTYNQLFEENPINASGVDAKAILSARLSKSRRLENLIAQLPGEKKNGLFGNLIALSLGLTPNFKSNFDLAEDAKLQLSKDTYDDDLDNLLAQIGDQYADLFLAAKNLSDAILLSDILRVNTEITKAPLSASMIKRYDEHHQDLTLLKALVRQQLPEKYKEIFFDQSKNGYAGYIDGGASQEEFYKFIKPILEKMDGTEELLVKLNREDLLRKQRTFDNGSIPHQIHLGELHAILRRQEDFYPFLKDNREKIEKILTFRIPYYVGPLARGNSRFAWMTRKSEETITPWNFEEVVDKGASAQSFIERMTNFDKNLPNEKVLPKHSLLYEYFTVYNELTKVKYVTEGMRKPAFLSGEQKKAIVDLLFKTNRKVTVKQLKEDYFKKIECFDSVEISGVEDRFNASLGTYHDLLKIIKDKDFLDNEENEDILEDIVLTLTLFEDREMIEERLKTYAHLFDDKVMKQLKRRRYTGWGRLSRKLINGIRDKQSGKTILDFLKSDGFANRNFMQLIHDDSLTFKEDIQKAQVSGQGDSLHEHIANLAGSPAIKKGILQTVKVVDELVKVMGRHKPENIVIEMARENQTTQKGQKNSRERMKRIEEGIKELGSQILKEHPVENTQLQNEKLYLYYLQNGRDMYVDQELDINRLSDYDVDHIVPQSFLKDDSIDNKVLTRSDKARGKSDNVPSEEVVKKMKNYWRQLLNAKLITQRKFDNLTKAERGGLSELDKAGFIKRQLVETRQITKHVAQILDSRMNTKYDENDKLIREVKVITLKSKLVSDFRKDFQFYKVREINNYHHAHDAYLNAVVGTALIKKYPKLESEFVYGDYKVYDVRKMIAKSEQEIGKATAKYFFYSNIMNFFKTEITLANGEIRKRPLIETNGETGEIVWDKGRDFATVRKVLSMPQVNIVKKTEVQTGGFSKESILPKRNSDKLIARKKDWDPKKYGGFDSPTVAYSVLVVAKVEKGKSKKLKSVKELLGITIMERSSFEKNPIDFLEAKGYKEVKKDLIIKLPKYSLFELENGRKRMLASAGELQKGNELALPSKYVNFLYLASHYEKLKGSPEDNEQKQLFVEQHKHYLDEIIEQISEFSKRVILADANLDKVLSAYNKHRDKPIREQAENIIHLFTLTNLGAPAAFKYFDTTIDRKRYTSTKEVLDATLIHQSITGLYETRIDLSQLGGDGGEAAAKEAAAKEAAAKEAAAKGGTAPLEEEYRLFLEAPIQNVTLLEQWKREIPKVWAEINPPGLASTQAPIHVQLLSTALPVRVRQYPITLEAKRSLRETIRKFRAAGILRPVHSPWNTPLLPVRKSGTSEYRMVQDLREVNKRVETIHPTVPNPYTLLSLLPPDRIWYSVLDLKDAFFCIPLAPESQLIFAFEWADAEEGESGQLTWTRLPQGFKNSPTLFNEALNRDLQGFRLDHPSVSLLQYVDDLLIAADTQAACLSATRDLLMTLAELGYRVSGKKAQLCQEEVTYLGFKIHKGSRSLSNSRTQAILQIPVPKTKRQVREFLGTIGYCRLWIPGFAELAQPLYAATRPGNDPLVWGEKEEEAFQSLKLALTQPPALALPSLDKPFQLFVEETSGAAKGVLTQALGPWKRPVAYLSKRLDPVAAGWPRCLRAIAAAALLTREASKLTFGQDIEITSSHNLESLLRSPPDKWLTNARITQYQVLLLDPPRVRFKQTAALNPATLLPETDDTLPIHHCLDTLDSLTSTRPDLTDQPLAQAEATLFTDGSSYIRDGKRYAGAAVVTLDSVIWAEPLPIGTSAQKAELIALTKALEWSKDKSVNIYTDSRYAFATLHVHGMIYRERGWLTAGGKAIKNAPEILALLTAVWLPKRVAVMHCKGHQKDDAPTSTGNRRADEVAREVAIRPLSTQATISAGKRTADGSEFEKRTADGSEFESPKKKAKVE

SEQ ID NO: 1138 - protein, 2100 aa, synthetic construct
MPAAKRVKLDGGDKKYSIGLDIGTNSVGWAVITDEYKVPSKKFKVLGNTDRHSIKKNLIGALLFDSGETAEATRLKRTARRRYTRRKNRICYLQEIFSNEMAKVDDSFFHRLEESFLVEEDKKHERHPIFGNIVDEVAYHEKYPTIYHLRKKLVDSTDKADLRLIYLALAHMIKFRGHFLIEGDLNPDNSDVDKLFIQLVQTYNQLFEENPINASGVDAKAILSARLSKSRRLENLIAQLPGEKKNGLFGNLIALSLGLTPNFKSNFDLAEDAKLQLSKDTYDDDLDNLLAQIGDQYADLFLAAKNLSDAILLSDILRVNTEITKAPLSASMIKRYDEHHQDLTLLKALVRQQLPEKYKEIFFDQSKNGYAGYIDGGASQEEFYKFIKPILEKMDGTEELLVKLNREDLLRKQRTFDNGSIPHQIHLGELHAILRRQEDFYPFLKDNREKIEKILTFRIPYYVGPLARGNSRFAWMTRKSEETITPWNFEEVVDKGASAQSFIERMTNFDKNLPNEKVLPKHSLLYEYFTVYNELTKVKYVTEGMRKPAFLSGEQKKAIVDLLFKTNRKVTVKQLKEDYFKKIECFDSVEISGVEDRFNASLGTYHDLLKIIKDKDFLDNEENEDILEDIVLTLTLFEDREMIEERLKTYAHLFDDKVMKQLKRRRYTGWGRLSRKLINGIRDKQSGKTILDFLKSDGFANRNFMQLIHDDSLTFKEDIQKAQVSGQGDSLHEHIANLAGSPAIKKGILQTVKVVDELVKVMGRHKPENIVIEMARENQTTQKGQKNSRERMKRIEEGIKELGSQILKEHPVENTQLQNEKLYLYYLQNGRDMYVDQELDINRLSDYDVDHIVPQSFLKDDSIDNKVLTRSDKARGKSDNVPSEEVVKKMKNYWRQLLNAKLITQRKFDNLTKAERGGLSELDKAGFIKRQLVETRQITKHVAQILDSRMNTKYDENDKLIREVKVITLKSKLVSDFRKDFQFYKVREINNYHHAHDAYLNAVVGTALIKKYPKLESEFVYGDYKVYDVRKMIAKSEQEIGKATAKYFFYSNIMNFFKTEITLANGEIRKRPLIETNGETGEIVWDKGRDFATVRKVLSMPQVNIVKKTEVQTGGFSKESILPKRNSDKLIARKKDWDPKKYGGFDSPTVAYSVLVVAKVEKGKSKKLKSVKELLGITIMERSSFEKNPIDFLEAKGYKEVKKDLIIKLPKYSLFELENGRKRMLASAGELQKGNELALPSKYVNFLYLASHYEKLKGSPEDNEQKQLFVEQHKHYLDEIIEQISEFSKRVILADANLDKVLSAYNKHRDKPIREQAENIIHLFTLTNLGAPAAFKYFDTTIDRKRYTSTKEVLDATLIHQSITGLYETRIDLSQLGGDGGPAPAPAPAPAPAPGGTAPLEEEYRLFLEAPIQNVTLLEQWKREIPKVWAEINPPGLASTQAPIHVQLLSTALPVRVRQYPITLEAKRSLRETIRKFRAAGILRPVHSPWNTPLLPVRKSGTSEYRMVQDLREVNKRVETIHPTVPNPYTLLSLLPPDRIWYSVLDLKDAFFCIPLAPESQLIFAFEWADAEEGESGQLTWTRLPQGFKNSPTLFNEALNRDLQGFRLDHPSVSLLQYVDDLLIAADTQAACLSATRDLLMTLAELGYRVSGKKAQLCQEEVTYLGFKIHKGSRSLSNSRTQAILQIPVPKTKRQVREFLGTIGYCRLWIPGFAELAQPLYAATRPGNDPLVWGEKEEEAFQSLKLALTQPPALALPSLDKPFQLFVEETSGAAKGVLTQALGPWKRPVAYLSKRLDPVAAGWPRCLRAIAAAALLTREASKLTFGQDIEITSSHNLESLLRSPPDKWLTNARITQYQVLLLDPPRVRFKQTAALNPATLLPETDDTLPIHHCLDTLDSLTSTRPDLTDQPLAQAEATLFTDGSSYIRDGKRYAGAAVVTLDSVIWAEPLPIGTSAQKAELIALTKALEWSKDKSVNIYTDSRYAFATLHVHGMIYRERGWLTAGGKAIKNAPEILALLTAVWLPKRVAVMHCKGHQKDDAPTSTGNRRADEVAREVAIRPLSTQATISAGKRTADGSEFEKRTADGSEFESPKKKAKVE

SEQ ID NO: 1139 - protein, 2098 aa, synthetic construct
MPAAKRVKLDGGDKKYSIGLDIGTNSVGWAVITDEYKVPSKKFKVLGNTDRHSIKKNLIGALLFDSGETAEATRLKRTARRRYTRRKNRICYLQEIFSNEMAKVDDSFFHRLEESFLVEEDKKHERHPIFGNIVDEVAYHEKYPTIYHLRKKLVDSTDKADLRLIYLALAHMIKFRGHFLIEGDLNPDNSDVDKLFIQLVQTYNQLFEENPINASGVDAKAILSARLSKSRRLENLIAQLPGEKKNGLFGNLIALSLGLTPNFKSNFDLAEDAKLQLSKDTYDDDLDNLLAQIGDQYADLFLAAKNLSDAILLSDILRVNTEITKAPLSASMIKRYDEHHQDLTLLKALVRQQLPEKYKEIFFDQSKNGYAGYIDGGASQEEFYKFIKPILEKMDGTEELLVKLNREDLLRKQRTFDNGSIPHQIHLGELHAILRRQEDFYPFLKDNREKIEKILTFRIPYYVGPLARGNSRFAWMTRKSEETITPWNFEEVVDKGASAQSFIERMTNFDKNLPNEKVLPKHSLLYEYFTVYNELTKVKYVTEGMRKPAFLSGEQKKAIVDLLFKTNRKVTVKQLKEDYFKKIECFDSVEISGVEDRFNASLGTYHDLLKIIKDKDFLDNEENEDILEDIVLTLTLFEDREMIEERLKTYAHLFDDKVMKQLKRRRYTGWGRLSRKLINGIRDKQSGKTILDFLKSDGFANRNFMQLIHDDSLTFKEDIQKAQVSGQGDSLHEHIANLAGSPAIKKGILQTVKVVDELVKVMGRHKPENIVIEMARENQTTQKGQKNSRERMKRIEEGIKELGSQILKEHPVENTQLQNEKLYLYYLQNGRDMYVDQELDINRLSDYDVDHIVPQSFLKDDSIDNKVLTRSDKARGKSDNVPSEEVVKKMKNYWRQLLNAKLITQRKFDNLTKAERGGLSELDKAGFIKRQLVETRQITKHVAQILDSRMNTKYDENDKLIREVKVITLKSKLVSDFRKDFQFYKVREINNYHHAHDAYLNAVVGTALIKKYPKLESEFVYGDYKVYDVRKMIAKSEQEIGKATAKYFFYSNIMNFFKTEITLANGEIRKRPLIETNGETGEIVWDKGRDFATVRKVLSMPQVNIVKKTEVQTGGFSKESILPKRNSDKLIARKKDWDPKKYGGFDSPTVAYSVLVVAKVEKGKSKKLKSVKELLGITIMERSSFEKNPIDFLEAKGYKEVKKDLIIKLPKYSLFELENGRKRMLASAGELQKGNELALPSKYVNFLYLASHYEKLKGSPEDNEQKQLFVEQHKHYLDEIIEQISEFSKRVILADANLDKVLSAYNKHRDKPIREQAENIIHLFTLTNLGAPAAFKYFDTTIDRKRYTSTKEVLDATLIHQSITGLYETRIDLSQLGGDGGEAAAKGGSPAPGGTAPLEEEYRLFLEAPIQNVTLLEQWKREIPKVWAEINPPGLASTQAPIHVQLLSTALPVRVRQYPITLEAKRSLRETIRKFRAAGILRPVHSPWNTPLLPVRKSGTSEYRMVQDLREVNKRVETIHPTVPNPYTLLSLLPPDRIWYSVLDLKDAFFCIPLAPESQLIFAFEWADAEEGESGQLTWTRLPQGFKNSPTLFNEALNRDLQGFRLDHPSVSLLQYVDDLLIAADTQAACLSATRDLLMTLAELGYRVSGKKAQLCQEEVTYLGFKIHKGSRSLSNSRTQAILQIPVPKTKRQVREFLGTIGYCRLWIPGFAELAQPLYAATRPGNDPLVWGEKEEEAFQSLKLALTQPPALALPSLDKPFQLFVEETSGAAKGVLTQALGPWKRPVAYLSKRLDPVAAGWPRCLRAIAAAALLTREASKLTFGQDIEITSSHNLESLLRSPPDKWLTNARITQYQVLLLDPPRVRFKQTAALNPATLLPETDDTLPIHHCLDTLDSLTSTRPDLTDQPLAQAEATLFTDGSSYIRDGKRYAGAAVVTLDSVIWAEPLPIGTSAQKAELIALTKALEWSKDKSVNIYTDSRYAFATLHVHGMIYRERGWLTAGGKAIKNAPEILALLTAVWLPKRVAVMHCKGHQKDDAPTSTGNRRADEVAREVAIRPLSTQATISAGKRTADGSEFEKRTADGSEFESPKKKAKVE

SEQ ID NO: 1140 - protein, 2096 aa, synthetic construct
MPAAKRVKLDGGDKKYSIGLDIGTNSVGWAVITDEYKVPSKKFKVLGNTDRHSIKKNLIGALLFDSGETAEATRLKRTARRRYTRRKNRICYLQEIFSNEMAKVDDSFFHRLEESFLVEEDKKHERHPIFGNIVDEVAYHEKYPTIYHLRKKLVDSTDKADLRLIYLALAHMIKFRGHFLIEGDLNPDNSDVDKLFIQLVQTYNQLFEENPINASGVDAKAILSARLSKSRRLENLIAQLPGEKKNGLFGNLIALSLGLTPNFKSNFDLAEDAKLQLSKDTYDDDLDNLLAQIGDQYADLFLAAKNLSDAILLSDILRVNTEITKAPLSASMIKRYDEHHQDLTLLKALVRQQLPEKYKEIFFDQSKNGYAGYIDGGASQEEFYKFIKPILEKMDGTEELLVKLNREDLLRKQRTFDNGSIPHQIHLGELHAILRRQEDFYPFLKDNREKIEKILTFRIPYYVGPLARGNSRFAWMTRKSEETITPWNFEEVVDKGASAQSFIERMTNFDKNLPNEKVLPKHSLLYEYFTVYNELTKVKYVTEGMRKPAFLSGEQKKAIVDLLFKTNRKVTVKQLKEDYFKKIECFDSVEISGVEDRFNASLGTYHDLLKIIKDKDFLDNEENEDILEDIVLTLTLFEDREMIEERLKTYAHLFDDKVMKQLKRRRYTGWGRLSRKLINGIRDKQSGKTILDFLKSDGFANRNFMQLIHDDSLTFKEDIQKAQVSGQGDSLHEHIANLAGSPAIKKGILQTVKVVDELVKVMGRHKPENIVIEMARENQTTQKGQKNSRERMKRIEEGIKELGSQILKEHPVENTQLQNEKLYLYYLQNGRDMYVDQELDINRLSDYDVDHIVPQSFLKDDSIDNKVLTRSDKARGKSDNVPSEEVVKKMKNYWRQLLNAKLITQRKFDNLTKAERGGLSELDKAGFIKRQLVETRQITKHVAQILDSRMNTKYDENDKLIREVKVITLKSKLVSDFRKDFQFYKVREINNYHHAHDAYLNAVVGTALIKKYPKLESEFVYGDYKVYDVRKMIAKSEQEIGKATAKYFFYSNIMNFFKTEITLANGEIRKRPLIETNGETGEIVWDKGRDFATVRKVLSMPQVNIVKKTEVQTGGFSKESILPKRNSDKLIARKKDWDPKKYGGFDSPTVAYSVLVVAKVEKGKSKKLKSVKELLGITIMERSSFEKNPIDFLEAKGYKEVKKDLIIKLPKYSLFELENGRKRMLASAGELQKGNELALPSKYVNFLYLASHYEKLKGSPEDNEQKQLFVEQHKHYLDEIIEQISEFSKRVILADANLDKVLSAYNKHRDKPIREQAENIIHLFTLTNLGAPAAFKYFDTTIDRKRYTSTKEVLDATLIHQSITGLYETRIDLSQLGGDGGGGGPAPGSSGGTAPLEEEYRLFLEAPIQNVTLLEQWKREIPKVWAEINPPGLASTQAPIHVQLLSTALPVRVRQYPITLEAKRSLRETIRKFRAAGILRPVHSPWNTPLLPVRKSGTSEYRMVQDLREVNKRVETIHPTVPNPYTLLSLLPPDRIWYSVLDLKDAFFCIPLAPESQLIFAFEWADAEEGESGQLTWTRLPQGFKNSPTLFNEALNRDLQGFRLDHPSVSLLQYVDDLLIAADTQAACLSATRDLLMTLAELGYRVSGKKAQLCQEEVTYLGFKIHKGSRSLSNSRTQAILQIPVPKTKRQVREFLGTIGYCRLWIPGFAELAQPLYAATRPGNDPLVWGEKEEEAFQSLKLALTQPPALALPSLDKPFQLFVEETSGAAKGVLTQALGPWKRPVAYLSKRLDPVAAGWPRCLRAIAAAALLTREASKLTFGQDIEITSSHNLESLLRSPPDKWLTNARITQYQVLLLDPPRVRFKQTAALNPATLLPETDDTLPIHHCLDTLDSLTSTRPDLTDQPLAQAEATLFTDGSSYIRDGKRYAGAAVVTLDSVIWAEPLPIGTSAQKAELIALTKALEWSKDKSVNIYTDSRYAFATLHVHGMIYRERGWLTAGGKAIKNAPEILALLTAVWLPKRVAVMHCKGHQKDDAPTSTGNRRADEVAREVAIRPLSTQATISAGKRTADGSEFEKRTADGSEFESPKKKAKVE

SEQ ID NO: 1141 - protein, 2095 aa, synthetic construct
MPAAKRVKLDGGDKKYSIGLDIGTNSVGWAVITDEYKVPSKKFKVLGNTDRHSIKKNLIGALLFDSGETAEATRLKRTARRRYTRRKNRICYLQEIFSNEMAKVDDSFFHRLEESFLVEEDKKHERHPIFGNIVDEVAYHEKYPTIYHLRKKLVDSTDKADLRLIYLALAHMIKFRGHFLIEGDLNPDNSDVDKLFIQLVQTYNQLFEENPINASGVDAKAILSARLSKSRRLENLIAQLPGEKKNGLFGNLIALSLGLTPNFKSNFDLAEDAKLQLSKDTYDDDLDNLLAQIGDQYADLFLAAKNLSDAILLSDILRVNTEITKAPLSASMIKRYDEHHQDLTLLKALVRQQLPEKYKEIFFDQSKNGYAGYIDGGASQEEFYKFIKPILEKMDGTEELLVKLNREDLLRKQRTFDNGSIPHQIHLGELHAILRRQEDFYPFLKDNREKIEKILTFRIPYYVGPLARGNSRFAWMTRKSEETITPWNFEEVVDKGASAQSFIERMTNFDKNLPNEKVLPKHSLLYEYFTVYNELTKVKYVTEGMRKPAFLSGEQKKAIVDLLFKTNRKVTVKQLKEDYFKKIECFDSVEISGVEDRFNASLGTYHDLLKIIKDKDFLDNEENEDILEDIVLTLTLFEDREMIEERLKTYAHLFDDKVMKQLKRRRYTGWGRLSRKLINGIRDKQSGKTILDFLKSDGFANRNFMQLIHDDSLTFKEDIQKAQVSGQGDSLHEHIANLAGSPAIKKGILQTVKVVDELVKVMGRHKPENIVIEMARENQTTQKGQKNSRERMKRIEEGIKELGSQILKEHPVENTQLQNEKLYLYYLQNGRDMYVDQELDINRLSDYDVDHIVPQSFLKDDSIDNKVLTRSDKARGKSDNVPSEEVVKKMKNYWRQLLNAKLITQRKFDNLTKAERGGLSELDKAGFIKRQLVETRQITKHVAQILDSRMNTKYDENDKLIREVKVITLKSKLVSDFRKDFQFYKVREINNYHHAHDAYLNAVVGTALIKKYPKLESEFVYGDYKVYDVRKMIAKSEQEIGKATAKYFFYSNIMNFFKTEITLANGEIRKRPLIETNGETGEIVWDKGRDFATVRKVLSMPQVNIVKKTEVQTGGFSKESILPKRNSDKLIARKKDWDPKKYGGFDSPTVAYSVLVVAKVEKGKSKKLKSVKELLGITIMERSSFEKNPIDFLEAKGYKEVKKDLIIKLPKYSLFELENGRKRMLASAGELQKGNELALPSKYVNFLYLASHYEKLKGSPEDNEQKQLFVEQHKHYLDEIIEQISEFSKRVILADANLDKVLSAYNKHRDKPIREQAENIIHLFTLTNLGAPAAFKYFDTTIDRKRYTSTKEVLDATLIHQSITGLYETRIDLSQLGGDGGEAAAKGGGGGTAPLEEEYRLFLEAPIQNVTLLEQWKREIPKVWAEINPPGLASTQAPIHVQLLSTALPVRVRQYPITLEAKRSLRETIRKFRAAGILRPVHSPWNTPLLPVRKSGTSEYRMVQDLREVNKRVETIHPTVPNPYTLLSLLPPDRIWYSVLDLKDAFFCIPLAPESQLIFAFEWADAEEGESGQLTWTRLPQGFKNSPTLFNEALNRDLQGFRLDHPSVSLLQYVDDLLIAADTQAACLSATRDLLMTLAELGYRVSGKKAQLCQEEVTYLGFKIHKGSRSLSNSRTQAILQIPVPKTKRQVREFLGTIGYCRLWIPGFAELAQPLYAATRPGNDPLVWGEKEEEAFQSLKLALTQPPALALPSLDKPFQLFVEETSGAAKGVLTQALGPWKRPVAYLSKRLDPVAAGWPRCLRAIAAAALLTREASKLTFGQDIEITSSHNLESLLRSPPDKWLTNARITQYQVLLLDPPRVRFKQTAALNPATLLPETDDTLPIHHCLDTLDSLTSTRPDLTDQPLAQAEATLFTDGSSYIRDGKRYAGAAVVTLDSVIWAEPLPIGTSAQKAELIALTKALEWSKDKSVNIYTDSRYAFATLHVHGMIYRERGWLTAGGKAIKNAPEILALLTAVWLPKRVAVMHCKGHQKDDAPTSTGNRRADEVAREVAIRPLSTQATISAGKRTADGSEFEKRTADGSEFESPKKKAKVE

SEQ ID NO: 1142 - protein, 2098 aa, synthetic construct
MPAAKRVKLDGGDKKYSIGLDIGTNSVGWAVITDEYKVPSKKFKVLGNTDRHSIKKNLIGALLFDSGETAEATRLKRTARRRYTRRKNRICYLQEIFSNEMAKVDDSFFHRLEESFLVEEDKKHERHPIFGNIVDEVAYHEKYPTIYHLRKKLVDSTDKADLRLIYLALAHMIKFRGHFLIEGDLNPDNSDVDKLFIQLVQTYNQLFEENPINASGVDAKAILSARLSKSRRLENLIAQLPGEKKNGLFGNLIALSLGLTPNFKSNFDLAEDAKLQLSKDTYDDDLDNLLAQIGDQYADLFLAAKNLSDAILLSDILRVNTEITKAPLSASMIKRYDEHHQDLTLLKALVRQQLPEKYKEIFFDQSKNGYAGYIDGGASQEEFYKFIKPILEKMDGTEELLVKLNREDLLRKQRTFDNGSIPHQIHLGELHAILRRQEDFYPFLKDNREKIEKILTFRIPYYVGPLARGNSRFAWMTRKSEETITPWNFEEVVDKGASAQSFIERMTNFDKNLPNEKVLPKHSLLYEYFTVYNELTKVKYVTEGMRKPAFLSGEQKKAIVDLLFKTNRKVTVKQLKEDYFKKIECFDSVEISGVEDRFNASLGTYHDLLKIIKDKDFLDNEENEDILEDIVLTLTLFEDREMIEERLKTYAHLFDDKVMKQLKRRRYTGWGRLSRKLINGIRDKQSGKTILDFLKSDGFANRNFMQLIHDDSLTFKEDIQKAQVSGQGDSLHEHIANLAGSPAIKKGILQTVKVVDELVKVMGRHKPENIVIEMARENQTTQKGQKNSRERMKRIEEGIKELGSQILKEHPVENTQLQNEKLYLYYLQNGRDMYVDQELDINRLSDYDVDHIVPQSFLKDDSIDNKVLTRSDKARGKSDNVPSEEVVKKMKNYWRQLLNAKLITQRKFDNLTKAERGGLSELDKAGFIKRQLVETRQITKHVAQILDSRMNTKYDENDKLIREVKVITLKSKLVSDFRKDFQFYKVREINNYHHAHDAYLNAVVGTALIKKYPKLESEFVYGDYKVYDVRKMIAKSEQEIGKATAKYFFYSNIMNFFKTEITLANGEIRKRPLIETNGETGEIVWDKGRDFATVRKVLSMPQVNIVKKTEVQTGGFSKESILPKRNSDKLIARKKDWDPKKYGGFDSPTVAYSVLVVAKVEKGKSKKLKSVKELLGITIMERSSFEKNPIDFLEAKGYKEVKKDLIIKLPKYSLFELENGRKRMLASAGELQKGNELALPSKYVNFLYLASHYEKLKGSPEDNEQKQLFVEQHKHYLDEIIEQISEFSKRVILADANLDKVLSAYNKHRDKPIREQAENIIHLFTLTNLGAPAAFKYFDTTIDRKRYTSTKEVLDATLIHQSITGLYETRIDLSQLGGDGGGGGEAAAKGSSGGTAPLEEEYRLFLEAPIQNVTLLEQWKREIPKVWAEINPPGLASTQAPIHVQLLSTALPVRVRQYPITLEAKRSLRETIRKFRAAGILRPVHSPWNTPLLPVRKSGTSEYRMVQDLREVNKRVETIHPTVPNPYTLLSLLPPDRIWYSVLDLKDAFFCIPLAPESQLIFAFEWADAEEGESGQLTWTRLPQGFKNSPTLFNEALNRDLQGFRLDHPSVSLLQYVDDLLIAADTQAACLSATRDLLMTLAELGYRVSGKKAQLCQEEVTYLGFKIHKGSRSLSNSRTQAILQIPVPKTKRQVREFLGTIGYCRLWIPGFAELAQPLYAATRPGNDPLVWGEKEEEAFQSLKLALTQPPALALPSLDKPFQLFVEETSGAAKGVLTQALGPWKRPVAYLSKRLDPVAAGWPRCLRAIAAAALLTREASKLTFGQDIEITSSHNLESLLRSPPDKWLTNARITQYQVLLLDPPRVRFKQTAALNPATLLPETDDTLPIHHCLDTLDSLTSTRPDLTDQPLAQAEATLFTDGSSYIRDGKRYAGAAVVTLDSVIWAEPLPIGTSAQKAELIALTKALEWSKDKSVNIYTDSRYAFATLHVHGMIYRERGWLTAGGKAIKNAPEILALLTAVWLPKRVAVMHCKGHQKDDAPTSTGNRRADEVAREVAIRPLSTQATISAGKRTADGSEFEKRTADGSEFESPKKKAKVE

SEQ ID NO: 1143 - protein, 2102 aa, synthetic construct
MPAAKRVKLDGGDKKYSIGLDIGTNSVGWAVITDEYKVPSKKFKVLGNTDRHSIKKNLIGALLFDSGETAEATRLKRTARRRYTRRKNRICYLQEIFSNEMAKVDDSFFHRLEESFLVEEDKKHERHPIFGNIVDEVAYHEKYPTIYHLRKKLVDSTDKADLRLIYLALAHMIKFRGHFLIEGDLNPDNSDVDKLFIQLVQTYNQLFEENPINASGVDAKAILSARLSKSRRLENLIAQLPGEKKNGLFGNLIALSLGLTPNFKSNFDLAEDAKLQLSKDTYDDDLDNLLAQIGDQYADLFLAAKNLSDAILLSDILRVNTEITKAPLSASMIKRYDEHHQDLTLLKALVRQQLPEKYKEIFFDQSKNGYAGYIDGGASQEEFYKFIKPILEKMDGTEELLVKLNREDLLRKQRTFDNGSIPHQIHLGELHAILRRQEDFYPFLKDNREKIEKILTFRIPYYVGPLARGNSRFAWMTRKSEETITPWNFEEVVDKGASAQSFIERMTNFDKNLPNEKVLPKHSLLYEYFTVYNELTKVKYVTEGMRKPAFLSGEQKKAIVDLLFKTNRKVTVKQLKEDYFKKIECFDSVEISGVEDRFNASLGTYHDLLKIIKDKDFLDNEENEDILEDIVLTLTLFEDREMIEERLKTYAHLFDDKVMKQLKRRRYTGWGRLSRKLINGIRDKQSGKTILDFLKSDGFANRNFMQLIHDDSLTFKEDIQKAQVSGQGDSLHEHIANLAGSPAIKKGILQTVKVVDELVKVMGRHKPENIVIEMARENQTTQKGQKNSRERMKRIEEGIKELGSQILKEHPVENTQLQNEKLYLYYLQNGRDMYVDQELDINRLSDYDVDHIVPQSFLKDDSIDNKVLTRSDKARGKSDNVPSEEVVKKMKNYWRQLLNAKLITQRKFDNLTKAERGGLSELDKAGFIKRQLVETRQITKHVAQILDSRMNTKYDENDKLIREVKVITLKSKLVSDFRKDFQFYKVREINNYHHAHDAYLNAVVGTALIKKYPKLESEFVYGDYKVYDVRKMIAKSEQEIGKATAKYFFYSNIMNFFKTEITLANGEIRKRPLIETNGETGEIVWDKGRDFATVRKVLSMPQVNIVKKTEVQTGGFSKESILPKRNSDKLIARKKDWDPKKYGGFDSPTVAYSVLVVAKVEKGKSKKLKSVKELLGITIMERSSFEKNPIDFLEAKGYKEVKKDLIIKLPKYSLFELENGRKRMLASAGELQKGNELALPSKYVNFLYLASHYEKLKGSPEDNEQKQLFVEQHKHYLDEIIEQISEFSKRVILADANLDKVLSAYNKHRDKPIREQAENIIHLFTLTNLGAPAAFKYFDTTIDRKRYTSTKEVLDATLIHQSITGLYETRIDLSQLGGDGGGSSGSSGSSGSSGSSGGTAPLEEEYRLFLEAPIQNVTLLEQWKREIPKVWAEINPPGLASTQAPIHVQLLSTALPVRVRQYPITLEAKRSLRETIRKFRAAGILRPVHSPWNTPLLPVRKSGTSEYRMVQDLREVNKRVETIHPTVPNPYTLLSLLPPDRIWYSVLDLKDAFFCIPLAPESQLIFAFEWADAEEGESGQLTWTRLPQGFKNSPTLFNEALNRDLQGFRLDHPSVSLLQYVDDLLIAADTQAACLSATRDLLMTLAELGYRVSGKKAQLCQEEVTYLGFKIHKGSRSLSNSRTQAILQIPVPKTKRQVREFLGTIGYCRLWIPGFAELAQPLYAATRPGNDPLVWGEKEEEAFQSLKLALTQPPALALPSLDKPFQLFVEETSGAAKGVLTQALGPWKRPVAYLSKRLDPVAAGWPRCLRAIAAAALLTREASKLTFGQDIEITSSHNLESLLRSPPDKWLTNARITQYQVLLLDPPRVRFKQTAALNPATLLPETDDTLPIHHCLDTLDSLTSTRPDLTDQPLAQAEATLFTDGSSYIRDGKRYAGAAVVTLDSVIWAEPLPIGTSAQKAELIALTKALEWSKDKSVNIYTDSRYAFATLHVHGMIYRERGWLTAGGKAIKNAPEILALLTAVWLPKRVAVMHCKGHQKDDAPTSTGNRRADEVAREVAIRPLSTQATISAGKRTADGSEFEKRTADGSEFESPKKKAKVE

SEQ ID NO: 1144 - protein, 2090 aa, synthetic construct
MPAAKRVKLDGGDKKYSIGLDIGTNSVGWAVITDEYKVPSKKFKVLGNTDRHSIKKNLIGALLFDSGETAEATRLKRTARRRYTRRKNRICYLQEIFSNEMAKVDDSFFHRLEESFLVEEDKKHERHPIFGNIVDEVAYHEKYPTIYHLRKKLVDSTDKADLRLIYLALAHMIKFRGHFLIEGDLNPDNSDVDKLFIQLVQTYNQLFEENPINASGVDAKAILSARLSKSRRLENLIAQLPGEKKNGLFGNLIALSLGLTPNFKSNFDLAEDAKLQLSKDTYDDDLDNLLAQIGDQYADLFLAAKNLSDAILLSDILRVNTEITKAPLSASMIKRYDEHHQDLTLLKALVRQQLPEKYKEIFFDQSKNGYAGYIDGGASQEEFYKFIKPILEKMDGTEELLVKLNREDLLRKQRTFDNGSIPHQIHLGELHAILRRQEDFYPFLKDNREKIEKILTFRIPYYVGPLARGNSRFAWMTRKSEETITPWNFEEVVDKGASAQSFIERMTNFDKNLPNEKVLPKHSLLYEYFTVYNELTKVKYVTEGMRKPAFLSGEQKKAIVDLLFKTNRKVTVKQLKEDYFKKIECFDSVEISGVEDRFNASLGTYHDLLKIIKDKDFLDNEENEDILEDIVLTLTLFEDREMIEERLKTYAHLFDDKVMKQLKRRRYTGWGRLSRKLINGIRDKQSGKTILDFLKSDGFANRNFMQLIHDDSLTFKEDIQKAQVSGQGDSLHEHIANLAGSPAIKKGILQTVKVVDELVKVMGRHKPENIVIEMARENQTTQKGQKNSRERMKRIEEGIKELGSQILKEHPVENTQLQNEKLYLYYLQNGRDMYVDQELDINRLSDYDVDHIVPQSFLKDDSIDNKVLTRSDKARGKSDNVPSEEVVKKMKNYWRQLLNAKLITQRKFDNLTKAERGGLSELDKAGFIKRQLVETRQITKHVAQILDSRMNTKYDENDKLIREVKVITLKSKLVSDFRKDFQFYKVREINNYHHAHDAYLNAVVGTALIKKYPKLESEFVYGDYKVYDVRKMIAKSEQEIGKATAKYFFYSNIMNFFKTEITLANGEIRKRPLIETNGETGEIVWDKGRDFATVRKVLSMPQVNIVKKTEVQTGGFSKESILPKRNSDKLIARKKDWDPKKYGGFDSPTVAYSVLVVAKVEKGKSKKLKSVKELLGITIMERSSFEKNPIDFLEAKGYKEVKKDLIIKLPKYSLFELENGRKRMLASAGELQKGNELALPSKYVNFLYLASHYEKLKGSPEDNEQKQLFVEQHKHYLDEIIEQISEFSKRVILADANLDKVLSAYNKHRDKPIREQAENIIHLFTLTNLGAPAAFKYFDTTIDRKRYTSTKEVLDATLIHQSITGLYETRIDLSQLGGDGGGGSGGTAPLEEEYRLFLEAPIQNVTLLEQWKREIPKVWAEINPPGLASTQAPIHVQLLSTALPVRVRQYPITLEAKRSLRETIRKFRAAGILRPVHSPWNTPLLPVRKSGTSEYRMVQDLREVNKRVETIHPTVPNPYTLLSLLPPDRIWYSVLDLKDAFFCIPLAPESQLIFAFEWADAEEGESGQLTWTRLPQGFKNSPTLFNEALNRDLQGFRLDHPSVSLLQYVDDLLIAADTQAACLSATRDLLMTLAELGYRVSGKKAQLCQEEVTYLGFKIHKGSRSLSNSRTQAILQIPVPKTKRQVREFLGTIGYCRLWIPGFAELAQPLYAATRPGNDPLVWGEKEEEAFQSLKLALTQPPALALPSLDKPFQLFVEETSGAAKGVLTQALGPWKRPVAYLSKRLDPVAAGWPRCLRAIAAAALLTREASKLTFGQDIEITSSHNLESLLRSPPDKWLTNARITQYQVLLLDPPRVRFKQTAALNPATLLPETDDTLPIHHCLDTLDSLTSTRPDLTDQPLAQAEATLFTDGSSYIRDGKRYAGAAVVTLDSVIWAEPLPIGTSAQKAELIALTKALEWSKDKSVNIYTDSRYAFATLHVHGMIYRERGWLTAGGKAIKNAPEILALLTAVWLPKRVAVMHCKGHQKDDAPTSTGNRRADEVAREVAIRPLSTQATISAGKRTADGSEFEKRTADGSEFESPKKKAKVE

SEQ ID NO: 1145 - protein, 2098 aa, synthetic construct
MPAAKRVKLDGGDKKYSIGLDIGTNSVGWAVITDEYKVPSKKFKVLGNTDRHSIKKNLIGALLFDSGETAEATRLKRTARRRYTRRKNRICYLQEIFSNEMAKVDDSFFHRLEESFLVEEDKKHERHPIFGNIVDEVAYHEKYPTIYHLRKKLVDSTDKADLRLIYLALAHMIKFRGHFLIEGDLNPDNSDVDKLFIQLVQTYNQLFEENPINASGVDAKAILSARLSKSRRLENLIAQLPGEKKNGLFGNLIALSLGLTPNFKSNFDLAEDAKLQLSKDTYDDDLDNLLAQIGDQYADLFLAAKNLSDAILLSDILRVNTEITKAPLSASMIKRYDEHHQDLTLLKALVRQQLPEKYKEIFFDQSKNGYAGYIDGGASQEEFYKFIKPILEKMDGTEELLVKLNREDLLRKQRTFDNGSIPHQIHLGELHAILRRQEDFYPFLKDNREKIEKILTFRIPYYVGPLARGNSRFAWMTRKSEETITPWNFEEVVDKGASAQSFIERMTNFDKNLPNEKVLPKHSLLYEYFTVYNELTKVKYVTEGMRKPAFLSGEQKKAIVDLLFKTNRKVTVKQLKEDYFKKIECFDSVEISGVEDRFNASLGTYHDLLKIIKDKDFLDNEENEDILEDIVLTLTLFEDREMIEERLKTYAHLFDDKVMKQLKRRRYTGWGRLSRKLINGIRDKQSGKTILDFLKSDGFANRNFMQLIHDDSLTFKEDIQKAQVSGQGDSLHEHIANLAGSPAIKKGILQTVKVVDELVKVMGRHKPENIVIEMARENQTTQKGQKNSRERMKRIEEGIKELGSQILKEHPVENTQLQNEKLYLYYLQNGRDMYVDQELDINRLSDYDVDHIVPQSFLKDDSIDNKVLTRSDKARGKSDNVPSEEVVKKMKNYWRQLLNAKLITQRKFDNLTKAERGGLSELDKAGFIKRQLVETRQITKHVAQILDSRMNTKYDENDKLIREVKVITLKSKLVSDFRKDFQFYKVREINNYHHAHDAYLNAVVGTALIKKYPKLESEFVYGDYKVYDVRKMIAKSEQEIGKATAKYFFYSNIMNFFKTEITLANGEIRKRPLIETNGETGEIVWDKGRDFATVRKVLSMPQVNIVKKTEVQTGGFSKESILPKRNSDKLIARKKDWDPKKYGGFDSPTVAYSVLVVAKVEKGKSKKLKSVKELLGITIMERSSFEKNPIDFLEAKGYKEVKKDLIIKLPKYSLFELENGRKRMLASAGELQKGNELALPSKYVNFLYLASHYEKLKGSPEDNEQKQLFVEQHKHYLDEIIEQISEFSKRVILADANLDKVLSAYNKHRDKPIREQAENIIHLFTLTNLGAPAAFKYFDTTIDRKRYTSTKEVLDATLIHQSITGLYETRIDLSQLGGDGGEAAAKPAPGSSGGTAPLEEEYRLFLEAPIQNVTLLEQWKREIPKVWAEINPPGLASTQAPIHVQLLSTALPVRVRQYPITLEAKRSLRETIRKFRAAGILRPVHSPWNTPLLPVRKSGTSEYRMVQDLREVNKRVETIHPTVPNPYTLLSLLPPDRIWYSVLDLKDAFFCIPLAPESQLIFAFEWADAEEGESGQLTWTRLPQGFKNSPTLFNEALNRDLQGFRLDHPSVSLLQYVDDLLIAADTQAACLSATRDLLMTLAELGYRVSGKKAQLCQEEVTYLGFKIHKGSRSLSNSRTQAILQIPVPKTKRQVREFLGTIGYCRLWIPGFAELAQPLYAATRPGNDPLVWGEKEEEAFQSLKLALTQPPALALPSLDKPFQLFVEETSGAAKGVLTQALGPWKRPVAYLSKRLDPVAAGWPRCLRAIAAAALLTREASKLTFGQDIEITSSHNLESLLRSPPDKWLTNARITQYQVLLLDPPRVRFKQTAALNPATLLPETDDTLPIHHCLDTLDSLTSTRPDLTDQPLAQAEATLFTDGSSYIRDGKRYAGAAVVTLDSVIWAEPLPIGTSAQKAELIALTKALEWSKDKSVNIYTDSRYAFATLHVHGMIYRERGWLTAGGKAIKNAPEILALLTAVWLPKRVAVMHCKGHQKDDAPTSTGNRRADEVAREVAIRPLSTQATISAGKRTADGSEFEKRTADGSEFESPKKKAKVE

SEQ ID NO: 1146 - protein, 2133 aa, synthetic construct
MPAAKRVKLDGGDKKYSIGLDIGTNSVGWAVITDEYKVPSKKFKVLGNTDRHSIKKNLIGALLFDSGETAEATRLKRTARRRYTRRKNRICYLQEIFSNEMAKVDDSFFHRLEESFLVEEDKKHERHPIFGNIVDEVAYHEKYPTIYHLRKKLVDSTDKADLRLIYLALAHMIKFRGHFLIEGDLNPDNSDVDKLFIQLVQTYNQLFEENPINASGVDAKAILSARLSKSRRLENLIAQLPGEKKNGLFGNLIALSLGLTPNFKSNFDLAEDAKLQLSKDTYDDDLDNLLAQIGDQYADLFLAAKNLSDAILLSDILRVNTEITKAPLSASMIKRYDEHHQDLTLLKALVRQQLPEKYKEIFFDQSKNGYAGYIDGGASQEEFYKFIKPILEKMDGTEELLVKLNREDLLRKQRTFDNGSIPHQIHLGELHAILRRQEDFYPFLKDNREKIEKILTFRIPYYVGPLARGNSRFAWMTRKSEETITPWNFEEVVDKGASAQSFIERMTNFDKNLPNEKVLPKHSLLYEYFTVYNELTKVKYVTEGMRKPAFLSGEQKKAIVDLLFKTNRKVTVKQLKEDYFKKIECFDSVEISGVEDRFNASLGTYHDLLKIIKDKDFLDNEENEDILEDIVLTLTLFEDREMIEERLKTYAHLFDDKVMKQLKRRRYTGWGRLSRKLINGIRDKQSGKTILDFLKSDGFANRNFMQLIHDDSLTFKEDIQKAQVSGQGDSLHEHIANLAGSPAIKKGILQTVKVVDELVKVMGRHKPENIVIEMARENQTTQKGQKNSRERMKRIEEGIKELGSQILKEHPVENTQLQNEKLYLYYLQNGRDMYVDQELDINRLSDYDVDHIVPQSFLKDDSIDNKVLTRSDKARGKSDNVPSEEVVKKMKNYWRQLLNAKLITQRKFDNLTKAERGGLSELDKAGFIKRQLVETRQITKHVAQILDSRMNTKYDENDKLIREVKVITLKSKLVSDFRKDFQFYKVREINNYHHAHDAYLNAVVGTALIKKYPKLESEFVYGDYKVYDVRKMIAKSEQEIGKATAKYFFYSNIMNFFKTEITLANGEIRKRPLIETNGETGEIVWDKGRDFATVRKVLSMPQVNIVKKTEVQTGGFSKESILPKRNSDKLIARKKDWDPKKYGGFDSPTVAYSVLVVAKVEKGKSKKLKSVKELLGITIMERSSFEKNPIDFLEAKGYKEVKKDLIIKLPKYSLFELENGRKRMLASAGELQKGNELALPSKYVNFLYLASHYEKLKGSPEDNEQKQLFVEQHKHYLDEIIEQISEFSKRVILADANLDKVLSAYNKHRDKPIREQAENIIHLFTLTNLGAPAAFKYFDTTIDRKRYTSTKEVLDATLIHQSITGLYETRIDLSQLGGDGGAEAAAKEAAAKEAAAKEAAAKALEAEAAAKEAAAKEAAAKEAAAKAGGTAPLEEEYRLFLEAPIQNVTLLEQWKREIPKVWAEINPPGLASTQAPIHVQLLSTALPVRVRQYPITLEAKRSLRETIRKFRAAGILRPVHSPWNTPLLPVRKSGTSEYRMVQDLREVNKRVETIHPTVPNPYTLLSLLPPDRIWYSVLDLKDAFFCIPLAPESQLIFAFEWADAEEGESGQLTWTRLPQGFKNSPTLFNEALNRDLQGFRLDHPSVSLLQYVDDLLIAADTQAACLSATRDLLMTLAELGYRVSGKKAQLCQEEVTYLGFKIHKGSRSLSNSRTQAILQIPVPKTKRQVREFLGTIGYCRLWIPGFAELAQPLYAATRPGNDPLVWGEKEEEAFQSLKLALTQPPALALPSLDKPFQLFVEETSGAAKGVLTQALGPWKRPVAYLSKRLDPVAAGWPRCLRAIAAAALLTREASKLTFGQDIEITSSHNLESLLRSPPDKWLTNARITQYQVLLLDPPRVRFKQTAALNPATLLPETDDTLPIHHCLDTLDSLTSTRPDLTDQPLAQAEATLFTDGSSYIRDGKRYAGAAVVTLDSVIWAEPLPIGTSAQKAELIALTKALEWSKDKSVNIYTDSRYAFATLHVHGMIYRERGWLTAGGKAIKNAPEILALLTAVWLPKRVAVMHCKGHQKDDAPTSTGNRRADEVAREVAIRPLSTQATISAGKRTADGSEFEKRTADGSEFESPKKKAKVE

SEQ ID NO: 1147 - protein, 2098 aa, synthetic construct
MPAAKRVKLDGGDKKYSIGLDIGTNSVGWAVITDEYKVPSKKFKVLGNTDRHSIKKNLIGALLFDSGETAEATRLKRTARRRYTRRKNRICYLQEIFSNEMAKVDDSFFHRLEESFLVEEDKKHERHPIFGNIVDEVAYHEKYPTIYHLRKKLVDSTDKADLRLIYLALAHMIKFRGHFLIEGDLNPDNSDVDKLFIQLVQTYNQLFEENPINASGVDAKAILSARLSKSRRLENLIAQLPGEKKNGLFGNLIALSLGLTPNFKSNFDLAEDAKLQLSKDTYDDDLDNLLAQIGDQYADLFLAAKNLSDAILLSDILRVNTEITKAPLSASMIKRYDEHHQDLTLLKALVRQQLPEKYKEIFFDQSKNGYAGYIDGGASQEEFYKFIKPILEKMDGTEELLVKLNREDLLRKQRTFDNGSIPHQIHLGELHAILRRQEDFYPFLKDNREKIEKILTFRIPYYVGPLARGNSRFAWMTRKSEETITPWNFEEVVDKGASAQSFIERMTNFDKNLPNEKVLPKHSLLYEYFTVYNELTKVKYVTEGMRKPAFLSGEQKKAIVDLLFKTNRKVTVKQLKEDYFKKIECFDSVEISGVEDRFNASLGTYHDLLKIIKDKDFLDNEENEDILEDIVLTLTLFEDREMIEERLKTYAHLFDDKVMKQLKRRRYTGWGRLSRKLINGIRDKQSGKTILDFLKSDGFANRNFMQLIHDDSLTFKEDIQKAQVSGQGDSLHEHIANLAGSPAIKKGILQTVKVVDELVKVMGRHKPENIVIEMARENQTTQKGQKNSRERMKRIEEGIKELGSQILKEHPVENTQLQNEKLYLYYLQNGRDMYVDQELDINRLSDYDVDHIVPQSFLKDDSIDNKVLTRSDKARGKSDNVPSEEVVKKMKNYWRQLLNAKLITQRKFDNLTKAERGGLSELDKAGFIKRQLVETRQITKHVAQILDSRMNTKYDENDKLIREVKVITLKSKLVSDFRKDFQFYKVREINNYHHAHDAYLNAVVGTALIKKYPKLESEFVYGDYKVYDVRKMIAKSEQEIGKATAKYFFYSNIMNFFKTEITLANGEIRKRPLIETNGETGEIVWDKGRDFATVRKVLSMPQVNIVKKTEVQTGGFSKESILPKRNSDKLIARKKDWDPKKYGGFDSPTVAYSVLVVAKVEKGKSKKLKSVKELLGITIMERSSFEKNPIDFLEAKGYKEVKKDLIIKLPKYSLFELENGRKRMLASAGELQKGNELALPSKYVNFLYLASHYEKLKGSPEDNEQKQLFVEQHKHYLDEIIEQISEFSKRVILADANLDKVLSAYNKHRDKPIREQAENIIHLFTLTNLGAPAAFKYFDTTIDRKRYTSTKEVLDATLIHQSITGLYETRIDLSQLGGDGGGGSEAAAKPAPGGTAPLEEEYRLFLEAPIQNVTLLEQWKREIPKVWAEINPPGLASTQAPIHVQLLSTALPVRVRQYPITLEAKRSLRETIRKFRAAGILRPVHSPWNTPLLPVRKSGTSEYRMVQDLREVNKRVETIHPTVPNPYTLLSLLPPDRIWYSVLDLKDAFFCIPLAPESQLIFAFEWADAEEGESGQLTWTRLPQGFKNSPTLFNEALNRDLQGFRLDHPSVSLLQYVDDLLIAADTQAACLSATRDLLMTLAELGYRVSGKKAQLCQEEVTYLGFKIHKGSRSLSNSRTQAILQIPVPKTKRQVREFLGTIGYCRLWIPGFAELAQPLYAATRPGNDPLVWGEKEEEAFQSLKLALTQPPALALPSLDKPFQLFVEETSGAAKGVLTQALGPWKRPVAYLSKRLDPVAAGWPRCLRAIAAAALLTREASKLTFGQDIEITSSHNLESLLRSPPDKWLTNARITQYQVLLLDPPRVRFKQTAALNPATLLPETDDTLPIHHCLDTLDSLTSTRPDLTDQPLAQAEATLFTDGSSYIRDGKRYAGAAVVTLDSVIWAEPLPIGTSAQKAELIALTKALEWSKDKSVNIYTDSRYAFATLHVHGMIYRERGWLTAGGKAIKNAPEILALLTAVWLPKRVAVMHCKGHQKDDAPTSTGNRRADEVAREVAIRPLSTQATISAGKRTADGSEFEKRTADGSEFESPKKKAKVE

SEQ ID NO: 1148 - protein, 2090 aa, synthetic construct
MPAAKRVKLDGGDKKYSIGLDIGTNSVGWAVITDEYKVPSKKFKVLGNTDRHSIKKNLIGALLFDSGETAEATRLKRTARRRYTRRKNRICYLQEIFSNEMAKVDDSFFHRLEESFLVEEDKKHERHPIFGNIVDEVAYHEKYPTIYHLRKKLVDSTDKADLRLIYLALAHMIKFRGHFLIEGDLNPDNSDVDKLFIQLVQTYNQLFEENPINASGVDAKAILSARLSKSRRLENLIAQLPGEKKNGLFGNLIALSLGLTPNFKSNFDLAEDAKLQLSKDTYDDDLDNLLAQIGDQYADLFLAAKNLSDAILLSDILRVNTEITKAPLSASMIKRYDEHHQDLTLLKALVRQQLPEKYKEIFFDQSKNGYAGYIDGGASQEEFYKFIKPILEKMDGTEELLVKLNREDLLRKQRTFDNGSIPHQIHLGELHAILRRQEDFYPFLKDNREKIEKILTFRIPYYVGPLARGNSRFAWMTRKSEETITPWNFEEVVDKGASAQSFIERMTNFDKNLPNEKVLPKHSLLYEYFTVYNELTKVKYVTEGMRKPAFLSGEQKKAIVDLLFKTNRKVTVKQLKEDYFKKIECFDSVEISGVEDRFNASLGTYHDLLKIIKDKDFLDNEENEDILEDIVLTLTLFEDREMIEERLKTYAHLFDDKVMKQLKRRRYTGWGRLSRKLINGIRDKQSGKTILDFLKSDGFANRNFMQLIHDDSLTFKEDIQKAQVSGQGDSLHEHIANLAGSPAIKKGILQTVKVVDELVKVMGRHKPENIVIEMARENQTTQKGQKNSRERMKRIEEGIKELGSQILKEHPVENTQLQNEKLYLYYLQNGRDMYVDQELDINRLSDYDVDHIVPQSFLKDDSIDNKVLTRSDKARGKSDNVPSEEVVKKMKNYWRQLLNAKLITQRKFDNLTKAERGGLSELDKAGFIKRQLVETRQITKHVAQILDSRMNTKYDENDKLIREVKVITLKSKLVSDFRKDFQFYKVREINNYHHAHDAYLNAVVGTALIKKYPKLESEFVYGDYKVYDVRKMIAKSEQEIGKATAKYFFYSNIMNFFKTEITLANGEIRKRPLIETNGETGEIVWDKGRDFATVRKVLSMPQVNIVKKTEVQTGGFSKESILPKRNSDKLIARKKDWDPKKYGGFDSPTVAYSVLVVAKVEKGKSKKLKSVKELLGITIMERSSFEKNPIDFLEAKGYKEVKKDLIIKLPKYSLFELENGRKRMLASAGELQKGNELALPSKYVNFLYLASHYEKLKGSPEDNEQKQLFVEQHKHYLDEIIEQISEFSKRVILADANLDKVLSAYNKHRDKPIREQAENIIHLFTLTNLGAPAAFKYFDTTIDRKRYTSTKEVLDATLIHQSITGLYETRIDLSQLGGDGGPAPGGTAPLEEEYRLFLEAPIQNVTLLEQWKREIPKVWAEINPPGLASTQAPIHVQLLSTALPVRVRQYPITLEAKRSLRETIRKFRAAGILRPVHSPWNTPLLPVRKSGTSEYRMVQDLREVNKRVETIHPTVPNPYTLLSLLPPDRIWYSVLDLKDAFFCIPLAPESQLIFAFEWADAEEGESGQLTWTRLPQGFKNSPTLFNEALNRDLQGFRLDHPSVSLLQYVDDLLIAADTQAACLSATRDLLMTLAELGYRVSGKKAQLCQEEVTYLGFKIHKGSRSLSNSRTQAILQIPVPKTKRQVREFLGTIGYCRLWIPGFAELAQPLYAATRPGNDPLVWGEKEEEAFQSLKLALTQPPALALPSLDKPFQLFVEETSGAAKGVLTQALGPWKRPVAYLSKRLDPVAAGWPRCLRAIAAAALLTREASKLTFGQDIEITSSHNLESLLRSPPDKWLTNARITQYQVLLLDPPRVRFKQTAALNPATLLPETDDTLPIHHCLDTLDSLTSTRPDLTDQPLAQAEATLFTDGSSYIRDGKRYAGAAVVTLDSVIWAEPLPIGTSAQKAELIALTKALEWSKDKSVNIYTDSRYAFATLHVHGMIYRERGWLTAGGKAIKNAPEILALLTAVWLPKRVAVMHCKGHQKDDAPTSTGNRRADEVAREVAIRPLSTQATISAGKRTADGSEFEKRTADGSEFESPKKKAKVE

SEQ ID NO: 1149 - protein, 2092 aa, synthetic construct
MPAAKRVKLDGGDKKYSIGLDIGTNSVGWAVITDEYKVPSKKFKVLGNTDRHSIKKNLIGALLFDSGETAEATRLKRTARRRYTRRKNRICYLQEIFSNEMAKVDDSFFHRLEESFLVEEDKKHERHPIFGNIVDEVAYHEKYPTIYHLRKKLVDSTDKADLRLIYLALAHMIKFRGHFLIEGDLNPDNSDVDKLFIQLVQTYNQLFEENPINASGVDAKAILSARLSKSRRLENLIAQLPGEKKNGLFGNLIALSLGLTPNFKSNFDLAEDAKLQLSKDTYDDDLDNLLAQIGDQYADLFLAAKNLSDAILLSDILRVNTEITKAPLSASMIKRYDEHHQDLTLLKALVRQQLPEKYKEIFFDQSKNGYAGYIDGGASQEEFYKFIKPILEKMDGTEELLVKLNREDLLRKQRTFDNGSIPHQIHLGELHAILRRQEDFYPFLKDNREKIEKILTFRIPYYVGPLARGNSRFAWMTRKSEETITPWNFEEVVDKGASAQSFIERMTNFDKNLPNEKVLPKHSLLYEYFTVYNELTKVKYVTEGMRKPAFLSGEQKKAIVDLLFKTNRKVTVKQLKEDYFKKIECFDSVEISGVEDRFNASLGTYHDLLKIIKDKDFLDNEENEDILEDIVLTLTLFEDREMIEERLKTYAHLFDDKVMKQLKRRRYTGWGRLSRKLINGIRDKQSGKTILDFLKSDGFANRNFMQLIHDDSLTFKEDIQKAQVSGQGDSLHEHIANLAGSPAIKKGILQTVKVVDELVKVMGRHKPENIVIEMARENQTTQKGQKNSRERMKRIEEGIKELGSQILKEHPVENTQLQNEKLYLYYLQNGRDMYVDQELDINRLSDYDVDHIVPQSFLKDDSIDNKVLTRSDKARGKSDNVPSEEVVKKMKNYWRQLLNAKLITQRKFDNLTKAERGGLSELDKAGFIKRQLVETRQITKHVAQILDSRMNTKYDENDKLIREVKVITLKSKLVSDFRKDFQFYKVREINNYHHAHDAYLNAVVGTALIKKYPKLESEFVYGDYKVYDVRKMIAKSEQEIGKATAKYFFYSNIMNFFKTEITLANGEIRKRPLIETNGETGEIVWDKGRDFATVRKVLSMPQVNIVKKTEVQTGGFSKESILPKRNSDKLIARKKDWDPKKYGGFDSPTVAYSVLVVAKVEKGKSKKLKSVKELLGITIMERSSFEKNPIDFLEAKGYKEVKKDLIIKLPKYSLFELENGRKRMLASAGELQKGNELALPSKYVNFLYLASHYEKLKGSPEDNEQKQLFVEQHKHYLDEIIEQISEFSKRVILADANLDKVLSAYNKHRDKPIREQAENIIHLFTLTNLGAPAAFKYFDTTIDRKRYTSTKEVLDATLIHQSITGLYETRIDLSQLGGDGGPAPAPGGTAPLEEEYRLFLEAPIQNVTLLEQWKREIPKVWAEINPPGLASTQAPIHVQLLSTALPVRVRQYPITLEAKRSLRETIRKFRAAGILRPVHSPWNTPLLPVRKSGTSEYRMVQDLREVNKRVETIHPTVPNPYTLLSLLPPDRIWYSVLDLKDAFFCIPLAPESQLIFAFEWADAEEGESGQLTWTRLPQGFKNSPTLFNEALNRDLQGFRLDHPSVSLLQYVDDLLIAADTQAACLSATRDLLMTLAELGYRVSGKKAQLCQEEVTYLGFKIHKGSRSLSNSRTQAILQIPVPKTKRQVREFLGTIGYCRLWIPGFAELAQPLYAATRPGNDPLVWGEKEEEAFQSLKLALTQPPALALPSLDKPFQLFVEETSGAAKGVLTQALGPWKRPVAYLSKRLDPVAAGWPRCLRAIAAAALLTREASKLTFGQDIEITSSHNLESLLRSPPDKWLTNARITQYQVLLLDPPRVRFKQTAALNPATLLPETDDTLPIHHCLDTLDSLTSTRPDLTDQPLAQAEATLFTDGSSYIRDGKRYAGAAVVTLDSVIWAEPLPIGTSAQKAELIALTKALEWSKDKSVNIYTDSRYAFATLHVHGMIYRERGWLTAGGKAIKNAPEILALLTAVWLPKRVAVMHCKGHQKDDAPTSTGNRRADEVAREVAIRPLSTQATISAGKRTADGSEFEKRTADGSEFESPKKKAKVE

SEQ ID NO: 1150 - protein, 2096 aa, synthetic construct
MPAAKRVKLDGGDKKYSIGLDIGTNSVGWAVITDEYKVPSKKFKVLGNTDRHSIKKNLIGALLFDSGETAEATRLKRTARRRYTRRKNRICYLQEIFSNEMAKVDDSFFHRLEESFLVEEDKKHERHPIFGNIVDEVAYHEKYPTIYHLRKKLVDSTDKADLRLIYLALAHMIKFRGHFLIEGDLNPDNSDVDKLFIQLVQTYNQLFEENPINASGVDAKAILSARLSKSRRLENLIAQLPGEKKNGLFGNLIALSLGLTPNFKSNFDLAEDAKLQLSKDTYDDDLDNLLAQIGDQYADLFLAAKNLSDAILLSDILRVNTEITKAPLSASMIKRYDEHHQDLTLLKALVRQQLPEKYKEIFFDQSKNGYAGYIDGGASQEEFYKFIKPILEKMDGTEELLVKLNREDLLRKQRTFDNGSIPHQIHLGELHAILRRQEDFYPFLKDNREKIEKILTFRIPYYVGPLARGNSRFAWMTRKSEETITPWNFEEVVDKGASAQSFIERMTNFDKNLPNEKVLPKHSLLYEYFTVYNELTKVKYVTEGMRKPAFLSGEQKKAIVDLLFKTNRKVTVKQLKEDYFKKIECFDSVEISGVEDRFNASLGTYHDLLKIIKDKDFLDNEENEDILEDIVLTLTLFEDREMIEERLKTYAHLFDDKVMKQLKRRRYTGWGRLSRKLINGIRDKQSGKTILDFLKSDGFANRNFMQLIHDDSLTFKEDIQKAQVSGQGDSLHEHIANLAGSPAIKKGILQTVKVVDELVKVMGRHKPENIVIEMARENQTTQKGQKNSRERMKRIEEGIKELGSQILKEHPVENTQLQNEKLYLYYLQNGRDMYVDQELDINRLSDYDVDHIVPQSFLKDDSIDNKVLTRSDKARGKSDNVPSEEVVKKMKNYWRQLLNAKLITQRKFDNLTKAERGGLSELDKAGFIKRQLVETRQITKHVAQILDSRMNTKYDENDKLIREVKVITLKSKLVSDFRKDFQFYKVREINNYHHAHDAYLNAVVGTALIKKYPKLESEFVYGDYKVYDVRKMIAKSEQEIGKATAKYFFYSNIMNFFKTEITLANGEIRKRPLIETNGETGEIVWDKGRDFATVRKVLSMPQVNIVKKTEVQTGGFSKESILPKRNSDKLIARKKDWDPKKYGGFDSPTVAYSVLVVAKVEKGKSKKLKSVKELLGITIMERSSFEKNPIDFLEAKGYKEVKKDLIIKLPKYSLFELENGRKRMLASAGELQKGNELALPSKYVNFLYLASHYEKLKGSPEDNEQKQLFVEQHKHYLDEIIEQISEFSKRVILADANLDKVLSAYNKHRDKPIREQAENIIHLFTLTNLGAPAAFKYFDTTIDRKRYTSTKEVLDATLIHQSITGLYETRIDLSQLGGDGGGGSPAPGGGGGTAPLEEEYRLFLEAPIQNVTLLEQWKREIPKVWAEINPPGLASTQAPIHVQLLSTALPVRVRQYPITLEAKRSLRETIRKFRAAGILRPVHSPWNTPLLPVRKSGTSEYRMVQDLREVNKRVETIHPTVPNPYTLLSLLPPDRIWYSVLDLKDAFFCIPLAPESQLIFAFEWADAEEGESGQLTWTRLPQGFKNSPTLFNEALNRDLQGFRLDHPSVSLLQYVDDLLIAADTQAACLSATRDLLMTLAELGYRVSGKKAQLCQEEVTYLGFKIHKGSRSLSNSRTQAILQIPVPKTKRQVREFLGTIGYCRLWIPGFAELAQPLYAATRPGNDPLVWGEKEEEAFQSLKLALTQPPALALPSLDKPFQLFVEETSGAAKGVLTQALGPWKRPVAYLSKRLDPVAAGWPRCLRAIAAAALLTREASKLTFGQDIEITSSHNLESLLRSPPDKWLTNARITQYQVLLLDPPRVRFKQTAALNPATLLPETDDTLPIHHCLDTLDSLTSTRPDLTDQPLAQAEATLFTDGSSYIRDGKRYAGAAVVTLDSVIWAEPLPIGTSAQKAELIALTKALEWSKDKSVNIYTDSRYAFATLHVHGMIYRERGWLTAGGKAIKNAPEILALLTAVWLPKRVAVMHCKGHQKDDAPTSTGNRRADEVAREVAIRPLSTQATISAGKRTADGSEFEKRTADGSEFESPKKKAKVE

SEQ ID NO: 1151 - protein, 2098 aa, synthetic construct
MPAAKRVKLDGGDKKYSIGLDIGTNSVGWAVITDEYKVPSKKFKVLGNTDRHSIKKNLIGALLFDSGETAEATRLKRTARRRYTRRKNRICYLQEIFSNEMAKVDDSFFHRLEESFLVEEDKKHERHPIFGNIVDEVAYHEKYPTIYHLRKKLVDSTDKADLRLIYLALAHMIKFRGHFLIEGDLNPDNSDVDKLFIQLVQTYNQLFEENPINASGVDAKAILSARLSKSRRLENLIAQLPGEKKNGLFGNLIALSLGLTPNFKSNFDLAEDAKLQLSKDTYDDDLDNLLAQIGDQYADLFLAAKNLSDAILLSDILRVNTEITKAPLSASMIKRYDEHHQDLTLLKALVRQQLPEKYKEIFFDQSKNGYAGYIDGGASQEEFYKFIKPILEKMDGTEELLVKLNREDLLRKQRTFDNGSIPHQIHLGELHAILRRQEDFYPFLKDNREKIEKILTFRIPYYVGPLARGNSRFAWMTRKSEETITPWNFEEVVDKGASAQSFIERMTNFDKNLPNEKVLPKHSLLYEYFTVYNELTKVKYVTEGMRKPAFLSGEQKKAIVDLLFKTNRKVTVKQLKEDYFKKIECFDSVEISGVEDRFNASLGTYHDLLKIIKDKDFLDNEENEDILEDIVLTLTLFEDREMIEERLKTYAHLFDDKVMKQLKRRRYTGWGRLSRKLINGIRDKQSGKTILDFLKSDGFANRNFMQLIHDDSLTFKEDIQKAQVSGQGDSLHEHIANLAGSPAIKKGILQTVKVVDELVKVMGRHKPENIVIEMARENQTTQKGQKNSRERMKRIEEGIKELGSQILKEHPVENTQLQNEKLYLYYLQNGRDMYVDQELDINRLSDYDVDHIVPQSFLKDDSIDNKVLTRSDKARGKSDNVPSEEVVKKMKNYWRQLLNAKLITQRKFDNLTKAERGGLSELDKAGFIKRQLVETRQITKHVAQILDSRMNTKYDENDKLIREVKVITLKSKLVSDFRKDFQFYKVREINNYHHAHDAYLNAVVGTALIKKYPKLESEFVYGDYKVYDVRKMIAKSEQEIGKATAKYFFYSNIMNFFKTEITLANGEIRKRPLIETNGETGEIVWDKGRDFATVRKVLSMPQVNIVKKTEVQTGGFSKESILPKRNSDKLIARKKDWDPKKYGGFDSPTVAYSVLVVAKVEKGKSKKLKSVKELLGITIMERSSFEKNPIDFLEAKGYKEVKKDLIIKLPKYSLFELENGRKRMLASAGELQKGNELALPSKYVNFLYLASHYEKLKGSPEDNEQKQLFVEQHKHYLDEIIEQISEFSKRVILADANLDKVLSAYNKHRDKPIREQAENIIHLFTLTNLGAPAAFKYFDTTIDRKRYTSTKEVLDATLIHQSITGLYETRIDLSQLGGDGGGSSGGGEAAAKGGTAPLEEEYRLFLEAPIQNVTLLEQWKREIPKVWAEINPPGLASTQAPIHVQLLSTALPVRVRQYPITLEAKRSLRETIRKFRAAGILRPVHSPWNTPLLPVRKSGTSEYRMVQDLREVNKRVETIHPTVPNPYTLLSLLPPDRIWYSVLDLKDAFFCIPLAPESQLIFAFEWADAEEGESGQLTWTRLPQGFKNSPTLFNEALNRDLQGFRLDHPSVSLLQYVDDLLIAADTQAACLSATRDLLMTLAELGYRVSGKKAQLCQEEVTYLGFKIHKGSRSLSNSRTQAILQIPVPKTKRQVREFLGTIGYCRLWIPGFAELAQPLYAATRPGNDPLVWGEKEEEAFQSLKLALTQPPALALPSLDKPFQLFVEETSGAAKGVLTQALGPWKRPVAYLSKRLDPVAAGWPRCLRAIAAAALLTREASKLTFGQDIEITSSHNLESLLRSPPDKWLTNARITQYQVLLLDPPRVRFKQTAALNPATLLPETDDTLPIHHCLDTLDSLTSTRPDLTDQPLAQAEATLFTDGSSYIRDGKRYAGAAVVTLDSVIWAEPLPIGTSAQKAELIALTKALEWSKDKSVNIYTDSRYAFATLHVHGMIYRERGWLTAGGKAIKNAPEILALLTAVWLPKRVAVMHCKGHQKDDAPTSTGNRRADEVAREVAIRPLSTQATISAGKRTADGSEFEKRTADGSEFESPKKKAKVE

SEQ ID NO: 1152 - protein, 2097 aa, synthetic construct
MPAAKRVKLDGGDKKYSIGLDIGTNSVGWAVITDEYKVPSKKFKVLGNTDRHSIKKNLIGALLFDSGETAEATRLKRTARRRYTRRKNRICYLQEIFSNEMAKVDDSFFHRLEESFLVEEDKKHERHPIFGNIVDEVAYHEKYPTIYHLRKKLVDSTDKADLRLIYLALAHMIKFRGHFLIEGDLNPDNSDVDKLFIQLVQTYNQLFEENPINASGVDAKAILSARLSKSRRLENLIAQLPGEKKNGLFGNLIALSLGLTPNFKSNFDLAEDAKLQLSKDTYDDDLDNLLAQIGDQYADLFLAAKNLSDAILLSDILRVNTEITKAPLSASMIKRYDEHHQDLTLLKALVRQQLPEKYKEIFFDQSKNGYAGYIDGGASQEEFYKFIKPILEKMDGTEELLVKLNREDLLRKQRTFDNGSIPHQIHLGELHAILRRQEDFYPFLKDNREKIEKILTFRIPYYVGPLARGNSRFAWMTRKSEETITPWNFEEVVDKGASAQSFIERMTNFDKNLPNEKVLPKHSLLYEYFTVYNELTKVKYVTEGMRKPAFLSGEQKKAIVDLLFKTNRKVTVKQLKEDYFKKIECFDSVEISGVEDRFNASLGTYHDLLKIIKDKDFLDNEENEDILEDIVLTLTLFEDREMIEERLKTYAHLFDDKVMKQLKRRRYTGWGRLSRKLINGIRDKQSGKTILDFLKSDGFANRNFMQLIHDDSLTFKEDIQKAQVSGQGDSLHEHIANLAGSPAIKKGILQTVKVVDELVKVMGRHKPENIVIEMARENQTTQKGQKNSRERMKRIEEGIKELGSQILKEHPVENTQLQNEKLYLYYLQNGRDMYVDQELDINRLSDYDVDHIVPQSFLKDDSIDNKVLTRSDKARGKSDNVPSEEVVKKMKNYWRQLLNAKLITQRKFDNLTKAERGGLSELDKAGFIKRQLVETRQITKHVAQILDSRMNTKYDENDKLIREVKVITLKSKLVSDFRKDFQFYKVREINNYHHAHDAYLNAVVGTALIKKYPKLESEFVYGDYKVYDVRKMIAKSEQEIGKATAKYFFYSNIMNFFKTEITLANGEIRKRPLIETNGETGEIVWDKGRDFATVRKVLSMPQVNIVKKTEVQTGGFSKESILPKRNSDKLIARKKDWDPKKYGGFDSPTVAYSVLVVAKVEKGKSKKLKSVKELLGITIMERSSFEKNPIDFLEAKGYKEVKKDLIIKLPKYSLFELENGRKRMLASAGELQKGNELALPSKYVNFLYLASHYEKLKGSPEDNEQKQLFVEQHKHYLDEIIEQISEFSKRVILADANLDKVLSAYNKHRDKPIREQAENIIHLFTLTNLGAPAAFKYFDTTIDRKRYTSTKEVLDATLIHQSITGLYETRIDLSQLGGDGGEAAAKEAAAKGGTAPLEEEYRLFLEAPIQNVTLLEQWKREIPKVWAEINPPGLASTQAPIHVQLLSTALPVRVRQYPITLEAKRSLRETIRKFRAAGILRPVHSPWNTPLLPVRKSGTSEYRMVQDLREVNKRVETIHPTVPNPYTLLSLLPPDRIWYSVLDLKDAFFCIPLAPESQLIFAFEWADAEEGESGQLTWTRLPQGFKNSPTLFNEALNRDLQGFRLDHPSVSLLQYVDDLLIAADTQAACLSATRDLLMTLAELGYRVSGKKAQLCQEEVTYLGFKIHKGSRSLSNSRTQAILQIPVPKTKRQVREFLGTIGYCRLWIPGFAELAQPLYAATRPGNDPLVWGEKEEEAFQSLKLALTQPPALALPSLDKPFQLFVEETSGAAKGVLTQALGPWKRPVAYLSKRLDPVAAGWPRCLRAIAAAALLTREASKLTFGQDIEITSSHNLESLLRSPPDKWLTNARITQYQVLLLDPPRVRFKQTAALNPATLLPETDDTLPIHHCLDTLDSLTSTRPDLTDQPLAQAEATLFTDGSSYIRDGKRYAGAAVVTLDSVIWAEPLPIGTSAQKAELIALTKALEWSKDKSVNIYTDSRYAFATLHVHGMIYRERGWLTAGGKAIKNAPEILALLTAVWLPKRVAVMHCKGHQKDDAPTSTGNRRADEVAREVAIRPLSTQATISAGKRTADGSEFEKRTADGSEFESPKKKAKVE

SEQ ID NO: 1153 - protein, 2096 aa, synthetic construct
MPAAKRVKLDGGDKKYSIGLDIGTNSVGWAVITDEYKVPSKKFKVLGNTDRHSIKKNLIGALLFDSGETAEATRLKRTARRRYTRRKNRICYLQEIFSNEMAKVDDSFFHRLEESFLVEEDKKHERHPIFGNIVDEVAYHEKYPTIYHLRKKLVDSTDKADLRLIYLALAHMIKFRGHFLIEGDLNPDNSDVDKLFIQLVQTYNQLFEENPINASGVDAKAILSARLSKSRRLENLIAQLPGEKKNGLFGNLIALSLGLTPNFKSNFDLAEDAKLQLSKDTYDDDLDNLLAQIGDQYADLFLAAKNLSDAILLSDILRVNTEITKAPLSASMIKRYDEHHQDLTLLKALVRQQLPEKYKEIFFDQSKNGYAGYIDGGASQEEFYKFIKPILEKMDGTEELLVKLNREDLLRKQRTFDNGSIPHQIHLGELHAILRRQEDFYPFLKDNREKIEKILTFRIPYYVGPLARGNSRFAWMTRKSEETITPWNFEEVVDKGASAQSFIERMTNFDKNLPNEKVLPKHSLLYEYFTVYNELTKVKYVTEGMRKPAFLSGEQKKAIVDLLFKTNRKVTVKQLKEDYFKKIECFDSVEISGVEDRFNASLGTYHDLLKIIKDKDFLDNEENEDILEDIVLTLTLFEDREMIEERLKTYAHLFDDKVMKQLKRRRYTGWGRLSRKLINGIRDKQSGKTILDFLKSDGFANRNFMQLIHDDSLTFKEDIQKAQVSGQGDSLHEHIANLAGSPAIKKGILQTVKVVDELVKVMGRHKPENIVIEMARENQTTQKGQKNSRERMKRIEEGIKELGSQILKEHPVENTQLQNEKLYLYYLQNGRDMYVDQELDINRLSDYDVDHIVPQSFLKDDSIDNKVLTRSDKARGKSDNVPSEEVVKKMKNYWRQLLNAKLITQRKFDNLTKAERGGLSELDKAGFIKRQLVETRQITKHVAQILDSRMNTKYDENDKLIREVKVITLKSKLVSDFRKDFQFYKVREINNYHHAHDAYLNAVVGTALIKKYPKLESEFVYGDYKVYDVRKMIAKSEQEIGKATAKYFFYSNIMNFFKTEITLANGEIRKRPLIETNGETGEIVWDKGRDFATVRKVLSMPQVNIVKKTEVQTGGFSKESILPKRNSDKLIARKKDWDPKKYGGFDSPTVAYSVLVVAKVEKGKSKKLKSVKELLGITIMERSSFEKNPIDFLEAKGYKEVKKDLIIKLPKYSLFELENGRKRMLASAGELQKGNELALPSKYVNFLYLASHYEKLKGSPEDNEQKQLFVEQHKHYLDEIIEQISEFSKRVILADANLDKVLSAYNKHRDKPIREQAENIIHLFTLTNLGAPAAFKYFDTTIDRKRYTSTKEVLDATLIHQSITGLYETRIDLSQLGGDGGGGSPAPGSSGGTAPLEEEYRLFLEAPIQNVTLLEQWKREIPKVWAEINPPGLASTQAPIHVQLLSTALPVRVRQYPITLEAKRSLRETIRKFRAAGILRPVHSPWNTPLLPVRKSGTSEYRMVQDLREVNKRVETIHPTVPNPYTLLSLLPPDRIWYSVLDLKDAFFCIPLAPESQLIFAFEWADAEEGESGQLTWTRLPQGFKNSPTLFNEALNRDLQGFRLDHPSVSLLQYVDDLLIAADTQAACLSATRDLLMTLAELGYRVSGKKAQLCQEEVTYLGFKIHKGSRSLSNSRTQAILQIPVPKTKRQVREFLGTIGYCRLWIPGFAELAQPLYAATRPGNDPLVWGEKEEEAFQSLKLALTQPPALALPSLDKPFQLFVEETSGAAKGVLTQALGPWKRPVAYLSKRLDPVAAGWPRCLRAIAAAALLTREASKLTFGQDIEITSSHNLESLLRSPPDKWLTNARITQYQVLLLDPPRVRFKQTAALNPATLLPETDDTLPIHHCLDTLDSLTSTRPDLTDQPLAQAEATLFTDGSSYIRDGKRYAGAAVVTLDSVIWAEPLPIGTSAQKAELIALTKALEWSKDKSVNIYTDSRYAFATLHVHGMIYRERGWLTAGGKAIKNAPEILALLTAVWLPKRVAVMHCKGHQKDDAPTSTGNRRADEVAREVAIRPLSTQATISAGKRTADGSEFEKRTADGSEFESPKKKAKVE

SEQ ID NO: 1154 - protein, 2098 aa, synthetic construct
MPAAKRVKLDGGDKKYSIGLDIGTNSVGWAVITDEYKVPSKKFKVLGNTDRHSIKKNLIGALLFDSGETAEATRLKRTARRRYTRRKNRICYLQEIFSNEMAKVDDSFFHRLEESFLVEEDKKHERHPIFGNIVDEVAYHEKYPTIYHLRKKLVDSTDKADLRLIYLALAHMIKFRGHFLIEGDLNPDNSDVDKLFIQLVQTYNQLFEENPINASGVDAKAILSARLSKSRRLENLIAQLPGEKKNGLFGNLIALSLGLTPNFKSNFDLAEDAKLQLSKDTYDDDLDNLLAQIGDQYADLFLAAKNLSDAILLSDILRVNTEITKAPLSASMIKRYDEHHQDLTLLKALVRQQLPEKYKEIFFDQSKNGYAGYIDGGASQEEFYKFIKPILEKMDGTEELLVKLNREDLLRKQRTFDNGSIPHQIHLGELHAILRRQEDFYPFLKDNREKIEKILTFRIPYYVGPLARGNSRFAWMTRKSEETITPWNFEEVVDKGASAQSFIERMTNFDKNLPNEKVLPKHSLLYEYFTVYNELTKVKYVTEGMRKPAFLSGEQKKAIVDLLFKTNRKVTVKQLKEDYFKKIECFDSVEISGVEDRFNASLGTYHDLLKIIKDKDFLDNEENEDILEDIVLTLTLFEDREMIEERLKTYAHLFDDKVMKQLKRRRYTGWGRLSRKLINGIRDKQSGKTILDFLKSDGFANRNFMQLIHDDSLTFKEDIQKAQVSGQGDSLHEHIANLAGSPAIKKGILQTVKVVDELVKVMGRHKPENIVIEMARENQTTQKGQKNSRERMKRIEEGIKELGSQILKEHPVENTQLQNEKLYLYYLQNGRDMYVDQELDINRLSDYDVDHIVPQSFLKDDSIDNKVLTRSDKARGKSDNVPSEEVVKKMKNYWRQLLNAKLITQRKFDNLTKAERGGLSELDKAGFIKRQLVETRQITKHVAQILDSRMNTKYDENDKLIREVKVITLKSKLVSDFRKDFQFYKVREINNYHHAHDAYLNAVVGTALIKKYPKLESEFVYGDYKVYDVRKMIAKSEQEIGKATAKYFFYSNIMNFFKTEITLANGEIRKRPLIETNGETGEIVWDKGRDFATVRKVLSMPQVNIVKKTEVQTGGFSKESILPKRNSDKLIARKKDWDPKKYGGFDSPTVAYSVLVVAKVEKGKSKKLKSVKELLGITIMERSSFEKNPIDFLEAKGYKEVKKDLIIKLPKYSLFELENGRKRMLASAGELQKGNELALPSKYVNFLYLASHYEKLKGSPEDNEQKQLFVEQHKHYLDEIIEQISEFSKRVILADANLDKVLSAYNKHRDKPIREQAENIIHLFTLTNLGAPAAFKYFDTTIDRKRYTSTKEVLDATLIHQSITGLYETRIDLSQLGGDGGGGGEAAAKGGSGGTAPLEEEYRLFLEAPIQNVTLLEQWKREIPKVWAEINPPGLASTQAPIHVQLLSTALPVRVRQYPITLEAKRSLRETIRKFRAAGILRPVHSPWNTPLLPVRKSGTSEYRMVQDLREVNKRVETIHPTVPNPYTLLSLLPPDRIWYSVLDLKDAFFCIPLAPESQLIFAFEWADAEEGESGQLTWTRLPQGFKNSPTLFNEALNRDLQGFRLDHPSVSLLQYVDDLLIAADTQAACLSATRDLLMTLAELGYRVSGKKAQLCQEEVTYLGFKIHKGSRSLSNSRTQAILQIPVPKTKRQVREFLGTIGYCRLWIPGFAELAQPLYAATRPGNDPLVWGEKEEEAFQSLKLALTQPPALALPSLDKPFQLFVEETSGAAKGVLTQALGPWKRPVAYLSKRLDPVAAGWPRCLRAIAAAALLTREASKLTFGQDIEITSSHNLESLLRSPPDKWLTNARITQYQVLLLDPPRVRFKQTAALNPATLLPETDDTLPIHHCLDTLDSLTSTRPDLTDQPLAQAEATLFTDGSSYIRDGKRYAGAAVVTLDSVIWAEPLPIGTSAQKAELIALTKALEWSKDKSVNIYTDSRYAFATLHVHGMIYRERGWLTAGGKAIKNAPEILALLTAVWLPKRVAVMHCKGHQKDDAPTSTGNRRADEVAREVAIRPLSTQATISAGKRTADGSEFEKRTADGSEFESPKKKAKVE

SEQ ID NO: 1155 - protein, 2098 aa, synthetic construct
MPAAKRVKLDGGDKKYSIGLDIGTNSVGWAVITDEYKVPSKKFKVLGNTDRHSIKKNLIGALLFDSGETAEATRLKRTARRRYTRRKNRICYLQEIFSNEMAKVDDSFFHRLEESFLVEEDKKHERHPIFGNIVDEVAYHEKYPTIYHLRKKLVDSTDKADLRLIYLALAHMIKFRGHFLIEGDLNPDNSDVDKLFIQLVQTYNQLFEENPINASGVDAKAILSARLSKSRRLENLIAQLPGEKKNGLFGNLIALSLGLTPNFKSNFDLAEDAKLQLSKDTYDDDLDNLLAQIGDQYADLFLAAKNLSDAILLSDILRVNTEITKAPLSASMIKRYDEHHQDLTLLKALVRQQLPEKYKEIFFDQSKNGYAGYIDGGASQEEFYKFIKPILEKMDGTEELLVKLNREDLLRKQRTFDNGSIPHQIHLGELHAILRRQEDFYPFLKDNREKIEKILTFRIPYYVGPLARGNSRFAWMTRKSEETITPWNFEEVVDKGASAQSFIERMTNFDKNLPNEKVLPKHSLLYEYFTVYNELTKVKYVTEGMRKPAFLSGEQKKAIVDLLFKTNRKVTVKQLKEDYFKKIECFDSVEISGVEDRFNASLGTYHDLLKIIKDKDFLDNEENEDILEDIVLTLTLFEDREMIEERLKTYAHLFDDKVMKQLKRRRYTGWGRLSRKLINGIRDKQSGKTILDFLKSDGFANRNFMQLIHDDSLTFKEDIQKAQVSGQGDSLHEHIANLAGSPAIKKGILQTVKVVDELVKVMGRHKPENIVIEMARENQTTQKGQKNSRERMKRIEEGIKELGSQILKEHPVENTQLQNEKLYLYYLQNGRDMYVDQELDINRLSDYDVDHIVPQSFLKDDSIDNKVLTRSDKARGKSDNVPSEEVVKKMKNYWRQLLNAKLITQRKFDNLTKAERGGLSELDKAGFIKRQLVETRQITKHVAQILDSRMNTKYDENDKLIREVKVITLKSKLVSDFRKDFQFYKVREINNYHHAHDAYLNAVVGTALIKKYPKLESEFVYGDYKVYDVRKMIAKSEQEIGKATAKYFFYSNIMNFFKTEITLANGEIRKRPLIETNGETGEIVWDKGRDFATVRKVLSMPQVNIVKKTEVQTGGFSKESILPKRNSDKLIARKKDWDPKKYGGFDSPTVAYSVLVVAKVEKGKSKKLKSVKELLGITIMERSSFEKNPIDFLEAKGYKEVKKDLIIKLPKYSLFELENGRKRMLASAGELQKGNELALPSKYVNFLYLASHYEKLKGSPEDNEQKQLFVEQHKHYLDEIIEQISEFSKRVILADANLDKVLSAYNKHRDKPIREQAENIIHLFTLTNLGAPAAFKYFDTTIDRKRYTSTKEVLDATLIHQSITGLYETRIDLSQLGGDGGGGGEAAAKPAPGGTAPLEEEYRLFLEAPIQNVTLLEQWKREIPKVWAEINPPGLASTQAPIHVQLLSTALPVRVRQYPITLEAKRSLRETIRKFRAAGILRPVHSPWNTPLLPVRKSGTSEYRMVQDLREVNKRVETIHPTVPNPYTLLSLLPPDRIWYSVLDLKDAFFCIPLAPESQLIFAFEWADAEEGESGQLTWTRLPQGFKNSPTLFNEALNRDLQGFRLDHPSVSLLQYVDDLLIAADTQAACLSATRDLLMTLAELGYRVSGKKAQLCQEEVTYLGFKIHKGSRSLSNSRTQAILQIPVPKTKRQVREFLGTIGYCRLWIPGFAELAQPLYAATRPGNDPLVWGEKEEEAFQSLKLALTQPPALALPSLDKPFQLFVEETSGAAKGVLTQALGPWKRPVAYLSKRLDPVAAGWPRCLRAIAAAALLTREASKLTFGQDIEITSSHNLESLLRSPPDKWLTNARITQYQVLLLDPPRVRFKQTAALNPATLLPETDDTLPIHHCLDTLDSLTSTRPDLTDQPLAQAEATLFTDGSSYIRDGKRYAGAAVVTLDSVIWAEPLPIGTSAQKAELIALTKALEWSKDKSVNIYTDSRYAFATLHVHGMIYRERGWLTAGGKAIKNAPEILALLTAVWLPKRVAVMHCKGHQKDDAPTSTGNRRADEVAREVAIRPLSTQATISAGKRTADGSEFEKRTADGSEFESPKKKAKVE

SEQ ID NO: 1156 - protein, 2098 aa, synthetic construct
MPAAKRVKLDGGDKKYSIGLDIGTNSVGWAVITDEYKVPSKKFKVLGNTDRHSIKKNLIGALLFDSGETAEATRLKRTARRRYTRRKNRICYLQEIFSNEMAKVDDSFFHRLEESFLVEEDKKHERHPIFGNIVDEVAYHEKYPTIYHLRKKLVDSTDKADLRLIYLALAHMIKFRGHFLIEGDLNPDNSDVDKLFIQLVQTYNQLFEENPINASGVDAKAILSARLSKSRRLENLIAQLPGEKKNGLFGNLIALSLGLTPNFKSNFDLAEDAKLQLSKDTYDDDLDNLLAQIGDQYADLFLAAKNLSDAILLSDILRVNTEITKAPLSASMIKRYDEHHQDLTLLKALVRQQLPEKYKEIFFDQSKNGYAGYIDGGASQEEFYKFIKPILEKMDGTEELLVKLNREDLLRKQRTFDNGSIPHQIHLGELHAILRRQEDFYPFLKDNREKIEKILTFRIPYYVGPLARGNSRFAWMTRKSEETITPWNFEEVVDKGASAQSFIERMTNFDKNLPNEKVLPKHSLLYEYFTVYNELTKVKYVTEGMRKPAFLSGEQKKAIVDLLFKTNRKVTVKQLKEDYFKKIECFDSVEISGVEDRFNASLGTYHDLLKIIKDKDFLDNEENEDILEDIVLTLTLFEDREMIEERLKTYAHLFDDKVMKQLKRRRYTGWGRLSRKLINGIRDKQSGKTILDFLKSDGFANRNFMQLIHDDSLTFKEDIQKAQVSGQGDSLHEHIANLAGSPAIKKGILQTVKVVDELVKVMGRHKPENIVIEMARENQTTQKGQKNSRERMKRIEEGIKELGSQILKEHPVENTQLQNEKLYLYYLQNGRDMYVDQELDINRLSDYDVDHIVPQSFLKDDSIDNKVLTRSDKARGKSDNVPSEEVVKKMKNYWRQLLNAKLITQRKFDNLTKAERGGLSELDKAGFIKRQLVETRQITKHVAQILDSRMNTKYDENDKLIREVKVITLKSKLVSDFRKDFQFYKVREINNYHHAHDAYLNAVVGTALIKKYPKLESEFVYGDYKVYDVRKMIAKSEQEIGKATAKYFFYSNIMNFFKTEITLANGEIRKRPLIETNGETGEIVWDKGRDFATVRKVLSMPQVNIVKKTEVQTGGFSKESILPKRNSDKLIARKKDWDPKKYGGFDSPTVAYSVLVVAKVEKGKSKKLKSVKELLGITIMERSSFEKNPIDFLEAKGYKEVKKDLIIKLPKYSLFELENGRKRMLASAGELQKGNELALPSKYVNFLYLASHYEKLKGSPEDNEQKQLFVEQHKHYLDEIIEQISEFSKRVILADANLDKVLSAYNKHRDKPIREQAENIIHLFTLTNLGAPAAFKYFDTTIDRKRYTSTKEVLDATLIHQSITGLYETRIDLSQLGGDGGEAAAKPAPGGSGGTAPLEEEYRLFLEAPIQNVTLLEQWKREIPKVWAEINPPGLASTQAPIHVQLLSTALPVRVRQYPITLEAKRSLRETIRKFRAAGILRPVHSPWNTPLLPVRKSGTSEYRMVQDLREVNKRVETIHPTVPNPYTLLSLLPPDRIWYSVLDLKDAFFCIPLAPESQLIFAFEWADAEEGESGQLTWTRLPQGFKNSPTLFNEALNRDLQGFRLDHPSVSLLQYVDDLLIAADTQAACLSATRDLLMTLAELGYRVSGKKAQLCQEEVTYLGFKIHKGSRSLSNSRTQAILQIPVPKTKRQVREFLGTIGYCRLWIPGFAELAQPLYAATRPGNDPLVWGEKEEEAFQSLKLALTQPPALALPSLDKPFQLFVEETSGAAKGVLTQALGPWKRPVAYLSKRLDPVAAGWPRCLRAIAAAALLTREASKLTFGQDIEITSSHNLESLLRSPPDKWLTNARITQYQVLLLDPPRVRFKQTAALNPATLLPETDDTLPIHHCLDTLDSLTSTRPDLTDQPLAQAEATLFTDGSSYIRDGKRYAGAAVVTLDSVIWAEPLPIGTSAQKAELIALTKALEWSKDKSVNIYTDSRYAFATLHVHGMIYRERGWLTAGGKAIKNAPEILALLTAVWLPKRVAVMHCKGHQKDDAPTSTGNRRADEVAREVAIRPLSTQATISAGKRTADGSEFEKRTADGSEFESPKKKAKVE

SEQ ID NO: 1157 - protein, 2098 aa, synthetic construct
MPAAKRVKLDGGDKKYSIGLDIGTNSVGWAVITDEYKVPSKKFKVLGNTDRHSIKKNLIGALLFDSGETAEATRLKRTARRRYTRRKNRICYLQEIFSNEMAKVDDSFFHRLEESFLVEEDKKHERHPIFGNIVDEVAYHEKYPTIYHLRKKLVDSTDKADLRLIYLALAHMIKFRGHFLIEGDLNPDNSDVDKLFIQLVQTYNQLFEENPINASGVDAKAILSARLSKSRRLENLIAQLPGEKKNGLFGNLIALSLGLTPNFKSNFDLAEDAKLQLSKDTYDDDLDNLLAQIGDQYADLFLAAKNLSDAILLSDILRVNTEITKAPLSASMIKRYDEHHQDLTLLKALVRQQLPEKYKEIFFDQSKNGYAGYIDGGASQEEFYKFIKPILEKMDGTEELLVKLNREDLLRKQRTFDNGSIPHQIHLGELHAILRRQEDFYPFLKDNREKIEKILTFRIPYYVGPLARGNSRFAWMTRKSEETITPWNFEEVVDKGASAQSFIERMTNFDKNLPNEKVLPKHSLLYEYFTVYNELTKVKYVTEGMRKPAFLSGEQKKAIVDLLFKTNRKVTVKQLKEDYFKKIECFDSVEISGVEDRFNASLGTYHDLLKIIKDKDFLDNEENEDILEDIVLTLTLFEDREMIEERLKTYAHLFDDKVMKQLKRRRYTGWGRLSRKLINGIRDKQSGKTILDFLKSDGFANRNFMQLIHDDSLTFKEDIQKAQVSGQGDSLHEHIANLAGSPAIKKGILQTVKVVDELVKVMGRHKPENIVIEMARENQTTQKGQKNSRERMKRIEEGIKELGSQILKEHPVENTQLQNEKLYLYYLQNGRDMYVDQELDINRLSDYDVDHIVPQSFLKDDSIDNKVLTRSDKARGKSDNVPSEEVVKKMKNYWRQLLNAKLITQRKFDNLTKAERGGLSELDKAGFIKRQLVETRQITKHVAQILDSRMNTKYDENDKLIREVKVITLKSKLVSDFRKDFQFYKVREINNYHHAHDAYLNAVVGTALIKKYPKLESEFVYGDYKVYDVRKMIAKSEQEIGKATAKYFFYSNIMNFFKTEITLANGEIRKRPLIETNGETGEIVWDKGRDFATVRKVLSMPQVNIVKKTEVQTGGFSKESILPKRNSDKLIARKKDWDPKKYGGFDSPTVAYSVLVVAKVEKGKSKKLKSVKELLGITIMERSSFEKNPIDFLEAKGYKEVKKDLIIKLPKYSLFELENGRKRMLASAGELQKGNELALPSKYVNFLYLASHYEKLKGSPEDNEQKQLFVEQHKHYLDEIIEQISEFSKRVILADANLDKVLSAYNKHRDKPIREQAENIIHLFTLTNLGAPAAFKYFDTTIDRKRYTSTKEVLDATLIHQSITGLYETRIDLSQLGGDGGEAAAKGGGGGSGGTAPLEEEYRLFLEAPIQNVTLLEQWKREIPKVWAEINPPGLASTQAPIHVQLLSTALPVRVRQYPITLEAKRSLRETIRKFRAAGILRPVHSPWNTPLLPVRKSGTSEYRMVQDLREVNKRVETIHPTVPNPYTLLSLLPPDRIWYSVLDLKDAFFCIPLAPESQLIFAFEWADAEEGESGQLTWTRLPQGFKNSPTLFNEALNRDLQGFRLDHPSVSLLQYVDDLLIAADTQAACLSATRDLLMTLAELGYRVSGKKAQLCQEEVTYLGFKIHKGSRSLSNSRTQAILQIPVPKTKRQVREFLGTIGYCRLWIPGFAELAQPLYAATRPGNDPLVWGEKEEEAFQSLKLALTQPPALALPSLDKPFQLFVEETSGAAKGVLTQALGPWKRPVAYLSKRLDPVAAGWPRCLRAIAAAALLTREASKLTFGQDIEITSSHNLESLLRSPPDKWLTNARITQYQVLLLDPPRVRFKQTAALNPATLLPETDDTLPIHHCLDTLDSLTSTRPDLTDQPLAQAEATLFTDGSSYIRDGKRYAGAAVVTLDSVIWAEPLPIGTSAQKAELIALTKALEWSKDKSVNIYTDSRYAFATLHVHGMIYRERGWLTAGGKAIKNAPEILALLTAVWLPKRVAVMHCKGHQKDDAPTSTGNRRADEVAREVAIRPLSTQATISAGKRTADGSEFEKRTADGSEFESPKKKAKVE

SEQ ID NO: 1158 - protein, 2102 aa, synthetic construct
MPAAKRVKLDGGDKKYSIGLDIGTNSVGWAVITDEYKVPSKKFKVLGNTDRHSIKKNLIGALLFDSGETAEATRLKRTARRRYTRRKNRICYLQEIFSNEMAKVDDSFFHRLEESFLVEEDKKHERHPIFGNIVDEVAYHEKYPTIYHLRKKLVDSTDKADLRLIYLALAHMIKFRGHFLIEGDLNPDNSDVDKLFIQLVQTYNQLFEENPINASGVDAKAILSARLSKSRRLENLIAQLPGEKKNGLFGNLIALSLGLTPNFKSNFDLAEDAKLQLSKDTYDDDLDNLLAQIGDQYADLFLAAKNLSDAILLSDILRVNTEITKAPLSASMIKRYDEHHQDLTLLKALVRQQLPEKYKEIFFDQSKNGYAGYIDGGASQEEFYKFIKPILEKMDGTEELLVKLNREDLLRKQRTFDNGSIPHQIHLGELHAILRRQEDFYPFLKDNREKIEKILTFRIPYYVGPLARGNSRFAWMTRKSEETITPWNFEEVVDKGASAQSFIERMTNFDKNLPNEKVLPKHSLLYEYFTVYNELTKVKYVTEGMRKPAFLSGEQKKAIVDLLFKTNRKVTVKQLKEDYFKKIECFDSVEISGVEDRFNASLGTYHDLLKIIKDKDFLDNEENEDILEDIVLTLTLFEDREMIEERLKTYAHLFDDKVMKQLKRRRYTGWGRLSRKLINGIRDKQSGKTILDFLKSDGFANRNFMQLIHDDSLTFKEDIQKAQVSGQGDSLHEHIANLAGSPAIKKGILQTVKVVDELVKVMGRHKPENIVIEMARENQTTQKGQKNSRERMKRIEEGIKELGSQILKEHPVENTQLQNEKLYLYYLQNGRDMYVDQELDINRLSDYDVDHIVPQSFLKDDSIDNKVLTRSDKARGKSDNVPSEEVVKKMKNYWRQLLNAKLITQRKFDNLTKAERGGLSELDKAGFIKRQLVETRQITKHVAQILDSRMNTKYDENDKLIREVKVITLKSKLVSDFRKDFQFYKVREINNYHHAHDAYLNAVVGTALIKKYPKLESEFVYGDYKVYDVRKMIAKSEQEIGKATAKYFFYSNIMNFFKTEITLANGEIRKRPLIETNGETGEIVWDKGRDFATVRKVLSMPQVNIVKKTEVQTGGFSKESILPKRNSDKLIARKKDWDPKKYGGFDSPTVAYSVLVVAKVEKGKSKKLKSVKELLGITIMERSSFEKNPIDFLEAKGYKEVKKDLIIKLPKYSLFELENGRKRMLASAGELQKGNELALPSKYVNFLYLASHYEKLKGSPEDNEQKQLFVEQHKHYLDEIIEQISEFSKRVILADANLDKVLSAYNKHRDKPIREQAENIIHLFTLTNLGAPAAFKYFDTTIDRKRYTSTKEVLDATLIHQSITGLYETRIDLSQLGGDGGGGGGSEAAAKGGGGSGGTAPLEEEYRLFLEAPIQNVTLLEQWKREIPKVWAEINPPGLASTQAPIHVQLLSTALPVRVRQYPITLEAKRSLRETIRKFRAAGILRPVHSPWNTPLLPVRKSGTSEYRMVQDLREVNKRVETIHPTVPNPYTLLSLLPPDRIWYSVLDLKDAFFCIPLAPESQLIFAFEWADAEEGESGQLTWTRLPQGFKNSPTLFNEALNRDLQGFRLDHPSVSLLQYVDDLLIAADTQAACLSATRDLLMTLAELGYRVSGKKAQLCQEEVTYLGFKIHKGSRSLSNSRTQAILQIPVPKTKRQVREFLGTIGYCRLWIPGFAELAQPLYAATRPGNDPLVWGEKEEEAFQSLKLALTQPPALALPSLDKPFQLFVEETSGAAKGVLTQALGPWKRPVAYLSKRLDPVAAGWPRCLRAIAAAALLTREASKLTFGQDIEITSSHNLESLLRSPPDKWLTNARITQYQVLLLDPPRVRFKQTAALNPATLLPETDDTLPIHHCLDTLDSLTSTRPDLTDQPLAQAEATLFTDGSSYIRDGKRYAGAAVVTLDSVIWAEPLPIGTSAQKAELIALTKALEWSKDKSVNIYTDSRYAFATLHVHGMIYRERGWLTAGGKAIKNAPEILALLTAVWLPKRVAVMHCKGHQKDDAPTSTGNRRADEVAREVAIRPLSTQATISAGKRTADGSEFEKRTADGSEFESPKKKAKVE

SEQ ID NO: 1159 - protein, 2096 aa, synthetic construct
MPAAKRVKLDGGDKKYSIGLDIGTNSVGWAVITDEYKVPSKKFKVLGNTDRHSIKKNLIGALLFDSGETAEATRLKRTARRRYTRRKNRICYLQEIFSNEMAKVDDSFFHRLEESFLVEEDKKHERHPIFGNIVDEVAYHEKYPTIYHLRKKLVDSTDKADLRLIYLALAHMIKFRGHFLIEGDLNPDNSDVDKLFIQLVQTYNQLFEENPINASGVDAKAILSARLSKSRRLENLIAQLPGEKKNGLFGNLIALSLGLTPNFKSNFDLAEDAKLQLSKDTYDDDLDNLLAQIGDQYADLFLAAKNLSDAILLSDILRVNTEITKAPLSASMIKRYDEHHQDLTLLKALVRQQLPEKYKEIFFDQSKNGYAGYIDGGASQEEFYKFIKPILEKMDGTEELLVKLNREDLLRKQRTFDNGSIPHQIHLGELHAILRRQEDFYPFLKDNREKIEKILTFRIPYYVGPLARGNSRFAWMTRKSEETITPWNFEEVVDKGASAQSFIERMTNFDKNLPNEKVLPKHSLLYEYFTVYNELTKVKYVTEGMRKPAFLSGEQKKAIVDLLFKTNRKVTVKQLKEDYFKKIECFDSVEISGVEDRFNASLGTYHDLLKIIKDKDFLDNEENEDILEDIVLTLTLFEDREMIEERLKTYAHLFDDKVMKQLKRRRYTGWGRLSRKLINGIRDKQSGKTILDFLKSDGFANRNFMQLIHDDSLTFKEDIQKAQVSGQGDSLHEHIANLAGSPAIKKGILQTVKVVDELVKVMGRHKPENIVIEMARENQTTQKGQKNSRERMKRIEEGIKELGSQILKEHPVENTQLQNEKLYLYYLQNGRDMYVDQELDINRLSDYDVDHIVPQSFLKDDSIDNKVLTRSDKARGKSDNVPSEEVVKKMKNYWRQLLNAKLITQRKFDNLTKAERGGLSELDKAGFIKRQLVETRQITKHVAQILDSRMNTKYDENDKLIREVKVITLKSKLVSDFRKDFQFYKVREINNYHHAHDAYLNAVVGTALIKKYPKLESEFVYGDYKVYDVRKMIAKSEQEIGKATAKYFFYSNIMNFFKTEITLANGEIRKRPLIETNGETGEIVWDKGRDFATVRKVLSMPQVNIVKKTEVQTGGFSKESILPKRNSDKLIARKKDWDPKKYGGFDSPTVAYSVLVVAKVEKGKSKKLKSVKELLGITIMERSSFEKNPIDFLEAKGYKEVKKDLIIKLPKYSLFELENGRKRMLASAGELQKGNELALPSKYVNFLYLASHYEKLKGSPEDNEQKQLFVEQHKHYLDEIIEQISEFSKRVILADANLDKVLSAYNKHRDKPIREQAENIIHLFTLTNLGAPAAFKYFDTTIDRKRYTSTKEVLDATLIHQSITGLYETRIDLSQLGGDGGPAPGGGGGSGGTAPLEEEYRLFLEAPIQNVTLLEQWKREIPKVWAEINPPGLASTQAPIHVQLLSTALPVRVRQYPITLEAKRSLRETIRKFRAAGILRPVHSPWNTPLLPVRKSGTSEYRMVQDLREVNKRVETIHPTVPNPYTLLSLLPPDRIWYSVLDLKDAFFCIPLAPESQLIFAFEWADAEEGESGQLTWTRLPQGFKNSPTLFNEALNRDLQGFRLDHPSVSLLQYVDDLLIAADTQAACLSATRDLLMTLAELGYRVSGKKAQLCQEEVTYLGFKIHKGSRSLSNSRTQAILQIPVPKTKRQVREFLGTIGYCRLWIPGFAELAQPLYAATRPGNDPLVWGEKEEEAFQSLKLALTQPPALALPSLDKPFQLFVEETSGAAKGVLTQALGPWKRPVAYLSKRLDPVAAGWPRCLRAIAAAALLTREASKLTFGQDIEITSSHNLESLLRSPPDKWLTNARITQYQVLLLDPPRVRFKQTAALNPATLLPETDDTLPIHHCLDTLDSLTSTRPDLTDQPLAQAEATLFTDGSSYIRDGKRYAGAAVVTLDSVIWAEPLPIGTSAQKAELIALTKALEWSKDKSVNIYTDSRYAFATLHVHGMIYRERGWLTAGGKAIKNAPEILALLTAVWLPKRVAVMHCKGHQKDDAPTSTGNRRADEVAREVAIRPLSTQATISAGKRTADGSEFEKRTADGSEFESPKKKAKVE

SEQ ID NO: 1160 - protein, 2098 aa, synthetic construct
MPAAKRVKLDGGDKKYSIGLDIGTNSVGWAVITDEYKVPSKKFKVLGNTDRHSIKKNLIGALLFDSGETAEATRLKRTARRRYTRRKNRICYLQEIFSNEMAKVDDSFFHRLEESFLVEEDKKHERHPIFGNIVDEVAYHEKYPTIYHLRKKLVDSTDKADLRLIYLALAHMIKFRGHFLIEGDLNPDNSDVDKLFIQLVQTYNQLFEENPINASGVDAKAILSARLSKSRRLENLIAQLPGEKKNGLFGNLIALSLGLTPNFKSNFDLAEDAKLQLSKDTYDDDLDNLLAQIGDQYADLFLAAKNLSDAILLSDILRVNTEITKAPLSASMIKRYDEHHQDLTLLKALVRQQLPEKYKEIFFDQSKNGYAGYIDGGASQEEFYKFIKPILEKMDGTEELLVKLNREDLLRKQRTFDNGSIPHQIHLGELHAILRRQEDFYPFLKDNREKIEKILTFRIPYYVGPLARGNSRFAWMTRKSEETITPWNFEEVVDKGASAQSFIERMTNFDKNLPNEKVLPKHSLLYEYFTVYNELTKVKYVTEGMRKPAFLSGEQKKAIVDLLFKTNRKVTVKQLKEDYFKKIECFDSVEISGVEDRFNASLGTYHDLLKIIKDKDFLDNEENEDILEDIVLTLTLFEDREMIEERLKTYAHLFDDKVMKQLKRRRYTGWGRLSRKLINGIRDKQSGKTILDFLKSDGFANRNFMQLIHDDSLTFKEDIQKAQVSGQGDSLHEHIANLAGSPAIKKGILQTVKVVDELVKVMGRHKPENIVIEMARENQTTQKGQKNSRERMKRIEEGIKELGSQILKEHPVENTQLQNEKLYLYYLQNGRDMYVDQELDINRLSDYDVDHIVPQSFLKDDSIDNKVLTRSDKARGKSDNVPSEEVVKKMKNYWRQLLNAKLITQRKFDNLTKAERGGLSELDKAGFIKRQLVETRQITKHVAQILDSRMNTKYDENDKLIREVKVITLKSKLVSDFRKDFQFYKVREINNYHHAHDAYLNAVVGTALIKKYPKLESEFVYGDYKVYDVRKMIAKSEQEIGKATAKYFFYSNIMNFFKTEITLANGEIRKRPLIETNGETGEIVWDKGRDFATVRKVLSMPQVNIVKKTEVQTGGFSKESILPKRNSDKLIARKKDWDPKKYGGFDSPTVAYSVLVVAKVEKGKSKKLKSVKELLGITIMERSSFEKNPIDFLEAKGYKEVKKDLIIKLPKYSLFELENGRKRMLASAGELQKGNELALPSKYVNFLYLASHYEKLKGSPEDNEQKQLFVEQHKHYLDEIIEQISEFSKRVILADANLDKVLSAYNKHRDKPIREQAENIIHLFTLTNLGAPAAFKYFDTTIDRKRYTSTKEVLDATLIHQSITGLYETRIDLSQLGGDGGGGSPAPEAAAKGGTAPLEEEYRLFLEAPIQNVTLLEQWKREIPKVWAEINPPGLASTQAPIHVQLLSTALPVRVRQYPITLEAKRSLRETIRKFRAAGILRPVHSPWNTPLLPVRKSGTSEYRMVQDLREVNKRVETIHPTVPNPYTLLSLLPPDRIWYSVLDLKDAFFCIPLAPESQLIFAFEWADAEEGESGQLTWTRLPQGFKNSPTLFNEALNRDLQGFRLDHPSVSLLQYVDDLLIAADTQAACLSATRDLLMTLAELGYRVSGKKAQLCQEEVTYLGFKIHKGSRSLSNSRTQAILQIPVPKTKRQVREFLGTIGYCRLWIPGFAELAQPLYAATRPGNDPLVWGEKEEEAFQSLKLALTQPPALALPSLDKPFQLFVEETSGAAKGVLTQALGPWKRPVAYLSKRLDPVAAGWPRCLRAIAAAALLTREASKLTFGQDIEITSSHNLESLLRSPPDKWLTNARITQYQVLLLDPPRVRFKQTAALNPATLLPETDDTLPIHHCLDTLDSLTSTRPDLTDQPLAQAEATLFTDGSSYIRDGKRYAGAAVVTLDSVIWAEPLPIGTSAQKAELIALTKALEWSKDKSVNIYTDSRYAFATLHVHGMIYRERGWLTAGGKAIKNAPEILALLTAVWLPKRVAVMHCKGHQKDDAPTSTGNRRADEVAREVAIRPLSTQATISAGKRTADGSEFEKRTADGSEFESPKKKAKVE

SEQ ID NO: 1161 - protein, 2098 aa, synthetic construct
MPAAKRVKLDGGDKKYSIGLDIGTNSVGWAVITDEYKVPSKKFKVLGNTDRHSIKKNLIGALLFDSGETAEATRLKRTARRRYTRRKNRICYLQEIFSNEMAKVDDSFFHRLEESFLVEEDKKHERHPIFGNIVDEVAYHEKYPTIYHLRKKLVDSTDKADLRLIYLALAHMIKFRGHFLIEGDLNPDNSDVDKLFIQLVQTYNQLFEENPINASGVDAKAILSARLSKSRRLENLIAQLPGEKKNGLFGNLIALSLGLTPNFKSNFDLAEDAKLQLSKDTYDDDLDNLLAQIGDQYADLFLAAKNLSDAILLSDILRVNTEITKAPLSASMIKRYDEHHQDLTLLKALVRQQLPEKYKEIFFDQSKNGYAGYIDGGASQEEFYKFIKPILEKMDGTEELLVKLNREDLLRKQRTFDNGSIPHQIHLGELHAILRRQEDFYPFLKDNREKIEKILTFRIPYYVGPLARGNSRFAWMTRKSEETITPWNFEEVVDKGASAQSFIERMTNFDKNLPNEKVLPKHSLLYEYFTVYNELTKVKYVTEGMRKPAFLSGEQKKAIVDLLFKTNRKVTVKQLKEDYFKKIECFDSVEISGVEDRFNASLGTYHDLLKIIKDKDFLDNEENEDILEDIVLTLTLFEDREMIEERLKTYAHLFDDKVMKQLKRRRYTGWGRLSRKLINGIRDKQSGKTILDFLKSDGFANRNFMQLIHDDSLTFKEDIQKAQVSGQGDSLHEHIANLAGSPAIKKGILQTVKVVDELVKVMGRHKPENIVIEMARENQTTQKGQKNSRERMKRIEEGIKELGSQILKEHPVENTQLQNEKLYLYYLQNGRDMYVDQELDINRLSDYDVDHIVPQSFLKDDSIDNKVLTRSDKARGKSDNVPSEEVVKKMKNYWRQLLNAKLITQRKFDNLTKAERGGLSELDKAGFIKRQLVETRQITKHVAQILDSRMNTKYDENDKLIREVKVITLKSKLVSDFRKDFQFYKVREINNYHHAHDAYLNAVVGTALIKKYPKLESEFVYGDYKVYDVRKMIAKSEQEIGKATAKYFFYSNIMNFFKTEITLANGEIRKRPLIETNGETGEIVWDKGRDFATVRKVLSMPQVNIVKKTEVQTGGFSKESILPKRNSDKLIARKKDWDPKKYGGFDSPTVAYSVLVVAKVEKGKSKKLKSVKELLGITIMERSSFEKNPIDFLEAKGYKEVKKDLIIKLPKYSLFELENGRKRMLASAGELQKGNELALPSKYVNFLYLASHYEKLKGSPEDNEQKQLFVEQHKHYLDEIIEQISEFSKRVILADANLDKVLSAYNKHRDKPIREQAENIIHLFTLTNLGAPAAFKYFDTTIDRKRYTSTKEVLDATLIHQSITGLYETRIDLSQLGGDGGPAPEAAAKGGSGGTAPLEEEYRLFLEAPIQNVTLLEQWKREIPKVWAEINPPGLASTQAPIHVQLLSTALPVRVRQYPITLEAKRSLRETIRKFRAAGILRPVHSPWNTPLLPVRKSGTSEYRMVQDLREVNKRVETIHPTVPNPYTLLSLLPPDRIWYSVLDLKDAFFCIPLAPESQLIFAFEWADAEEGESGQLTWTRLPQGFKNSPTLFNEALNRDLQGFRLDHPSVSLLQYVDDLLIAADTQAACLSATRDLLMTLAELGYRVSGKKAQLCQEEVTYLGFKIHKGSRSLSNSRTQAILQIPVPKTKRQVREFLGTIGYCRLWIPGFAELAQPLYAATRPGNDPLVWGEKEEEAFQSLKLALTQPPALALPSLDKPFQLFVEETSGAAKGVLTQALGPWKRPVAYLSKRLDPVAAGWPRCLRAIAAAALLTREASKLTFGQDIEITSSHNLESLLRSPPDKWLTNARITQYQVLLLDPPRVRFKQTAALNPATLLPETDDTLPIHHCLDTLDSLTSTRPDLTDQPLAQAEATLFTDGSSYIRDGKRYAGAAVVTLDSVIWAEPLPIGTSAQKAELIALTKALEWSKDKSVNIYTDSRYAFATLHVHGMIYRERGWLTAGGKAIKNAPEILALLTAVWLPKRVAVMHCKGHQKDDAPTSTGNRRADEVAREVAIRPLSTQATISAGKRTADGSEFEKRTADGSEFESPKKKAKVE

SEQ ID NO: 1162 - protein, 2098 aa, synthetic construct
MPAAKRVKLDGGDKKYSIGLDIGTNSVGWAVITDEYKVPSKKFKVLGNTDRHSIKKNLIGALLFDSGETAEATRLKRTARRRYTRRKNRICYLQEIFSNEMAKVDDSFFHRLEESFLVEEDKKHERHPIFGNIVDEVAYHEKYPTIYHLRKKLVDSTDKADLRLIYLALAHMIKFRGHFLIEGDLNPDNSDVDKLFIQLVQTYNQLFEENPINASGVDAKAILSARLSKSRRLENLIAQLPGEKKNGLFGNLIALSLGLTPNFKSNFDLAEDAKLQLSKDTYDDDLDNLLAQIGDQYADLFLAAKNLSDAILLSDILRVNTEITKAPLSASMIKRYDEHHQDLTLLKALVRQQLPEKYKEIFFDQSKNGYAGYIDGGASQEEFYKFIKPILEKMDGTEELLVKLNREDLLRKQRTFDNGSIPHQIHLGELHAILRRQEDFYPFLKDNREKIEKILTFRIPYYVGPLARGNSRFAWMTRKSEETITPWNFEEVVDKGASAQSFIERMTNFDKNLPNEKVLPKHSLLYEYFTVYNELTKVKYVTEGMRKPAFLSGEQKKAIVDLLFKTNRKVTVKQLKEDYFKKIECFDSVEISGVEDRFNASLGTYHDLLKIIKDKDFLDNEENEDILEDIVLTLTLFEDREMIEERLKTYAHLFDDKVMKQLKRRRYTGWGRLSRKLINGIRDKQSGKTILDFLKSDGFANRNFMQLIHDDSLTFKEDIQKAQVSGQGDSLHEHIANLAGSPAIKKGILQTVKVVDELVKVMGRHKPENIVIEMARENQTTQKGQKNSRERMKRIEEGIKELGSQILKEHPVENTQLQNEKLYLYYLQNGRDMYVDQELDINRLSDYDVDHIVPQSFLKDDSIDNKVLTRSDKARGKSDNVPSEEVVKKMKNYWRQLLNAKLITQRKFDNLTKAERGGLSELDKAGFIKRQLVETRQITKHVAQILDSRMNTKYDENDKLIREVKVITLKSKLVSDFRKDFQFYKVREINNYHHAHDAYLNAVVGTALIKKYPKLESEFVYGDYKVYDVRKMIAKSEQEIGKATAKYFFYSNIMNFFKTEITLANGEIRKRPLIETNGETGEIVWDKGRDFATVRKVLSMPQVNIVKKTEVQTGGFSKESILPKRNSDKLIARKKDWDPKKYGGFDSPTVAYSVLVVAKVEKGKSKKLKSVKELLGITIMERSSFEKNPIDFLEAKGYKEVKKDLIIKLPKYSLFELENGRKRMLASAGELQKGNELALPSKYVNFLYLASHYEKLKGSPEDNEQKQLFVEQHKHYLDEIIEQISEFSKRVILADANLDKVLSAYNKHRDKPIREQAENIIHLFTLTNLGAPAAFKYFDTTIDRKRYTSTKEVLDATLIHQSITGLYETRIDLSQLGGDGGGSSEAAAKGGGGGTAPLEEEYRLFLEAPIQNVTLLEQWKREIPKVWAEINPPGLASTQAPIHVQLLSTALPVRVRQYPITLEAKRSLRETIRKFRAAGILRPVHSPWNTPLLPVRKSGTSEYRMVQDLREVNKRVETIHPTVPNPYTLLSLLPPDRIWYSVLDLKDAFFCIPLAPESQLIFAFEWADAEEGESGQLTWTRLPQGFKNSPTLFNEALNRDLQGFRLDHPSVSLLQYVDDLLIAADTQAACLSATRDLLMTLAELGYRVSGKKAQLCQEEVTYLGFKIHKGSRSLSNSRTQAILQIPVPKTKRQVREFLGTIGYCRLWIPGFAELAQPLYAATRPGNDPLVWGEKEEEAFQSLKLALTQPPALALPSLDKPFQLFVEETSGAAKGVLTQALGPWKRPVAYLSKRLDPVAAGWPRCLRAIAAAALLTREASKLTFGQDIEITSSHNLESLLRSPPDKWLTNARITQYQVLLLDPPRVRFKQTAALNPATLLPETDDTLPIHHCLDTLDSLTSTRPDLTDQPLAQAEATLFTDGSSYIRDGKRYAGAAVVTLDSVIWAEPLPIGTSAQKAELIALTKALEWSKDKSVNIYTDSRYAFATLHVHGMIYRERGWLTAGGKAIKNAPEILALLTAVWLPKRVAVMHCKGHQKDDAPTSTGNRRADEVAREVAIRPLSTQATISAGKRTADGSEFEKRTADGSEFESPKKKAKVE

SEQ ID NO: 1163 - protein, 2096 aa, synthetic construct
MPAAKRVKLDGGDKKYSIGLDIGTNSVGWAVITDEYKVPSKKFKVLGNTDRHSIKKNLIGALLFDSGETAEATRLKRTARRRYTRRKNRICYLQEIFSNEMAKVDDSFFHRLEESFLVEEDKKHERHPIFGNIVDEVAYHEKYPTIYHLRKKLVDSTDKADLRLIYLALAHMIKFRGHFLIEGDLNPDNSDVDKLFIQLVQTYNQLFEENPINASGVDAKAILSARLSKSRRLENLIAQLPGEKKNGLFGNLIALSLGLTPNFKSNFDLAEDAKLQLSKDTYDDDLDNLLAQIGDQYADLFLAAKNLSDAILLSDILRVNTEITKAPLSASMIKRYDEHHQDLTLLKALVRQQLPEKYKEIFFDQSKNGYAGYIDGGASQEEFYKFIKPILEKMDGTEELLVKLNREDLLRKQRTFDNGSIPHQIHLGELHAILRRQEDFYPFLKDNREKIEKILTFRIPYYVGPLARGNSRFAWMTRKSEETITPWNFEEVVDKGASAQSFIERMTNFDKNLPNEKVLPKHSLLYEYFTVYNELTKVKYVTEGMRKPAFLSGEQKKAIVDLLFKTNRKVTVKQLKEDYFKKIECFDSVEISGVEDRFNASLGTYHDLLKIIKDKDFLDNEENEDILEDIVLTLTLFEDREMIEERLKTYAHLFDDKVMKQLKRRRYTGWGRLSRKLINGIRDKQSGKTILDFLKSDGFANRNFMQLIHDDSLTFKEDIQKAQVSGQGDSLHEHIANLAGSPAIKKGILQTVKVVDELVKVMGRHKPENIVIEMARENQTTQKGQKNSRERMKRIEEGIKELGSQILKEHPVENTQLQNEKLYLYYLQNGRDMYVDQELDINRLSDYDVDHIVPQSFLKDDSIDNKVLTRSDKARGKSDNVPSEEVVKKMKNYWRQLLNAKLITQRKFDNLTKAERGGLSELDKAGFIKRQLVETRQITKHVAQILDSRMNTKYDENDKLIREVKVITLKSKLVSDFRKDFQFYKVREINNYHHAHDAYLNAVVGTALIKKYPKLESEFVYGDYKVYDVRKMIAKSEQEIGKATAKYFFYSNIMNFFKTEITLANGEIRKRPLIETNGETGEIVWDKGRDFATVRKVLSMPQVNIVKKTEVQTGGFSKESILPKRNSDKLIARKKDWDPKKYGGFDSPTVAYSVLVVAKVEKGKSKKLKSVKELLGITIMERSSFEKNPIDFLEAKGYKEVKKDLIIKLPKYSLFELENGRKRMLASAGELQKGNELALPSKYVNFLYLASHYEKLKGSPEDNEQKQLFVEQHKHYLDEIIEQISEFSKRVILADANLDKVLSAYNKHRDKPIREQAENIIHLFTLTNLGAPAAFKYFDTTIDRKRYTSTKEVLDATLIHQSITGLYETRIDLSQLGGDGGGGGGGSPAPGGTAPLEEEYRLFLEAPIQNVTLLEQWKREIPKVWAEINPPGLASTQAPIHVQLLSTALPVRVRQYPITLEAKRSLRETIRKFRAAGILRPVHSPWNTPLLPVRKSGTSEYRMVQDLREVNKRVETIHPTVPNPYTLLSLLPPDRIWYSVLDLKDAFFCIPLAPESQLIFAFEWADAEEGESGQLTWTRLPQGFKNSPTLFNEALNRDLQGFRLDHPSVSLLQYVDDLLIAADTQAACLSATRDLLMTLAELGYRVSGKKAQLCQEEVTYLGFKIHKGSRSLSNSRTQAILQIPVPKTKRQVREFLGTIGYCRLWIPGFAELAQPLYAATRPGNDPLVWGEKEEEAFQSLKLALTQPPALALPSLDKPFQLFVEETSGAAKGVLTQALGPWKRPVAYLSKRLDPVAAGWPRCLRAIAAAALLTREASKLTFGQDIEITSSHNLESLLRSPPDKWLTNARITQYQVLLLDPPRVRFKQTAALNPATLLPETDDTLPIHHCLDTLDSLTSTRPDLTDQPLAQAEATLFTDGSSYIRDGKRYAGAAVVTLDSVIWAEPLPIGTSAQKAELIALTKALEWSKDKSVNIYTDSRYAFATLHVHGMIYRERGWLTAGGKAIKNAPEILALLTAVWLPKRVAVMHCKGHQKDDAPTSTGNRRADEVAREVAIRPLSTQATISAGKRTADGSEFEKRTADGSEFESPKKKAKVE

SEQ ID NO: 1164 - protein, 2098 aa, synthetic construct
MPAAKRVKLDGGDKKYSIGLDIGTNSVGWAVITDEYKVPSKKFKVLGNTDRHSIKKNLIGALLFDSGETAEATRLKRTARRRYTRRKNRICYLQEIFSNEMAKVDDSFFHRLEESFLVEEDKKHERHPIFGNIVDEVAYHEKYPTIYHLRKKLVDSTDKADLRLIYLALAHMIKFRGHFLIEGDLNPDNSDVDKLFIQLVQTYNQLFEENPINASGVDAKAILSARLSKSRRLENLIAQLPGEKKNGLFGNLIALSLGLTPNFKSNFDLAEDAKLQLSKDTYDDDLDNLLAQIGDQYADLFLAAKNLSDAILLSDILRVNTEITKAPLSASMIKRYDEHHQDLTLLKALVRQQLPEKYKEIFFDQSKNGYAGYIDGGASQEEFYKFIKPILEKMDGTEELLVKLNREDLLRKQRTFDNGSIPHQIHLGELHAILRRQEDFYPFLKDNREKIEKILTFRIPYYVGPLARGNSRFAWMTRKSEETITPWNFEEVVDKGASAQSFIERMTNFDKNLPNEKVLPKHSLLYEYFTVYNELTKVKYVTEGMRKPAFLSGEQKKAIVDLLFKTNRKVTVKQLKEDYFKKIECFDSVEISGVEDRFNASLGTYHDLLKIIKDKDFLDNEENEDILEDIVLTLTLFEDREMIEERLKTYAHLFDDKVMKQLKRRRYTGWGRLSRKLINGIRDKQSGKTILDFLKSDGFANRNFMQLIHDDSLTFKEDIQKAQVSGQGDSLHEHIANLAGSPAIKKGILQTVKVVDELVKVMGRHKPENIVIEMARENQTTQKGQKNSRERMKRIEEGIKELGSQILKEHPVENTQLQNEKLYLYYLQNGRDMYVDQELDINRLSDYDVDHIVPQSFLKDDSIDNKVLTRSDKARGKSDNVPSEEVVKKMKNYWRQLLNAKLITQRKFDNLTKAERGGLSELDKAGFIKRQLVETRQITKHVAQILDSRMNTKYDENDKLIREVKVITLKSKLVSDFRKDFQFYKVREINNYHHAHDAYLNAVVGTALIKKYPKLESEFVYGDYKVYDVRKMIAKSEQEIGKATAKYFFYSNIMNFFKTEITLANGEIRKRPLIETNGETGEIVWDKGRDFATVRKVLSMPQVNIVKKTEVQTGGFSKESILPKRNSDKLIARKKDWDPKKYGGFDSPTVAYSVLVVAKVEKGKSKKLKSVKELLGITIMERSSFEKNPIDFLEAKGYKEVKKDLIIKLPKYSLFELENGRKRMLASAGELQKGNELALPSKYVNFLYLASHYEKLKGSPEDNEQKQLFVEQHKHYLDEIIEQISEFSKRVILADANLDKVLSAYNKHRDKPIREQAENIIHLFTLTNLGAPAAFKYFDTTIDRKRYTSTKEVLDATLIHQSITGLYETRIDLSQLGGDGGGSSPAPEAAAKGGTAPLEEEYRLFLEAPIQNVTLLEQWKREIPKVWAEINPPGLASTQAPIHVQLLSTALPVRVRQYPITLEAKRSLRETIRKFRAAGILRPVHSPWNTPLLPVRKSGTSEYRMVQDLREVNKRVETIHPTVPNPYTLLSLLPPDRIWYSVLDLKDAFFCIPLAPESQLIFAFEWADAEEGESGQLTWTRLPQGFKNSPTLFNEALNRDLQGFRLDHPSVSLLQYVDDLLIAADTQAACLSATRDLLMTLAELGYRVSGKKAQLCQEEVTYLGFKIHKGSRSLSNSRTQAILQIPVPKTKRQVREFLGTIGYCRLWIPGFAELAQPLYAATRPGNDPLVWGEKEEEAFQSLKLALTQPPALALPSLDKPFQLFVEETSGAAKGVLTQALGPWKRPVAYLSKRLDPVAAGWPRCLRAIAAAALLTREASKLTFGQDIEITSSHNLESLLRSPPDKWLTNARITQYQVLLLDPPRVRFKQTAALNPATLLPETDDTLPIHHCLDTLDSLTSTRPDLTDQPLAQAEATLFTDGSSYIRDGKRYAGAAVVTLDSVIWAEPLPIGTSAQKAELIALTKALEWSKDKSVNIYTDSRYAFATLHVHGMIYRERGWLTAGGKAIKNAPEILALLTAVWLPKRVAVMHCKGHQKDDAPTSTGNRRADEVAREVAIRPLSTQATISAGKRTADGSEFEKRTADGSEFESPKKKAKVE

SEQ ID NO: 1165 - protein, 2096 aa, synthetic construct
MPAAKRVKLDGGDKKYSIGLDIGTNSVGWAVITDEYKVPSKKFKVLGNTDRHSIKKNLIGALLFDSGETAEATRLKRTARRRYTRRKNRICYLQEIFSNEMAKVDDSFFHRLEESFLVEEDKKHERHPIFGNIVDEVAYHEKYPTIYHLRKKLVDSTDKADLRLIYLALAHMIKFRGHFLIEGDLNPDNSDVDKLFIQLVQTYNQLFEENPINASGVDAKAILSARLSKSRRLENLIAQLPGEKKNGLFGNLIALSLGLTPNFKSNFDLAEDAKLQLSKDTYDDDLDNLLAQIGDQYADLFLAAKNLSDAILLSDILRVNTEITKAPLSASMIKRYDEHHQDLTLLKALVRQQLPEKYKEIFFDQSKNGYAGYIDGGASQEEFYKFIKPILEKMDGTEELLVKLNREDLLRKQRTFDNGSIPHQIHLGELHAILRRQEDFYPFLKDNREKIEKILTFRIPYYVGPLARGNSRFAWMTRKSEETITPWNFEEVVDKGASAQSFIERMTNFDKNLPNEKVLPKHSLLYEYFTVYNELTKVKYVTEGMRKPAFLSGEQKKAIVDLLFKTNRKVTVKQLKEDYFKKIECFDSVEISGVEDRFNASLGTYHDLLKIIKDKDFLDNEENEDILEDIVLTLTLFEDREMIEERLKTYAHLFDDKVMKQLKRRRYTGWGRLSRKLINGIRDKQSGKTILDFLKSDGFANRNFMQLIHDDSLTFKEDIQKAQVSGQGDSLHEHIANLAGSPAIKKGILQTVKVVDELVKVMGRHKPENIVIEMARENQTTQKGQKNSRERMKRIEEGIKELGSQILKEHPVENTQLQNEKLYLYYLQNGRDMYVDQELDINRLSDYDVDHIVPQSFLKDDSIDNKVLTRSDKARGKSDNVPSEEVVKKMKNYWRQLLNAKLITQRKFDNLTKAERGGLSELDKAGFIKRQLVETRQITKHVAQILDSRMNTKYDENDKLIREVKVITLKSKLVSDFRKDFQFYKVREINNYHHAHDAYLNAVVGTALIKKYPKLESEFVYGDYKVYDVRKMIAKSEQEIGKATAKYFFYSNIMNFFKTEITLANGEIRKRPLIETNGETGEIVWDKGRDFATVRKVLSMPQVNIVKKTEVQTGGFSKESILPKRNSDKLIARKKDWDPKKYGGFDSPTVAYSVLVVAKVEKGKSKKLKSVKELLGITIMERSSFEKNPIDFLEAKGYKEVKKDLIIKLPKYSLFELENGRKRMLASAGELQKGNELALPSKYVNFLYLASHYEKLKGSPEDNEQKQLFVEQHKHYLDEIIEQISEFSKRVILADANLDKVLSAYNKHRDKPIREQAENIIHLFTLTNLGAPAAFKYFDTTIDRKRYTSTKEVLDATLIHQSITGLYETRIDLSQLGGDGGGSSGGSPAPGGTAPLEEEYRLFLEAPIQNVTLLEQWKREIPKVWAEINPPGLASTQAPIHVQLLSTALPVRVRQYPITLEAKRSLRETIRKFRAAGILRPVHSPWNTPLLPVRKSGTSEYRMVQDLREVNKRVETIHPTVPNPYTLLSLLPPDRIWYSVLDLKDAFFCIPLAPESQLIFAFEWADAEEGESGQLTWTRLPQGFKNSPTLFNEALNRDLQGFRLDHPSVSLLQYVDDLLIAADTQAACLSATRDLLMTLAELGYRVSGKKAQLCQEEVTYLGFKIHKGSRSLSNSRTQAILQIPVPKTKRQVREFLGTIGYCRLWIPGFAELAQPLYAATRPGNDPLVWGEKEEEAFQSLKLALTQPPALALPSLDKPFQLFVEETSGAAKGVLTQALGPWKRPVAYLSKRLDPVAAGWPRCLRAIAAAALLTREASKLTFGQDIEITSSHNLESLLRSPPDKWLTNARITQYQVLLLDPPRVRFKQTAALNPATLLPETDDTLPIHHCLDTLDSLTSTRPDLTDQPLAQAEATLFTDGSSYIRDGKRYAGAAVVTLDSVIWAEPLPIGTSAQKAELIALTKALEWSKDKSVNIYTDSRYAFATLHVHGMIYRERGWLTAGGKAIKNAPEILALLTAVWLPKRVAVMHCKGHQKDDAPTSTGNRRADEVAREVAIRPLSTQATISAGKRTADGSEFEKRTADGSEFESPKKKAKVE

SEQ ID NO: 1166 - protein, 2093 aa, synthetic construct
MPAAKRVKLDGGDKKYSIGLDIGTNSVGWAVITDEYKVPSKKFKVLGNTDRHSIKKNLIGALLFDSGETAEATRLKRTARRRYTRRKNRICYLQEIFSNEMAKVDDSFFHRLEESFLVEEDKKHERHPIFGNIVDEVAYHEKYPTIYHLRKKLVDSTDKADLRLIYLALAHMIKFRGHFLIEGDLNPDNSDVDKLFIQLVQTYNQLFEENPINASGVDAKAILSARLSKSRRLENLIAQLPGEKKNGLFGNLIALSLGLTPNFKSNFDLAEDAKLQLSKDTYDDDLDNLLAQIGDQYADLFLAAKNLSDAILLSDILRVNTEITKAPLSASMIKRYDEHHQDLTLLKALVRQQLPEKYKEIFFDQSKNGYAGYIDGGASQEEFYKFIKPILEKMDGTEELLVKLNREDLLRKQRTFDNGSIPHQIHLGELHAILRRQEDFYPFLKDNREKIEKILTFRIPYYVGPLARGNSRFAWMTRKSEETITPWNFEEVVDKGASAQSFIERMTNFDKNLPNEKVLPKHSLLYEYFTVYNELTKVKYVTEGMRKPAFLSGEQKKAIVDLLFKTNRKVTVKQLKEDYFKKIECFDSVEISGVEDRFNASLGTYHDLLKIIKDKDFLDNEENEDILEDIVLTLTLFEDREMIEERLKTYAHLFDDKVMKQLKRRRYTGWGRLSRKLINGIRDKQSGKTILDFLKSDGFANRNFMQLIHDDSLTFKEDIQKAQVSGQGDSLHEHIANLAGSPAIKKGILQTVKVVDELVKVMGRHKPENIVIEMARENQTTQKGQKNSRERMKRIEEGIKELGSQILKEHPVENTQLQNEKLYLYYLQNGRDMYVDQELDINRLSDYDVDHIVPQSFLKDDSIDNKVLTRSDKARGKSDNVPSEEVVKKMKNYWRQLLNAKLITQRKFDNLTKAERGGLSELDKAGFIKRQLVETRQITKHVAQILDSRMNTKYDENDKLIREVKVITLKSKLVSDFRKDFQFYKVREINNYHHAHDAYLNAVVGTALIKKYPKLESEFVYGDYKVYDVRKMIAKSEQEIGKATAKYFFYSNIMNFFKTEITLANGEIRKRPLIETNGETGEIVWDKGRDFATVRKVLSMPQVNIVKKTEVQTGGFSKESILPKRNSDKLIARKKDWDPKKYGGFDSPTVAYSVLVVAKVEKGKSKKLKSVKELLGITIMERSSFEKNPIDFLEAKGYKEVKKDLIIKLPKYSLFELENGRKRMLASAGELQKGNELALPSKYVNFLYLASHYEKLKGSPEDNEQKQLFVEQHKHYLDEIIEQISEFSKRVILADANLDKVLSAYNKHRDKPIREQAENIIHLFTLTNLGAPAAFKYFDTTIDRKRYTSTKEVLDATLIHQSITGLYETRIDLSQLGGDGGGGSGSSGGTAPLEEEYRLFLEAPIQNVTLLEQWKREIPKVWAEINPPGLASTQAPIHVQLLSTALPVRVRQYPITLEAKRSLRETIRKFRAAGILRPVHSPWNTPLLPVRKSGTSEYRMVQDLREVNKRVETIHPTVPNPYTLLSLLPPDRIWYSVLDLKDAFFCIPLAPESQLIFAFEWADAEEGESGQLTWTRLPQGFKNSPTLFNEALNRDLQGFRLDHPSVSLLQYVDDLLIAADTQAACLSATRDLLMTLAELGYRVSGKKAQLCQEEVTYLGFKIHKGSRSLSNSRTQAILQIPVPKTKRQVREFLGTIGYCRLWIPGFAELAQPLYAATRPGNDPLVWGEKEEEAFQSLKLALTQPPALALPSLDKPFQLFVEETSGAAKGVLTQALGPWKRPVAYLSKRLDPVAAGWPRCLRAIAAAALLTREASKLTFGQDIEITSSHNLESLLRSPPDKWLTNARITQYQVLLLDPPRVRFKQTAALNPATLLPETDDTLPIHHCLDTLDSLTSTRPDLTDQPLAQAEATLFTDGSSYIRDGKRYAGAAVVTLDSVIWAEPLPIGTSAQKAELIALTKALEWSKDKSVNIYTDSRYAFATLHVHGMIYRERGWLTAGGKAIKNAPEILALLTAVWLPKRVAVMHCKGHQKDDAPTSTGNRRADEVAREVAIRPLSTQATISAGKRTADGSEFEKRTADGSEFESPKKKAKVE

SEQ ID NO: 1167 - protein, 2098 aa, synthetic construct
MPAAKRVKLDGGDKKYSIGLDIGTNSVGWAVITDEYKVPSKKFKVLGNTDRHSIKKNLIGALLFDSGETAEATRLKRTARRRYTRRKNRICYLQEIFSNEMAKVDDSFFHRLEESFLVEEDKKHERHPIFGNIVDEVAYHEKYPTIYHLRKKLVDSTDKADLRLIYLALAHMIKFRGHFLIEGDLNPDNSDVDKLFIQLVQTYNQLFEENPINASGVDAKAILSARLSKSRRLENLIAQLPGEKKNGLFGNLIALSLGLTPNFKSNFDLAEDAKLQLSKDTYDDDLDNLLAQIGDQYADLFLAAKNLSDAILLSDILRVNTEITKAPLSASMIKRYDEHHQDLTLLKALVRQQLPEKYKEIFFDQSKNGYAGYIDGGASQEEFYKFIKPILEKMDGTEELLVKLNREDLLRKQRTFDNGSIPHQIHLGELHAILRRQEDFYPFLKDNREKIEKILTFRIPYYVGPLARGNSRFAWMTRKSEETITPWNFEEVVDKGASAQSFIERMTNFDKNLPNEKVLPKHSLLYEYFTVYNELTKVKYVTEGMRKPAFLSGEQKKAIVDLLFKTNRKVTVKQLKEDYFKKIECFDSVEISGVEDRFNASLGTYHDLLKIIKDKDFLDNEENEDILEDIVLTLTLFEDREMIEERLKTYAHLFDDKVMKQLKRRRYTGWGRLSRKLINGIRDKQSGKTILDFLKSDGFANRNFMQLIHDDSLTFKEDIQKAQVSGQGDSLHEHIANLAGSPAIKKGILQTVKVVDELVKVMGRHKPENIVIEMARENQTTQKGQKNSRERMKRIEEGIKELGSQILKEHPVENTQLQNEKLYLYYLQNGRDMYVDQELDINRLSDYDVDHIVPQSFLKDDSIDNKVLTRSDKARGKSDNVPSEEVVKKMKNYWRQLLNAKLITQRKFDNLTKAERGGLSELDKAGFIKRQLVETRQITKHVAQILDSRMNTKYDENDKLIREVKVITLKSKLVSDFRKDFQFYKVREINNYHHAHDAYLNAVVGTALIKKYPKLESEFVYGDYKVYDVRKMIAKSEQEIGKATAKYFFYSNIMNFFKTEITLANGEIRKRPLIETNGETGEIVWDKGRDFATVRKVLSMPQVNIVKKTEVQTGGFSKESILPKRNSDKLIARKKDWDPKKYGGFDSPTVAYSVLVVAKVEKGKSKKLKSVKELLGITIMERSSFEKNPIDFLEAKGYKEVKKDLIIKLPKYSLFELENGRKRMLASAGELQKGNELALPSKYVNFLYLASHYEKLKGSPEDNEQKQLFVEQHKHYLDEIIEQISEFSKRVILADANLDKVLSAYNKHRDKPIREQAENIIHLFTLTNLGAPAAFKYFDTTIDRKRYTSTKEVLDATLIHQSITGLYETRIDLSQLGGDGGEAAAKPAPGGGGGTAPLEEEYRLFLEAPIQNVTLLEQWKREIPKVWAEINPPGLASTQAPIHVQLLSTALPVRVRQYPITLEAKRSLRETIRKFRAAGILRPVHSPWNTPLLPVRKSGTSEYRMVQDLREVNKRVETIHPTVPNPYTLLSLLPPDRIWYSVLDLKDAFFCIPLAPESQLIFAFEWADAEEGESGQLTWTRLPQGFKNSPTLFNEALNRDLQGFRLDHPSVSLLQYVDDLLIAADTQAACLSATRDLLMTLAELGYRVSGKKAQLCQEEVTYLGFKIHKGSRSLSNSRTQAILQIPVPKTKRQVREFLGTIGYCRLWIPGFAELAQPLYAATRPGNDPLVWGEKEEEAFQSLKLALTQPPALALPSLDKPFQLFVEETSGAAKGVLTQALGPWKRPVAYLSKRLDPVAAGWPRCLRAIAAAALLTREASKLTFGQDIEITSSHNLESLLRSPPDKWLTNARITQYQVLLLDPPRVRFKQTAALNPATLLPETDDTLPIHHCLDTLDSLTSTRPDLTDQPLAQAEATLFTDGSSYIRDGKRYAGAAVVTLDSVIWAEPLPIGTSAQKAELIALTKALEWSKDKSVNIYTDSRYAFATLHVHGMIYRERGWLTAGGKAIKNAPEILALLTAVWLPKRVAVMHCKGHQKDDAPTSTGNRRADEVAREVAIRPLSTQATISAGKRTADGSEFEKRTADGSEFESPKKKAKVE

SEQ ID NO: 1168 - protein, 2093 aa, synthetic construct
MPAAKRVKLDGGDKKYSIGLDIGTNSVGWAVITDEYKVPSKKFKVLGNTDRHSIKKNLIGALLFDSGETAEATRLKRTARRRYTRRKNRICYLQEIFSNEMAKVDDSFFHRLEESFLVEEDKKHERHPIFGNIVDEVAYHEKYPTIYHLRKKLVDSTDKADLRLIYLALAHMIKFRGHFLIEGDLNPDNSDVDKLFIQLVQTYNQLFEENPINASGVDAKAILSARLSKSRRLENLIAQLPGEKKNGLFGNLIALSLGLTPNFKSNFDLAEDAKLQLSKDTYDDDLDNLLAQIGDQYADLFLAAKNLSDAILLSDILRVNTEITKAPLSASMIKRYDEHHQDLTLLKALVRQQLPEKYKEIFFDQSKNGYAGYIDGGASQEEFYKFIKPILEKMDGTEELLVKLNREDLLRKQRTFDNGSIPHQIHLGELHAILRRQEDFYPFLKDNREKIEKILTFRIPYYVGPLARGNSRFAWMTRKSEETITPWNFEEVVDKGASAQSFIERMTNFDKNLPNEKVLPKHSLLYEYFTVYNELTKVKYVTEGMRKPAFLSGEQKKAIVDLLFKTNRKVTVKQLKEDYFKKIECFDSVEISGVEDRFNASLGTYHDLLKIIKDKDFLDNEENEDILEDIVLTLTLFEDREMIEERLKTYAHLFDDKVMKQLKRRRYTGWGRLSRKLINGIRDKQSGKTILDFLKSDGFANRNFMQLIHDDSLTFKEDIQKAQVSGQGDSLHEHIANLAGSPAIKKGILQTVKVVDELVKVMGRHKPENIVIEMARENQTTQKGQKNSRERMKRIEEGIKELGSQILKEHPVENTQLQNEKLYLYYLQNGRDMYVDQELDINRLSDYDVDHIVPQSFLKDDSIDNKVLTRSDKARGKSDNVPSEEVVKKMKNYWRQLLNAKLITQRKFDNLTKAERGGLSELDKAGFIKRQLVETRQITKHVAQILDSRMNTKYDENDKLIREVKVITLKSKLVSDFRKDFQFYKVREINNYHHAHDAYLNAVVGTALIKKYPKLESEFVYGDYKVYDVRKMIAKSEQEIGKATAKYFFYSNIMNFFKTEITLANGEIRKRPLIETNGETGEIVWDKGRDFATVRKVLSMPQVNIVKKTEVQTGGFSKESILPKRNSDKLIARKKDWDPKKYGGFDSPTVAYSVLVVAKVEKGKSKKLKSVKELLGITIMERSSFEKNPIDFLEAKGYKEVKKDLIIKLPKYSLFELENGRKRMLASAGELQKGNELALPSKYVNFLYLASHYEKLKGSPEDNEQKQLFVEQHKHYLDEIIEQISEFSKRVILADANLDKVLSAYNKHRDKPIREQAENIIHLFTLTNLGAPAAFKYFDTTIDRKRYTSTKEVLDATLIHQSITGLYETRIDLSQLGGDGGGGGGGSPAPGGTLQLEEEYRLFEPESTQKQEMDIWLKNFPQAWAETGGMGTAHCQAPVLIQLKATATPISIRQYPMPHEAYQGIKPHIRRMLDQGILKPCQSPWNTPLLPVKKPGTEDYRPVQDLREVNKRVEDIHPTVPNPYNLLSTLPPSHPWYTVLDLKDAFFCLRLHSESQLLFAFEWRDPEIGLSGQLTWTRLPQGFKNSPTLFNEALHSDLADFRVRYPALVLLQYVDDLLLAAATRTECLEGTKALLETLGNKGYRASAKKAQICLQEVTYLGYSLKDGQRWLTKARKEAILSIPVPKNSRQVREFLGTAGYCRLWIPGFAELAAPLYPLTRPGTLFQWGTEQQLAFEDIKKALLSSPALGLPDITKPFELFIDENSGFAKGVLVQKLGPWKRPVAYLSKKLDTVASGWPPCLRMVAAIAILVKDAGKLTLGQPLTILTSHPVEALVRQPPNKWLSNARMTHYQAMLLDAERVHFGPTVSLNPATLLPLPSGGNHHDCLQILAETHGTRPDLTDQPLPDADLTWYTDGSSFIRNGEREAGAAVTTESEVIWAAPLPPGTSAQRAELIALTQALKMAEGKKLTVYTDSRYAFATTHVHGEIYRRRGWLTSEGKEIKNKNEILALLEALFLPKRLSIIHCPGHQKGDSPQAKGNRLADDTAKKAATETHSSLTVLPAGKRTADGSEFEKRTADGSEFESPKKKAKVE

SEQ ID NO: 1169 - protein, 2117 aa, synthetic construct
MPAAKRVKLDGGDKKYSIGLDIGTNSVGWAVITDEYKVPSKKFKVLGNTDRHSIKKNLIGALLFDSGETAEATRLKRTARRRYTRRKNRICYLQEIFSNEMAKVDDSFFHRLEESFLVEEDKKHERHPIFGNIVDEVAYHEKYPTIYHLRKKLVDSTDKADLRLIYLALAHMIKFRGHFLIEGDLNPDNSDVDKLFIQLVQTYNQLFEENPINASGVDAKAILSARLSKSRRLENLIAQLPGEKKNGLFGNLIALSLGLTPNFKSNFDLAEDAKLQLSKDTYDDDLDNLLAQIGDQYADLFLAAKNLSDAILLSDILRVNTEITKAPLSASMIKRYDEHHQDLTLLKALVRQQLPEKYKEIFFDQSKNGYAGYIDGGASQEEFYKFIKPILEKMDGTEELLVKLNREDLLRKQRTFDNGSIPHQIHLGELHAILRRQEDFYPFLKDNREKIEKILTFRIPYYVGPLARGNSRFAWMTRKSEETITPWNFEEVVDKGASAQSFIERMTNFDKNLPNEKVLPKHSLLYEYFTVYNELTKVKYVTEGMRKPAFLSGEQKKAIVDLLFKTNRKVTVKQLKEDYFKKIECFDSVEISGVEDRFNASLGTYHDLLKIIKDKDFLDNEENEDILEDIVLTLTLFEDREMIEERLKTYAHLFDDKVMKQLKRRRYTGWGRLSRKLINGIRDKQSGKTILDFLKSDGFANRNFMQLIHDDSLTFKEDIQKAQVSGQGDSLHEHIANLAGSPAIKKGILQTVKVVDELVKVMGRHKPENIVIEMARENQTTQKGQKNSRERMKRIEEGIKELGSQILKEHPVENTQLQNEKLYLYYLQNGRDMYVDQELDINRLSDYDVDHIVPQSFLKDDSIDNKVLTRSDKARGKSDNVPSEEVVKKMKNYWRQLLNAKLITQRKFDNLTKAERGGLSELDKAGFIKRQLVETRQITKHVAQILDSRMNTKYDENDKLIREVKVITLKSKLVSDFRKDFQFYKVREINNYHHAHDAYLNAVVGTALIKKYPKLESEFVYGDYKVYDVRKMIAKSEQEIGKATAKYFFYSNIMNFFKTEITLANGEIRKRPLIETNGETGEIVWDKGRDFATVRKVLSMPQVNIVKKTEVQTGGFSKESILPKRNSDKLIARKKDWDPKKYGGFDSPTVAYSVLVVAKVEKGKSKKLKSVKELLGITIMERSSFEKNPIDFLEAKGYKEVKKDLIIKLPKYSLFELENGRKRMLASAGELQKGNELALPSKYVNFLYLASHYEKLKGSPEDNEQKQLFVEQHKHYLDEIIEQISEFSKRVILADANLDKVLSAYNKHRDKPIREQAENIIHLFTLTNLGAPAAFKYFDTTIDRKRYTSTKEVLDATLIHQSITGLYETRIDLSQLGGDGGSGGSSGGSSGSETPGTSESATPESSGGSSGGSSGGTLQLEEEYRLFEPESTQKQEMDIWLKNFPQAWAETGGMGTAHCQAPVLIQLKATATPISIRQYPMPHEAYQGIKPHIRRMLDQGILKPCQSPWNTPLLPVKKPGTEDYRPVQDLREVNKRVEDIHPTVPNPYNLLSTLPPSHPWYTVLDLKDAFFCLRLHSESQLLFAFEWRDPEIGLSGQLTWTRLPQGFKNSPTLFNEALHSDLADFRVRYPALVLLQYVDDLLLAAATRTECLEGTKALLETLGNKGYRASAKKAQICLQEVTYLGYSLKDGQRWLTKARKEAILSIPVPKNSRQVREFLGTAGYCRLWIPGFAELAAPLYPLTRPGTLFQWGTEQQLAFEDIKKALLSSPALGLPDITKPFELFIDENSGFAKGVLVQKLGPWKRPVAYLSKKLDTVASGWPPCLRMVAAIAILVKDAGKLTLGQPLTILTSHPVEALVRQPPNKWLSNARMTHYQAMLLDAERVHFGPTVSLNPATLLPLPSGGNHHDCLQILAETHGTRPDLTDQPLPDADLTWYTDGSSFIRNGEREAGAAVTTESEVIWAAPLPPGTSAQRAELIALTQALKMAEGKKLTVYTDSRYAFATTHVHGEIYRRRGWLTSEGKEIKNKNEILALLEALFLPKRLSIIHCPGHQKGDSPQAKGNRLADDTAKKAATETHSSLTVLPAGKRTADGSEFEKRTADGSEFESPKKKAKVE

SEQ ID NO: 1170 - protein, 2130 aa, synthetic construct
MPAAKRVKLDGGDKKYSIGLDIGTNSVGWAVITDEYKVPSKKFKVLGNTDRHSIKKNLIGALLFDSGETAEATRLKRTARRRYTRRKNRICYLQEIFSNEMAKVDDSFFHRLEESFLVEEDKKHERHPIFGNIVDEVAYHEKYPTIYHLRKKLVDSTDKADLRLIYLALAHMIKFRGHFLIEGDLNPDNSDVDKLFIQLVQTYNQLFEENPINASGVDAKAILSARLSKSRRLENLIAQLPGEKKNGLFGNLIALSLGLTPNFKSNFDLAEDAKLQLSKDTYDDDLDNLLAQIGDQYADLFLAAKNLSDAILLSDILRVNTEITKAPLSASMIKRYDEHHQDLTLLKALVRQQLPEKYKEIFFDQSKNGYAGYIDGGASQEEFYKFIKPILEKMDGTEELLVKLNREDLLRKQRTFDNGSIPHQIHLGELHAILRRQEDFYPFLKDNREKIEKILTFRIPYYVGPLARGNSRFAWMTRKSEETITPWNFEEVVDKGASAQSFIERMTNFDKNLPNEKVLPKHSLLYEYFTVYNELTKVKYVTEGMRKPAFLSGEQKKAIVDLLFKTNRKVTVKQLKEDYFKKIECFDSVEISGVEDRFNASLGTYHDLLKIIKDKDFLDNEENEDILEDIVLTLTLFEDREMIEERLKTYAHLFDDKVMKQLKRRRYTGWGRLSRKLINGIRDKQSGKTILDFLKSDGFANRNFMQLIHDDSLTFKEDIQKAQVSGQGDSLHEHIANLAGSPAIKKGILQTVKVVDELVKVMGRHKPENIVIEMARENQTTQKGQKNSRERMKRIEEGIKELGSQILKEHPVENTQLQNEKLYLYYLQNGRDMYVDQELDINRLSDYDVDHIVPQSFLKDDSIDNKVLTRSDKARGKSDNVPSEEVVKKMKNYWRQLLNAKLITQRKFDNLTKAERGGLSELDKAGFIKRQLVETRQITKHVAQILDSRMNTKYDENDKLIREVKVITLKSKLVSDFRKDFQFYKVREINNYHHAHDAYLNAVVGTALIKKYPKLESEFVYGDYKVYDVRKMIAKSEQEIGKATAKYFFYSNIMNFFKTEITLANGEIRKRPLIETNGETGEIVWDKGRDFATVRKVLSMPQVNIVKKTEVQTGGFSKESILPKRNSDKLIARKKDWDPKKYGGFDSPTVAYSVLVVAKVEKGKSKKLKSVKELLGITIMERSSFEKNPIDFLEAKGYKEVKKDLIIKLPKYSLFELENGRKRMLASAGELQKGNELALPSKYVNFLYLASHYEKLKGSPEDNEQKQLFVEQHKHYLDEIIEQISEFSKRVILADANLDKVLSAYNKHRDKPIREQAENIIHLFTLTNLGAPAAFKYFDTTIDRKRYTSTKEVLDATLIHQSITGLYETRIDLSQLGGDGGAEAAAKEAAAKEAAAKEAAAKALEAEAAAKEAAAKEAAAKEAAAKAGGTLQLEEEYRLFEPESTQKQEMDIWLKNFPQAWAETGGMGTAHCQAPVLIQLKATATPISIRQYPMPHEAYQGIKPHIRRMLDQGILKPCQSPWNTPLLPVKKPGTEDYRPVQDLREVNKRVEDIHPTVPNPYNLLSTLPPSHPWYTVLDLKDAFFCLRLHSESQLLFAFEWRDPEIGLSGQLTWTRLPQGFKNSPTLFNEALHSDLADFRVRYPALVLLQYVDDLLLAAATRTECLEGTKALLETLGNKGYRASAKKAQICLQEVTYLGYSLKDGQRWLTKARKEAILSIPVPKNSRQVREFLGTAGYCRLWIPGFAELAAPLYPLTRPGTLFQWGTEQQLAFEDIKKALLSSPALGLPDITKPFELFIDENSGFAKGVLVQKLGPWKRPVAYLSKKLDTVASGWPPCLRMVAAIAILVKDAGKLTLGQPLTILTSHPVEALVRQPPNKWLSNARMTHYQAMLLDAERVHFGPTVSLNPATLLPLPSGGNHHDCLQILAETHGTRPDLTDQPLPDADLTWYTDGSSFIRNGEREAGAAVTTESEVIWAAPLPPGTSAQRAELIALTQALKMAEGKKLTVYTDSRYAFATTHVHGEIYRRRGWLTSEGKEIKNKNEILALLEALFLPKRLSIIHCPGHQKGDSPQAKGNRLADDTAKKAATETHSSLTVLPAGKRTADGSEFEKRTADGSEFESPKKKAKVE

SEQ ID NO: 1171 - protein, 2114 aa, synthetic construct
MPAAKRVKLDGGDKKYSIGLDIGTNSVGWAVITDEYKVPSKKFKVLGNTDRHSIKKNLIGALLFDSGETAEATRLKRTARRRYTRRKNRICYLQEIFSNEMAKVDDSFFHRLEESFLVEEDKKHERHPIFGNIVDEVAYHEKYPTIYHLRKKLVDSTDKADLRLIYLALAHMIKFRGHFLIEGDLNPDNSDVDKLFIQLVQTYNQLFEENPINASGVDAKAILSARLSKSRRLENLIAQLPGEKKNGLFGNLIALSLGLTPNFKSNFDLAEDAKLQLSKDTYDDDLDNLLAQIGDQYADLFLAAKNLSDAILLSDILRVNTEITKAPLSASMIKRYDEHHQDLTLLKALVRQQLPEKYKEIFFDQSKNGYAGYIDGGASQEEFYKFIKPILEKMDGTEELLVKLNREDLLRKQRTFDNGSIPHQIHLGELHAILRRQEDFYPFLKDNREKIEKILTFRIPYYVGPLARGNSRFAWMTRKSEETITPWNFEEVVDKGASAQSFIERMTNFDKNLPNEKVLPKHSLLYEYFTVYNELTKVKYVTEGMRKPAFLSGEQKKAIVDLLFKTNRKVTVKQLKEDYFKKIECFDSVEISGVEDRFNASLGTYHDLLKIIKDKDFLDNEENEDILEDIVLTLTLFEDREMIEERLKTYAHLFDDKVMKQLKRRRYTGWGRLSRKLINGIRDKQSGKTILDFLKSDGFANRNFMQLIHDDSLTFKEDIQKAQVSGQGDSLHEHIANLAGSPAIKKGILQTVKVVDELVKVMGRHKPENIVIEMARENQTTQKGQKNSRERMKRIEEGIKELGSQILKEHPVENTQLQNEKLYLYYLQNGRDMYVDQELDINRLSDYDVDHIVPQSFLKDDSIDNKVLTRSDKARGKSDNVPSEEVVKKMKNYWRQLLNAKLITQRKFDNLTKAERGGLSELDKAGFIKRQLVETRQITKHVAQILDSRMNTKYDENDKLIREVKVITLKSKLVSDFRKDFQFYKVREINNYHHAHDAYLNAVVGTALIKKYPKLESEFVYGDYKVYDVRKMIAKSEQEIGKATAKYFFYSNIMNFFKTEITLANGEIRKRPLIETNGETGEIVWDKGRDFATVRKVLSMPQVNIVKKTEVQTGGFSKESILPKRNSDKLIARKKDWDPKKYGGFDSPTVAYSVLVVAKVEKGKSKKLKSVKELLGITIMERSSFEKNPIDFLEAKGYKEVKKDLIIKLPKYSLFELENGRKRMLASAGELQKGNELALPSKYVNFLYLASHYEKLKGSPEDNEQKQLFVEQHKHYLDEIIEQISEFSKRVILADANLDKVLSAYNKHRDKPIREQAENIIHLFTLTNLGAPAAFKYFDTTIDRKRYTSTKEVLDATLIHQSITGLYETRIDLSQLGGDGGEAAAKEAAAKEAAAKEAAAKEAAAKEAAAKGGTLQLEEEYRLFEPESTQKQEMDIWLKNFPQAWAETGGMGTAHCQAPVLIQLKATATPISIRQYPMPHEAYQGIKPHIRRMLDQGILKPCQSPWNTPLLPVKKPGTEDYRPVQDLREVNKRVEDIHPTVPNPYNLLSTLPPSHPWYTVLDLKDAFFCLRLHSESQLLFAFEWRDPEIGLSGQLTWTRLPQGFKNSPTLFNEALHSDLADFRVRYPALVLLQYVDDLLLAAATRTECLEGTKALLETLGNKGYRASAKKAQICLQEVTYLGYSLKDGQRWLTKARKEAILSIPVPKNSRQVREFLGTAGYCRLWIPGFAELAAPLYPLTRPGTLFQWGTEQQLAFEDIKKALLSSPALGLPDITKPFELFIDENSGFAKGVLVQKLGPWKRPVAYLSKKLDTVASGWPPCLRMVAAIAILVKDAGKLTLGQPLTILTSHPVEALVRQPPNKWLSNARMTHYQAMLLDAERVHFGPTVSLNPATLLPLPSGGNHHDCLQILAETHGTRPDLTDQPLPDADLTWYTDGSSFIRNGEREAGAAVTTESEVIWAAPLPPGTSAQRAELIALTQALKMAEGKKLTVYTDSRYAFATTHVHGEIYRRRGWLTSEGKEIKNKNEILALLEALFLPKRLSIIHCPGHQKGDSPQAKGNRLADDTAKKAATETHSSLTVLPAGKRTADGSEFEKRTADGSEFESPKKKAKVE

SEQ ID NO: 1172 - protein, 2092 aa, synthetic construct
MPAAKRVKLDGGDKKYSIGLDIGTNSVGWAVITDEYKVPSKKFKVLGNTDRHSIKKNLIGALLFDSGETAEATRLKRTARRRYTRRKNRICYLQEIFSNEMAKVDDSFFHRLEESFLVEEDKKHERHPIFGNIVDEVAYHEKYPTIYHLRKKLVDSTDKADLRLIYLALAHMIKFRGHFLIEGDLNPDNSDVDKLFIQLVQTYNQLFEENPINASGVDAKAILSARLSKSRRLENLIAQLPGEKKNGLFGNLIALSLGLTPNFKSNFDLAEDAKLQLSKDTYDDDLDNLLAQIGDQYADLFLAAKNLSDAILLSDILRVNTEITKAPLSASMIKRYDEHHQDLTLLKALVRQQLPEKYKEIFFDQSKNGYAGYIDGGASQEEFYKFIKPILEKMDGTEELLVKLNREDLLRKQRTFDNGSIPHQIHLGELHAILRRQEDFYPFLKDNREKIEKILTFRIPYYVGPLARGNSRFAWMTRKSEETITPWNFEEVVDKGASAQSFIERMTNFDKNLPNEKVLPKHSLLYEYFTVYNELTKVKYVTEGMRKPAFLSGEQKKAIVDLLFKTNRKVTVKQLKEDYFKKIECFDSVEISGVEDRFNASLGTYHDLLKIIKDKDFLDNEENEDILEDIVLTLTLFEDREMIEERLKTYAHLFDDKVMKQLKRRRYTGWGRLSRKLINGIRDKQSGKTILDFLKSDGFANRNFMQLIHDDSLTFKEDIQKAQVSGQGDSLHEHIANLAGSPAIKKGILQTVKVVDELVKVMGRHKPENIVIEMARENQTTQKGQKNSRERMKRIEEGIKELGSQILKEHPVENTQLQNEKLYLYYLQNGRDMYVDQELDINRLSDYDVDHIVPQSFLKDDSIDNKVLTRSDKARGKSDNVPSEEVVKKMKNYWRQLLNAKLITQRKFDNLTKAERGGLSELDKAGFIKRQLVETRQITKHVAQILDSRMNTKYDENDKLIREVKVITLKSKLVSDFRKDFQFYKVREINNYHHAHDAYLNAVVGTALIKKYPKLESEFVYGDYKVYDVRKMIAKSEQEIGKATAKYFFYSNIMNFFKTEITLANGEIRKRPLIETNGETGEIVWDKGRDFATVRKVLSMPQVNIVKKTEVQTGGFSKESILPKRNSDKLIARKKDWDPKKYGGFDSPTVAYSVLVVAKVEKGKSKKLKSVKELLGITIMERSSFEKNPIDFLEAKGYKEVKKDLIIKLPKYSLFELENGRKRMLASAGELQKGNELALPSKYVNFLYLASHYEKLKGSPEDNEQKQLFVEQHKHYLDEIIEQISEFSKRVILADANLDKVLSAYNKHRDKPIREQAENIIHLFTLTNLGAPAAFKYFDTTIDRKRYTSTKEVLDATLIHQSITGLYETRIDLSQLGGDGGEAAAKGGSGGTLQLEEEYRLFEPESTQKQEMDIWLKNFPQAWAETGGMGTAHCQAPVLIQLKATATPISIRQYPMPHEAYQGIKPHIRRMLDQGILKPCQSPWNTPLLPVKKPGTEDYRPVQDLREVNKRVEDIHPTVPNPYNLLSTLPPSHPWYTVLDLKDAFFCLRLHSESQLLFAFEWRDPEIGLSGQLTWTRLPQGFKNSPTLFNEALHSDLADFRVRYPALVLLQYVDDLLLAAATRTECLEGTKALLETLGNKGYRASAKKAQICLQEVTYLGYSLKDGQRWLTKARKEAILSIPVPKNSRQVREFLGTAGYCRLWIPGFAELAAPLYPLTRPGTLFQWGTEQQLAFEDIKKALLSSPALGLPDITKPFELFIDENSGFAKGVLVQKLGPWKRPVAYLSKKLDTVASGWPPCLRMVAAIAILVKDAGKLTLGQPLTILTSHPVEALVRQPPNKWLSNARMTHYQAMLLDAERVHFGPTVSLNPATLLPLPSGGNHHDCLQILAETHGTRPDLTDQPLPDADLTWYTDGSSFIRNGEREAGAAVTTESEVIWAAPLPPGTSAQRAELIALTQALKMAEGKKLTVYTDSRYAFATTHVHGEIYRRRGWLTSEGKEIKNKNEILALLEALFLPKRLSIIHCPGHQKGDSPQAKGNRLADDTAKKAATETHSSLTVLPAGKRTADGSEFEKRTADGSEFESPKKKAKVE

SEQ ID NO: 1173 - protein, 2095 aa, synthetic construct
MPAAKRVKLDGGDKKYSIGLDIGTNSVGWAVITDEYKVPSKKFKVLGNTDRHSIKKNLIGALLFDSGETAEATRLKRTARRRYTRRKNRICYLQEIFSNEMAKVDDSFFHRLEESFLVEEDKKHERHPIFGNIVDEVAYHEKYPTIYHLRKKLVDSTDKADLRLIYLALAHMIKFRGHFLIEGDLNPDNSDVDKLFIQLVQTYNQLFEENPINASGVDAKAILSARLSKSRRLENLIAQLPGEKKNGLFGNLIALSLGLTPNFKSNFDLAEDAKLQLSKDTYDDDLDNLLAQIGDQYADLFLAAKNLSDAILLSDILRVNTEITKAPLSASMIKRYDEHHQDLTLLKALVRQQLPEKYKEIFFDQSKNGYAGYIDGGASQEEFYKFIKPILEKMDGTEELLVKLNREDLLRKQRTFDNGSIPHQIHLGELHAILRRQEDFYPFLKDNREKIEKILTFRIPYYVGPLARGNSRFAWMTRKSEETITPWNFEEVVDKGASAQSFIERMTNFDKNLPNEKVLPKHSLLYEYFTVYNELTKVKYVTEGMRKPAFLSGEQKKAIVDLLFKTNRKVTVKQLKEDYFKKIECFDSVEISGVEDRFNASLGTYHDLLKIIKDKDFLDNEENEDILEDIVLTLTLFEDREMIEERLKTYAHLFDDKVMKQLKRRRYTGWGRLSRKLINGIRDKQSGKTILDFLKSDGFANRNFMQLIHDDSLTFKEDIQKAQVSGQGDSLHEHIANLAGSPAIKKGILQTVKVVDELVKVMGRHKPENIVIEMARENQTTQKGQKNSRERMKRIEEGIKELGSQILKEHPVENTQLQNEKLYLYYLQNGRDMYVDQELDINRLSDYDVDHIVPQSFLKDDSIDNKVLTRSDKARGKSDNVPSEEVVKKMKNYWRQLLNAKLITQRKFDNLTKAERGGLSELDKAGFIKRQLVETRQITKHVAQILDSRMNTKYDENDKLIREVKVITLKSKLVSDFRKDFQFYKVREINNYHHAHDAYLNAVVGTALIKKYPKLESEFVYGDYKVYDVRKMIAKSEQEIGKATAKYFFYSNIMNFFKTEITLANGEIRKRPLIETNGETGEIVWDKGRDFATVRKVLSMPQVNIVKKTEVQTGGFSKESILPKRNSDKLIARKKDWDPKKYGGFDSPTVAYSVLVVAKVEKGKSKKLKSVKELLGITIMERSSFEKNPIDFLEAKGYKEVKKDLIIKLPKYSLFELENGRKRMLASAGELQKGNELALPSKYVNFLYLASHYEKLKGSPEDNEQKQLFVEQHKHYLDEIIEQISEFSKRVILADANLDKVLSAYNKHRDKPIREQAENIIHLFTLTNLGAPAAFKYFDTTIDRKRYTSTKEVLDATLIHQSITGLYETRIDLSQLGGDGGPAPAPAPAPAPGGTLQLEEEYRLFEPESTQKQEMDIWLKNFPQAWAETGGMGTAHCQAPVLIQLKATATPISIRQYPMPHEAYQGIKPHIRRMLDQGILKPCQSPWNTPLLPVKKPGTEDYRPVQDLREVNKRVEDIHPTVPNPYNLLSTLPPSHPWYTVLDLKDAFFCLRLHSESQLLFAFEWRDPEIGLSGQLTWTRLPQGFKNSPTLFNEALHSDLADFRVRYPALVLLQYVDDLLLAAATRTECLEGTKALLETLGNKGYRASAKKAQICLQEVTYLGYSLKDGQRWLTKARKEAILSIPVPKNSRQVREFLGTAGYCRLWIPGFAELAAPLYPLTRPGTLFQWGTEQQLAFEDIKKALLSSPALGLPDITKPFELFIDENSGFAKGVLVQKLGPWKRPVAYLSKKLDTVASGWPPCLRMVAAIAILVKDAGKLTLGQPLTILTSHPVEALVRQPPNKWLSNARMTHYQAMLLDAERVHFGPTVSLNPATLLPLPSGGNHHDCLQILAETHGTRPDLTDQPLPDADLTWYTDGSSFIRNGEREAGAAVTTESEVIWAAPLPPGTSAQRAELIALTQALKMAEGKKLTVYTDSRYAFATTHVHGEIYRRRGWLTSEGKEIKNKNEILALLEALFLPKRLSIIHCPGHQKGDSPQAKGNRLADDTAKKAATETHSSLTVLPAGKRTADGSEFEKRTADGSEFESPKKKAKVE

SEQ ID NO: 1174 - protein, 2099 aa, synthetic construct
MPAAKRVKLDGGDKKYSIGLDIGTNSVGWAVITDEYKVPSKKFKVLGNTDRHSIKKNLIGALLFDSGETAEATRLKRTARRRYTRRKNRICYLQEIFSNEMAKVDDSFFHRLEESFLVEEDKKHERHPIFGNIVDEVAYHEKYPTIYHLRKKLVDSTDKADLRLIYLALAHMIKFRGHFLIEGDLNPDNSDVDKLFIQLVQTYNQLFEENPINASGVDAKAILSARLSKSRRLENLIAQLPGEKKNGLFGNLIALSLGLTPNFKSNFDLAEDAKLQLSKDTYDDDLDNLLAQIGDQYADLFLAAKNLSDAILLSDILRVNTEITKAPLSASMIKRYDEHHQDLTLLKALVRQQLPEKYKEIFFDQSKNGYAGYIDGGASQEEFYKFIKPILEKMDGTEELLVKLNREDLLRKQRTFDNGSIPHQIHLGELHAILRRQEDFYPFLKDNREKIEKILTFRIPYYVGPLARGNSRFAWMTRKSEETITPWNFEEVVDKGASAQSFIERMTNFDKNLPNEKVLPKHSLLYEYFTVYNELTKVKYVTEGMRKPAFLSGEQKKAIVDLLFKTNRKVTVKQLKEDYFKKIECFDSVEISGVEDRFNASLGTYHDLLKIIKDKDFLDNEENEDILEDIVLTLTLFEDREMIEERLKTYAHLFDDKVMKQLKRRRYTGWGRLSRKLINGIRDKQSGKTILDFLKSDGFANRNFMQLIHDDSLTFKEDIQKAQVSGQGDSLHEHIANLAGSPAIKKGILQTVKVVDELVKVMGRHKPENIVIEMARENQTTQKGQKNSRERMKRIEEGIKELGSQILKEHPVENTQLQNEKLYLYYLQNGRDMYVDQELDINRLSDYDVDHIVPQSFLKDDSIDNKVLTRSDKARGKSDNVPSEEVVKKMKNYWRQLLNAKLITQRKFDNLTKAERGGLSELDKAGFIKRQLVETRQITKHVAQILDSRMNTKYDENDKLIREVKVITLKSKLVSDFRKDFQFYKVREINNYHHAHDAYLNAVVGTALIKKYPKLESEFVYGDYKVYDVRKMIAKSEQEIGKATAKYFFYSNIMNFFKTEITLANGEIRKRPLIETNGETGEIVWDKGRDFATVRKVLSMPQVNIVKKTEVQTGGFSKESILPKRNSDKLIARKKDWDPKKYGGFDSPTVAYSVLVVAKVEKGKSKKLKSVKELLGITIMERSSFEKNPIDFLEAKGYKEVKKDLIIKLPKYSLFELENGRKRMLASAGELQKGNELALPSKYVNFLYLASHYEKLKGSPEDNEQKQLFVEQHKHYLDEIIEQISEFSKRVILADANLDKVLSAYNKHRDKPIREQAENIIHLFTLTNLGAPAAFKYFDTTIDRKRYTSTKEVLDATLIHQSITGLYETRIDLSQLGGDGGGGGGSGGGGSGGGGSGGTLQLEEEYRLFEPESTQKQEMDIWLKNFPQAWAETGGMGTAHCQAPVLIQLKATATPISIRQYPMPHEAYQGIKPHIRRMLDQGILKPCQSPWNTPLLPVKKPGTEDYRPVQDLREVNKRVEDIHPTVPNPYNLLSTLPPSHPWYTVLDLKDAFFCLRLHSESQLLFAFEWRDPEIGLSGQLTWTRLPQGFKNSPTLFNEALHSDLADFRVRYPALVLLQYVDDLLLAAATRTECLEGTKALLETLGNKGYRASAKKAQICLQEVTYLGYSLKDGQRWLTKARKEAILSIPVPKNSRQVREFLGTAGYCRLWIPGFAELAAPLYPLTRPGTLFQWGTEQQLAFEDIKKALLSSPALGLPDITKPFELFIDENSGFAKGVLVQKLGPWKRPVAYLSKKLDTVASGWPPCLRMVAAIAILVKDAGKLTLGQPLTILTSHPVEALVRQPPNKWLSNARMTHYQAMLLDAERVHFGPTVSLNPATLLPLPSGGNHHDCLQILAETHGTRPDLTDQPLPDADLTWYTDGSSFIRNGEREAGAAVTTESEVIWAAPLPPGTSAQRAELIALTQALKMAEGKKLTVYTDSRYAFATTHVHGEIYRRRGWLTSEGKEIKNKNEILALLEALFLPKRLSIIHCPGHQKGDSPQAKGNRLADDTAKKAATETHSSLTVLPAGKRTADGSEFEKRTADGSEFESPKKKAKVE

SEQ ID NO: 1175 - protein, 2109 aa, synthetic construct
MPAAKRVKLDGGDKKYSIGLDIGTNSVGWAVITDEYKVPSKKFKVLGNTDRHSIKKNLIGALLFDSGETAEATRLKRTARRRYTRRKNRICYLQEIFSNEMAKVDDSFFHRLEESFLVEEDKKHERHPIFGNIVDEVAYHEKYPTIYHLRKKLVDSTDKADLRLIYLALAHMIKFRGHFLIEGDLNPDNSDVDKLFIQLVQTYNQLFEENPINASGVDAKAILSARLSKSRRLENLIAQLPGEKKNGLFGNLIALSLGLTPNFKSNFDLAEDAKLQLSKDTYDDDLDNLLAQIGDQYADLFLAAKNLSDAILLSDILRVNTEITKAPLSASMIKRYDEHHQDLTLLKALVRQQLPEKYKEIFFDQSKNGYAGYIDGGASQEEFYKFIKPILEKMDGTEELLVKLNREDLLRKQRTFDNGSIPHQIHLGELHAILRRQEDFYPFLKDNREKIEKILTFRIPYYVGPLARGNSRFAWMTRKSEETITPWNFEEVVDKGASAQSFIERMTNFDKNLPNEKVLPKHSLLYEYFTVYNELTKVKYVTEGMRKPAFLSGEQKKAIVDLLFKTNRKVTVKQLKEDYFKKIECFDSVEISGVEDRFNASLGTYHDLLKIIKDKDFLDNEENEDILEDIVLTLTLFEDREMIEERLKTYAHLFDDKVMKQLKRRRYTGWGRLSRKLINGIRDKQSGKTILDFLKSDGFANRNFMQLIHDDSLTFKEDIQKAQVSGQGDSLHEHIANLAGSPAIKKGILQTVKVVDELVKVMGRHKPENIVIEMARENQTTQKGQKNSRERMKRIEEGIKELGSQILKEHPVENTQLQNEKLYLYYLQNGRDMYVDQELDINRLSDYDVDHIVPQSFLKDDSIDNKVLTRSDKARGKSDNVPSEEVVKKMKNYWRQLLNAKLITQRKFDNLTKAERGGLSELDKAGFIKRQLVETRQITKHVAQILDSRMNTKYDENDKLIREVKVITLKSKLVSDFRKDFQFYKVREINNYHHAHDAYLNAVVGTALIKKYPKLESEFVYGDYKVYDVRKMIAKSEQEIGKATAKYFFYSNIMNFFKTEITLANGEIRKRPLIETNGETGEIVWDKGRDFATVRKVLSMPQVNIVKKTEVQTGGFSKESILPKRNSDKLIARKKDWDPKKYGGFDSPTVAYSVLVVAKVEKGKSKKLKSVKELLGITIMERSSFEKNPIDFLEAKGYKEVKKDLIIKLPKYSLFELENGRKRMLASAGELQKGNELALPSKYVNFLYLASHYEKLKGSPEDNEQKQLFVEQHKHYLDEIIEQISEFSKRVILADANLDKVLSAYNKHRDKPIREQAENIIHLFTLTNLGAPAAFKYFDTTIDRKRYTSTKEVLDATLIHQSITGLYETRIDLSQLGGDGGEAAAKEAAAKEAAAKEAAAKEAAAKGGTLQLEEEYRLFEPESTQKQEMDIWLKNFPQAWAETGGMGTAHCQAPVLIQLKATATPISIRQYPMPHEAYQGIKPHIRRMLDQGILKPCQSPWNTPLLPVKKPGTEDYRPVQDLREVNKRVEDIHPTVPNPYNLLSTLPPSHPWYTVLDLKDAFFCLRLHSESQLLFAFEWRDPEIGLSGQLTWTRLPQGFKNSPTLFNEALHSDLADFRVRYPALVLLQYVDDLLLAAATRTECLEGTKALLETLGNKGYRASAKKAQICLQEVTYLGYSLKDGQRWLTKARKEAILSIPVPKNSRQVREFLGTAGYCRLWIPGFAELAAPLYPLTRPGTLFQWGTEQQLAFEDIKKALLSSPALGLPDITKPFELFIDENSGFAKGVLVQKLGPWKRPVAYLSKKLDTVASGWPPCLRMVAAIAILVKDAGKLTLGQPLTILTSHPVEALVRQPPNKWLSNARMTHYQAMLLDAERVHFGPTVSLNPATLLPLPSGGNHHDCLQILAETHGTRPDLTDQPLPDADLTWYTDGSSFIRNGEREAGAAVTTESEVIWAAPLPPGTSAQRAELIALTQALKMAEGKKLTVYTDSRYAFATTHVHGEIYRRRGWLTSEGKEIKNKNEILALLEALFLPKRLSIIHCPGHQKGDSPQAKGNRLADDTAKKAATETHSSLTVLPAGKRTADGSEFEKRTADGSEFESPKKKAKVE

SEQ ID NO: 1176 - protein, 2095 aa, synthetic construct
MPAAKRVKLDGGDKKYSIGLDIGTNSVGWAVITDEYKVPSKKFKVLGNTDRHSIKKNLIGALLFDSGETAEATRLKRTARRRYTRRKNRICYLQEIFSNEMAKVDDSFFHRLEESFLVEEDKKHERHPIFGNIVDEVAYHEKYPTIYHLRKKLVDSTDKADLRLIYLALAHMIKFRGHFLIEGDLNPDNSDVDKLFIQLVQTYNQLFEENPINASGVDAKAILSARLSKSRRLENLIAQLPGEKKNGLFGNLIALSLGLTPNFKSNFDLAEDAKLQLSKDTYDDDLDNLLAQIGDQYADLFLAAKNLSDAILLSDILRVNTEITKAPLSASMIKRYDEHHQDLTLLKALVRQQLPEKYKEIFFDQSKNGYAGYIDGGASQEEFYKFIKPILEKMDGTEELLVKLNREDLLRKQRTFDNGSIPHQIHLGELHAILRRQEDFYPFLKDNREKIEKILTFRIPYYVGPLARGNSRFAWMTRKSEETITPWNFEEVVDKGASAQSFIERMTNFDKNLPNEKVLPKHSLLYEYFTVYNELTKVKYVTEGMRKPAFLSGEQKKAIVDLLFKTNRKVTVKQLKEDYFKKIECFDSVEISGVEDRFNASLGTYHDLLKIIKDKDFLDNEENEDILEDIVLTLTLFEDREMIEERLKTYAHLFDDKVMKQLKRRRYTGWGRLSRKLINGIRDKQSGKTILDFLKSDGFANRNFMQLIHDDSLTFKEDIQKAQVSGQGDSLHEHIANLAGSPAIKKGILQTVKVVDELVKVMGRHKPENIVIEMARENQTTQKGQKNSRERMKRIEEGIKELGSQILKEHPVENTQLQNEKLYLYYLQNGRDMYVDQELDINRLSDYDVDHIVPQSFLKDDSIDNKVLTRSDKARGKSDNVPSEEVVKKMKNYWRQLLNAKLITQRKFDNLTKAERGGLSELDKAGFIKRQLVETRQITKHVAQILDSRMNTKYDENDKLIREVKVITLKSKLVSDFRKDFQFYKVREINNYHHAHDAYLNAVVGTALIKKYPKLESEFVYGDYKVYDVRKMIAKSEQEIGKATAKYFFYSNIMNFFKTEITLANGEIRKRPLIETNGETGEIVWDKGRDFATVRKVLSMPQVNIVKKTEVQTGGFSKESILPKRNSDKLIARKKDWDPKKYGGFDSPTVAYSVLVVAKVEKGKSKKLKSVKELLGITIMERSSFEKNPIDFLEAKGYKEVKKDLIIKLPKYSLFELENGRKRMLASAGELQKGNELALPSKYVNFLYLASHYEKLKGSPEDNEQKQLFVEQHKHYLDEIIEQISEFSKRVILADANLDKVLSAYNKHRDKPIREQAENIIHLFTLTNLGAPAAFKYFDTTIDRKRYTSTKEVLDATLIHQSITGLYETRIDLSQLGGDGGGGSPAPEAAAKGGTLQLEEEYRLFEPESTQKQEMDIWLKNFPQAWAETGGMGTAHCQAPVLIQLKATATPISIRQYPMPHEAYQGIKPHIRRMLDQGILKPCQSPWNTPLLPVKKPGTEDYRPVQDLREVNKRVEDIHPTVPNPYNLLSTLPPSHPWYTVLDLKDAFFCLRLHSESQLLFAFEWRDPEIGLSGQLTWTRLPQGFKNSPTLFNEALHSDLADFRVRYPALVLLQYVDDLLLAAATRTECLEGTKALLETLGNKGYRASAKKAQICLQEVTYLGYSLKDGQRWLTKARKEAILSIPVPKNSRQVREFLGTAGYCRLWIPGFAELAAPLYPLTRPGTLFQWGTEQQLAFEDIKKALLSSPALGLPDITKPFELFIDENSGFAKGVLVQKLGPWKRPVAYLSKKLDTVASGWPPCLRMVAAIAILVKDAGKLTLGQPLTILTSHPVEALVRQPPNKWLSNARMTHYQAMLLDAERVHFGPTVSLNPATLLPLPSGGNHHDCLQILAETHGTRPDLTDQPLPDADLTWYTDGSSFIRNGEREAGAAVTTESEVIWAAPLPPGTSAQRAELIALTQALKMAEGKKLTVYTDSRYAFATTHVHGEIYRRRGWLTSEGKEIKNKNEILALLEALFLPKRLSIIHCPGHQKGDSPQAKGNRLADDTAKKAATETHSSLTVLPAGKRTADGSEFEKRTADGSEFESPKKKAKVE

SEQ ID NO: 1177 - protein, 2102 aa, synthetic construct
MPAAKRVKLDGGDKKYSIGLDIGTNSVGWAVITDEYKVPSKKFKVLGNTDRHSIKKNLIGALLFDSGETAEATRLKRTARRRYTRRKNRICYLQEIFSNEMAKVDDSFFHRLEESFLVEEDKKHERHPIFGNIVDEVAYHEKYPTIYHLRKKLVDSTDKADLRLIYLALAHMIKFRGHFLIEGDLNPDNSDVDKLFIQLVQTYNQLFEENPINASGVDAKAILSARLSKSRRLENLIAQLPGEKKNGLFGNLIALSLGLTPNFKSNFDLAEDAKLQLSKDTYDDDLDNLLAQIGDQYADLFLAAKNLSDAILLSDILRVNTEITKAPLSASMIKRYDEHHQDLTLLKALVRQQLPEKYKEIFFDQSKNGYAGYIDGGASQEEFYKFIKPILEKMDGTEELLVKLNREDLLRKQRTFDNGSIPHQIHLGELHAILRRQEDFYPFLKDNREKIEKILTFRIPYYVGPLARGNSRFAWMTRKSEETITPWNFEEVVDKGASAQSFIERMTNFDKNLPNEKVLPKHSLLYEYFTVYNELTKVKYVTEGMRKPAFLSGEQKKAIVDLLFKTNRKVTVKQLKEDYFKKIECFDSVEISGVEDRFNASLGTYHDLLKIIKDKDFLDNEENEDILEDIVLTLTLFEDREMIEERLKTYAHLFDDKVMKQLKRRRYTGWGRLSRKLINGIRDKQSGKTILDFLKSDGFANRNFMQLIHDDSLTFKEDIQKAQVSGQGDSLHEHIANLAGSPAIKKGILQTVKVVDELVKVMGRHKPENIVIEMARENQTTQKGQKNSRERMKRIEEGIKELGSQILKEHPVENTQLQNEKLYLYYLQNGRDMYVDQELDINRLSDYDVDHIVPQSFLKDDSIDNKVLTRSDKARGKSDNVPSEEVVKKMKNYWRQLLNAKLITQRKFDNLTKAERGGLSELDKAGFIKRQLVETRQITKHVAQILDSRMNTKYDENDKLIREVKVITLKSKLVSDFRKDFQFYKVREINNYHHAHDAYLNAVVGTALIKKYPKLESEFVYGDYKVYDVRKMIAKSEQEIGKATAKYFFYSNIMNFFKTEITLANGEIRKRPLIETNGETGEIVWDKGRDFATVRKVLSMPQVNIVKKTEVQTGGFSKESILPKRNSDKLIARKKDWDPKKYGGFDSPTVAYSVLVVAKVEKGKSKKLKSVKELLGITIMERSSFEKNPIDFLEAKGYKEVKKDLIIKLPKYSLFELENGRKRMLASAGELQKGNELALPSKYVNFLYLASHYEKLKGSPEDNEQKQLFVEQHKHYLDEIIEQISEFSKRVILADANLDKVLSAYNKHRDKPIREQAENIIHLFTLTNLGAPAAFKYFDTTIDRKRYTSTKEVLDATLIHQSITGLYETRIDLSQLGGDGGGGSGGSGGSGGSGGSGGSGGTLQLEEEYRLFEPESTQKQEMDIWLKNFPQAWAETGGMGTAHCQAPVLIQLKATATPISIRQYPMPHEAYQGIKPHIRRMLDQGILKPCQSPWNTPLLPVKKPGTEDYRPVQDLREVNKRVEDIHPTVPNPYNLLSTLPPSHPWYTVLDLKDAFFCLRLHSESQLLFAFEWRDPEIGLSGQLTWTRLPQGFKNSPTLFNEALHSDLADFRVRYPALVLLQYVDDLLLAAATRTECLEGTKALLETLGNKGYRASAKKAQICLQEVTYLGYSLKDGQRWLTKARKEAILSIPVPKNSRQVREFLGTAGYCRLWIPGFAELAAPLYPLTRPGTLFQWGTEQQLAFEDIKKALLSSPALGLPDITKPFELFIDENSGFAKGVLVQKLGPWKRPVAYLSKKLDTVASGWPPCLRMVAAIAILVKDAGKLTLGQPLTILTSHPVEALVRQPPNKWLSNARMTHYQAMLLDAERVHFGPTVSLNPATLLPLPSGGNHHDCLQILAETHGTRPDLTDQPLPDADLTWYTDGSSFIRNGEREAGAAVTTESEVIWAAPLPPGTSAQRAELIALTQALKMAEGKKLTVYTDSRYAFATTHVHGEIYRRRGWLTSEGKEIKNKNEILALLEALFLPKRLSIIHCPGHQKGDSPQAKGNRLADDTAKKAATETHSSLTVLPAGKRTADGSEFEKRTADGSEFESPKKKAKVE

SEQ ID NO: 1178 - protein, 2095 aa, synthetic construct
MPAAKRVKLDGGDKKYSIGLDIGTNSVGWAVITDEYKVPSKKFKVLGNTDRHSIKKNLIGALLFDSGETAEATRLKRTARRRYTRRKNRICYLQEIFSNEMAKVDDSFFHRLEESFLVEEDKKHERHPIFGNIVDEVAYHEKYPTIYHLRKKLVDSTDKADLRLIYLALAHMIKFRGHFLIEGDLNPDNSDVDKLFIQLVQTYNQLFEENPINASGVDAKAILSARLSKSRRLENLIAQLPGEKKNGLFGNLIALSLGLTPNFKSNFDLAEDAKLQLSKDTYDDDLDNLLAQIGDQYADLFLAAKNLSDAILLSDILRVNTEITKAPLSASMIKRYDEHHQDLTLLKALVRQQLPEKYKEIFFDQSKNGYAGYIDGGASQEEFYKFIKPILEKMDGTEELLVKLNREDLLRKQRTFDNGSIPHQIHLGELHAILRRQEDFYPFLKDNREKIEKILTFRIPYYVGPLARGNSRFAWMTRKSEETITPWNFEEVVDKGASAQSFIERMTNFDKNLPNEKVLPKHSLLYEYFTVYNELTKVKYVTEGMRKPAFLSGEQKKAIVDLLFKTNRKVTVKQLKEDYFKKIECFDSVEISGVEDRFNASLGTYHDLLKIIKDKDFLDNEENEDILEDIVLTLTLFEDREMIEERLKTYAHLFDDKVMKQLKRRRYTGWGRLSRKLINGIRDKQSGKTILDFLKSDGFANRNFMQLIHDDSLTFKEDIQKAQVSGQGDSLHEHIANLAGSPAIKKGILQTVKVVDELVKVMGRHKPENIVIEMARENQTTQKGQKNSRERMKRIEEGIKELGSQILKEHPVENTQLQNEKLYLYYLQNGRDMYVDQELDINRLSDYDVDHIVPQSFLKDDSIDNKVLTRSDKARGKSDNVPSEEVVKKMKNYWRQLLNAKLITQRKFDNLTKAERGGLSELDKAGFIKRQLVETRQITKHVAQILDSRMNTKYDENDKLIREVKVITLKSKLVSDFRKDFQFYKVREINNYHHAHDAYLNAVVGTALIKKYPKLESEFVYGDYKVYDVRKMIAKSEQEIGKATAKYFFYSNIMNFFKTEITLANGEIRKRPLIETNGETGEIVWDKGRDFATVRKVLSMPQVNIVKKTEVQTGGFSKESILPKRNSDKLIARKKDWDPKKYGGFDSPTVAYSVLVVAKVEKGKSKKLKSVKELLGITIMERSSFEKNPIDFLEAKGYKEVKKDLIIKLPKYSLFELENGRKRMLASAGELQKGNELALPSKYVNFLYLASHYEKLKGSPEDNEQKQLFVEQHKHYLDEIIEQISEFSKRVILADANLDKVLSAYNKHRDKPIREQAENIIHLFTLTNLGAPAAFKYFDTTIDRKRYTSTKEVLDATLIHQSITGLYETRIDLSQLGGDGGEAAAKGGSGSSGGTLQLEEEYRLFEPESTQKQEMDIWLKNFPQAWAETGGMGTAHCQAPVLIQLKATATPISIRQYPMPHEAYQGIKPHIRRMLDQGILKPCQSPWNTPLLPVKKPGTEDYRPVQDLREVNKRVEDIHPTVPNPYNLLSTLPPSHPWYTVLDLKDAFFCLRLHSESQLLFAFEWRDPEIGLSGQLTWTRLPQGFKNSPTLFNEALHSDLADFRVRYPALVLLQYVDDLLLAAATRTECLEGTKALLETLGNKGYRASAKKAQICLQEVTYLGYSLKDGQRWLTKARKEAILSIPVPKNSRQVREFLGTAGYCRLWIPGFAELAAPLYPLTRPGTLFQWGTEQQLAFEDIKKALLSSPALGLPDITKPFELFIDENSGFAKGVLVQKLGPWKRPVAYLSKKLDTVASGWPPCLRMVAAIAILVKDAGKLTLGQPLTILTSHPVEALVRQPPNKWLSNARMTHYQAMLLDAERVHFGPTVSLNPATLLPLPSGGNHHDCLQILAETHGTRPDLTDQPLPDADLTWYTDGSSFIRNGEREAGAAVTTESEVIWAAPLPPGTSAQRAELIALTQALKMAEGKKLTVYTDSRYAFATTHVHGEIYRRRGWLTSEGKEIKNKNEILALLEALFLPKRLSIIHCPGHQKGDSPQAKGNRLADDTAKKAATETHSSLTVLPAGKRTADGSEFEKRTADGSEFESPKKKAKVE

SEQ ID NO: 1179 - protein, 2095 aa, synthetic construct
MPAAKRVKLDGGDKKYSIGLDIGTNSVGWAVITDEYKVPSKKFKVLGNTDRHSIKKNLIGALLFDSGETAEATRLKRTARRRYTRRKNRICYLQEIFSNEMAKVDDSFFHRLEESFLVEEDKKHERHPIFGNIVDEVAYHEKYPTIYHLRKKLVDSTDKADLRLIYLALAHMIKFRGHFLIEGDLNPDNSDVDKLFIQLVQTYNQLFEENPINASGVDAKAILSARLSKSRRLENLIAQLPGEKKNGLFGNLIALSLGLTPNFKSNFDLAEDAKLQLSKDTYDDDLDNLLAQIGDQYADLFLAAKNLSDAILLSDILRVNTEITKAPLSASMIKRYDEHHQDLTLLKALVRQQLPEKYKEIFFDQSKNGYAGYIDGGASQEEFYKFIKPILEKMDGTEELLVKLNREDLLRKQRTFDNGSIPHQIHLGELHAILRRQEDFYPFLKDNREKIEKILTFRIPYYVGPLARGNSRFAWMTRKSEETITPWNFEEVVDKGASAQSFIERMTNFDKNLPNEKVLPKHSLLYEYFTVYNELTKVKYVTEGMRKPAFLSGEQKKAIVDLLFKTNRKVTVKQLKEDYFKKIECFDSVEISGVEDRFNASLGTYHDLLKIIKDKDFLDNEENEDILEDIVLTLTLFEDREMIEERLKTYAHLFDDKVMKQLKRRRYTGWGRLSRKLINGIRDKQSGKTILDFLKSDGFANRNFMQLIHDDSLTFKEDIQKAQVSGQGDSLHEHIANLAGSPAIKKGILQTVKVVDELVKVMGRHKPENIVIEMARENQTTQKGQKNSRERMKRIEEGIKELGSQILKEHPVENTQLQNEKLYLYYLQNGRDMYVDQELDINRLSDYDVDHIVPQSFLKDDSIDNKVLTRSDKARGKSDNVPSEEVVKKMKNYWRQLLNAKLITQRKFDNLTKAERGGLSELDKAGFIKRQLVETRQITKHVAQILDSRMNTKYDENDKLIREVKVITLKSKLVSDFRKDFQFYKVREINNYHHAHDAYLNAVVGTALIKKYPKLESEFVYGDYKVYDVRKMIAKSEQEIGKATAKYFFYSNIMNFFKTEITLANGEIRKRPLIETNGETGEIVWDKGRDFATVRKVLSMPQVNIVKKTEVQTGGFSKESILPKRNSDKLIARKKDWDPKKYGGFDSPTVAYSVLVVAKVEKGKSKKLKSVKELLGITIMERSSFEKNPIDFLEAKGYKEVKKDLIIKLPKYSLFELENGRKRMLASAGELQKGNELALPSKYVNFLYLASHYEKLKGSPEDNEQKQLFVEQHKHYLDEIIEQISEFSKRVILADANLDKVLSAYNKHRDKPIREQAENIIHLFTLTNLGAPAAFKYFDTTIDRKRYTSTKEVLDATLIHQSITGLYETRIDLSQLGGDGGGGGEAAAKPAPGGTLQLEEEYRLFEPESTQKQEMDIWLKNFPQAWAETGGMGTAHCQAPVLIQLKATATPISIRQYPMPHEAYQGIKPHIRRMLDQGILKPCQSPWNTPLLPVKKPGTEDYRPVQDLREVNKRVEDIHPTVPNPYNLLSTLPPSHPWYTVLDLKDAFFCLRLHSESQLLFAFEWRDPEIGLSGQLTWTRLPQGFKNSPTLFNEALHSDLADFRVRYPALVLLQYVDDLLLAAATRTECLEGTKALLETLGNKGYRASAKKAQICLQEVTYLGYSLKDGQRWLTKARKEAILSIPVPKNSRQVREFLGTAGYCRLWIPGFAELAAPLYPLTRPGTLFQWGTEQQLAFEDIKKALLSSPALGLPDITKPFELFIDENSGFAKGVLVQKLGPWKRPVAYLSKKLDTVASGWPPCLRMVAAIAILVKDAGKLTLGQPLTILTSHPVEALVRQPPNKWLSNARMTHYQAMLLDAERVHFGPTVSLNPATLLPLPSGGNHHDCLQILAETHGTRPDLTDQPLPDADLTWYTDGSSFIRNGEREAGAAVTTESEVIWAAPLPPGTSAQRAELIALTQALKMAEGKKLTVYTDSRYAFATTHVHGEIYRRRGWLTSEGKEIKNKNEILALLEALFLPKRLSIIHCPGHQKGDSPQAKGNRLADDTAKKAATETHSSLTVLPAGKRTADGSEFEKRTADGSEFESPKKKAKVE

SEQ ID NO: 1180 - protein, 2094 aa, synthetic construct
MPAAKRVKLDGGDKKYSIGLDIGTNSVGWAVITDEYKVPSKKFKVLGNTDRHSIKKNLIGALLFDSGETAEATRLKRTARRRYTRRKNRICYLQEIFSNEMAKVDDSFFHRLEESFLVEEDKKHERHPIFGNIVDEVAYHEKYPTIYHLRKKLVDSTDKADLRLIYLALAHMIKFRGHFLIEGDLNPDNSDVDKLFIQLVQTYNQLFEENPINASGVDAKAILSARLSKSRRLENLIAQLPGEKKNGLFGNLIALSLGLTPNFKSNFDLAEDAKLQLSKDTYDDDLDNLLAQIGDQYADLFLAAKNLSDAILLSDILRVNTEITKAPLSASMIKRYDEHHQDLTLLKALVRQQLPEKYKEIFFDQSKNGYAGYIDGGASQEEFYKFIKPILEKMDGTEELLVKLNREDLLRKQRTFDNGSIPHQIHLGELHAILRRQEDFYPFLKDNREKIEKILTFRIPYYVGPLARGNSRFAWMTRKSEETITPWNFEEVVDKGASAQSFIERMTNFDKNLPNEKVLPKHSLLYEYFTVYNELTKVKYVTEGMRKPAFLSGEQKKAIVDLLFKTNRKVTVKQLKEDYFKKIECFDSVEISGVEDRFNASLGTYHDLLKIIKDKDFLDNEENEDILEDIVLTLTLFEDREMIEERLKTYAHLFDDKVMKQLKRRRYTGWGRLSRKLINGIRDKQSGKTILDFLKSDGFANRNFMQLIHDDSLTFKEDIQKAQVSGQGDSLHEHIANLAGSPAIKKGILQTVKVVDELVKVMGRHKPENIVIEMARENQTTQKGQKNSRERMKRIEEGIKELGSQILKEHPVENTQLQNEKLYLYYLQNGRDMYVDQELDINRLSDYDVDHIVPQSFLKDDSIDNKVLTRSDKARGKSDNVPSEEVVKKMKNYWRQLLNAKLITQRKFDNLTKAERGGLSELDKAGFIKRQLVETRQITKHVAQILDSRMNTKYDENDKLIREVKVITLKSKLVSDFRKDFQFYKVREINNYHHAHDAYLNAVVGTALIKKYPKLESEFVYGDYKVYDVRKMIAKSEQEIGKATAKYFFYSNIMNFFKTEITLANGEIRKRPLIETNGETGEIVWDKGRDFATVRKVLSMPQVNIVKKTEVQTGGFSKESILPKRNSDKLIARKKDWDPKKYGGFDSPTVAYSVLVVAKVEKGKSKKLKSVKELLGITIMERSSFEKNPIDFLEAKGYKEVKKDLIIKLPKYSLFELENGRKRMLASAGELQKGNELALPSKYVNFLYLASHYEKLKGSPEDNEQKQLFVEQHKHYLDEIIEQISEFSKRVILADANLDKVLSAYNKHRDKPIREQAENIIHLFTLTNLGAPAAFKYFDTTIDRKRYTSTKEVLDATLIHQSITGLYETRIDLSQLGGDGGGGGGSGGGGSGGTLQLEEEYRLFEPESTQKQEMDIWLKNFPQAWAETGGMGTAHCQAPVLIQLKATATPISIRQYPMPHEAYQGIKPHIRRMLDQGILKPCQSPWNTPLLPVKKPGTEDYRPVQDLREVNKRVEDIHPTVPNPYNLLSTLPPSHPWYTVLDLKDAFFCLRLHSESQLLFAFEWRDPEIGLSGQLTWTRLPQGFKNSPTLFNEALHSDLADFRVRYPALVLLQYVDDLLLAAATRTECLEGTKALLETLGNKGYRASAKKAQICLQEVTYLGYSLKDGQRWLTKARKEAILSIPVPKNSRQVREFLGTAGYCRLWIPGFAELAAPLYPLTRPGTLFQWGTEQQLAFEDIKKALLSSPALGLPDITKPFELFIDENSGFAKGVLVQKLGPWKRPVAYLSKKLDTVASGWPPCLRMVAAIAILVKDAGKLTLGQPLTILTSHPVEALVRQPPNKWLSNARMTHYQAMLLDAERVHFGPTVSLNPATLLPLPSGGNHHDCLQILAETHGTRPDLTDQPLPDADLTWYTDGSSFIRNGEREAGAAVTTESEVIWAAPLPPGTSAQRAELIALTQALKMAEGKKLTVYTDSRYAFATTHVHGEIYRRRGWLTSEGKEIKNKNEILALLEALFLPKRLSIIHCPGHQKGDSPQAKGNRLADDTAKKAATETHSSLTVLPAGKRTADGSEFEKRTADGSEFESPKKKAKVE

SEQ ID NO: 1181 - protein, 2091 aa, synthetic construct
MPAAKRVKLDGGDKKYSIGLDIGTNSVGWAVITDEYKVPSKKFKVLGNTDRHSIKKNLIGALLFDSGETAEATRLKRTARRRYTRRKNRICYLQEIFSNEMAKVDDSFFHRLEESFLVEEDKKHERHPIFGNIVDEVAYHEKYPTIYHLRKKLVDSTDKADLRLIYLALAHMIKFRGHFLIEGDLNPDNSDVDKLFIQLVQTYNQLFEENPINASGVDAKAILSARLSKSRRLENLIAQLPGEKKNGLFGNLIALSLGLTPNFKSNFDLAEDAKLQLSKDTYDDDLDNLLAQIGDQYADLFLAAKNLSDAILLSDILRVNTEITKAPLSASMIKRYDEHHQDLTLLKALVRQQLPEKYKEIFFDQSKNGYAGYIDGGASQEEFYKFIKPILEKMDGTEELLVKLNREDLLRKQRTFDNGSIPHQIHLGELHAILRRQEDFYPFLKDNREKIEKILTFRIPYYVGPLARGNSRFAWMTRKSEETITPWNFEEVVDKGASAQSFIERMTNFDKNLPNEKVLPKHSLLYEYFTVYNELTKVKYVTEGMRKPAFLSGEQKKAIVDLLFKTNRKVTVKQLKEDYFKKIECFDSVEISGVEDRFNASLGTYHDLLKIIKDKDFLDNEENEDILEDIVLTLTLFEDREMIEERLKTYAHLFDDKVMKQLKRRRYTGWGRLSRKLINGIRDKQSGKTILDFLKSDGFANRNFMQLIHDDSLTFKEDIQKAQVSGQGDSLHEHIANLAGSPAIKKGILQTVKVVDELVKVMGRHKPENIVIEMARENQTTQKGQKNSRERMKRIEEGIKELGSQILKEHPVENTQLQNEKLYLYYLQNGRDMYVDQELDINRLSDYDVDHIVPQSFLKDDSIDNKVLTRSDKARGKSDNVPSEEVVKKMKNYWRQLLNAKLITQRKFDNLTKAERGGLSELDKAGFIKRQLVETRQITKHVAQILDSRMNTKYDENDKLIREVKVITLKSKLVSDFRKDFQFYKVREINNYHHAHDAYLNAVVGTALIKKYPKLESEFVYGDYKVYDVRKMIAKSEQEIGKATAKYFFYSNIMNFFKTEITLANGEIRKRPLIETNGETGEIVWDKGRDFATVRKVLSMPQVNIVKKTEVQTGGFSKESILPKRNSDKLIARKKDWDPKKYGGFDSPTVAYSVLVVAKVEKGKSKKLKSVKELLGITIMERSSFEKNPIDFLEAKGYKEVKKDLIIKLPKYSLFELENGRKRMLASAGELQKGNELALPSKYVNFLYLASHYEKLKGSPEDNEQKQLFVEQHKHYLDEIIEQISEFSKRVILADANLDKVLSAYNKHRDKPIREQAENIIHLFTLTNLGAPAAFKYFDTTIDRKRYTSTKEVLDATLIHQSITGLYETRIDLSQLGGDGGGGGGGGGGGTLQLEEEYRLFEPESTQKQEMDIWLKNFPQAWAETGGMGTAHCQAPVLIQLKATATPISIRQYPMPHEAYQGIKPHIRRMLDQGILKPCQSPWNTPLLPVKKPGTEDYRPVQDLREVNKRVEDIHPTVPNPYNLLSTLPPSHPWYTVLDLKDAFFCLRLHSESQLLFAFEWRDPEIGLSGQLTWTRLPQGFKNSPTLFNEALHSDLADFRVRYPALVLLQYVDDLLLAAATRTECLEGTKALLETLGNKGYRASAKKAQICLQEVTYLGYSLKDGQRWLTKARKEAILSIPVPKNSRQVREFLGTAGYCRLWIPGFAELAAPLYPLTRPGTLFQWGTEQQLAFEDIKKALLSSPALGLPDITKPFELFIDENSGFAKGVLVQKLGPWKRPVAYLSKKLDTVASGWPPCLRMVAAIAILVKDAGKLTLGQPLTILTSHPVEALVRQPPNKWLSNARMTHYQAMLLDAERVHFGPTVSLNPATLLPLPSGGNHHDCLQILAETHGTRPDLTDQPLPDADLTWYTDGSSFIRNGEREAGAAVTTESEVIWAAPLPPGTSAQRAELIALTQALKMAEGKKLTVYTDSRYAFATTHVHGEIYRRRGWLTSEGKEIKNKNEILALLEALFLPKRLSIIHCPGHQKGDSPQAKGNRLADDTAKKAATETHSSLTVLPAGKRTADGSEFEKRTADGSEFESPKKKAKVE

SEQ ID NO: 1182 - protein, 2093 aa, synthetic construct
MPAAKRVKLDGGDKKYSIGLDIGTNSVGWAVITDEYKVPSKKFKVLGNTDRHSIKKNLIGALLFDSGETAEATRLKRTARRRYTRRKNRICYLQEIFSNEMAKVDDSFFHRLEESFLVEEDKKHERHPIFGNIVDEVAYHEKYPTIYHLRKKLVDSTDKADLRLIYLALAHMIKFRGHFLIEGDLNPDNSDVDKLFIQLVQTYNQLFEENPINASGVDAKAILSARLSKSRRLENLIAQLPGEKKNGLFGNLIALSLGLTPNFKSNFDLAEDAKLQLSKDTYDDDLDNLLAQIGDQYADLFLAAKNLSDAILLSDILRVNTEITKAPLSASMIKRYDEHHQDLTLLKALVRQQLPEKYKEIFFDQSKNGYAGYIDGGASQEEFYKFIKPILEKMDGTEELLVKLNREDLLRKQRTFDNGSIPHQIHLGELHAILRRQEDFYPFLKDNREKIEKILTFRIPYYVGPLARGNSRFAWMTRKSEETITPWNFEEVVDKGASAQSFIERMTNFDKNLPNEKVLPKHSLLYEYFTVYNELTKVKYVTEGMRKPAFLSGEQKKAIVDLLFKTNRKVTVKQLKEDYFKKIECFDSVEISGVEDRFNASLGTYHDLLKIIKDKDFLDNEENEDILEDIVLTLTLFEDREMIEERLKTYAHLFDDKVMKQLKRRRYTGWGRLSRKLINGIRDKQSGKTILDFLKSDGFANRNFMQLIHDDSLTFKEDIQKAQVSGQGDSLHEHIANLAGSPAIKKGILQTVKVVDELVKVMGRHKPENIVIEMARENQTTQKGQKNSRERMKRIEEGIKELGSQILKEHPVENTQLQNEKLYLYYLQNGRDMYVDQELDINRLSDYDVDHIVPQSFLKDDSIDNKVLTRSDKARGKSDNVPSEEVVKKMKNYWRQLLNAKLITQRKFDNLTKAERGGLSELDKAGFIKRQLVETRQITKHVAQILDSRMNTKYDENDKLIREVKVITLKSKLVSDFRKDFQFYKVREINNYHHAHDAYLNAVVGTALIKKYPKLESEFVYGDYKVYDVRKMIAKSEQEIGKATAKYFFYSNIMNFFKTEITLANGEIRKRPLIETNGETGEIVWDKGRDFATVRKVLSMPQVNIVKKTEVQTGGFSKESILPKRNSDKLIARKKDWDPKKYGGFDSPTVAYSVLVVAKVEKGKSKKLKSVKELLGITIMERSSFEKNPIDFLEAKGYKEVKKDLIIKLPKYSLFELENGRKRMLASAGELQKGNELALPSKYVNFLYLASHYEKLKGSPEDNEQKQLFVEQHKHYLDEIIEQISEFSKRVILADANLDKVLSAYNKHRDKPIREQAENIIHLFTLTNLGAPAAFKYFDTTIDRKRYTSTKEVLDATLIHQSITGLYETRIDLSQLGGDGGGGGPAPGGSGGTLQLEEEYRLFEPESTQKQEMDIWLKNFPQAWAETGGMGTAHCQAPVLIQLKATATPISIRQYPMPHEAYQGIKPHIRRMLDQGILKPCQSPWNTPLLPVKKPGTEDYRPVQDLREVNKRVEDIHPTVPNPYNLLSTLPPSHPWYTVLDLKDAFFCLRLHSESQLLFAFEWRDPEIGLSGQLTWTRLPQGFKNSPTLFNEALHSDLADFRVRYPALVLLQYVDDLLLAAATRTECLEGTKALLETLGNKGYRASAKKAQICLQEVTYLGYSLKDGQRWLTKARKEAILSIPVPKNSRQVREFLGTAGYCRLWIPGFAELAAPLYPLTRPGTLFQWGTEQQLAFEDIKKALLSSPALGLPDITKPFELFIDENSGFAKGVLVQKLGPWKRPVAYLSKKLDTVASGWPPCLRMVAAIAILVKDAGKLTLGQPLTILTSHPVEALVRQPPNKWLSNARMTHYQAMLLDAERVHFGPTVSLNPATLLPLPSGGNHHDCLQILAETHGTRPDLTDQPLPDADLTWYTDGSSFIRNGEREAGAAVTTESEVIWAAPLPPGTSAQRAELIALTQALKMAEGKKLTVYTDSRYAFATTHVHGEIYRRRGWLTSEGKEIKNKNEILALLEALFLPKRLSIIHCPGHQKGDSPQAKGNRLADDTAKKAATETHSSLTVLPAGKRTADGSEFEKRTADGSEFESPKKKAKVE

SEQ ID NO: 1183 - protein, 2089 aa, synthetic construct
MPAAKRVKLDGGDKKYSIGLDIGTNSVGWAVITDEYKVPSKKFKVLGNTDRHSIKKNLIGALLFDSGETAEATRLKRTARRRYTRRKNRICYLQEIFSNEMAKVDDSFFHRLEESFLVEEDKKHERHPIFGNIVDEVAYHEKYPTIYHLRKKLVDSTDKADLRLIYLALAHMIKFRGHFLIEGDLNPDNSDVDKLFIQLVQTYNQLFEENPINASGVDAKAILSARLSKSRRLENLIAQLPGEKKNGLFGNLIALSLGLTPNFKSNFDLAEDAKLQLSKDTYDDDLDNLLAQIGDQYADLFLAAKNLSDAILLSDILRVNTEITKAPLSASMIKRYDEHHQDLTLLKALVRQQLPEKYKEIFFDQSKNGYAGYIDGGASQEEFYKFIKPILEKMDGTEELLVKLNREDLLRKQRTFDNGSIPHQIHLGELHAILRRQEDFYPFLKDNREKIEKILTFRIPYYVGPLARGNSRFAWMTRKSEETITPWNFEEVVDKGASAQSFIERMTNFDKNLPNEKVLPKHSLLYEYFTVYNELTKVKYVTEGMRKPAFLSGEQKKAIVDLLFKTNRKVTVKQLKEDYFKKIECFDSVEISGVEDRFNASLGTYHDLLKIIKDKDFLDNEENEDILEDIVLTLTLFEDREMIEERLKTYAHLFDDKVMKQLKRRRYTGWGRLSRKLINGIRDKQSGKTILDFLKSDGFANRNFMQLIHDDSLTFKEDIQKAQVSGQGDSLHEHIANLAGSPAIKKGILQTVKVVDELVKVMGRHKPENIVIEMARENQTTQKGQKNSRERMKRIEEGIKELGSQILKEHPVENTQLQNEKLYLYYLQNGRDMYVDQELDINRLSDYDVDHIVPQSFLKDDSIDNKVLTRSDKARGKSDNVPSEEVVKKMKNYWRQLLNAKLITQRKFDNLTKAERGGLSELDKAGFIKRQLVETRQITKHVAQILDSRMNTKYDENDKLIREVKVITLKSKLVSDFRKDFQFYKVREINNYHHAHDAYLNAVVGTALIKKYPKLESEFVYGDYKVYDVRKMIAKSEQEIGKATAKYFFYSNIMNFFKTEITLANGEIRKRPLIETNGETGEIVWDKGRDFATVRKVLSMPQVNIVKKTEVQTGGFSKESILPKRNSDKLIARKKDWDPKKYGGFDSPTVAYSVLVVAKVEKGKSKKLKSVKELLGITIMERSSFEKNPIDFLEAKGYKEVKKDLIIKLPKYSLFELENGRKRMLASAGELQKGNELALPSKYVNFLYLASHYEKLKGSPEDNEQKQLFVEQHKHYLDEIIEQISEFSKRVILADANLDKVLSAYNKHRDKPIREQAENIIHLFTLTNLGAPAAFKYFDTTIDRKRYTSTKEVLDATLIHQSITGLYETRIDLSQLGGDGGEAAAKGGTLQLEEEYRLFEPESTQKQEMDIWLKNFPQAWAETGGMGTAHCQAPVLIQLKATATPISIRQYPMPHEAYQGIKPHIRRMLDQGILKPCQSPWNTPLLPVKKPGTEDYRPVQDLREVNKRVEDIHPTVPNPYNLLSTLPPSHPWYTVLDLKDAFFCLRLHSESQLLFAFEWRDPEIGLSGQLTWTRLPQGFKNSPTLFNEALHSDLADFRVRYPALVLLQYVDDLLLAAATRTECLEGTKALLETLGNKGYRASAKKAQICLQEVTYLGYSLKDGQRWLTKARKEAILSIPVPKNSRQVREFLGTAGYCRLWIPGFAELAAPLYPLTRPGTLFQWGTEQQLAFEDIKKALLSSPALGLPDITKPFELFIDENSGFAKGVLVQKLGPWKRPVAYLSKKLDTVASGWPPCLRMVAAIAILVKDAGKLTLGQPLTILTSHPVEALVRQPPNKWLSNARMTHYQAMLLDAERVHFGPTVSLNPATLLPLPSGGNHHDCLQILAETHGTRPDLTDQPLPDADLTWYTDGSSFIRNGEREAGAAVTTESEVIWAAPLPPGTSAQRAELIALTQALKMAEGKKLTVYTDSRYAFATTHVHGEIYRRRGWLTSEGKEIKNKNEILALLEALFLPKRLSIIHCPGHQKGDSPQAKGNRLADDTAKKAATETHSSLTVLPAGKRTADGSEFEKRTADGSEFESPKKKAKVE

SEQ ID NO: 1184 - protein, 2090 aa, synthetic construct
MPAAKRVKLDGGDKKYSIGLDIGTNSVGWAVITDEYKVPSKKFKVLGNTDRHSIKKNLIGALLFDSGETAEATRLKRTARRRYTRRKNRICYLQEIFSNEMAKVDDSFFHRLEESFLVEEDKKHERHPIFGNIVDEVAYHEKYPTIYHLRKKLVDSTDKADLRLIYLALAHMIKFRGHFLIEGDLNPDNSDVDKLFIQLVQTYNQLFEENPINASGVDAKAILSARLSKSRRLENLIAQLPGEKKNGLFGNLIALSLGLTPNFKSNFDLAEDAKLQLSKDTYDDDLDNLLAQIGDQYADLFLAAKNLSDAILLSDILRVNTEITKAPLSASMIKRYDEHHQDLTLLKALVRQQLPEKYKEIFFDQSKNGYAGYIDGGASQEEFYKFIKPILEKMDGTEELLVKLNREDLLRKQRTFDNGSIPHQIHLGELHAILRRQEDFYPFLKDNREKIEKILTFRIPYYVGPLARGNSRFAWMTRKSEETITPWNFEEVVDKGASAQSFIERMTNFDKNLPNEKVLPKHSLLYEYFTVYNELTKVKYVTEGMRKPAFLSGEQKKAIVDLLFKTNRKVTVKQLKEDYFKKIECFDSVEISGVEDRFNASLGTYHDLLKIIKDKDFLDNEENEDILEDIVLTLTLFEDREMIEERLKTYAHLFDDKVMKQLKRRRYTGWGRLSRKLINGIRDKQSGKTILDFLKSDGFANRNFMQLIHDDSLTFKEDIQKAQVSGQGDSLHEHIANLAGSPAIKKGILQTVKVVDELVKVMGRHKPENIVIEMARENQTTQKGQKNSRERMKRIEEGIKELGSQILKEHPVENTQLQNEKLYLYYLQNGRDMYVDQELDINRLSDYDVDHIVPQSFLKDDSIDNKVLTRSDKARGKSDNVPSEEVVKKMKNYWRQLLNAKLITQRKFDNLTKAERGGLSELDKAGFIKRQLVETRQITKHVAQILDSRMNTKYDENDKLIREVKVITLKSKLVSDFRKDFQFYKVREINNYHHAHDAYLNAVVGTALIKKYPKLESEFVYGDYKVYDVRKMIAKSEQEIGKATAKYFFYSNIMNFFKTEITLANGEIRKRPLIETNGETGEIVWDKGRDFATVRKVLSMPQVNIVKKTEVQTGGFSKESILPKRNSDKLIARKKDWDPKKYGGFDSPTVAYSVLVVAKVEKGKSKKLKSVKELLGITIMERSSFEKNPIDFLEAKGYKEVKKDLIIKLPKYSLFELENGRKRMLASAGELQKGNELALPSKYVNFLYLASHYEKLKGSPEDNEQKQLFVEQHKHYLDEIIEQISEFSKRVILADANLDKVLSAYNKHRDKPIREQAENIIHLFTLTNLGAPAAFKYFDTTIDRKRYTSTKEVLDATLIHQSITGLYETRIDLSQLGGDGGGGSGGGGGTLQLEEEYRLFEPESTQKQEMDIWLKNFPQAWAETGGMGTAHCQAPVLIQLKATATPISIRQYPMPHEAYQGIKPHIRRMLDQGILKPCQSPWNTPLLPVKKPGTEDYRPVQDLREVNKRVEDIHPTVPNPYNLLSTLPPSHPWYTVLDLKDAFFCLRLHSESQLLFAFEWRDPEIGLSGQLTWTRLPQGFKNSPTLFNEALHSDLADFRVRYPALVLLQYVDDLLLAAATRTECLEGTKALLETLGNKGYRASAKKAQICLQEVTYLGYSLKDGQRWLTKARKEAILSIPVPKNSRQVREFLGTAGYCRLWIPGFAELAAPLYPLTRPGTLFQWGTEQQLAFEDIKKALLSSPALGLPDITKPFELFIDENSGFAKGVLVQKLGPWKRPVAYLSKKLDTVASGWPPCLRMVAAIAILVKDAGKLTLGQPLTILTSHPVEALVRQPPNKWLSNARMTHYQAMLLDAERVHFGPTVSLNPATLLPLPSGGNHHDCLQILAETHGTRPDLTDQPLPDADLTWYTDGSSFIRNGEREAGAAVTTESEVIWAAPLPPGTSAQRAELIALTQALKMAEGKKLTVYTDSRYAFATTHVHGEIYRRRGWLTSEGKEIKNKNEILALLEALFLPKRLSIIHCPGHQKGDSPQAKGNRLADDTAKKAATETHSSLTVLPAGKRTADGSEFEKRTADGSEFESPKKKAKVE

SEQ ID NO: 1185 - protein, 2095 aa, synthetic construct
MPAAKRVKLDGGDKKYSIGLDIGTNSVGWAVITDEYKVPSKKFKVLGNTDRHSIKKNLIGALLFDSGETAEATRLKRTARRRYTRRKNRICYLQEIFSNEMAKVDDSFFHRLEESFLVEEDKKHERHPIFGNIVDEVAYHEKYPTIYHLRKKLVDSTDKADLRLIYLALAHMIKFRGHFLIEGDLNPDNSDVDKLFIQLVQTYNQLFEENPINASGVDAKAILSARLSKSRRLENLIAQLPGEKKNGLFGNLIALSLGLTPNFKSNFDLAEDAKLQLSKDTYDDDLDNLLAQIGDQYADLFLAAKNLSDAILLSDILRVNTEITKAPLSASMIKRYDEHHQDLTLLKALVRQQLPEKYKEIFFDQSKNGYAGYIDGGASQEEFYKFIKPILEKMDGTEELLVKLNREDLLRKQRTFDNGSIPHQIHLGELHAILRRQEDFYPFLKDNREKIEKILTFRIPYYVGPLARGNSRFAWMTRKSEETITPWNFEEVVDKGASAQSFIERMTNFDKNLPNEKVLPKHSLLYEYFTVYNELTKVKYVTEGMRKPAFLSGEQKKAIVDLLFKTNRKVTVKQLKEDYFKKIECFDSVEISGVEDRFNASLGTYHDLLKIIKDKDFLDNEENEDILEDIVLTLTLFEDREMIEERLKTYAHLFDDKVMKQLKRRRYTGWGRLSRKLINGIRDKQSGKTILDFLKSDGFANRNFMQLIHDDSLTFKEDIQKAQVSGQGDSLHEHIANLAGSPAIKKGILQTVKVVDELVKVMGRHKPENIVIEMARENQTTQKGQKNSRERMKRIEEGIKELGSQILKEHPVENTQLQNEKLYLYYLQNGRDMYVDQELDINRLSDYDVDHIVPQSFLKDDSIDNKVLTRSDKARGKSDNVPSEEVVKKMKNYWRQLLNAKLITQRKFDNLTKAERGGLSELDKAGFIKRQLVETRQITKHVAQILDSRMNTKYDENDKLIREVKVITLKSKLVSDFRKDFQFYKVREINNYHHAHDAYLNAVVGTALIKKYPKLESEFVYGDYKVYDVRKMIAKSEQEIGKATAKYFFYSNIMNFFKTEITLANGEIRKRPLIETNGETGEIVWDKGRDFATVRKVLSMPQVNIVKKTEVQTGGFSKESILPKRNSDKLIARKKDWDPKKYGGFDSPTVAYSVLVVAKVEKGKSKKLKSVKELLGITIMERSSFEKNPIDFLEAKGYKEVKKDLIIKLPKYSLFELENGRKRMLASAGELQKGNELALPSKYVNFLYLASHYEKLKGSPEDNEQKQLFVEQHKHYLDEIIEQISEFSKRVILADANLDKVLSAYNKHRDKPIREQAENIIHLFTLTNLGAPAAFKYFDTTIDRKRYTSTKEVLDATLIHQSITGLYETRIDLSQLGGDGGEAAAKPAPGGGGGTLQLEEEYRLFEPESTQKQEMDIWLKNFPQAWAETGGMGTAHCQAPVLIQLKATATPISIRQYPMPHEAYQGIKPHIRRMLDQGILKPCQSPWNTPLLPVKKPGTEDYRPVQDLREVNKRVEDIHPTVPNPYNLLSTLPPSHPWYTVLDLKDAFFCLRLHSESQLLFAFEWRDPEIGLSGQLTWTRLPQGFKNSPTLFNEALHSDLADFRVRYPALVLLQYVDDLLLAAATRTECLEGTKALLETLGNKGYRASAKKAQICLQEVTYLGYSLKDGQRWLTKARKEAILSIPVPKNSRQVREFLGTAGYCRLWIPGFAELAAPLYPLTRPGTLFQWGTEQQLAFEDIKKALLSSPALGLPDITKPFELFIDENSGFAKGVLVQKLGPWKRPVAYLSKKLDTVASGWPPCLRMVAAIAILVKDAGKLTLGQPLTILTSHPVEALVRQPPNKWLSNARMTHYQAMLLDAERVHFGPTVSLNPATLLPLPSGGNHHDCLQILAETHGTRPDLTDQPLPDADLTWYTDGSSFIRNGEREAGAAVTTESEVIWAAPLPPGTSAQRAELIALTQALKMAEGKKLTVYTDSRYAFATTHVHGEIYRRRGWLTSEGKEIKNKNEILALLEALFLPKRLSIIHCPGHQKGDSPQAKGNRLADDTAKKAATETHSSLTVLPAGKRTADGSEFEKRTADGSEFESPKKKAKVE

SEQ ID NO: 1186 - protein, 2095 aa, synthetic construct
MPAAKRVKLDGGDKKYSIGLDIGTNSVGWAVITDEYKVPSKKFKVLGNTDRHSIKKNLIGALLFDSGETAEATRLKRTARRRYTRRKNRICYLQEIFSNEMAKVDDSFFHRLEESFLVEEDKKHERHPIFGNIVDEVAYHEKYPTIYHLRKKLVDSTDKADLRLIYLALAHMIKFRGHFLIEGDLNPDNSDVDKLFIQLVQTYNQLFEENPINASGVDAKAILSARLSKSRRLENLIAQLPGEKKNGLFGNLIALSLGLTPNFKSNFDLAEDAKLQLSKDTYDDDLDNLLAQIGDQYADLFLAAKNLSDAILLSDILRVNTEITKAPLSASMIKRYDEHHQDLTLLKALVRQQLPEKYKEIFFDQSKNGYAGYIDGGASQEEFYKFIKPILEKMDGTEELLVKLNREDLLRKQRTFDNGSIPHQIHLGELHAILRRQEDFYPFLKDNREKIEKILTFRIPYYVGPLARGNSRFAWMTRKSEETITPWNFEEVVDKGASAQSFIERMTNFDKNLPNEKVLPKHSLLYEYFTVYNELTKVKYVTEGMRKPAFLSGEQKKAIVDLLFKTNRKVTVKQLKEDYFKKIECFDSVEISGVEDRFNASLGTYHDLLKIIKDKDFLDNEENEDILEDIVLTLTLFEDREMIEERLKTYAHLFDDKVMKQLKRRRYTGWGRLSRKLINGIRDKQSGKTILDFLKSDGFANRNFMQLIHDDSLTFKEDIQKAQVSGQGDSLHEHIANLAGSPAIKKGILQTVKVVDELVKVMGRHKPENIVIEMARENQTTQKGQKNSRERMKRIEEGIKELGSQILKEHPVENTQLQNEKLYLYYLQNGRDMYVDQELDINRLSDYDVDHIVPQSFLKDDSIDNKVLTRSDKARGKSDNVPSEEVVKKMKNYWRQLLNAKLITQRKFDNLTKAERGGLSELDKAGFIKRQLVETRQITKHVAQILDSRMNTKYDENDKLIREVKVITLKSKLVSDFRKDFQFYKVREINNYHHAHDAYLNAVVGTALIKKYPKLESEFVYGDYKVYDVRKMIAKSEQEIGKATAKYFFYSNIMNFFKTEITLANGEIRKRPLIETNGETGEIVWDKGRDFATVRKVLSMPQVNIVKKTEVQTGGFSKESILPKRNSDKLIARKKDWDPKKYGGFDSPTVAYSVLVVAKVEKGKSKKLKSVKELLGITIMERSSFEKNPIDFLEAKGYKEVKKDLIIKLPKYSLFELENGRKRMLASAGELQKGNELALPSKYVNFLYLASHYEKLKGSPEDNEQKQLFVEQHKHYLDEIIEQISEFSKRVILADANLDKVLSAYNKHRDKPIREQAENIIHLFTLTNLGAPAAFKYFDTTIDRKRYTSTKEVLDATLIHQSITGLYETRIDLSQLGGDGGGGGPAPEAAAKGGTLQLEEEYRLFEPESTQKQEMDIWLKNFPQAWAETGGMGTAHCQAPVLIQLKATATPISIRQYPMPHEAYQGIKPHIRRMLDQGILKPCQSPWNTPLLPVKKPGTEDYRPVQDLREVNKRVEDIHPTVPNPYNLLSTLPPSHPWYTVLDLKDAFFCLRLHSESQLLFAFEWRDPEIGLSGQLTWTRLPQGFKNSPTLFNEALHSDLADFRVRYPALVLLQYVDDLLLAAATRTECLEGTKALLETLGNKGYRASAKKAQICLQEVTYLGYSLKDGQRWLTKARKEAILSIPVPKNSRQVREFLGTAGYCRLWIPGFAELAAPLYPLTRPGTLFQWGTEQQLAFEDIKKALLSSPALGLPDITKPFELFIDENSGFAKGVLVQKLGPWKRPVAYLSKKLDTVASGWPPCLRMVAAIAILVKDAGKLTLGQPLTILTSHPVEALVRQPPNKWLSNARMTHYQAMLLDAERVHFGPTVSLNPATLLPLPSGGNHHDCLQILAETHGTRPDLTDQPLPDADLTWYTDGSSFIRNGEREAGAAVTTESEVIWAAPLPPGTSAQRAELIALTQALKMAEGKKLTVYTDSRYAFATTHVHGEIYRRRGWLTSEGKEIKNKNEILALLEALFLPKRLSIIHCPGHQKGDSPQAKGNRLADDTAKKAATETHSSLTVLPAGKRTADGSEFEKRTADGSEFESPKKKAKVE

SEQ ID NO: 1187 - protein, 2095 aa, synthetic construct
MPAAKRVKLDGGDKKYSIGLDIGTNSVGWAVITDEYKVPSKKFKVLGNTDRHSIKKNLIGALLFDSGETAEATRLKRTARRRYTRRKNRICYLQEIFSNEMAKVDDSFFHRLEESFLVEEDKKHERHPIFGNIVDEVAYHEKYPTIYHLRKKLVDSTDKADLRLIYLALAHMIKFRGHFLIEGDLNPDNSDVDKLFIQLVQTYNQLFEENPINASGVDAKAILSARLSKSRRLENLIAQLPGEKKNGLFGNLIALSLGLTPNFKSNFDLAEDAKLQLSKDTYDDDLDNLLAQIGDQYADLFLAAKNLSDAILLSDILRVNTEITKAPLSASMIKRYDEHHQDLTLLKALVRQQLPEKYKEIFFDQSKNGYAGYIDGGASQEEFYKFIKPILEKMDGTEELLVKLNREDLLRKQRTFDNGSIPHQIHLGELHAILRRQEDFYPFLKDNREKIEKILTFRIPYYVGPLARGNSRFAWMTRKSEETITPWNFEEVVDKGASAQSFIERMTNFDKNLPNEKVLPKHSLLYEYFTVYNELTKVKYVTEGMRKPAFLSGEQKKAIVDLLFKTNRKVTVKQLKEDYFKKIECFDSVEISGVEDRFNASLGTYHDLLKIIKDKDFLDNEENEDILEDIVLTLTLFEDREMIEERLKTYAHLFDDKVMKQLKRRRYTGWGRLSRKLINGIRDKQSGKTILDFLKSDGFANRNFMQLIHDDSLTFKEDIQKAQVSGQGDSLHEHIANLAGSPAIKKGILQTVKVVDELVKVMGRHKPENIVIEMARENQTTQKGQKNSRERMKRIEEGIKELGSQILKEHPVENTQLQNEKLYLYYLQNGRDMYVDQELDINRLSDYDVDHIVPQSFLKDDSIDNKVLTRSDKARGKSDNVPSEEVVKKMKNYWRQLLNAKLITQRKFDNLTKAERGGLSELDKAGFIKRQLVETRQITKHVAQILDSRMNTKYDENDKLIREVKVITLKSKLVSDFRKDFQFYKVREINNYHHAHDAYLNAVVGTALIKKYPKLESEFVYGDYKVYDVRKMIAKSEQEIGKATAKYFFYSNIMNFFKTEITLANGEIRKRPLIETNGETGEIVWDKGRDFATVRKVLSMPQVNIVKKTEVQTGGFSKESILPKRNSDKLIARKKDWDPKKYGGFDSPTVAYSVLVVAKVEKGKSKKLKSVKELLGITIMERSSFEKNPIDFLEAKGYKEVKKDLIIKLPKYSLFELENGRKRMLASAGELQKGNELALPSKYVNFLYLASHYEKLKGSPEDNEQKQLFVEQHKHYLDEIIEQISEFSKRVILADANLDKVLSAYNKHRDKPIREQAENIIHLFTLTNLGAPAAFKYFDTTIDRKRYTSTKEVLDATLIHQSITGLYETRIDLSQLGGDGGGGGGGSEAAAKGGTLQLEEEYRLFEPESTQKQEMDIWLKNFPQAWAETGGMGTAHCQAPVLIQLKATATPISIRQYPMPHEAYQGIKPHIRRMLDQGILKPCQSPWNTPLLPVKKPGTEDYRPVQDLREVNKRVEDIHPTVPNPYNLLSTLPPSHPWYTVLDLKDAFFCLRLHSESQLLFAFEWRDPEIGLSGQLTWTRLPQGFKNSPTLFNEALHSDLADFRVRYPALVLLQYVDDLLLAAATRTECLEGTKALLETLGNKGYRASAKKAQICLQEVTYLGYSLKDGQRWLTKARKEAILSIPVPKNSRQVREFLGTAGYCRLWIPGFAELAAPLYPLTRPGTLFQWGTEQQLAFEDIKKALLSSPALGLPDITKPFELFIDENSGFAKGVLVQKLGPWKRPVAYLSKKLDTVASGWPPCLRMVAAIAILVKDAGKLTLGQPLTILTSHPVEALVRQPPNKWLSNARMTHYQAMLLDAERVHFGPTVSLNPATLLPLPSGGNHHDCLQILAETHGTRPDLTDQPLPDADLTWYTDGSSFIRNGEREAGAAVTTESEVIWAAPLPPGTSAQRAELIALTQALKMAEGKKLTVYTDSRYAFATTHVHGEIYRRRGWLTSEGKEIKNKNEILALLEALFLPKRLSIIHCPGHQKGDSPQAKGNRLADDTAKKAATETHSSLTVLPAGKRTADGSEFEKRTADGSEFESPKKKAKVE

SEQ ID NO: 1188 - protein, 2090 aa, synthetic construct
MPAAKRVKLDGGDKKYSIGLDIGTNSVGWAVITDEYKVPSKKFKVLGNTDRHSIKKNLIGALLFDSGETAEATRLKRTARRRYTRRKNRICYLQEIFSNEMAKVDDSFFHRLEESFLVEEDKKHERHPIFGNIVDEVAYHEKYPTIYHLRKKLVDSTDKADLRLIYLALAHMIKFRGHFLIEGDLNPDNSDVDKLFIQLVQTYNQLFEENPINASGVDAKAILSARLSKSRRLENLIAQLPGEKKNGLFGNLIALSLGLTPNFKSNFDLAEDAKLQLSKDTYDDDLDNLLAQIGDQYADLFLAAKNLSDAILLSDILRVNTEITKAPLSASMIKRYDEHHQDLTLLKALVRQQLPEKYKEIFFDQSKNGYAGYIDGGASQEEFYKFIKPILEKMDGTEELLVKLNREDLLRKQRTFDNGSIPHQIHLGELHAILRRQEDFYPFLKDNREKIEKILTFRIPYYVGPLARGNSRFAWMTRKSEETITPWNFEEVVDKGASAQSFIERMTNFDKNLPNEKVLPKHSLLYEYFTVYNELTKVKYVTEGMRKPAFLSGEQKKAIVDLLFKTNRKVTVKQLKEDYFKKIECFDSVEISGVEDRFNASLGTYHDLLKIIKDKDFLDNEENEDILEDIVLTLTLFEDREMIEERLKTYAHLFDDKVMKQLKRRRYTGWGRLSRKLINGIRDKQSGKTILDFLKSDGFANRNFMQLIHDDSLTFKEDIQKAQVSGQGDSLHEHIANLAGSPAIKKGILQTVKVVDELVKVMGRHKPENIVIEMARENQTTQKGQKNSRERMKRIEEGIKELGSQILKEHPVENTQLQNEKLYLYYLQNGRDMYVDQELDINRLSDYDVDHIVPQSFLKDDSIDNKVLTRSDKARGKSDNVPSEEVVKKMKNYWRQLLNAKLITQRKFDNLTKAERGGLSELDKAGFIKRQLVETRQITKHVAQILDSRMNTKYDENDKLIREVKVITLKSKLVSDFRKDFQFYKVREINNYHHAHDAYLNAVVGTALIKKYPKLESEFVYGDYKVYDVRKMIAKSEQEIGKATAKYFFYSNIMNFFKTEITLANGEIRKRPLIETNGETGEIVWDKGRDFATVRKVLSMPQVNIVKKTEVQTGGFSKESILPKRNSDKLIARKKDWDPKKYGGFDSPTVAYSVLVVAKVEKGKSKKLKSVKELLGITIMERSSFEKNPIDFLEAKGYKEVKKDLIIKLPKYSLFELENGRKRMLASAGELQKGNELALPSKYVNFLYLASHYEKLKGSPEDNEQKQLFVEQHKHYLDEIIEQISEFSKRVILADANLDKVLSAYNKHRDKPIREQAENIIHLFTLTNLGAPAAFKYFDTTIDRKRYTSTKEVLDATLIHQSITGLYETRIDLSQLGGDGGGGGGGGGGTLQLEEEYRLFEPESTQKQEMDIWLKNFPQAWAETGGMGTAHCQAPVLIQLKATATPISIRQYPMPHEAYQGIKPHIRRMLDQGILKPCQSPWNTPLLPVKKPGTEDYRPVQDLREVNKRVEDIHPTVPNPYNLLSTLPPSHPWYTVLDLKDAFFCLRLHSESQLLFAFEWRDPEIGLSGQLTWTRLPQGFKNSPTLFNEALHSDLADFRVRYPALVLLQYVDDLLLAAATRTECLEGTKALLETLGNKGYRASAKKAQICLQEVTYLGYSLKDGQRWLTKARKEAILSIPVPKNSRQVREFLGTAGYCRLWIPGFAELAAPLYPLTRPGTLFQWGTEQQLAFEDIKKALLSSPALGLPDITKPFELFIDENSGFAKGVLVQKLGPWKRPVAYLSKKLDTVASGWPPCLRMVAAIAILVKDAGKLTLGQPLTILTSHPVEALVRQPPNKWLSNARMTHYQAMLLDAERVHFGPTVSLNPATLLPLPSGGNHHDCLQILAETHGTRPDLTDQPLPDADLTWYTDGSSFIRNGEREAGAAVTTESEVIWAAPLPPGTSAQRAELIALTQALKMAEGKKLTVYTDSRYAFATTHVHGEIYRRRGWLTSEGKEIKNKNEILALLEALFLPKRLSIIHCPGHQKGDSPQAKGNRLADDTAKKAATETHSSLTVLPAGKRTADGSEFEKRTADGSEFESPKKKAKVE

SEQ ID NO: 1189 - protein, 2093 aa, synthetic construct
MPAAKRVKLDGGDKKYSIGLDIGTNSVGWAVITDEYKVPSKKFKVLGNTDRHSIKKNLIGALLFDSGETAEATRLKRTARRRYTRRKNRICYLQEIFSNEMAKVDDSFFHRLEESFLVEEDKKHERHPIFGNIVDEVAYHEKYPTIYHLRKKLVDSTDKADLRLIYLALAHMIKFRGHFLIEGDLNPDNSDVDKLFIQLVQTYNQLFEENPINASGVDAKAILSARLSKSRRLENLIAQLPGEKKNGLFGNLIALSLGLTPNFKSNFDLAEDAKLQLSKDTYDDDLDNLLAQIGDQYADLFLAAKNLSDAILLSDILRVNTEITKAPLSASMIKRYDEHHQDLTLLKALVRQQLPEKYKEIFFDQSKNGYAGYIDGGASQEEFYKFIKPILEKMDGTEELLVKLNREDLLRKQRTFDNGSIPHQIHLGELHAILRRQEDFYPFLKDNREKIEKILTFRIPYYVGPLARGNSRFAWMTRKSEETITPWNFEEVVDKGASAQSFIERMTNFDKNLPNEKVLPKHSLLYEYFTVYNELTKVKYVTEGMRKPAFLSGEQKKAIVDLLFKTNRKVTVKQLKEDYFKKIECFDSVEISGVEDRFNASLGTYHDLLKIIKDKDFLDNEENEDILEDIVLTLTLFEDREMIEERLKTYAHLFDDKVMKQLKRRRYTGWGRLSRKLINGIRDKQSGKTILDFLKSDGFANRNFMQLIHDDSLTFKEDIQKAQVSGQGDSLHEHIANLAGSPAIKKGILQTVKVVDELVKVMGRHKPENIVIEMARENQTTQKGQKNSRERMKRIEEGIKELGSQILKEHPVENTQLQNEKLYLYYLQNGRDMYVDQELDINRLSDYDVDHIVPQSFLKDDSIDNKVLTRSDKARGKSDNVPSEEVVKKMKNYWRQLLNAKLITQRKFDNLTKAERGGLSELDKAGFIKRQLVETRQITKHVAQILDSRMNTKYDENDKLIREVKVITLKSKLVSDFRKDFQFYKVREINNYHHAHDAYLNAVVGTALIKKYPKLESEFVYGDYKVYDVRKMIAKSEQEIGKATAKYFFYSNIMNFFKTEITLANGEIRKRPLIETNGETGEIVWDKGRDFATVRKVLSMPQVNIVKKTEVQTGGFSKESILPKRNSDKLIARKKDWDPKKYGGFDSPTVAYSVLVVAKVEKGKSKKLKSVKELLGITIMERSSFEKNPIDFLEAKGYKEVKKDLIIKLPKYSLFELENGRKRMLASAGELQKGNELALPSKYVNFLYLASHYEKLKGSPEDNEQKQLFVEQHKHYLDEIIEQISEFSKRVILADANLDKVLSAYNKHRDKPIREQAENIIHLFTLTNLGAPAAFKYFDTTIDRKRYTSTKEVLDATLIHQSITGLYETRIDLSQLGGDGGGGGGSSPAPGGTLQLEEEYRLFEPESTQKQEMDIWLKNFPQAWAETGGMGTAHCQAPVLIQLKATATPISIRQYPMPHEAYQGIKPHIRRMLDQGILKPCQSPWNTPLLPVKKPGTEDYRPVQDLREVNKRVEDIHPTVPNPYNLLSTLPPSHPWYTVLDLKDAFFCLRLHSESQLLFAFEWRDPEIGLSGQLTWTRLPQGFKNSPTLFNEALHSDLADFRVRYPALVLLQYVDDLLLAAATRTECLEGTKALLETLGNKGYRASAKKAQICLQEVTYLGYSLKDGQRWLTKARKEAILSIPVPKNSRQVREFLGTAGYCRLWIPGFAELAAPLYPLTRPGTLFQWGTEQQLAFEDIKKALLSSPALGLPDITKPFELFIDENSGFAKGVLVQKLGPWKRPVAYLSKKLDTVASGWPPCLRMVAAIAILVKDAGKLTLGQPLTILTSHPVEALVRQPPNKWLSNARMTHYQAMLLDAERVHFGPTVSLNPATLLPLPSGGNHHDCLQILAETHGTRPDLTDQPLPDADLTWYTDGSSFIRNGEREAGAAVTTESEVIWAAPLPPGTSAQRAELIALTQALKMAEGKKLTVYTDSRYAFATTHVHGEIYRRRGWLTSEGKEIKNKNEILALLEALFLPKRLSIIHCPGHQKGDSPQAKGNRLADDTAKKAATETHSSLTVLPAGKRTADGSEFEKRTADGSEFESPKKKAKVE

SEQ ID NO: 1190 - protein, 2093 aa, synthetic construct
MPAAKRVKLDGGDKKYSIGLDIGTNSVGWAVITDEYKVPSKKFKVLGNTDRHSIKKNLIGALLFDSGETAEATRLKRTARRRYTRRKNRICYLQEIFSNEMAKVDDSFFHRLEESFLVEEDKKHERHPIFGNIVDEVAYHEKYPTIYHLRKKLVDSTDKADLRLIYLALAHMIKFRGHFLIEGDLNPDNSDVDKLFIQLVQTYNQLFEENPINASGVDAKAILSARLSKSRRLENLIAQLPGEKKNGLFGNLIALSLGLTPNFKSNFDLAEDAKLQLSKDTYDDDLDNLLAQIGDQYADLFLAAKNLSDAILLSDILRVNTEITKAPLSASMIKRYDEHHQDLTLLKALVRQQLPEKYKEIFFDQSKNGYAGYIDGGASQEEFYKFIKPILEKMDGTEELLVKLNREDLLRKQRTFDNGSIPHQIHLGELHAILRRQEDFYPFLKDNREKIEKILTFRIPYYVGPLARGNSRFAWMTRKSEETITPWNFEEVVDKGASAQSFIERMTNFDKNLPNEKVLPKHSLLYEYFTVYNELTKVKYVTEGMRKPAFLSGEQKKAIVDLLFKTNRKVTVKQLKEDYFKKIECFDSVEISGVEDRFNASLGTYHDLLKIIKDKDFLDNEENEDILEDIVLTLTLFEDREMIEERLKTYAHLFDDKVMKQLKRRRYTGWGRLSRKLINGIRDKQSGKTILDFLKSDGFANRNFMQLIHDDSLTFKEDIQKAQVSGQGDSLHEHIANLAGSPAIKKGILQTVKVVDELVKVMGRHKPENIVIEMARENQTTQKGQKNSRERMKRIEEGIKELGSQILKEHPVENTQLQNEKLYLYYLQNGRDMYVDQELDINRLSDYDVDHIVPQSFLKDDSIDNKVLTRSDKARGKSDNVPSEEVVKKMKNYWRQLLNAKLITQRKFDNLTKAERGGLSELDKAGFIKRQLVETRQITKHVAQILDSRMNTKYDENDKLIREVKVITLKSKLVSDFRKDFQFYKVREINNYHHAHDAYLNAVVGTALIKKYPKLESEFVYGDYKVYDVRKMIAKSEQEIGKATAKYFFYSNIMNFFKTEITLANGEIRKRPLIETNGETGEIVWDKGRDFATVRKVLSMPQVNIVKKTEVQTGGFSKESILPKRNSDKLIARKKDWDPKKYGGFDSPTVAYSVLVVAKVEKGKSKKLKSVKELLGITIMERSSFEKNPIDFLEAKGYKEVKKDLIIKLPKYSLFELENGRKRMLASAGELQKGNELALPSKYVNFLYLASHYEKLKGSPEDNEQKQLFVEQHKHYLDEIIEQISEFSKRVILADANLDKVLSAYNKHRDKPIREQAENIIHLFTLTNLGAPAAFKYFDTTIDRKRYTSTKEVLDATLIHQSITGLYETRIDLSQLGGDGGGGSGGGPAPGGTLQLEEEYRLFEPESTQKQEMDIWLKNFPQAWAETGGMGTAHCQAPVLIQLKATATPISIRQYPMPHEAYQGIKPHIRRMLDQGILKPCQSPWNTPLLPVKKPGTEDYRPVQDLREVNKRVEDIHPTVPNPYNLLSTLPPSHPWYTVLDLKDAFFCLRLHSESQLLFAFEWRDPEIGLSGQLTWTRLPQGFKNSPTLFNEALHSDLADFRVRYPALVLLQYVDDLLLAAATRTECLEGTKALLETLGNKGYRASAKKAQICLQEVTYLGYSLKDGQRWLTKARKEAILSIPVPKNSRQVREFLGTAGYCRLWIPGFAELAAPLYPLTRPGTLFQWGTEQQLAFEDIKKALLSSPALGLPDITKPFELFIDENSGFAKGVLVQKLGPWKRPVAYLSKKLDTVASGWPPCLRMVAAIAILVKDAGKLTLGQPLTILTSHPVEALVRQPPNKWLSNARMTHYQAMLLDAERVHFGPTVSLNPATLLPLPSGGNHHDCLQILAETHGTRPDLTDQPLPDADLTWYTDGSSFIRNGEREAGAAVTTESEVIWAAPLPPGTSAQRAELIALTQALKMAEGKKLTVYTDSRYAFATTHVHGEIYRRRGWLTSEGKEIKNKNEILALLEALFLPKRLSIIHCPGHQKGDSPQAKGNRLADDTAKKAATETHSSLTVLPAGKRTADGSEFEKRTADGSEFESPKKKAKVE

SEQ ID NO: 1191 - protein, 2095 aa, synthetic construct
MPAAKRVKLDGGDKKYSIGLDIGTNSVGWAVITDEYKVPSKKFKVLGNTDRHSIKKNLIGALLFDSGETAEATRLKRTARRRYTRRKNRICYLQEIFSNEMAKVDDSFFHRLEESFLVEEDKKHERHPIFGNIVDEVAYHEKYPTIYHLRKKLVDSTDKADLRLIYLALAHMIKFRGHFLIEGDLNPDNSDVDKLFIQLVQTYNQLFEENPINASGVDAKAILSARLSKSRRLENLIAQLPGEKKNGLFGNLIALSLGLTPNFKSNFDLAEDAKLQLSKDTYDDDLDNLLAQIGDQYADLFLAAKNLSDAILLSDILRVNTEITKAPLSASMIKRYDEHHQDLTLLKALVRQQLPEKYKEIFFDQSKNGYAGYIDGGASQEEFYKFIKPILEKMDGTEELLVKLNREDLLRKQRTFDNGSIPHQIHLGELHAILRRQEDFYPFLKDNREKIEKILTFRIPYYVGPLARGNSRFAWMTRKSEETITPWNFEEVVDKGASAQSFIERMTNFDKNLPNEKVLPKHSLLYEYFTVYNELTKVKYVTEGMRKPAFLSGEQKKAIVDLLFKTNRKVTVKQLKEDYFKKIECFDSVEISGVEDRFNASLGTYHDLLKIIKDKDFLDNEENEDILEDIVLTLTLFEDREMIEERLKTYAHLFDDKVMKQLKRRRYTGWGRLSRKLINGIRDKQSGKTILDFLKSDGFANRNFMQLIHDDSLTFKEDIQKAQVSGQGDSLHEHIANLAGSPAIKKGILQTVKVVDELVKVMGRHKPENIVIEMARENQTTQKGQKNSRERMKRIEEGIKELGSQILKEHPVENTQLQNEKLYLYYLQNGRDMYVDQELDINRLSDYDVDHIVPQSFLKDDSIDNKVLTRSDKARGKSDNVPSEEVVKKMKNYWRQLLNAKLITQRKFDNLTKAERGGLSELDKAGFIKRQLVETRQITKHVAQILDSRMNTKYDENDKLIREVKVITLKSKLVSDFRKDFQFYKVREINNYHHAHDAYLNAVVGTALIKKYPKLESEFVYGDYKVYDVRKMIAKSEQEIGKATAKYFFYSNIMNFFKTEITLANGEIRKRPLIETNGETGEIVWDKGRDFATVRKVLSMPQVNIVKKTEVQTGGFSKESILPKRNSDKLIARKKDWDPKKYGGFDSPTVAYSVLVVAKVEKGKSKKLKSVKELLGITIMERSSFEKNPIDFLEAKGYKEVKKDLIIKLPKYSLFELENGRKRMLASAGELQKGNELALPSKYVNFLYLASHYEKLKGSPEDNEQKQLFVEQHKHYLDEIIEQISEFSKRVILADANLDKVLSAYNKHRDKPIREQAENIIHLFTLTNLGAPAAFKYFDTTIDRKRYTSTKEVLDATLIHQSITGLYETRIDLSQLGGDGGGSSPAPEAAAKGGTLQLEEEYRLFEPESTQKQEMDIWLKNFPQAWAETGGMGTAHCQAPVLIQLKATATPISIRQYPMPHEAYQGIKPHIRRMLDQGILKPCQSPWNTPLLPVKKPGTEDYRPVQDLREVNKRVEDIHPTVPNPYNLLSTLPPSHPWYTVLDLKDAFFCLRLHSESQLLFAFEWRDPEIGLSGQLTWTRLPQGFKNSPTLFNEALHSDLADFRVRYPALVLLQYVDDLLLAAATRTECLEGTKALLETLGNKGYRASAKKAQICLQEVTYLGYSLKDGQRWLTKARKEAILSIPVPKNSRQVREFLGTAGYCRLWIPGFAELAAPLYPLTRPGTLFQWGTEQQLAFEDIKKALLSSPALGLPDITKPFELFIDENSGFAKGVLVQKLGPWKRPVAYLSKKLDTVASGWPPCLRMVAAIAILVKDAGKLTLGQPLTILTSHPVEALVRQPPNKWLSNARMTHYQAMLLDAERVHFGPTVSLNPATLLPLPSGGNHHDCLQILAETHGTRPDLTDQPLPDADLTWYTDGSSFIRNGEREAGAAVTTESEVIWAAPLPPGTSAQRAELIALTQALKMAEGKKLTVYTDSRYAFATTHVHGEIYRRRGWLTSEGKEIKNKNEILALLEALFLPKRLSIIHCPGHQKGDSPQAKGNRLADDTAKKAATETHSSLTVLPAGKRTADGSEFEKRTADGSEFESPKKKAKVE

SEQ ID NO: 1192 - protein, 2093 aa, synthetic construct
MPAAKRVKLDGGDKKYSIGLDIGTNSVGWAVITDEYKVPSKKFKVLGNTDRHSIKKNLIGALLFDSGETAEATRLKRTARRRYTRRKNRICYLQEIFSNEMAKVDDSFFHRLEESFLVEEDKKHERHPIFGNIVDEVAYHEKYPTIYHLRKKLVDSTDKADLRLIYLALAHMIKFRGHFLIEGDLNPDNSDVDKLFIQLVQTYNQLFEENPINASGVDAKAILSARLSKSRRLENLIAQLPGEKKNGLFGNLIALSLGLTPNFKSNFDLAEDAKLQLSKDTYDDDLDNLLAQIGDQYADLFLAAKNLSDAILLSDILRVNTEITKAPLSASMIKRYDEHHQDLTLLKALVRQQLPEKYKEIFFDQSKNGYAGYIDGGASQEEFYKFIKPILEKMDGTEELLVKLNREDLLRKQRTFDNGSIPHQIHLGELHAILRRQEDFYPFLKDNREKIEKILTFRIPYYVGPLARGNSRFAWMTRKSEETITPWNFEEVVDKGASAQSFIERMTNFDKNLPNEKVLPKHSLLYEYFTVYNELTKVKYVTEGMRKPAFLSGEQKKAIVDLLFKTNRKVTVKQLKEDYFKKIECFDSVEISGVEDRFNASLGTYHDLLKIIKDKDFLDNEENEDILEDIVLTLTLFEDREMIEERLKTYAHLFDDKVMKQLKRRRYTGWGRLSRKLINGIRDKQSGKTILDFLKSDGFANRNFMQLIHDDSLTFKEDIQKAQVSGQGDSLHEHIANLAGSPAIKKGILQTVKVVDELVKVMGRHKPENIVIEMARENQTTQKGQKNSRERMKRIEEGIKELGSQILKEHPVENTQLQNEKLYLYYLQNGRDMYVDQELDINRLSDYDVDHIVPQSFLKDDSIDNKVLTRSDKARGKSDNVPSEEVVKKMKNYWRQLLNAKLITQRKFDNLTKAERGGLSELDKAGFIKRQLVETRQITKHVAQILDSRMNTKYDENDKLIREVKVITLKSKLVSDFRKDFQFYKVREINNYHHAHDAYLNAVVGTALIKKYPKLESEFVYGDYKVYDVRKMIAKSEQEIGKATAKYFFYSNIMNFFKTEITLANGEIRKRPLIETNGETGEIVWDKGRDFATVRKVLSMPQVNIVKKTEVQTGGFSKESILPKRNSDKLIARKKDWDPKKYGGFDSPTVAYSVLVVAKVEKGKSKKLKSVKELLGITIMERSSFEKNPIDFLEAKGYKEVKKDLIIKLPKYSLFELENGRKRMLASAGELQKGNELALPSKYVNFLYLASHYEKLKGSPEDNEQKQLFVEQHKHYLDEIIEQISEFSKRVILADANLDKVLSAYNKHRDKPIREQAENIIHLFTLTNLGAPAAFKYFDTTIDRKRYTSTKEVLDATLIHQSITGLYETRIDLSQLGGDGGPAPGSSGGGGGTLQLEEEYRLFEPESTQKQEMDIWLKNFPQAWAETGGMGTAHCQAPVLIQLKATATPISIRQYPMPHEAYQGIKPHIRRMLDQGILKPCQSPWNTPLLPVKKPGTEDYRPVQDLREVNKRVEDIHPTVPNPYNLLSTLPPSHPWYTVLDLKDAFFCLRLHSESQLLFAFEWRDPEIGLSGQLTWTRLPQGFKNSPTLFNEALHSDLADFRVRYPALVLLQYVDDLLLAAATRTECLEGTKALLETLGNKGYRASAKKAQICLQEVTYLGYSLKDGQRWLTKARKEAILSIPVPKNSRQVREFLGTAGYCRLWIPGFAELAAPLYPLTRPGTLFQWGTEQQLAFEDIKKALLSSPALGLPDITKPFELFIDENSGFAKGVLVQKLGPWKRPVAYLSKKLDTVASGWPPCLRMVAAIAILVKDAGKLTLGQPLTILTSHPVEALVRQPPNKWLSNARMTHYQAMLLDAERVHFGPTVSLNPATLLPLPSGGNHHDCLQILAETHGTRPDLTDQPLPDADLTWYTDGSSFIRNGEREAGAAVTTESEVIWAAPLPPGTSAQRAELIALTQALKMAEGKKLTVYTDSRYAFATTHVHGEIYRRRGWLTSEGKEIKNKNEILALLEALFLPKRLSIIHCPGHQKGDSPQAKGNRLADDTAKKAATETHSSLTVLPAGKRTADGSEFEKRTADGSEFESPKKKAKVE

SEQ ID NO: 1193 - protein, 2090 aa, synthetic construct
MPAAKRVKLDGGDKKYSIGLDIGTNSVGWAVITDEYKVPSKKFKVLGNTDRHSIKKNLIGALLFDSGETAEATRLKRTARRRYTRRKNRICYLQEIFSNEMAKVDDSFFHRLEESFLVEEDKKHERHPIFGNIVDEVAYHEKYPTIYHLRKKLVDSTDKADLRLIYLALAHMIKFRGHFLIEGDLNPDNSDVDKLFIQLVQTYNQLFEENPINASGVDAKAILSARLSKSRRLENLIAQLPGEKKNGLFGNLIALSLGLTPNFKSNFDLAEDAKLQLSKDTYDDDLDNLLAQIGDQYADLFLAAKNLSDAILLSDILRVNTEITKAPLSASMIKRYDEHHQDLTLLKALVRQQLPEKYKEIFFDQSKNGYAGYIDGGASQEEFYKFIKPILEKMDGTEELLVKLNREDLLRKQRTFDNGSIPHQIHLGELHAILRRQEDFYPFLKDNREKIEKILTFRIPYYVGPLARGNSRFAWMTRKSEETITPWNFEEVVDKGASAQSFIERMTNFDKNLPNEKVLPKHSLLYEYFTVYNELTKVKYVTEGMRKPAFLSGEQKKAIVDLLFKTNRKVTVKQLKEDYFKKIECFDSVEISGVEDRFNASLGTYHDLLKIIKDKDFLDNEENEDILEDIVLTLTLFEDREMIEERLKTYAHLFDDKVMKQLKRRRYTGWGRLSRKLINGIRDKQSGKTILDFLKSDGFANRNFMQLIHDDSLTFKEDIQKAQVSGQGDSLHEHIANLAGSPAIKKGILQTVKVVDELVKVMGRHKPENIVIEMARENQTTQKGQKNSRERMKRIEEGIKELGSQILKEHPVENTQLQNEKLYLYYLQNGRDMYVDQELDINRLSDYDVDHIVPQSFLKDDSIDNKVLTRSDKARGKSDNVPSEEVVKKMKNYWRQLLNAKLITQRKFDNLTKAERGGLSELDKAGFIKRQLVETRQITKHVAQILDSRMNTKYDENDKLIREVKVITLKSKLVSDFRKDFQFYKVREINNYHHAHDAYLNAVVGTALIKKYPKLESEFVYGDYKVYDVRKMIAKSEQEIGKATAKYFFYSNIMNFFKTEITLANGEIRKRPLIETNGETGEIVWDKGRDFATVRKVLSMPQVNIVKKTEVQTGGFSKESILPKRNSDKLIARKKDWDPKKYGGFDSPTVAYSVLVVAKVEKGKSKKLKSVKELLGITIMERSSFEKNPIDFLEAKGYKEVKKDLIIKLPKYSLFELENGRKRMLASAGELQKGNELALPSKYVNFLYLASHYEKLKGSPEDNEQKQLFVEQHKHYLDEIIEQISEFSKRVILADANLDKVLSAYNKHRDKPIREQAENIIHLFTLTNLGAPAAFKYFDTTIDRKRYTSTKEVLDATLIHQSITGLYETRIDLSQLGGDGGGGSGGSGGTLQLEEEYRLFEPESTQKQEMDIWLKNFPQAWAETGGMGTAHCQAPVLIQLKATATPISIRQYPMPHEAYQGIKPHIRRMLDQGILKPCQSPWNTPLLPVKKPGTEDYRPVQDLREVNKRVEDIHPTVPNPYNLLSTLPPSHPWYTVLDLKDAFFCLRLHSESQLLFAFEWRDPEIGLSGQLTWTRLPQGFKNSPTLFNEALHSDLADFRVRYPALVLLQYVDDLLLAAATRTECLEGTKALLETLGNKGYRASAKKAQICLQEVTYLGYSLKDGQRWLTKARKEAILSIPVPKNSRQVREFLGTAGYCRLWIPGFAELAAPLYPLTRPGTLFQWGTEQQLAFEDIKKALLSSPALGLPDITKPFELFIDENSGFAKGVLVQKLGPWKRPVAYLSKKLDTVASGWPPCLRMVAAIAILVKDAGKLTLGQPLTILTSHPVEALVRQPPNKWLSNARMTHYQAMLLDAERVHFGPTVSLNPATLLPLPSGGNHHDCLQILAETHGTRPDLTDQPLPDADLTWYTDGSSFIRNGEREAGAAVTTESEVIWAAPLPPGTSAQRAELIALTQALKMAEGKKLTVYTDSRYAFATTHVHGEIYRRRGWLTSEGKEIKNKNEILALLEALFLPKRLSIIHCPGHQKGDSPQAKGNRLADDTAKKAATETHSSLTVLPAGKRTADGSEFEKRTADGSEFESPKKKAKVE

SEQ ID NO: 1194 - protein, 2093 aa, synthetic construct
MPAAKRVKLDGGDKKYSIGLDIGTNSVGWAVITDEYKVPSKKFKVLGNTDRHSIKKNLIGALLFDSGETAEATRLKRTARRRYTRRKNRICYLQEIFSNEMAKVDDSFFHRLEESFLVEEDKKHERHPIFGNIVDEVAYHEKYPTIYHLRKKLVDSTDKADLRLIYLALAHMIKFRGHFLIEGDLNPDNSDVDKLFIQLVQTYNQLFEENPINASGVDAKAILSARLSKSRRLENLIAQLPGEKKNGLFGNLIALSLGLTPNFKSNFDLAEDAKLQLSKDTYDDDLDNLLAQIGDQYADLFLAAKNLSDAILLSDILRVNTEITKAPLSASMIKRYDEHHQDLTLLKALVRQQLPEKYKEIFFDQSKNGYAGYIDGGASQEEFYKFIKPILEKMDGTEELLVKLNREDLLRKQRTFDNGSIPHQIHLGELHAILRRQEDFYPFLKDNREKIEKILTFRIPYYVGPLARGNSRFAWMTRKSEETITPWNFEEVVDKGASAQSFIERMTNFDKNLPNEKVLPKHSLLYEYFTVYNELTKVKYVTEGMRKPAFLSGEQKKAIVDLLFKTNRKVTVKQLKEDYFKKIECFDSVEISGVEDRFNASLGTYHDLLKIIKDKDFLDNEENEDILEDIVLTLTLFEDREMIEERLKTYAHLFDDKVMKQLKRRRYTGWGRLSRKLINGIRDKQSGKTILDFLKSDGFANRNFMQLIHDDSLTFKEDIQKAQVSGQGDSLHEHIANLAGSPAIKKGILQTVKVVDELVKVMGRHKPENIVIEMARENQTTQKGQKNSRERMKRIEEGIKELGSQILKEHPVENTQLQNEKLYLYYLQNGRDMYVDQELDINRLSDYDVDHIVPQSFLKDDSIDNKVLTRSDKARGKSDNVPSEEVVKKMKNYWRQLLNAKLITQRKFDNLTKAERGGLSELDKAGFIKRQLVETRQITKHVAQILDSRMNTKYDENDKLIREVKVITLKSKLVSDFRKDFQFYKVREINNYHHAHDAYLNAVVGTALIKKYPKLESEFVYGDYKVYDVRKMIAKSEQEIGKATAKYFFYSNIMNFFKTEITLANGEIRKRPLIETNGETGEIVWDKGRDFATVRKVLSMPQVNIVKKTEVQTGGFSKESILPKRNSDKLIARKKDWDPKKYGGFDSPTVAYSVLVVAKVEKGKSKKLKSVKELLGITIMERSSFEKNPIDFLEAKGYKEVKKDLIIKLPKYSLFELENGRKRMLASAGELQKGNELALPSKYVNFLYLASHYEKLKGSPEDNEQKQLFVEQHKHYLDEIIEQISEFSKRVILADANLDKVLSAYNKHRDKPIREQAENIIHLFTLTNLGAPAAFKYFDTTIDRKRYTSTKEVLDATLIHQSITGLYETRIDLSQLGGDGGGGSPAPGGGGGTLQLEEEYRLFEPESTQKQEMDIWLKNFPQAWAETGGMGTAHCQAPVLIQLKATATPISIRQYPMPHEAYQGIKPHIRRMLDQGILKPCQSPWNTPLLPVKKPGTEDYRPVQDLREVNKRVEDIHPTVPNPYNLLSTLPPSHPWYTVLDLKDAFFCLRLHSESQLLFAFEWRDPEIGLSGQLTWTRLPQGFKNSPTLFNEALHSDLADFRVRYPALVLLQYVDDLLLAAATRTECLEGTKALLETLGNKGYRASAKKAQICLQEVTYLGYSLKDGQRWLTKARKEAILSIPVPKNSRQVREFLGTAGYCRLWIPGFAELAAPLYPLTRPGTLFQWGTEQQLAFEDIKKALLSSPALGLPDITKPFELFIDENSGFAKGVLVQKLGPWKRPVAYLSKKLDTVASGWPPCLRMVAAIAILVKDAGKLTLGQPLTILTSHPVEALVRQPPNKWLSNARMTHYQAMLLDAERVHFGPTVSLNPATLLPLPSGGNHHDCLQILAETHGTRPDLTDQPLPDADLTWYTDGSSFIRNGEREAGAAVTTESEVIWAAPLPPGTSAQRAELIALTQALKMAEGKKLTVYTDSRYAFATTHVHGEIYRRRGWLTSEGKEIKNKNEILALLEALFLPKRLSIIHCPGHQKGDSPQAKGNRLADDTAKKAATETHSSLTVLPAGKRTADGSEFEKRTADGSEFESPKKKAKVE

SEQ ID NO: 1195 - protein, 2089 aa, synthetic construct
MPAAKRVKLDGGDKKYSIGLDIGTNSVGWAVITDEYKVPSKKFKVLGNTDRHSIKKNLIGALLFDSGETAEATRLKRTARRRYTRRKNRICYLQEIFSNEMAKVDDSFFHRLEESFLVEEDKKHERHPIFGNIVDEVAYHEKYPTIYHLRKKLVDSTDKADLRLIYLALAHMIKFRGHFLIEGDLNPDNSDVDKLFIQLVQTYNQLFEENPINASGVDAKAILSARLSKSRRLENLIAQLPGEKKNGLFGNLIALSLGLTPNFKSNFDLAEDAKLQLSKDTYDDDLDNLLAQIGDQYADLFLAAKNLSDAILLSDILRVNTEITKAPLSASMIKRYDEHHQDLTLLKALVRQQLPEKYKEIFFDQSKNGYAGYIDGGASQEEFYKFIKPILEKMDGTEELLVKLNREDLLRKQRTFDNGSIPHQIHLGELHAILRRQEDFYPFLKDNREKIEKILTFRIPYYVGPLARGNSRFAWMTRKSEETITPWNFEEVVDKGASAQSFIERMTNFDKNLPNEKVLPKHSLLYEYFTVYNELTKVKYVTEGMRKPAFLSGEQKKAIVDLLFKTNRKVTVKQLKEDYFKKIECFDSVEISGVEDRFNASLGTYHDLLKIIKDKDFLDNEENEDILEDIVLTLTLFEDREMIEERLKTYAHLFDDKVMKQLKRRRYTGWGRLSRKLINGIRDKQSGKTILDFLKSDGFANRNFMQLIHDDSLTFKEDIQKAQVSGQGDSLHEHIANLAGSPAIKKGILQTVKVVDELVKVMGRHKPENIVIEMARENQTTQKGQKNSRERMKRIEEGIKELGSQILKEHPVENTQLQNEKLYLYYLQNGRDMYVDQELDINRLSDYDVDHIVPQSFLKDDSIDNKVLTRSDKARGKSDNVPSEEVVKKMKNYWRQLLNAKLITQRKFDNLTKAERGGLSELDKAGFIKRQLVETRQITKHVAQILDSRMNTKYDENDKLIREVKVITLKSKLVSDFRKDFQFYKVREINNYHHAHDAYLNAVVGTALIKKYPKLESEFVYGDYKVYDVRKMIAKSEQEIGKATAKYFFYSNIMNFFKTEITLANGEIRKRPLIETNGETGEIVWDKGRDFATVRKVLSMPQVNIVKKTEVQTGGFSKESILPKRNSDKLIARKKDWDPKKYGGFDSPTVAYSVLVVAKVEKGKSKKLKSVKELLGITIMERSSFEKNPIDFLEAKGYKEVKKDLIIKLPKYSLFELENGRKRMLASAGELQKGNELALPSKYVNFLYLASHYEKLKGSPEDNEQKQLFVEQHKHYLDEIIEQISEFSKRVILADANLDKVLSAYNKHRDKPIREQAENIIHLFTLTNLGAPAAFKYFDTTIDRKRYTSTKEVLDATLIHQSITGLYETRIDLSQLGGDGGGGGGGGGTLQLEEEYRLFEPESTQKQEMDIWLKNFPQAWAETGGMGTAHCQAPVLIQLKATATPISIRQYPMPHEAYQGIKPHIRRMLDQGILKPCQSPWNTPLLPVKKPGTEDYRPVQDLREVNKRVEDIHPTVPNPYNLLSTLPPSHPWYTVLDLKDAFFCLRLHSESQLLFAFEWRDPEIGLSGQLTWTRLPQGFKNSPTLFNEALHSDLADFRVRYPALVLLQYVDDLLLAAATRTECLEGTKALLETLGNKGYRASAKKAQICLQEVTYLGYSLKDGQRWLTKARKEAILSIPVPKNSRQVREFLGTAGYCRLWIPGFAELAAPLYPLTRPGTLFQWGTEQQLAFEDIKKALLSSPALGLPDITKPFELFIDENSGFAKGVLVQKLGPWKRPVAYLSKKLDTVASGWPPCLRMVAAIAILVKDAGKLTLGQPLTILTSHPVEALVRQPPNKWLSNARMTHYQAMLLDAERVHFGPTVSLNPATLLPLPSGGNHHDCLQILAETHGTRPDLTDQPLPDADLTWYTDGSSFIRNGEREAGAAVTTESEVIWAAPLPPGTSAQRAELIALTQALKMAEGKKLTVYTDSRYAFATTHVHGEIYRRRGWLTSEGKEIKNKNEILALLEALFLPKRLSIIHCPGHQKGDSPQAKGNRLADDTAKKAATETHSSLTVLPAGKRTADGSEFEKRTADGSEFESPKKKAKVE

SEQ ID NO: 1196 - protein, 2093 aa, synthetic construct
MPAAKRVKLDGGDKKYSIGLDIGTNSVGWAVITDEYKVPSKKFKVLGNTDRHSIKKNLIGALLFDSGETAEATRLKRTARRRYTRRKNRICYLQEIFSNEMAKVDDSFFHRLEESFLVEEDKKHERHPIFGNIVDEVAYHEKYPTIYHLRKKLVDSTDKADLRLIYLALAHMIKFRGHFLIEGDLNPDNSDVDKLFIQLVQTYNQLFEENPINASGVDAKAILSARLSKSRRLENLIAQLPGEKKNGLFGNLIALSLGLTPNFKSNFDLAEDAKLQLSKDTYDDDLDNLLAQIGDQYADLFLAAKNLSDAILLSDILRVNTEITKAPLSASMIKRYDEHHQDLTLLKALVRQQLPEKYKEIFFDQSKNGYAGYIDGGASQEEFYKFIKPILEKMDGTEELLVKLNREDLLRKQRTFDNGSIPHQIHLGELHAILRRQEDFYPFLKDNREKIEKILTFRIPYYVGPLARGNSRFAWMTRKSEETITPWNFEEVVDKGASAQSFIERMTNFDKNLPNEKVLPKHSLLYEYFTVYNELTKVKYVTEGMRKPAFLSGEQKKAIVDLLFKTNRKVTVKQLKEDYFKKIECFDSVEISGVEDRFNASLGTYHDLLKIIKDKDFLDNEENEDILEDIVLTLTLFEDREMIEERLKTYAHLFDDKVMKQLKRRRYTGWGRLSRKLINGIRDKQSGKTILDFLKSDGFANRNFMQLIHDDSLTFKEDIQKAQVSGQGDSLHEHIANLAGSPAIKKGILQTVKVVDELVKVMGRHKPENIVIEMARENQTTQKGQKNSRERMKRIEEGIKELGSQILKEHPVENTQLQNEKLYLYYLQNGRDMYVDQELDINRLSDYDVDHIVPQSFLKDDSIDNKVLTRSDKARGKSDNVPSEEVVKKMKNYWRQLLNAKLITQRKFDNLTKAERGGLSELDKAGFIKRQLVETRQITKHVAQILDSRMNTKYDENDKLIREVKVITLKSKLVSDFRKDFQFYKVREINNYHHAHDAYLNAVVGTALIKKYPKLESEFVYGDYKVYDVRKMIAKSEQEIGKATAKYFFYSNIMNFFKTEITLANGEIRKRPLIETNGETGEIVWDKGRDFATVRKVLSMPQVNIVKKTEVQTGGFSKESILPKRNSDKLIARKKDWDPKKYGGFDSPTVAYSVLVVAKVEKGKSKKLKSVKELLGITIMERSSFEKNPIDFLEAKGYKEVKKDLIIKLPKYSLFELENGRKRMLASAGELQKGNELALPSKYVNFLYLASHYEKLKGSPEDNEQKQLFVEQHKHYLDEIIEQISEFSKRVILADANLDKVLSAYNKHRDKPIREQAENIIHLFTLTNLGAPAAFKYFDTTIDRKRYTSTKEVLDATLIHQSITGLYETRIDLSQLGGDGGPAPGGSGGGGGTLQLEEEYRLFEPESTQKQEMDIWLKNFPQAWAETGGMGTAHCQAPVLIQLKATATPISIRQYPMPHEAYQGIKPHIRRMLDQGILKPCQSPWNTPLLPVKKPGTEDYRPVQDLREVNKRVEDIHPTVPNPYNLLSTLPPSHPWYTVLDLKDAFFCLRLHSESQLLFAFEWRDPEIGLSGQLTWTRLPQGFKNSPTLFNEALHSDLADFRVRYPALVLLQYVDDLLLAAATRTECLEGTKALLETLGNKGYRASAKKAQICLQEVTYLGYSLKDGQRWLTKARKEAILSIPVPKNSRQVREFLGTAGYCRLWIPGFAELAAPLYPLTRPGTLFQWGTEQQLAFEDIKKALLSSPALGLPDITKPFELFIDENSGFAKGVLVQKLGPWKRPVAYLSKKLDTVASGWPPCLRMVAAIAILVKDAGKLTLGQPLTILTSHPVEALVRQPPNKWLSNARMTHYQAMLLDAERVHFGPTVSLNPATLLPLPSGGNHHDCLQILAETHGTRPDLTDQPLPDADLTWYTDGSSFIRNGEREAGAAVTTESEVIWAAPLPPGTSAQRAELIALTQALKMAEGKKLTVYTDSRYAFATTHVHGEIYRRRGWLTSEGKEIKNKNEILALLEALFLPKRLSIIHCPGHQKGDSPQAKGNRLADDTAKKAATETHSSLTVLPAGKRTADGSEFEKRTADGSEFESPKKKAKVE

SEQ ID NO: 1197 - protein, 2130 aa, synthetic construct
MPAAKRVKLDGGDKKYSIGLDIGTNSVGWAVITDEYKVPSKKFKVLGNTDRHSIKKNLIGALLFDSGETAEATRLKRTARRRYTRRKNRICYLQEIFSNEMAKVDDSFFHRLEESFLVEEDKKHERHPIFGNIVDEVAYHEKYPTIYHLRKKLVDSTDKADLRLIYLALAHMIKFRGHFLIEGDLNPDNSDVDKLFIQLVQTYNQLFEENPINASGVDAKAILSARLSKSRRLENLIAQLPGEKKNGLFGNLIALSLGLTPNFKSNFDLAEDAKLQLSKDTYDDDLDNLLAQIGDQYADLFLAAKNLSDAILLSDILRVNTEITKAPLSASMIKRYDEHHQDLTLLKALVRQQLPEKYKEIFFDQSKNGYAGYIDGGASQEEFYKFIKPILEKMDGTEELLVKLNREDLLRKQRTFDNGSIPHQIHLGELHAILRRQEDFYPFLKDNREKIEKILTFRIPYYVGPLARGNSRFAWMTRKSEETITPWNFEEVVDKGASAQSFIERMTNFDKNLPNEKVLPKHSLLYEYFTVYNELTKVKYVTEGMRKPAFLSGEQKKAIVDLLFKTNRKVTVKQLKEDYFKKIECFDSVEISGVEDRFNASLGTYHDLLKIIKDKDFLDNEENEDILEDIVLTLTLFEDREMIEERLKTYAHLFDDKVMKQLKRRRYTGWGRLSRKLINGIRDKQSGKTILDFLKSDGFANRNFMQLIHDDSLTFKEDIQKAQVSGQGDSLHEHIANLAGSPAIKKGILQTVKVVDELVKVMGRHKPENIVIEMARENQTTQKGQKNSRERMKRIEEGIKELGSQILKEHPVENTQLQNEKLYLYYLQNGRDMYVDQELDINRLSDYDVDHIVPQSFLKDDSIDNKVLTRSDKARGKSDNVPSEEVVKKMKNYWRQLLNAKLITQRKFDNLTKAERGGLSELDKAGFIKRQLVETRQITKHVAQILDSRMNTKYDENDKLIREVKVITLKSKLVSDFRKDFQFYKVREINNYHHAHDAYLNAVVGTALIKKYPKLESEFVYGDYKVYDVRKMIAKSEQEIGKATAKYFFYSNIMNFFKTEITLANGEIRKRPLIETNGETGEIVWDKGRDFATVRKVLSMPQVNIVKKTEVQTGGFSKESILPKRNSDKLIARKKDWDPKKYGGFDSPTVAYSVLVVAKVEKGKSKKLKSVKELLGITIMERSSFEKNPIDFLEAKGYKEVKKDLIIKLPKYSLFELENGRKRMLASAGELQKGNELALPSKYVNFLYLASHYEKLKGSPEDNEQKQLFVEQHKHYLDEIIEQISEFSKRVILADANLDKVLSAYNKHRDKPIREQAENIIHLFTLTNLGAPAAFKYFDTTIDRKRYTSTKEVLDATLIHQSITGLYETRIDLSQLGGDGGAEAAAKEAAAKEAAAKEAAAKALEAEAAAKEAAAKEAAAKEAAAKAGGTLQLEEEYRLFEPESTQKQEMDIWLKNFPQAWAETGGMGTAHCQAPVLIQLKATATPISIRQYPMPHEAYQGIKPHIRRMLDQGILKPCQSPWNTPLLPVKKPGTEDYRPVQDLREVNKRVEDIHPTVPNPYNLLSTLPPSHPWYTVLDLKDAFFCLRLHSESQLLFAFEWRDPEIGLSGQLTWTRLPQGFKNSPTLFNEALHSDLADFRVRYPALVLLQYVDDLLLAAATRTECLEGTKALLETLGNKGYRASAKKAQICLQEVTYLGYSLKDGQRWLTKARKEAILSIPVPKNSRQVREFLGKAGYCRLFIPGFAELAAPLYPLTRPGTLFQWGTEQQLAFEDIKKALLSSPALGLPDITKPFELFIDENSGFAKGVLVQKLGPWKRPVAYLSKKLDTVASGWPPCLRMVAAIAILVKDAGKLTLGQPLTILTSHPVEALVRQPPNKWLSNARMTHYQAMLLDAERVHFGPTVSLNPATLLPLPSGGNHHDCLQILAETHGTRPDLTDQPLPDADLTWYTDGSSFIRNGEREAGAAVTTESEVIWAAPLPPGTSAQRAELIALTQALKMAEGKKLTVYTDSRYAFATTHVHGEIYRRRGWLTSEGKEIKNKNEILALLEALFLPKRLSIIHCPGHQKGDSPQAKGNRLADDTAKKAATETHSSLTVLPAGKRTADGSEFEKRTADGSEFESPKKKAKVE

SEQ ID NO: 1198 - protein, 2104 aa, synthetic construct
MPAAKRVKLDGGDKKYSIGLDIGTNSVGWAVITDEYKVPSKKFKVLGNTDRHSIKKNLIGALLFDSGETAEATRLKRTARRRYTRRKNRICYLQEIFSNEMAKVDDSFFHRLEESFLVEEDKKHERHPIFGNIVDEVAYHEKYPTIYHLRKKLVDSTDKADLRLIYLALAHMIKFRGHFLIEGDLNPDNSDVDKLFIQLVQTYNQLFEENPINASGVDAKAILSARLSKSRRLENLIAQLPGEKKNGLFGNLIALSLGLTPNFKSNFDLAEDAKLQLSKDTYDDDLDNLLAQIGDQYADLFLAAKNLSDAILLSDILRVNTEITKAPLSASMIKRYDEHHQDLTLLKALVRQQLPEKYKEIFFDQSKNGYAGYIDGGASQEEFYKFIKPILEKMDGTEELLVKLNREDLLRKQRTFDNGSIPHQIHLGELHAILRRQEDFYPFLKDNREKIEKILTFRIPYYVGPLARGNSRFAWMTRKSEETITPWNFEEVVDKGASAQSFIERMTNFDKNLPNEKVLPKHSLLYEYFTVYNELTKVKYVTEGMRKPAFLSGEQKKAIVDLLFKTNRKVTVKQLKEDYFKKIECFDSVEISGVEDRFNASLGTYHDLLKIIKDKDFLDNEENEDILEDIVLTLTLFEDREMIEERLKTYAHLFDDKVMKQLKRRRYTGWGRLSRKLINGIRDKQSGKTILDFLKSDGFANRNFMQLIHDDSLTFKEDIQKAQVSGQGDSLHEHIANLAGSPAIKKGILQTVKVVDELVKVMGRHKPENIVIEMARENQTTQKGQKNSRERMKRIEEGIKELGSQILKEHPVENTQLQNEKLYLYYLQNGRDMYVDQELDINRLSDYDVDHIVPQSFLKDDSIDNKVLTRSDKARGKSDNVPSEEVVKKMKNYWRQLLNAKLITQRKFDNLTKAERGGLSELDKAGFIKRQLVETRQITKHVAQILDSRMNTKYDENDKLIREVKVITLKSKLVSDFRKDFQFYKVREINNYHHAHDAYLNAVVGTALIKKYPKLESEFVYGDYKVYDVRKMIAKSEQEIGKATAKYFFYSNIMNFFKTEITLANGEIRKRPLIETNGETGEIVWDKGRDFATVRKVLSMPQVNIVKKTEVQTGGFSKESILPKRNSDKLIARKKDWDPKKYGGFDSPTVAYSVLVVAKVEKGKSKKLKSVKELLGITIMERSSFEKNPIDFLEAKGYKEVKKDLIIKLPKYSLFELENGRKRMLASAGELQKGNELALPSKYVNFLYLASHYEKLKGSPEDNEQKQLFVEQHKHYLDEIIEQISEFSKRVILADANLDKVLSAYNKHRDKPIREQAENIIHLFTLTNLGAPAAFKYFDTTIDRKRYTSTKEVLDATLIHQSITGLYETRIDLSQLGGDGGEAAAKEAAAKEAAAKEAAAKGGTLQLEEEYRLFEPESTQKQEMDIWLKNFPQAWAETGGMGTAHCQAPVLIQLKATATPISIRQYPMPHEAYQGIKPHIRRMLDQGILKPCQSPWNTPLLPVKKPGTEDYRPVQDLREVNKRVEDIHPTVPNPYNLLSTLPPSHPWYTVLDLKDAFFCLRLHSESQLLFAFEWRDPEIGLSGQLTWTRLPQGFKNSPTLFNEALHSDLADFRVRYPALVLLQYVDDLLLAAATRTECLEGTKALLETLGNKGYRASAKKAQICLQEVTYLGYSLKDGQRWLTKARKEAILSIPVPKNSRQVREFLGKAGYCRLFIPGFAELAAPLYPLTRPGTLFQWGTEQQLAFEDIKKALLSSPALGLPDITKPFELFIDENSGFAKGVLVQKLGPWKRPVAYLSKKLDTVASGWPPCLRMVAAIAILVKDAGKLTLGQPLTILTSHPVEALVRQPPNKWLSNARMTHYQAMLLDAERVHFGPTVSLNPATLLPLPSGGNHHDCLQILAETHGTRPDLTDQPLPDADLTWYTDGSSFIRNGEREAGAAVTTESEVIWAAPLPPGTSAQRAELIALTQALKMAEGKKLTVYTDSRYAFATTHVHGEIYRRRGWLTSEGKEIKNKNEILALLEALFLPKRLSIIHCPGHQKGDSPQAKGNRLADDTAKKAATETHSSLTVLPAGKRTADGSEFEKRTADGSEFESPKKKAKVE

SEQ ID NO: 1199 - protein, 2114 aa, synthetic construct
MPAAKRVKLDGGDKKYSIGLDIGTNSVGWAVITDEYKVPSKKFKVLGNTDRHSIKKNLIGALLFDSGETAEATRLKRTARRRYTRRKNRICYLQEIFSNEMAKVDDSFFHRLEESFLVEEDKKHERHPIFGNIVDEVAYHEKYPTIYHLRKKLVDSTDKADLRLIYLALAHMIKFRGHFLIEGDLNPDNSDVDKLFIQLVQTYNQLFEENPINASGVDAKAILSARLSKSRRLENLIAQLPGEKKNGLFGNLIALSLGLTPNFKSNFDLAEDAKLQLSKDTYDDDLDNLLAQIGDQYADLFLAAKNLSDAILLSDILRVNTEITKAPLSASMIKRYDEHHQDLTLLKALVRQQLPEKYKEIFFDQSKNGYAGYIDGGASQEEFYKFIKPILEKMDGTEELLVKLNREDLLRKQRTFDNGSIPHQIHLGELHAILRRQEDFYPFLKDNREKIEKILTFRIPYYVGPLARGNSRFAWMTRKSEETITPWNFEEVVDKGASAQSFIERMTNFDKNLPNEKVLPKHSLLYEYFTVYNELTKVKYVTEGMRKPAFLSGEQKKAIVDLLFKTNRKVTVKQLKEDYFKKIECFDSVEISGVEDRFNASLGTYHDLLKIIKDKDFLDNEENEDILEDIVLTLTLFEDREMIEERLKTYAHLFDDKVMKQLKRRRYTGWGRLSRKLINGIRDKQSGKTILDFLKSDGFANRNFMQLIHDDSLTFKEDIQKAQVSGQGDSLHEHIANLAGSPAIKKGILQTVKVVDELVKVMGRHKPENIVIEMARENQTTQKGQKNSRERMKRIEEGIKELGSQILKEHPVENTQLQNEKLYLYYLQNGRDMYVDQELDINRLSDYDVDHIVPQSFLKDDSIDNKVLTRSDKARGKSDNVPSEEVVKKMKNYWRQLLNAKLITQRKFDNLTKAERGGLSELDKAGFIKRQLVETRQITKHVAQILDSRMNTKYDENDKLIREVKVITLKSKLVSDFRKDFQFYKVREINNYHHAHDAYLNAVVGTALIKKYPKLESEFVYGDYKVYDVRKMIAKSEQEIGKATAKYFFYSNIMNFFKTEITLANGEIRKRPLIETNGETGEIVWDKGRDFATVRKVLSMPQVNIVKKTEVQTGGFSKESILPKRNSDKLIARKKDWDPKKYGGFDSPTVAYSVLVVAKVEKGKSKKLKSVKELLGITIMERSSFEKNPIDFLEAKGYKEVKKDLIIKLPKYSLFELENGRKRMLASAGELQKGNELALPSKYVNFLYLASHYEKLKGSPEDNEQKQLFVEQHKHYLDEIIEQISEFSKRVILADANLDKVLSAYNKHRDKPIREQAENIIHLFTLTNLGAPAAFKYFDTTIDRKRYTSTKEVLDATLIHQSITGLYETRIDLSQLGGDGGEAAAKEAAAKEAAAKEAAAKEAAAKEAAAKGGTLQLEEEYRLFEPESTQKQEMDIWLKNFPQAWAETGGMGTAHCQAPVLIQLKATATPISIRQYPMPHEAYQGIKPHIRRMLDQGILKPCQSPWNTPLLPVKKPGTEDYRPVQDLREVNKRVEDIHPTVPNPYNLLSTLPPSHPWYTVLDLKDAFFCLRLHSESQLLFAFEWRDPEIGLSGQLTWTRLPQGFKNSPTLFNEALHSDLADFRVRYPALVLLQYVDDLLLAAATRTECLEGTKALLETLGNKGYRASAKKAQICLQEVTYLGYSLKDGQRWLTKARKEAILSIPVPKNSRQVREFLGKAGYCRLFIPGFAELAAPLYPLTRPGTLFQWGTEQQLAFEDIKKALLSSPALGLPDITKPFELFIDENSGFAKGVLVQKLGPWKRPVAYLSKKLDTVASGWPPCLRMVAAIAILVKDAGKLTLGQPLTILTSHPVEALVRQPPNKWLSNARMTHYQAMLLDAERVHFGPTVSLNPATLLPLPSGGNHHDCLQILAETHGTRPDLTDQPLPDADLTWYTDGSSFIRNGEREAGAAVTTESEVIWAAPLPPGTSAQRAELIALTQALKMAEGKKLTVYTDSRYAFATTHVHGEIYRRRGWLTSEGKEIKNKNEILALLEALFLPKRLSIIHCPGHQKGDSPQAKGNRLADDTAKKAATETHSSLTVLPAGKRTADGSEFEKRTADGSEFESPKKKAKVE

SEQ ID NO: 1200 - protein, 2095 aa, synthetic construct
MPAAKRVKLDGGDKKYSIGLDIGTNSVGWAVITDEYKVPSKKFKVLGNTDRHSIKKNLIGALLFDSGETAEATRLKRTARRRYTRRKNRICYLQEIFSNEMAKVDDSFFHRLEESFLVEEDKKHERHPIFGNIVDEVAYHEKYPTIYHLRKKLVDSTDKADLRLIYLALAHMIKFRGHFLIEGDLNPDNSDVDKLFIQLVQTYNQLFEENPINASGVDAKAILSARLSKSRRLENLIAQLPGEKKNGLFGNLIALSLGLTPNFKSNFDLAEDAKLQLSKDTYDDDLDNLLAQIGDQYADLFLAAKNLSDAILLSDILRVNTEITKAPLSASMIKRYDEHHQDLTLLKALVRQQLPEKYKEIFFDQSKNGYAGYIDGGASQEEFYKFIKPILEKMDGTEELLVKLNREDLLRKQRTFDNGSIPHQIHLGELHAILRRQEDFYPFLKDNREKIEKILTFRIPYYVGPLARGNSRFAWMTRKSEETITPWNFEEVVDKGASAQSFIERMTNFDKNLPNEKVLPKHSLLYEYFTVYNELTKVKYVTEGMRKPAFLSGEQKKAIVDLLFKTNRKVTVKQLKEDYFKKIECFDSVEISGVEDRFNASLGTYHDLLKIIKDKDFLDNEENEDILEDIVLTLTLFEDREMIEERLKTYAHLFDDKVMKQLKRRRYTGWGRLSRKLINGIRDKQSGKTILDFLKSDGFANRNFMQLIHDDSLTFKEDIQKAQVSGQGDSLHEHIANLAGSPAIKKGILQTVKVVDELVKVMGRHKPENIVIEMARENQTTQKGQKNSRERMKRIEEGIKELGSQILKEHPVENTQLQNEKLYLYYLQNGRDMYVDQELDINRLSDYDVDHIVPQSFLKDDSIDNKVLTRSDKARGKSDNVPSEEVVKKMKNYWRQLLNAKLITQRKFDNLTKAERGGLSELDKAGFIKRQLVETRQITKHVAQILDSRMNTKYDENDKLIREVKVITLKSKLVSDFRKDFQFYKVREINNYHHAHDAYLNAVVGTALIKKYPKLESEFVYGDYKVYDVRKMIAKSEQEIGKATAKYFFYSNIMNFFKTEITLANGEIRKRPLIETNGETGEIVWDKGRDFATVRKVLSMPQVNIVKKTEVQTGGFSKESILPKRNSDKLIARKKDWDPKKYGGFDSPTVAYSVLVVAKVEKGKSKKLKSVKELLGITIMERSSFEKNPIDFLEAKGYKEVKKDLIIKLPKYSLFELENGRKRMLASAGELQKGNELALPSKYVNFLYLASHYEKLKGSPEDNEQKQLFVEQHKHYLDEIIEQISEFSKRVILADANLDKVLSAYNKHRDKPIREQAENIIHLFTLTNLGAPAAFKYFDTTIDRKRYTSTKEVLDATLIHQSITGLYETRIDLSQLGGDGGPAPEAAAKGGGGGTLQLEEEYRLFEPESTQKQEMDIWLKNFPQAWAETGGMGTAHCQAPVLIQLKATATPISIRQYPMPHEAYQGIKPHIRRMLDQGILKPCQSPWNTPLLPVKKPGTEDYRPVQDLREVNKRVEDIHPTVPNPYNLLSTLPPSHPWYTVLDLKDAFFCLRLHSESQLLFAFEWRDPEIGLSGQLTWTRLPQGFKNSPTLFNEALHSDLADFRVRYPALVLLQYVDDLLLAAATRTECLEGTKALLETLGNKGYRASAKKAQICLQEVTYLGYSLKDGQRWLTKARKEAILSIPVPKNSRQVREFLGKAGYCRLFIPGFAELAAPLYPLTRPGTLFQWGTEQQLAFEDIKKALLSSPALGLPDITKPFELFIDENSGFAKGVLVQKLGPWKRPVAYLSKKLDTVASGWPPCLRMVAAIAILVKDAGKLTLGQPLTILTSHPVEALVRQPPNKWLSNARMTHYQAMLLDAERVHFGPTVSLNPATLLPLPSGGNHHDCLQILAETHGTRPDLTDQPLPDADLTWYTDGSSFIRNGEREAGAAVTTESEVIWAAPLPPGTSAQRAELIALTQALKMAEGKKLTVYTDSRYAFATTHVHGEIYRRRGWLTSEGKEIKNKNEILALLEALFLPKRLSIIHCPGHQKGDSPQAKGNRLADDTAKKAATETHSSLTVLPAGKRTADGSEFEKRTADGSEFESPKKKAKVE

SEQ ID NO: 1201 - protein, 2095 aa, synthetic construct
MPAAKRVKLDGGDKKYSIGLDIGTNSVGWAVITDEYKVPSKKFKVLGNTDRHSIKKNLIGALLFDSGETAEATRLKRTARRRYTRRKNRICYLQEIFSNEMAKVDDSFFHRLEESFLVEEDKKHERHPIFGNIVDEVAYHEKYPTIYHLRKKLVDSTDKADLRLIYLALAHMIKFRGHFLIEGDLNPDNSDVDKLFIQLVQTYNQLFEENPINASGVDAKAILSARLSKSRRLENLIAQLPGEKKNGLFGNLIALSLGLTPNFKSNFDLAEDAKLQLSKDTYDDDLDNLLAQIGDQYADLFLAAKNLSDAILLSDILRVNTEITKAPLSASMIKRYDEHHQDLTLLKALVRQQLPEKYKEIFFDQSKNGYAGYIDGGASQEEFYKFIKPILEKMDGTEELLVKLNREDLLRKQRTFDNGSIPHQIHLGELHAILRRQEDFYPFLKDNREKIEKILTFRIPYYVGPLARGNSRFAWMTRKSEETITPWNFEEVVDKGASAQSFIERMTNFDKNLPNEKVLPKHSLLYEYFTVYNELTKVKYVTEGMRKPAFLSGEQKKAIVDLLFKTNRKVTVKQLKEDYFKKIECFDSVEISGVEDRFNASLGTYHDLLKIIKDKDFLDNEENEDILEDIVLTLTLFEDREMIEERLKTYAHLFDDKVMKQLKRRRYTGWGRLSRKLINGIRDKQSGKTILDFLKSDGFANRNFMQLIHDDSLTFKEDIQKAQVSGQGDSLHEHIANLAGSPAIKKGILQTVKVVDELVKVMGRHKPENIVIEMARENQTTQKGQKNSRERMKRIEEGIKELGSQILKEHPVENTQLQNEKLYLYYLQNGRDMYVDQELDINRLSDYDVDHIVPQSFLKDDSIDNKVLTRSDKARGKSDNVPSEEVVKKMKNYWRQLLNAKLITQRKFDNLTKAERGGLSELDKAGFIKRQLVETRQITKHVAQILDSRMNTKYDENDKLIREVKVITLKSKLVSDFRKDFQFYKVREINNYHHAHDAYLNAVVGTALIKKYPKLESEFVYGDYKVYDVRKMIAKSEQEIGKATAKYFFYSNIMNFFKTEITLANGEIRKRPLIETNGETGEIVWDKGRDFATVRKVLSMPQVNIVKKTEVQTGGFSKESILPKRNSDKLIARKKDWDPKKYGGFDSPTVAYSVLVVAKVEKGKSKKLKSVKELLGITIMERSSFEKNPIDFLEAKGYKEVKKDLIIKLPKYSLFELENGRKRMLASAGELQKGNELALPSKYVNFLYLASHYEKLKGSPEDNEQKQLFVEQHKHYLDEIIEQISEFSKRVILADANLDKVLSAYNKHRDKPIREQAENIIHLFTLTNLGAPAAFKYFDTTIDRKRYTSTKEVLDATLIHQSITGLYETRIDLSQLGGDGGEAAAKGSSPAPGGTLQLEEEYRLFEPESTQKQEMDIWLKNFPQAWAETGGMGTAHCQAPVLIQLKATATPISIRQYPMPHEAYQGIKPHIRRMLDQGILKPCQSPWNTPLLPVKKPGTEDYRPVQDLREVNKRVEDIHPTVPNPYNLLSTLPPSHPWYTVLDLKDAFFCLRLHSESQLLFAFEWRDPEIGLSGQLTWTRLPQGFKNSPTLFNEALHSDLADFRVRYPALVLLQYVDDLLLAAATRTECLEGTKALLETLGNKGYRASAKKAQICLQEVTYLGYSLKDGQRWLTKARKEAILSIPVPKNSRQVREFLGKAGYCRLFIPGFAELAAPLYPLTRPGTLFQWGTEQQLAFEDIKKALLSSPALGLPDITKPFELFIDENSGFAKGVLVQKLGPWKRPVAYLSKKLDTVASGWPPCLRMVAAIAILVKDAGKLTLGQPLTILTSHPVEALVRQPPNKWLSNARMTHYQAMLLDAERVHFGPTVSLNPATLLPLPSGGNHHDCLQILAETHGTRPDLTDQPLPDADLTWYTDGSSFIRNGEREAGAAVTTESEVIWAAPLPPGTSAQRAELIALTQALKMAEGKKLTVYTDSRYAFATTHVHGEIYRRRGWLTSEGKEIKNKNEILALLEALFLPKRLSIIHCPGHQKGDSPQAKGNRLADDTAKKAATETHSSLTVLPAGKRTADGSEFEKRTADGSEFESPKKKAKVE

SEQ ID NO: 1202 - protein, 2109 aa, synthetic construct
MPAAKRVKLDGGDKKYSIGLDIGTNSVGWAVITDEYKVPSKKFKVLGNTDRHSIKKNLIGALLFDSGETAEATRLKRTARRRYTRRKNRICYLQEIFSNEMAKVDDSFFHRLEESFLVEEDKKHERHPIFGNIVDEVAYHEKYPTIYHLRKKLVDSTDKADLRLIYLALAHMIKFRGHFLIEGDLNPDNSDVDKLFIQLVQTYNQLFEENPINASGVDAKAILSARLSKSRRLENLIAQLPGEKKNGLFGNLIALSLGLTPNFKSNFDLAEDAKLQLSKDTYDDDLDNLLAQIGDQYADLFLAAKNLSDAILLSDILRVNTEITKAPLSASMIKRYDEHHQDLTLLKALVRQQLPEKYKEIFFDQSKNGYAGYIDGGASQEEFYKFIKPILEKMDGTEELLVKLNREDLLRKQRTFDNGSIPHQIHLGELHAILRRQEDFYPFLKDNREKIEKILTFRIPYYVGPLARGNSRFAWMTRKSEETITPWNFEEVVDKGASAQSFIERMTNFDKNLPNEKVLPKHSLLYEYFTVYNELTKVKYVTEGMRKPAFLSGEQKKAIVDLLFKTNRKVTVKQLKEDYFKKIECFDSVEISGVEDRFNASLGTYHDLLKIIKDKDFLDNEENEDILEDIVLTLTLFEDREMIEERLKTYAHLFDDKVMKQLKRRRYTGWGRLSRKLINGIRDKQSGKTILDFLKSDGFANRNFMQLIHDDSLTFKEDIQKAQVSGQGDSLHEHIANLAGSPAIKKGILQTVKVVDELVKVMGRHKPENIVIEMARENQTTQKGQKNSRERMKRIEEGIKELGSQILKEHPVENTQLQNEKLYLYYLQNGRDMYVDQELDINRLSDYDVDHIVPQSFLKDDSIDNKVLTRSDKARGKSDNVPSEEVVKKMKNYWRQLLNAKLITQRKFDNLTKAERGGLSELDKAGFIKRQLVETRQITKHVAQILDSRMNTKYDENDKLIREVKVITLKSKLVSDFRKDFQFYKVREINNYHHAHDAYLNAVVGTALIKKYPKLESEFVYGDYKVYDVRKMIAKSEQEIGKATAKYFFYSNIMNFFKTEITLANGEIRKRPLIETNGETGEIVWDKGRDFATVRKVLSMPQVNIVKKTEVQTGGFSKESILPKRNSDKLIARKKDWDPKKYGGFDSPTVAYSVLVVAKVEKGKSKKLKSVKELLGITIMERSSFEKNPIDFLEAKGYKEVKKDLIIKLPKYSLFELENGRKRMLASAGELQKGNELALPSKYVNFLYLASHYEKLKGSPEDNEQKQLFVEQHKHYLDEIIEQISEFSKRVILADANLDKVLSAYNKHRDKPIREQAENIIHLFTLTNLGAPAAFKYFDTTIDRKRYTSTKEVLDATLIHQSITGLYETRIDLSQLGGDGGGGGGSGGGGSGGGGSGGGGSGGGGSGGTLQLEEEYRLFEPESTQKQEMDIWLKNFPQAWAETGGMGTAHCQAPVLIQLKATATPISIRQYPMPHEAYQGIKPHIRRMLDQGILKPCQSPWNTPLLPVKKPGTEDYRPVQDLREVNKRVEDIHPTVPNPYNLLSTLPPSHPWYTVLDLKDAFFCLRLHSESQLLFAFEWRDPEIGLSGQLTWTRLPQGFKNSPTLFNEALHSDLADFRVRYPALVLLQYVDDLLLAAATRTECLEGTKALLETLGNKGYRASAKKAQICLQEVTYLGYSLKDGQRWLTKARKEAILSIPVPKNSRQVREFLGKAGYCRLFIPGFAELAAPLYPLTRPGTLFQWGTEQQLAFEDIKKALLSSPALGLPDITKPFELFIDENSGFAKGVLVQKLGPWKRPVAYLSKKLDTVASGWPPCLRMVAAIAILVKDAGKLTLGQPLTILTSHPVEALVRQPPNKWLSNARMTHYQAMLLDAERVHFGPTVSLNPATLLPLPSGGNHHDCLQILAETHGTRPDLTDQPLPDADLTWYTDGSSFIRNGEREAGAAVTTESEVIWAAPLPPGTSAQRAELIALTQALKMAEGKKLTVYTDSRYAFATTHVHGEIYRRRGWLTSEGKEIKNKNEILALLEALFLPKRLSIIHCPGHQKGDSPQAKGNRLADDTAKKAATETHSSLTVLPAGKRTADGSEFEKRTADGSEFESPKKKAKVE

SEQ ID NO: 1203 - protein, 2099 aa, synthetic construct
MPAAKRVKLDGGDKKYSIGLDIGTNSVGWAVITDEYKVPSKKFKVLGNTDRHSIKKNLIGALLFDSGETAEATRLKRTARRRYTRRKNRICYLQEIFSNEMAKVDDSFFHRLEESFLVEEDKKHERHPIFGNIVDEVAYHEKYPTIYHLRKKLVDSTDKADLRLIYLALAHMIKFRGHFLIEGDLNPDNSDVDKLFIQLVQTYNQLFEENPINASGVDAKAILSARLSKSRRLENLIAQLPGEKKNGLFGNLIALSLGLTPNFKSNFDLAEDAKLQLSKDTYDDDLDNLLAQIGDQYADLFLAAKNLSDAILLSDILRVNTEITKAPLSASMIKRYDEHHQDLTLLKALVRQQLPEKYKEIFFDQSKNGYAGYIDGGASQEEFYKFIKPILEKMDGTEELLVKLNREDLLRKQRTFDNGSIPHQIHLGELHAILRRQEDFYPFLKDNREKIEKILTFRIPYYVGPLARGNSRFAWMTRKSEETITPWNFEEVVDKGASAQSFIERMTNFDKNLPNEKVLPKHSLLYEYFTVYNELTKVKYVTEGMRKPAFLSGEQKKAIVDLLFKTNRKVTVKQLKEDYFKKIECFDSVEISGVEDRFNASLGTYHDLLKIIKDKDFLDNEENEDILEDIVLTLTLFEDREMIEERLKTYAHLFDDKVMKQLKRRRYTGWGRLSRKLINGIRDKQSGKTILDFLKSDGFANRNFMQLIHDDSLTFKEDIQKAQVSGQGDSLHEHIANLAGSPAIKKGILQTVKVVDELVKVMGRHKPENIVIEMARENQTTQKGQKNSRERMKRIEEGIKELGSQILKEHPVENTQLQNEKLYLYYLQNGRDMYVDQELDINRLSDYDVDHIVPQSFLKDDSIDNKVLTRSDKARGKSDNVPSEEVVKKMKNYWRQLLNAKLITQRKFDNLTKAERGGLSELDKAGFIKRQLVETRQITKHVAQILDSRMNTKYDENDKLIREVKVITLKSKLVSDFRKDFQFYKVREINNYHHAHDAYLNAVVGTALIKKYPKLESEFVYGDYKVYDVRKMIAKSEQEIGKATAKYFFYSNIMNFFKTEITLANGEIRKRPLIETNGETGEIVWDKGRDFATVRKVLSMPQVNIVKKTEVQTGGFSKESILPKRNSDKLIARKKDWDPKKYGGFDSPTVAYSVLVVAKVEKGKSKKLKSVKELLGITIMERSSFEKNPIDFLEAKGYKEVKKDLIIKLPKYSLFELENGRKRMLASAGELQKGNELALPSKYVNFLYLASHYEKLKGSPEDNEQKQLFVEQHKHYLDEIIEQISEFSKRVILADANLDKVLSAYNKHRDKPIREQAENIIHLFTLTNLGAPAAFKYFDTTIDRKRYTSTKEVLDATLIHQSITGLYETRIDLSQLGGDGGGGGGSEAAAKGGGGSGGTLQLEEEYRLFEPESTQKQEMDIWLKNFPQAWAETGGMGTAHCQAPVLIQLKATATPISIRQYPMPHEAYQGIKPHIRRMLDQGILKPCQSPWNTPLLPVKKPGTEDYRPVQDLREVNKRVEDIHPTVPNPYNLLSTLPPSHPWYTVLDLKDAFFCLRLHSESQLLFAFEWRDPEIGLSGQLTWTRLPQGFKNSPTLFNEALHSDLADFRVRYPALVLLQYVDDLLLAAATRTECLEGTKALLETLGNKGYRASAKKAQICLQEVTYLGYSLKDGQRWLTKARKEAILSIPVPKNSRQVREFLGKAGYCRLFIPGFAELAAPLYPLTRPGTLFQWGTEQQLAFEDIKKALLSSPALGLPDITKPFELFIDENSGFAKGVLVQKLGPWKRPVAYLSKKLDTVASGWPPCLRMVAAIAILVKDAGKLTLGQPLTILTSHPVEALVRQPPNKWLSNARMTHYQAMLLDAERVHFGPTVSLNPATLLPLPSGGNHHDCLQILAETHGTRPDLTDQPLPDADLTWYTDGSSFIRNGEREAGAAVTTESEVIWAAPLPPGTSAQRAELIALTQALKMAEGKKLTVYTDSRYAFATTHVHGEIYRRRGWLTSEGKEIKNKNEILALLEALFLPKRLSIIHCPGHQKGDSPQAKGNRLADDTAKKAATETHSSLTVLPAGKRTADGSEFEKRTADGSEFESPKKKAKVE

SEQ ID NO: 1204 - protein, 2092 aa, synthetic construct
MPAAKRVKLDGGDKKYSIGLDIGTNSVGWAVITDEYKVPSKKFKVLGNTDRHSIKKNLIGALLFDSGETAEATRLKRTARRRYTRRKNRICYLQEIFSNEMAKVDDSFFHRLEESFLVEEDKKHERHPIFGNIVDEVAYHEKYPTIYHLRKKLVDSTDKADLRLIYLALAHMIKFRGHFLIEGDLNPDNSDVDKLFIQLVQTYNQLFEENPINASGVDAKAILSARLSKSRRLENLIAQLPGEKKNGLFGNLIALSLGLTPNFKSNFDLAEDAKLQLSKDTYDDDLDNLLAQIGDQYADLFLAAKNLSDAILLSDILRVNTEITKAPLSASMIKRYDEHHQDLTLLKALVRQQLPEKYKEIFFDQSKNGYAGYIDGGASQEEFYKFIKPILEKMDGTEELLVKLNREDLLRKQRTFDNGSIPHQIHLGELHAILRRQEDFYPFLKDNREKIEKILTFRIPYYVGPLARGNSRFAWMTRKSEETITPWNFEEVVDKGASAQSFIERMTNFDKNLPNEKVLPKHSLLYEYFTVYNELTKVKYVTEGMRKPAFLSGEQKKAIVDLLFKTNRKVTVKQLKEDYFKKIECFDSVEISGVEDRFNASLGTYHDLLKIIKDKDFLDNEENEDILEDIVLTLTLFEDREMIEERLKTYAHLFDDKVMKQLKRRRYTGWGRLSRKLINGIRDKQSGKTILDFLKSDGFANRNFMQLIHDDSLTFKEDIQKAQVSGQGDSLHEHIANLAGSPAIKKGILQTVKVVDELVKVMGRHKPENIVIEMARENQTTQKGQKNSRERMKRIEEGIKELGSQILKEHPVENTQLQNEKLYLYYLQNGRDMYVDQELDINRLSDYDVDHIVPQSFLKDDSIDNKVLTRSDKARGKSDNVPSEEVVKKMKNYWRQLLNAKLITQRKFDNLTKAERGGLSELDKAGFIKRQLVETRQITKHVAQILDSRMNTKYDENDKLIREVKVITLKSKLVSDFRKDFQFYKVREINNYHHAHDAYLNAVVGTALIKKYPKLESEFVYGDYKVYDVRKMIAKSEQEIGKATAKYFFYSNIMNFFKTEITLANGEIRKRPLIETNGETGEIVWDKGRDFATVRKVLSMPQVNIVKKTEVQTGGFSKESILPKRNSDKLIARKKDWDPKKYGGFDSPTVAYSVLVVAKVEKGKSKKLKSVKELLGITIMERSSFEKNPIDFLEAKGYKEVKKDLIIKLPKYSLFELENGRKRMLASAGELQKGNELALPSKYVNFLYLASHYEKLKGSPEDNEQKQLFVEQHKHYLDEIIEQISEFSKRVILADANLDKVLSAYNKHRDKPIREQAENIIHLFTLTNLGAPAAFKYFDTTIDRKRYTSTKEVLDATLIHQSITGLYETRIDLSQLGGDGGGGSEAAAKGGTLQLEEEYRLFEPESTQKQEMDIWLKNFPQAWAETGGMGTAHCQAPVLIQLKATATPISIRQYPMPHEAYQGIKPHIRRMLDQGILKPCQSPWNTPLLPVKKPGTEDYRPVQDLREVNKRVEDIHPTVPNPYNLLSTLPPSHPWYTVLDLKDAFFCLRLHSESQLLFAFEWRDPEIGLSGQLTWTRLPQGFKNSPTLFNEALHSDLADFRVRYPALVLLQYVDDLLLAAATRTECLEGTKALLETLGNKGYRASAKKAQICLQEVTYLGYSLKDGQRWLTKARKEAILSIPVPKNSRQVREFLGKAGYCRLFIPGFAELAAPLYPLTRPGTLFQWGTEQQLAFEDIKKALLSSPALGLPDITKPFELFIDENSGFAKGVLVQKLGPWKRPVAYLSKKLDTVASGWPPCLRMVAAIAILVKDAGKLTLGQPLTILTSHPVEALVRQPPNKWLSNARMTHYQAMLLDAERVHFGPTVSLNPATLLPLPSGGNHHDCLQILAETHGTRPDLTDQPLPDADLTWYTDGSSFIRNGEREAGAAVTTESEVIWAAPLPPGTSAQRAELIALTQALKMAEGKKLTVYTDSRYAFATTHVHGEIYRRRGWLTSEGKEIKNKNEILALLEALFLPKRLSIIHCPGHQKGDSPQAKGNRLADDTAKKAATETHSSLTVLPAGKRTADGSEFEKRTADGSEFESPKKKAKVE

SEQ ID NO: 1205 - protein, 2100 aa, synthetic construct
MPAAKRVKLDGGDKKYSIGLDIGTNSVGWAVITDEYKVPSKKFKVLGNTDRHSIKKNLIGALLFDSGETAEATRLKRTARRRYTRRKNRICYLQEIFSNEMAKVDDSFFHRLEESFLVEEDKKHERHPIFGNIVDEVAYHEKYPTIYHLRKKLVDSTDKADLRLIYLALAHMIKFRGHFLIEGDLNPDNSDVDKLFIQLVQTYNQLFEENPINASGVDAKAILSARLSKSRRLENLIAQLPGEKKNGLFGNLIALSLGLTPNFKSNFDLAEDAKLQLSKDTYDDDLDNLLAQIGDQYADLFLAAKNLSDAILLSDILRVNTEITKAPLSASMIKRYDEHHQDLTLLKALVRQQLPEKYKEIFFDQSKNGYAGYIDGGASQEEFYKFIKPILEKMDGTEELLVKLNREDLLRKQRTFDNGSIPHQIHLGELHAILRRQEDFYPFLKDNREKIEKILTFRIPYYVGPLARGNSRFAWMTRKSEETITPWNFEEVVDKGASAQSFIERMTNFDKNLPNEKVLPKHSLLYEYFTVYNELTKVKYVTEGMRKPAFLSGEQKKAIVDLLFKTNRKVTVKQLKEDYFKKIECFDSVEISGVEDRFNASLGTYHDLLKIIKDKDFLDNEENEDILEDIVLTLTLFEDREMIEERLKTYAHLFDDKVMKQLKRRRYTGWGRLSRKLINGIRDKQSGKTILDFLKSDGFANRNFMQLIHDDSLTFKEDIQKAQVSGQGDSLHEHIANLAGSPAIKKGILQTVKVVDELVKVMGRHKPENIVIEMARENQTTQKGQKNSRERMKRIEEGIKELGSQILKEHPVENTQLQNEKLYLYYLQNGRDMYVDQELDINRLSDYDVDHIVPQSFLKDDSIDNKVLTRSDKARGKSDNVPSEEVVKKMKNYWRQLLNAKLITQRKFDNLTKAERGGLSELDKAGFIKRQLVETRQITKHVAQILDSRMNTKYDENDKLIREVKVITLKSKLVSDFRKDFQFYKVREINNYHHAHDAYLNAVVGTALIKKYPKLESEFVYGDYKVYDVRKMIAKSEQEIGKATAKYFFYSNIMNFFKTEITLANGEIRKRPLIETNGETGEIVWDKGRDFATVRKVLSMPQVNIVKKTEVQTGGFSKESILPKRNSDKLIARKKDWDPKKYGGFDSPTVAYSVLVVAKVEKGKSKKLKSVKELLGITIMERSSFEKNPIDFLEAKGYKEVKKDLIIKLPKYSLFELENGRKRMLASAGELQKGNELALPSKYVNFLYLASHYEKLKGSPEDNEQKQLFVEQHKHYLDEIIEQISEFSKRVILADANLDKVLSAYNKHRDKPIREQAENIIHLFTLTNLGAPAAFKYFDTTIDRKRYTSTKEVLDATLIHQSITGLYETRIDLSQLGGDGGSGSETPGTSESATPESGGTLQLEEEYRLFEPESTQKQEMDIWLKNFPQAWAETGGMGTAHCQAPVLIQLKATATPISIRQYPMPHEAYQGIKPHIRRMLDQGILKPCQSPWNTPLLPVKKPGTEDYRPVQDLREVNKRVEDIHPTVPNPYNLLSTLPPSHPWYTVLDLKDAFFCLRLHSESQLLFAFEWRDPEIGLSGQLTWTRLPQGFKNSPTLFNEALHSDLADFRVRYPALVLLQYVDDLLLAAATRTECLEGTKALLETLGNKGYRASAKKAQICLQEVTYLGYSLKDGQRWLTKARKEAILSIPVPKNSRQVREFLGKAGYCRLFIPGFAELAAPLYPLTRPGTLFQWGTEQQLAFEDIKKALLSSPALGLPDITKPFELFIDENSGFAKGVLVQKLGPWKRPVAYLSKKLDTVASGWPPCLRMVAAIAILVKDAGKLTLGQPLTILTSHPVEALVRQPPNKWLSNARMTHYQAMLLDAERVHFGPTVSLNPATLLPLPSGGNHHDCLQILAETHGTRPDLTDQPLPDADLTWYTDGSSFIRNGEREAGAAVTTESEVIWAAPLPPGTSAQRAELIALTQALKMAEGKKLTVYTDSRYAFATTHVHGEIYRRRGWLTSEGKEIKNKNEILALLEALFLPKRLSIIHCPGHQKGDSPQAKGNRLADDTAKKAATETHSSLTVLPAGKRTADGSEFEKRTADGSEFESPKKKAKVE

SEQ ID NO: 1206 - protein, 2094 aa, synthetic construct
MPAAKRVKLDGGDKKYSIGLDIGTNSVGWAVITDEYKVPSKKFKVLGNTDRHSIKKNLIGALLFDSGETAEATRLKRTARRRYTRRKNRICYLQEIFSNEMAKVDDSFFHRLEESFLVEEDKKHERHPIFGNIVDEVAYHEKYPTIYHLRKKLVDSTDKADLRLIYLALAHMIKFRGHFLIEGDLNPDNSDVDKLFIQLVQTYNQLFEENPINASGVDAKAILSARLSKSRRLENLIAQLPGEKKNGLFGNLIALSLGLTPNFKSNFDLAEDAKLQLSKDTYDDDLDNLLAQIGDQYADLFLAAKNLSDAILLSDILRVNTEITKAPLSASMIKRYDEHHQDLTLLKALVRQQLPEKYKEIFFDQSKNGYAGYIDGGASQEEFYKFIKPILEKMDGTEELLVKLNREDLLRKQRTFDNGSIPHQIHLGELHAILRRQEDFYPFLKDNREKIEKILTFRIPYYVGPLARGNSRFAWMTRKSEETITPWNFEEVVDKGASAQSFIERMTNFDKNLPNEKVLPKHSLLYEYFTVYNELTKVKYVTEGMRKPAFLSGEQKKAIVDLLFKTNRKVTVKQLKEDYFKKIECFDSVEISGVEDRFNASLGTYHDLLKIIKDKDFLDNEENEDILEDIVLTLTLFEDREMIEERLKTYAHLFDDKVMKQLKRRRYTGWGRLSRKLINGIRDKQSGKTILDFLKSDGFANRNFMQLIHDDSLTFKEDIQKAQVSGQGDSLHEHIANLAGSPAIKKGILQTVKVVDELVKVMGRHKPENIVIEMARENQTTQKGQKNSRERMKRIEEGIKELGSQILKEHPVENTQLQNEKLYLYYLQNGRDMYVDQELDINRLSDYDVDHIVPQSFLKDDSIDNKVLTRSDKARGKSDNVPSEEVVKKMKNYWRQLLNAKLITQRKFDNLTKAERGGLSELDKAGFIKRQLVETRQITKHVAQILDSRMNTKYDENDKLIREVKVITLKSKLVSDFRKDFQFYKVREINNYHHAHDAYLNAVVGTALIKKYPKLESEFVYGDYKVYDVRKMIAKSEQEIGKATAKYFFYSNIMNFFKTEITLANGEIRKRPLIETNGETGEIVWDKGRDFATVRKVLSMPQVNIVKKTEVQTGGFSKESILPKRNSDKLIARKKDWDPKKYGGFDSPTVAYSVLVVAKVEKGKSKKLKSVKELLGITIMERSSFEKNPIDFLEAKGYKEVKKDLIIKLPKYSLFELENGRKRMLASAGELQKGNELALPSKYVNFLYLASHYEKLKGSPEDNEQKQLFVEQHKHYLDEIIEQISEFSKRVILADANLDKVLSAYNKHRDKPIREQAENIIHLFTLTNLGAPAAFKYFDTTIDRKRYTSTKEVLDATLIHQSITGLYETRIDLSQLGGDGGEAAAKEAAAKGGTLQLEEEYRLFEPESTQKQEMDIWLKNFPQAWAETGGMGTAHCQAPVLIQLKATATPISIRQYPMPHEAYQGIKPHIRRMLDQGILKPCQSPWNTPLLPVKKPGTEDYRPVQDLREVNKRVEDIHPTVPNPYNLLSTLPPSHPWYTVLDLKDAFFCLRLHSESQLLFAFEWRDPEIGLSGQLTWTRLPQGFKNSPTLFNEALHSDLADFRVRYPALVLLQYVDDLLLAAATRTECLEGTKALLETLGNKGYRASAKKAQICLQEVTYLGYSLKDGQRWLTKARKEAILSIPVPKNSRQVREFLGKAGYCRLFIPGFAELAAPLYPLTRPGTLFQWGTEQQLAFEDIKKALLSSPALGLPDITKPFELFIDENSGFAKGVLVQKLGPWKRPVAYLSKKLDTVASGWPPCLRMVAAIAILVKDAGKLTLGQPLTILTSHPVEALVRQPPNKWLSNARMTHYQAMLLDAERVHFGPTVSLNPATLLPLPSGGNHHDCLQILAETHGTRPDLTDQPLPDADLTWYTDGSSFIRNGEREAGAAVTTESEVIWAAPLPPGTSAQRAELIALTQALKMAEGKKLTVYTDSRYAFATTHVHGEIYRRRGWLTSEGKEIKNKNEILALLEALFLPKRLSIIHCPGHQKGDSPQAKGNRLADDTAKKAATETHSSLTVLPAGKRTADGSEFEKRTADGSEFESPKKKAKVE

SEQ ID NO: 1207 - protein, 2096 aa, synthetic construct
MPAAKRVKLDGGDKKYSIGLDIGTNSVGWAVITDEYKVPSKKFKVLGNTDRHSIKKNLIGALLFDSGETAEATRLKRTARRRYTRRKNRICYLQEIFSNEMAKVDDSFFHRLEESFLVEEDKKHERHPIFGNIVDEVAYHEKYPTIYHLRKKLVDSTDKADLRLIYLALAHMIKFRGHFLIEGDLNPDNSDVDKLFIQLVQTYNQLFEENPINASGVDAKAILSARLSKSRRLENLIAQLPGEKKNGLFGNLIALSLGLTPNFKSNFDLAEDAKLQLSKDTYDDDLDNLLAQIGDQYADLFLAAKNLSDAILLSDILRVNTEITKAPLSASMIKRYDEHHQDLTLLKALVRQQLPEKYKEIFFDQSKNGYAGYIDGGASQEEFYKFIKPILEKMDGTEELLVKLNREDLLRKQRTFDNGSIPHQIHLGELHAILRRQEDFYPFLKDNREKIEKILTFRIPYYVGPLARGNSRFAWMTRKSEETITPWNFEEVVDKGASAQSFIERMTNFDKNLPNEKVLPKHSLLYEYFTVYNELTKVKYVTEGMRKPAFLSGEQKKAIVDLLFKTNRKVTVKQLKEDYFKKIECFDSVEISGVEDRFNASLGTYHDLLKIIKDKDFLDNEENEDILEDIVLTLTLFEDREMIEERLKTYAHLFDDKVMKQLKRRRYTGWGRLSRKLINGIRDKQSGKTILDFLKSDGFANRNFMQLIHDDSLTFKEDIQKAQVSGQGDSLHEHIANLAGSPAIKKGILQTVKVVDELVKVMGRHKPENIVIEMARENQTTQKGQKNSRERMKRIEEGIKELGSQILKEHPVENTQLQNEKLYLYYLQNGRDMYVDQELDINRLSDYDVDHIVPQSFLKDDSIDNKVLTRSDKARGKSDNVPSEEVVKKMKNYWRQLLNAKLITQRKFDNLTKAERGGLSELDKAGFIKRQLVETRQITKHVAQILDSRMNTKYDENDKLIREVKVITLKSKLVSDFRKDFQFYKVREINNYHHAHDAYLNAVVGTALIKKYPKLESEFVYGDYKVYDVRKMIAKSEQEIGKATAKYFFYSNIMNFFKTEITLANGEIRKRPLIETNGETGEIVWDKGRDFATVRKVLSMPQVNIVKKTEVQTGGFSKESILPKRNSDKLIARKKDWDPKKYGGFDSPTVAYSVLVVAKVEKGKSKKLKSVKELLGITIMERSSFEKNPIDFLEAKGYKEVKKDLIIKLPKYSLFELENGRKRMLASAGELQKGNELALPSKYVNFLYLASHYEKLKGSPEDNEQKQLFVEQHKHYLDEIIEQISEFSKRVILADANLDKVLSAYNKHRDKPIREQAENIIHLFTLTNLGAPAAFKYFDTTIDRKRYTSTKEVLDATLIHQSITGLYETRIDLSQLGGDGGGGSGGSGGSGGSGGTLQLEEEYRLFEPESTQKQEMDIWLKNFPQAWAETGGMGTAHCQAPVLIQLKATATPISIRQYPMPHEAYQGIKPHIRRMLDQGILKPCQSPWNTPLLPVKKPGTEDYRPVQDLREVNKRVEDIHPTVPNPYNLLSTLPPSHPWYTVLDLKDAFFCLRLHSESQLLFAFEWRDPEIGLSGQLTWTRLPQGFKNSPTLFNEALHSDLADFRVRYPALVLLQYVDDLLLAAATRTECLEGTKALLETLGNKGYRASAKKAQICLQEVTYLGYSLKDGQRWLTKARKEAILSIPVPKNSRQVREFLGKAGYCRLFIPGFAELAAPLYPLTRPGTLFQWGTEQQLAFEDIKKALLSSPALGLPDITKPFELFIDENSGFAKGVLVQKLGPWKRPVAYLSKKLDTVASGWPPCLRMVAAIAILVKDAGKLTLGQPLTILTSHPVEALVRQPPNKWLSNARMTHYQAMLLDAERVHFGPTVSLNPATLLPLPSGGNHHDCLQILAETHGTRPDLTDQPLPDADLTWYTDGSSFIRNGEREAGAAVTTESEVIWAAPLPPGTSAQRAELIALTQALKMAEGKKLTVYTDSRYAFATTHVHGEIYRRRGWLTSEGKEIKNKNEILALLEALFLPKRLSIIHCPGHQKGDSPQAKGNRLADDTAKKAATETHSSLTVLPAGKRTADGSEFEKRTADGSEFESPKKKAKVE

SEQ ID NO: 1208 - protein, 2095 aa, synthetic construct
MPAAKRVKLDGGDKKYSIGLDIGTNSVGWAVITDEYKVPSKKFKVLGNTDRHSIKKNLIGALLFDSGETAEATRLKRTARRRYTRRKNRICYLQEIFSNEMAKVDDSFFHRLEESFLVEEDKKHERHPIFGNIVDEVAYHEKYPTIYHLRKKLVDSTDKADLRLIYLALAHMIKFRGHFLIEGDLNPDNSDVDKLFIQLVQTYNQLFEENPINASGVDAKAILSARLSKSRRLENLIAQLPGEKKNGLFGNLIALSLGLTPNFKSNFDLAEDAKLQLSKDTYDDDLDNLLAQIGDQYADLFLAAKNLSDAILLSDILRVNTEITKAPLSASMIKRYDEHHQDLTLLKALVRQQLPEKYKEIFFDQSKNGYAGYIDGGASQEEFYKFIKPILEKMDGTEELLVKLNREDLLRKQRTFDNGSIPHQIHLGELHAILRRQEDFYPFLKDNREKIEKILTFRIPYYVGPLARGNSRFAWMTRKSEETITPWNFEEVVDKGASAQSFIERMTNFDKNLPNEKVLPKHSLLYEYFTVYNELTKVKYVTEGMRKPAFLSGEQKKAIVDLLFKTNRKVTVKQLKEDYFKKIECFDSVEISGVEDRFNASLGTYHDLLKIIKDKDFLDNEENEDILEDIVLTLTLFEDREMIEERLKTYAHLFDDKVMKQLKRRRYTGWGRLSRKLINGIRDKQSGKTILDFLKSDGFANRNFMQLIHDDSLTFKEDIQKAQVSGQGDSLHEHIANLAGSPAIKKGILQTVKVVDELVKVMGRHKPENIVIEMARENQTTQKGQKNSRERMKRIEEGIKELGSQILKEHPVENTQLQNEKLYLYYLQNGRDMYVDQELDINRLSDYDVDHIVPQSFLKDDSIDNKVLTRSDKARGKSDNVPSEEVVKKMKNYWRQLLNAKLITQRKFDNLTKAERGGLSELDKAGFIKRQLVETRQITKHVAQILDSRMNTKYDENDKLIREVKVITLKSKLVSDFRKDFQFYKVREINNYHHAHDAYLNAVVGTALIKKYPKLESEFVYGDYKVYDVRKMIAKSEQEIGKATAKYFFYSNIMNFFKTEITLANGEIRKRPLIETNGETGEIVWDKGRDFATVRKVLSMPQVNIVKKTEVQTGGFSKESILPKRNSDKLIARKKDWDPKKYGGFDSPTVAYSVLVVAKVEKGKSKKLKSVKELLGITIMERSSFEKNPIDFLEAKGYKEVKKDLIIKLPKYSLFELENGRKRMLASAGELQKGNELALPSKYVNFLYLASHYEKLKGSPEDNEQKQLFVEQHKHYLDEIIEQISEFSKRVILADANLDKVLSAYNKHRDKPIREQAENIIHLFTLTNLGAPAAFKYFDTTIDRKRYTSTKEVLDATLIHQSITGLYETRIDLSQLGGDGGPAPEAAAKGSSGGTLQLEEEYRLFEPESTQKQEMDIWLKNFPQAWAETGGMGTAHCQAPVLIQLKATATPISIRQYPMPHEAYQGIKPHIRRMLDQGILKPCQSPWNTPLLPVKKPGTEDYRPVQDLREVNKRVEDIHPTVPNPYNLLSTLPPSHPWYTVLDLKDAFFCLRLHSESQLLFAFEWRDPEIGLSGQLTWTRLPQGFKNSPTLFNEALHSDLADFRVRYPALVLLQYVDDLLLAAATRTECLEGTKALLETLGNKGYRASAKKAQICLQEVTYLGYSLKDGQRWLTKARKEAILSIPVPKNSRQVREFLGKAGYCRLFIPGFAELAAPLYPLTRPGTLFQWGTEQQLAFEDIKKALLSSPALGLPDITKPFELFIDENSGFAKGVLVQKLGPWKRPVAYLSKKLDTVASGWPPCLRMVAAIAILVKDAGKLTLGQPLTILTSHPVEALVRQPPNKWLSNARMTHYQAMLLDAERVHFGPTVSLNPATLLPLPSGGNHHDCLQILAETHGTRPDLTDQPLPDADLTWYTDGSSFIRNGEREAGAAVTTESEVIWAAPLPPGTSAQRAELIALTQALKMAEGKKLTVYTDSRYAFATTHVHGEIYRRRGWLTSEGKEIKNKNEILALLEALFLPKRLSIIHCPGHQKGDSPQAKGNRLADDTAKKAATETHSSLTVLPAGKRTADGSEFEKRTADGSEFESPKKKAKVE

SEQ ID NO: 1209 - protein, 2114 aa, synthetic construct
MPAAKRVKLDGGDKKYSIGLDIGTNSVGWAVITDEYKVPSKKFKVLGNTDRHSIKKNLIGALLFDSGETAEATRLKRTARRRYTRRKNRICYLQEIFSNEMAKVDDSFFHRLEESFLVEEDKKHERHPIFGNIVDEVAYHEKYPTIYHLRKKLVDSTDKADLRLIYLALAHMIKFRGHFLIEGDLNPDNSDVDKLFIQLVQTYNQLFEENPINASGVDAKAILSARLSKSRRLENLIAQLPGEKKNGLFGNLIALSLGLTPNFKSNFDLAEDAKLQLSKDTYDDDLDNLLAQIGDQYADLFLAAKNLSDAILLSDILRVNTEITKAPLSASMIKRYDEHHQDLTLLKALVRQQLPEKYKEIFFDQSKNGYAGYIDGGASQEEFYKFIKPILEKMDGTEELLVKLNREDLLRKQRTFDNGSIPHQIHLGELHAILRRQEDFYPFLKDNREKIEKILTFRIPYYVGPLARGNSRFAWMTRKSEETITPWNFEEVVDKGASAQSFIERMTNFDKNLPNEKVLPKHSLLYEYFTVYNELTKVKYVTEGMRKPAFLSGEQKKAIVDLLFKTNRKVTVKQLKEDYFKKIECFDSVEISGVEDRFNASLGTYHDLLKIIKDKDFLDNEENEDILEDIVLTLTLFEDREMIEERLKTYAHLFDDKVMKQLKRRRYTGWGRLSRKLINGIRDKQSGKTILDFLKSDGFANRNFMQLIHDDSLTFKEDIQKAQVSGQGDSLHEHIANLAGSPAIKKGILQTVKVVDELVKVMGRHKPENIVIEMARENQTTQKGQKNSRERMKRIEEGIKELGSQILKEHPVENTQLQNEKLYLYYLQNGRDMYVDQELDINRLSDYDVDHIVPQSFLKDDSIDNKVLTRSDKARGKSDNVPSEEVVKKMKNYWRQLLNAKLITQRKFDNLTKAERGGLSELDKAGFIKRQLVETRQITKHVAQILDSRMNTKYDENDKLIREVKVITLKSKLVSDFRKDFQFYKVREINNYHHAHDAYLNAVVGTALIKKYPKLESEFVYGDYKVYDVRKMIAKSEQEIGKATAKYFFYSNIMNFFKTEITLANGEIRKRPLIETNGETGEIVWDKGRDFATVRKVLSMPQVNIVKKTEVQTGGFSKESILPKRNSDKLIARKKDWDPKKYGGFDSPTVAYSVLVVAKVEKGKSKKLKSVKELLGITIMERSSFEKNPIDFLEAKGYKEVKKDLIIKLPKYSLFELENGRKRMLASAGELQKGNELALPSKYVNFLYLASHYEKLKGSPEDNEQKQLFVEQHKHYLDEIIEQISEFSKRVILADANLDKVLSAYNKHRDKPIREQAENIIHLFTLTNLGAPAAFKYFDTTIDRKRYTSTKEVLDATLIHQSITGLYETRIDLSQLGGDGGGGGGSGGGGSGGGGSGGGGSGGGGSGGGGSGGTLQLEEEYRLFEPESTQKQEMDIWLKNFPQAWAETGGMGTAHCQAPVLIQLKATATPISIRQYPMPHEAYQGIKPHIRRMLDQGILKPCQSPWNTPLLPVKKPGTEDYRPVQDLREVNKRVEDIHPTVPNPYNLLSTLPPSHPWYTVLDLKDAFFCLRLHSESQLLFAFEWRDPEIGLSGQLTWTRLPQGFKNSPTLFNEALHSDLADFRVRYPALVLLQYVDDLLLAAATRTECLEGTKALLETLGNKGYRASAKKAQICLQEVTYLGYSLKDGQRWLTKARKEAILSIPVPKNSRQVREFLGKAGYCRLFIPGFAELAAPLYPLTRPGTLFQWGTEQQLAFEDIKKALLSSPALGLPDITKPFELFIDENSGFAKGVLVQKLGPWKRPVAYLSKKLDTVASGWPPCLRMVAAIAILVKDAGKLTLGQPLTILTSHPVEALVRQPPNKWLSNARMTHYQAMLLDAERVHFGPTVSLNPATLLPLPSGGNHHDCLQILAETHGTRPDLTDQPLPDADLTWYTDGSSFIRNGEREAGAAVTTESEVIWAAPLPPGTSAQRAELIALTQALKMAEGKKLTVYTDSRYAFATTHVHGEIYRRRGWLTSEGKEIKNKNEILALLEALFLPKRLSIIHCPGHQKGDSPQAKGNRLADDTAKKAATETHSSLTVLPAGKRTADGSEFEKRTADGSEFESPKKKAKVE

SEQ ID NO: 1210 - protein, 2095 aa, synthetic construct
MPAAKRVKLDGGDKKYSIGLDIGTNSVGWAVITDEYKVPSKKFKVLGNTDRHSIKKNLIGALLFDSGETAEATRLKRTARRRYTRRKNRICYLQEIFSNEMAKVDDSFFHRLEESFLVEEDKKHERHPIFGNIVDEVAYHEKYPTIYHLRKKLVDSTDKADLRLIYLALAHMIKFRGHFLIEGDLNPDNSDVDKLFIQLVQTYNQLFEENPINASGVDAKAILSARLSKSRRLENLIAQLPGEKKNGLFGNLIALSLGLTPNFKSNFDLAEDAKLQLSKDTYDDDLDNLLAQIGDQYADLFLAAKNLSDAILLSDILRVNTEITKAPLSASMIKRYDEHHQDLTLLKALVRQQLPEKYKEIFFDQSKNGYAGYIDGGASQEEFYKFIKPILEKMDGTEELLVKLNREDLLRKQRTFDNGSIPHQIHLGELHAILRRQEDFYPFLKDNREKIEKILTFRIPYYVGPLARGNSRFAWMTRKSEETITPWNFEEVVDKGASAQSFIERMTNFDKNLPNEKVLPKHSLLYEYFTVYNELTKVKYVTEGMRKPAFLSGEQKKAIVDLLFKTNRKVTVKQLKEDYFKKIECFDSVEISGVEDRFNASLGTYHDLLKIIKDKDFLDNEENEDILEDIVLTLTLFEDREMIEERLKTYAHLFDDKVMKQLKRRRYTGWGRLSRKLINGIRDKQSGKTILDFLKSDGFANRNFMQLIHDDSLTFKEDIQKAQVSGQGDSLHEHIANLAGSPAIKKGILQTVKVVDELVKVMGRHKPENIVIEMARENQTTQKGQKNSRERMKRIEEGIKELGSQILKEHPVENTQLQNEKLYLYYLQNGRDMYVDQELDINRLSDYDVDHIVPQSFLKDDSIDNKVLTRSDKARGKSDNVPSEEVVKKMKNYWRQLLNAKLITQRKFDNLTKAERGGLSELDKAGFIKRQLVETRQITKHVAQILDSRMNTKYDENDKLIREVKVITLKSKLVSDFRKDFQFYKVREINNYHHAHDAYLNAVVGTALIKKYPKLESEFVYGDYKVYDVRKMIAKSEQEIGKATAKYFFYSNIMNFFKTEITLANGEIRKRPLIETNGETGEIVWDKGRDFATVRKVLSMPQVNIVKKTEVQTGGFSKESILPKRNSDKLIARKKDWDPKKYGGFDSPTVAYSVLVVAKVEKGKSKKLKSVKELLGITIMERSSFEKNPIDFLEAKGYKEVKKDLIIKLPKYSLFELENGRKRMLASAGELQKGNELALPSKYVNFLYLASHYEKLKGSPEDNEQKQLFVEQHKHYLDEIIEQISEFSKRVILADANLDKVLSAYNKHRDKPIREQAENIIHLFTLTNLGAPAAFKYFDTTIDRKRYTSTKEVLDATLIHQSITGLYETRIDLSQLGGDGGEAAAKGSSGGGGGTLQLEEEYRLFEPESTQKQEMDIWLKNFPQAWAETGGMGTAHCQAPVLIQLKATATPISIRQYPMPHEAYQGIKPHIRRMLDQGILKPCQSPWNTPLLPVKKPGTEDYRPVQDLREVNKRVEDIHPTVPNPYNLLSTLPPSHPWYTVLDLKDAFFCLRLHSESQLLFAFEWRDPEIGLSGQLTWTRLPQGFKNSPTLFNEALHSDLADFRVRYPALVLLQYVDDLLLAAATRTECLEGTKALLETLGNKGYRASAKKAQICLQEVTYLGYSLKDGQRWLTKARKEAILSIPVPKNSRQVREFLGKAGYCRLFIPGFAELAAPLYPLTRPGTLFQWGTEQQLAFEDIKKALLSSPALGLPDITKPFELFIDENSGFAKGVLVQKLGPWKRPVAYLSKKLDTVASGWPPCLRMVAAIAILVKDAGKLTLGQPLTILTSHPVEALVRQPPNKWLSNARMTHYQAMLLDAERVHFGPTVSLNPATLLPLPSGGNHHDCLQILAETHGTRPDLTDQPLPDADLTWYTDGSSFIRNGEREAGAAVTTESEVIWAAPLPPGTSAQRAELIALTQALKMAEGKKLTVYTDSRYAFATTHVHGEIYRRRGWLTSEGKEIKNKNEILALLEALFLPKRLSIIHCPGHQKGDSPQAKGNRLADDTAKKAATETHSSLTVLPAGKRTADGSEFEKRTADGSEFESPKKKAKVE

SEQ ID NO: 1211 - protein, 2090 aa, synthetic construct
MPAAKRVKLDGGDKKYSIGLDIGTNSVGWAVITDEYKVPSKKFKVLGNTDRHSIKKNLIGALLFDSGETAEATRLKRTARRRYTRRKNRICYLQEIFSNEMAKVDDSFFHRLEESFLVEEDKKHERHPIFGNIVDEVAYHEKYPTIYHLRKKLVDSTDKADLRLIYLALAHMIKFRGHFLIEGDLNPDNSDVDKLFIQLVQTYNQLFEENPINASGVDAKAILSARLSKSRRLENLIAQLPGEKKNGLFGNLIALSLGLTPNFKSNFDLAEDAKLQLSKDTYDDDLDNLLAQIGDQYADLFLAAKNLSDAILLSDILRVNTEITKAPLSASMIKRYDEHHQDLTLLKALVRQQLPEKYKEIFFDQSKNGYAGYIDGGASQEEFYKFIKPILEKMDGTEELLVKLNREDLLRKQRTFDNGSIPHQIHLGELHAILRRQEDFYPFLKDNREKIEKILTFRIPYYVGPLARGNSRFAWMTRKSEETITPWNFEEVVDKGASAQSFIERMTNFDKNLPNEKVLPKHSLLYEYFTVYNELTKVKYVTEGMRKPAFLSGEQKKAIVDLLFKTNRKVTVKQLKEDYFKKIECFDSVEISGVEDRFNASLGTYHDLLKIIKDKDFLDNEENEDILEDIVLTLTLFEDREMIEERLKTYAHLFDDKVMKQLKRRRYTGWGRLSRKLINGIRDKQSGKTILDFLKSDGFANRNFMQLIHDDSLTFKEDIQKAQVSGQGDSLHEHIANLAGSPAIKKGILQTVKVVDELVKVMGRHKPENIVIEMARENQTTQKGQKNSRERMKRIEEGIKELGSQILKEHPVENTQLQNEKLYLYYLQNGRDMYVDQELDINRLSDYDVDHIVPQSFLKDDSIDNKVLTRSDKARGKSDNVPSEEVVKKMKNYWRQLLNAKLITQRKFDNLTKAERGGLSELDKAGFIKRQLVETRQITKHVAQILDSRMNTKYDENDKLIREVKVITLKSKLVSDFRKDFQFYKVREINNYHHAHDAYLNAVVGTALIKKYPKLESEFVYGDYKVYDVRKMIAKSEQEIGKATAKYFFYSNIMNFFKTEITLANGEIRKRPLIETNGETGEIVWDKGRDFATVRKVLSMPQVNIVKKTEVQTGGFSKESILPKRNSDKLIARKKDWDPKKYGGFDSPTVAYSVLVVAKVEKGKSKKLKSVKELLGITIMERSSFEKNPIDFLEAKGYKEVKKDLIIKLPKYSLFELENGRKRMLASAGELQKGNELALPSKYVNFLYLASHYEKLKGSPEDNEQKQLFVEQHKHYLDEIIEQISEFSKRVILADANLDKVLSAYNKHRDKPIREQAENIIHLFTLTNLGAPAAFKYFDTTIDRKRYTSTKEVLDATLIHQSITGLYETRIDLSQLGGDGGGGGGGGGGTLQLEEEYRLFEPESTQKQEMDIWLKNFPQAWAETGGMGTAHCQAPVLIQLKATATPISIRQYPMPHEAYQGIKPHIRRMLDQGILKPCQSPWNTPLLPVKKPGTEDYRPVQDLREVNKRVEDIHPTVPNPYNLLSTLPPSHPWYTVLDLKDAFFCLRLHSESQLLFAFEWRDPEIGLSGQLTWTRLPQGFKNSPTLFNEALHSDLADFRVRYPALVLLQYVDDLLLAAATRTECLEGTKALLETLGNKGYRASAKKAQICLQEVTYLGYSLKDGQRWLTKARKEAILSIPVPKNSRQVREFLGKAGYCRLFIPGFAELAAPLYPLTRPGTLFQWGTEQQLAFEDIKKALLSSPALGLPDITKPFELFIDENSGFAKGVLVQKLGPWKRPVAYLSKKLDTVASGWPPCLRMVAAIAILVKDAGKLTLGQPLTILTSHPVEALVRQPPNKWLSNARMTHYQAMLLDAERVHFGPTVSLNPATLLPLPSGGNHHDCLQILAETHGTRPDLTDQPLPDADLTWYTDGSSFIRNGEREAGAAVTTESEVIWAAPLPPGTSAQRAELIALTQALKMAEGKKLTVYTDSRYAFATTHVHGEIYRRRGWLTSEGKEIKNKNEILALLEALFLPKRLSIIHCPGHQKGDSPQAKGNRLADDTAKKAATETHSSLTVLPAGKRTADGSEFEKRTADGSEFESPKKKAKVE

SEQ ID NO: 1212 - protein, 2102 aa, synthetic construct
MPAAKRVKLDGGDKKYSIGLDIGTNSVGWAVITDEYKVPSKKFKVLGNTDRHSIKKNLIGALLFDSGETAEATRLKRTARRRYTRRKNRICYLQEIFSNEMAKVDDSFFHRLEESFLVEEDKKHERHPIFGNIVDEVAYHEKYPTIYHLRKKLVDSTDKADLRLIYLALAHMIKFRGHFLIEGDLNPDNSDVDKLFIQLVQTYNQLFEENPINASGVDAKAILSARLSKSRRLENLIAQLPGEKKNGLFGNLIALSLGLTPNFKSNFDLAEDAKLQLSKDTYDDDLDNLLAQIGDQYADLFLAAKNLSDAILLSDILRVNTEITKAPLSASMIKRYDEHHQDLTLLKALVRQQLPEKYKEIFFDQSKNGYAGYIDGGASQEEFYKFIKPILEKMDGTEELLVKLNREDLLRKQRTFDNGSIPHQIHLGELHAILRRQEDFYPFLKDNREKIEKILTFRIPYYVGPLARGNSRFAWMTRKSEETITPWNFEEVVDKGASAQSFIERMTNFDKNLPNEKVLPKHSLLYEYFTVYNELTKVKYVTEGMRKPAFLSGEQKKAIVDLLFKTNRKVTVKQLKEDYFKKIECFDSVEISGVEDRFNASLGTYHDLLKIIKDKDFLDNEENEDILEDIVLTLTLFEDREMIEERLKTYAHLFDDKVMKQLKRRRYTGWGRLSRKLINGIRDKQSGKTILDFLKSDGFANRNFMQLIHDDSLTFKEDIQKAQVSGQGDSLHEHIANLAGSPAIKKGILQTVKVVDELVKVMGRHKPENIVIEMARENQTTQKGQKNSRERMKRIEEGIKELGSQILKEHPVENTQLQNEKLYLYYLQNGRDMYVDQELDINRLSDYDVDHIVPQSFLKDDSIDNKVLTRSDKARGKSDNVPSEEVVKKMKNYWRQLLNAKLITQRKFDNLTKAERGGLSELDKAGFIKRQLVETRQITKHVAQILDSRMNTKYDENDKLIREVKVITLKSKLVSDFRKDFQFYKVREINNYHHAHDAYLNAVVGTALIKKYPKLESEFVYGDYKVYDVRKMIAKSEQEIGKATAKYFFYSNIMNFFKTEITLANGEIRKRPLIETNGETGEIVWDKGRDFATVRKVLSMPQVNIVKKTEVQTGGFSKESILPKRNSDKLIARKKDWDPKKYGGFDSPTVAYSVLVVAKVEKGKSKKLKSVKELLGITIMERSSFEKNPIDFLEAKGYKEVKKDLIIKLPKYSLFELENGRKRMLASAGELQKGNELALPSKYVNFLYLASHYEKLKGSPEDNEQKQLFVEQHKHYLDEIIEQISEFSKRVILADANLDKVLSAYNKHRDKPIREQAENIIHLFTLTNLGAPAAFKYFDTTIDRKRYTSTKEVLDATLIHQSITGLYETRIDLSQLGGDGGGSSGSSGSSGSSGSSGSSGGTLQLEEEYRLFEPESTQKQEMDIWLKNFPQAWAETGGMGTAHCQAPVLIQLKATATPISIRQYPMPHEAYQGIKPHIRRMLDQGILKPCQSPWNTPLLPVKKPGTEDYRPVQDLREVNKRVEDIHPTVPNPYNLLSTLPPSHPWYTVLDLKDAFFCLRLHSESQLLFAFEWRDPEIGLSGQLTWTRLPQGFKNSPTLFNEALHSDLADFRVRYPALVLLQYVDDLLLAAATRTECLEGTKALLETLGNKGYRASAKKAQICLQEVTYLGYSLKDGQRWLTKARKEAILSIPVPKNSRQVREFLGKAGYCRLFIPGFAELAAPLYPLTRPGTLFQWGTEQQLAFEDIKKALLSSPALGLPDITKPFELFIDENSGFAKGVLVQKLGPWKRPVAYLSKKLDTVASGWPPCLRMVAAIAILVKDAGKLTLGQPLTILTSHPVEALVRQPPNKWLSNARMTHYQAMLLDAERVHFGPTVSLNPATLLPLPSGGNHHDCLQILAETHGTRPDLTDQPLPDADLTWYTDGSSFIRNGEREAGAAVTTESEVIWAAPLPPGTSAQRAELIALTQALKMAEGKKLTVYTDSRYAFATTHVHGEIYRRRGWLTSEGKEIKNKNEILALLEALFLPKRLSIIHCPGHQKGDSPQAKGNRLADDTAKKAATETHSSLTVLPAGKRTADGSEFEKRTADGSEFESPKKKAKVE

SEQ ID NO: 1213 - protein, 2099 aa, synthetic construct
MPAAKRVKLDGGDKKYSIGLDIGTNSVGWAVITDEYKVPSKKFKVLGNTDRHSIKKNLIGALLFDSGETAEATRLKRTARRRYTRRKNRICYLQEIFSNEMAKVDDSFFHRLEESFLVEEDKKHERHPIFGNIVDEVAYHEKYPTIYHLRKKLVDSTDKADLRLIYLALAHMIKFRGHFLIEGDLNPDNSDVDKLFIQLVQTYNQLFEENPINASGVDAKAILSARLSKSRRLENLIAQLPGEKKNGLFGNLIALSLGLTPNFKSNFDLAEDAKLQLSKDTYDDDLDNLLAQIGDQYADLFLAAKNLSDAILLSDILRVNTEITKAPLSASMIKRYDEHHQDLTLLKALVRQQLPEKYKEIFFDQSKNGYAGYIDGGASQEEFYKFIKPILEKMDGTEELLVKLNREDLLRKQRTFDNGSIPHQIHLGELHAILRRQEDFYPFLKDNREKIEKILTFRIPYYVGPLARGNSRFAWMTRKSEETITPWNFEEVVDKGASAQSFIERMTNFDKNLPNEKVLPKHSLLYEYFTVYNELTKVKYVTEGMRKPAFLSGEQKKAIVDLLFKTNRKVTVKQLKEDYFKKIECFDSVEISGVEDRFNASLGTYHDLLKIIKDKDFLDNEENEDILEDIVLTLTLFEDREMIEERLKTYAHLFDDKVMKQLKRRRYTGWGRLSRKLINGIRDKQSGKTILDFLKSDGFANRNFMQLIHDDSLTFKEDIQKAQVSGQGDSLHEHIANLAGSPAIKKGILQTVKVVDELVKVMGRHKPENIVIEMARENQTTQKGQKNSRERMKRIEEGIKELGSQILKEHPVENTQLQNEKLYLYYLQNGRDMYVDQELDINRLSDYDVDHIVPQSFLKDDSIDNKVLTRSDKARGKSDNVPSEEVVKKMKNYWRQLLNAKLITQRKFDNLTKAERGGLSELDKAGFIKRQLVETRQITKHVAQILDSRMNTKYDENDKLIREVKVITLKSKLVSDFRKDFQFYKVREINNYHHAHDAYLNAVVGTALIKKYPKLESEFVYGDYKVYDVRKMIAKSEQEIGKATAKYFFYSNIMNFFKTEITLANGEIRKRPLIETNGETGEIVWDKGRDFATVRKVLSMPQVNIVKKTEVQTGGFSKESILPKRNSDKLIARKKDWDPKKYGGFDSPTVAYSVLVVAKVEKGKSKKLKSVKELLGITIMERSSFEKNPIDFLEAKGYKEVKKDLIIKLPKYSLFELENGRKRMLASAGELQKGNELALPSKYVNFLYLASHYEKLKGSPEDNEQKQLFVEQHKHYLDEIIEQISEFSKRVILADANLDKVLSAYNKHRDKPIREQAENIIHLFTLTNLGAPAAFKYFDTTIDRKRYTSTKEVLDATLIHQSITGLYETRIDLSQLGGDGGEAAAKEAAAKEAAAKGGTLQLEEEYRLFEPESTQKQEMDIWLKNFPQAWAETGGMGTAHCQAPVLIQLKATATPISIRQYPMPHEAYQGIKPHIRRMLDQGILKPCQSPWNTPLLPVKKPGTEDYRPVQDLREVNKRVEDIHPTVPNPYNLLSTLPPSHPWYTVLDLKDAFFCLRLHSESQLLFAFEWRDPEIGLSGQLTWTRLPQGFKNSPTLFNEALHSDLADFRVRYPALVLLQYVDDLLLAAATRTECLEGTKALLETLGNKGYRASAKKAQICLQEVTYLGYSLKDGQRWLTKARKEAILSIPVPKNSRQVREFLGKAGYCRLFIPGFAELAAPLYPLTRPGTLFQWGTEQQLAFEDIKKALLSSPALGLPDITKPFELFIDENSGFAKGVLVQKLGPWKRPVAYLSKKLDTVASGWPPCLRMVAAIAILVKDAGKLTLGQPLTILTSHPVEALVRQPPNKWLSNARMTHYQAMLLDAERVHFGPTVSLNPATLLPLPSGGNHHDCLQILAETHGTRPDLTDQPLPDADLTWYTDGSSFIRNGEREAGAAVTTESEVIWAAPLPPGTSAQRAELIALTQALKMAEGKKLTVYTDSRYAFATTHVHGEIYRRRGWLTSEGKEIKNKNEILALLEALFLPKRLSIIHCPGHQKGDSPQAKGNRLADDTAKKAATETHSSLTVLPAGKRTADGSEFEKRTADGSEFESPKKKAKVE

SEQ ID NO: 1214 - protein, 2095 aa, synthetic construct
MPAAKRVKLDGGDKKYSIGLDIGTNSVGWAVITDEYKVPSKKFKVLGNTDRHSIKKNLIGALLFDSGETAEATRLKRTARRRYTRRKNRICYLQEIFSNEMAKVDDSFFHRLEESFLVEEDKKHERHPIFGNIVDEVAYHEKYPTIYHLRKKLVDSTDKADLRLIYLALAHMIKFRGHFLIEGDLNPDNSDVDKLFIQLVQTYNQLFEENPINASGVDAKAILSARLSKSRRLENLIAQLPGEKKNGLFGNLIALSLGLTPNFKSNFDLAEDAKLQLSKDTYDDDLDNLLAQIGDQYADLFLAAKNLSDAILLSDILRVNTEITKAPLSASMIKRYDEHHQDLTLLKALVRQQLPEKYKEIFFDQSKNGYAGYIDGGASQEEFYKFIKPILEKMDGTEELLVKLNREDLLRKQRTFDNGSIPHQIHLGELHAILRRQEDFYPFLKDNREKIEKILTFRIPYYVGPLARGNSRFAWMTRKSEETITPWNFEEVVDKGASAQSFIERMTNFDKNLPNEKVLPKHSLLYEYFTVYNELTKVKYVTEGMRKPAFLSGEQKKAIVDLLFKTNRKVTVKQLKEDYFKKIECFDSVEISGVEDRFNASLGTYHDLLKIIKDKDFLDNEENEDILEDIVLTLTLFEDREMIEERLKTYAHLFDDKVMKQLKRRRYTGWGRLSRKLINGIRDKQSGKTILDFLKSDGFANRNFMQLIHDDSLTFKEDIQKAQVSGQGDSLHEHIANLAGSPAIKKGILQTVKVVDELVKVMGRHKPENIVIEMARENQTTQKGQKNSRERMKRIEEGIKELGSQILKEHPVENTQLQNEKLYLYYLQNGRDMYVDQELDINRLSDYDVDHIVPQSFLKDDSIDNKVLTRSDKARGKSDNVPSEEVVKKMKNYWRQLLNAKLITQRKFDNLTKAERGGLSELDKAGFIKRQLVETRQITKHVAQILDSRMNTKYDENDKLIREVKVITLKSKLVSDFRKDFQFYKVREINNYHHAHDAYLNAVVGTALIKKYPKLESEFVYGDYKVYDVRKMIAKSEQEIGKATAKYFFYSNIMNFFKTEITLANGEIRKRPLIETNGETGEIVWDKGRDFATVRKVLSMPQVNIVKKTEVQTGGFSKESILPKRNSDKLIARKKDWDPKKYGGFDSPTVAYSVLVVAKVEKGKSKKLKSVKELLGITIMERSSFEKNPIDFLEAKGYKEVKKDLIIKLPKYSLFELENGRKRMLASAGELQKGNELALPSKYVNFLYLASHYEKLKGSPEDNEQKQLFVEQHKHYLDEIIEQISEFSKRVILADANLDKVLSAYNKHRDKPIREQAENIIHLFTLTNLGAPAAFKYFDTTIDRKRYTSTKEVLDATLIHQSITGLYETRIDLSQLGGDGGPAPGSSEAAAKGGTLQLEEEYRLFEPESTQKQEMDIWLKNFPQAWAETGGMGTAHCQAPVLIQLKATATPISIRQYPMPHEAYQGIKPHIRRMLDQGILKPCQSPWNTPLLPVKKPGTEDYRPVQDLREVNKRVEDIHPTVPNPYNLLSTLPPSHPWYTVLDLKDAFFCLRLHSESQLLFAFEWRDPEIGLSGQLTWTRLPQGFKNSPTLFNEALHSDLADFRVRYPALVLLQYVDDLLLAAATRTECLEGTKALLETLGNKGYRASAKKAQICLQEVTYLGYSLKDGQRWLTKARKEAILSIPVPKNSRQVREFLGKAGYCRLFIPGFAELAAPLYPLTRPGTLFQWGTEQQLAFEDIKKALLSSPALGLPDITKPFELFIDENSGFAKGVLVQKLGPWKRPVAYLSKKLDTVASGWPPCLRMVAAIAILVKDAGKLTLGQPLTILTSHPVEALVRQPPNKWLSNARMTHYQAMLLDAERVHFGPTVSLNPATLLPLPSGGNHHDCLQILAETHGTRPDLTDQPLPDADLTWYTDGSSFIRNGEREAGAAVTTESEVIWAAPLPPGTSAQRAELIALTQALKMAEGKKLTVYTDSRYAFATTHVHGEIYRRRGWLTSEGKEIKNKNEILALLEALFLPKRLSIIHCPGHQKGDSPQAKGNRLADDTAKKAATETHSSLTVLPAGKRTADGSEFEKRTADGSEFESPKKKAKVE

SEQ ID NO: 1215 - protein, 2092 aa, synthetic construct
MPAAKRVKLDGGDKKYSIGLDIGTNSVGWAVITDEYKVPSKKFKVLGNTDRHSIKKNLIGALLFDSGETAEATRLKRTARRRYTRRKNRICYLQEIFSNEMAKVDDSFFHRLEESFLVEEDKKHERHPIFGNIVDEVAYHEKYPTIYHLRKKLVDSTDKADLRLIYLALAHMIKFRGHFLIEGDLNPDNSDVDKLFIQLVQTYNQLFEENPINASGVDAKAILSARLSKSRRLENLIAQLPGEKKNGLFGNLIALSLGLTPNFKSNFDLAEDAKLQLSKDTYDDDLDNLLAQIGDQYADLFLAAKNLSDAILLSDILRVNTEITKAPLSASMIKRYDEHHQDLTLLKALVRQQLPEKYKEIFFDQSKNGYAGYIDGGASQEEFYKFIKPILEKMDGTEELLVKLNREDLLRKQRTFDNGSIPHQIHLGELHAILRRQEDFYPFLKDNREKIEKILTFRIPYYVGPLARGNSRFAWMTRKSEETITPWNFEEVVDKGASAQSFIERMTNFDKNLPNEKVLPKHSLLYEYFTVYNELTKVKYVTEGMRKPAFLSGEQKKAIVDLLFKTNRKVTVKQLKEDYFKKIECFDSVEISGVEDRFNASLGTYHDLLKIIKDKDFLDNEENEDILEDIVLTLTLFEDREMIEERLKTYAHLFDDKVMKQLKRRRYTGWGRLSRKLINGIRDKQSGKTILDFLKSDGFANRNFMQLIHDDSLTFKEDIQKAQVSGQGDSLHEHIANLAGSPAIKKGILQTVKVVDELVKVMGRHKPENIVIEMARENQTTQKGQKNSRERMKRIEEGIKELGSQILKEHPVENTQLQNEKLYLYYLQNGRDMYVDQELDINRLSDYDVDHIVPQSFLKDDSIDNKVLTRSDKARGKSDNVPSEEVVKKMKNYWRQLLNAKLITQRKFDNLTKAERGGLSELDKAGFIKRQLVETRQITKHVAQILDSRMNTKYDENDKLIREVKVITLKSKLVSDFRKDFQFYKVREINNYHHAHDAYLNAVVGTALIKKYPKLESEFVYGDYKVYDVRKMIAKSEQEIGKATAKYFFYSNIMNFFKTEITLANGEIRKRPLIETNGETGEIVWDKGRDFATVRKVLSMPQVNIVKKTEVQTGGFSKESILPKRNSDKLIARKKDWDPKKYGGFDSPTVAYSVLVVAKVEKGKSKKLKSVKELLGITIMERSSFEKNPIDFLEAKGYKEVKKDLIIKLPKYSLFELENGRKRMLASAGELQKGNELALPSKYVNFLYLASHYEKLKGSPEDNEQKQLFVEQHKHYLDEIIEQISEFSKRVILADANLDKVLSAYNKHRDKPIREQAENIIHLFTLTNLGAPAAFKYFDTTIDRKRYTSTKEVLDATLIHQSITGLYETRIDLSQLGGDGGGGGGGGGGGGTLQLEEEYRLFEPESTQKQEMDIWLKNFPQAWAETGGMGTAHCQAPVLIQLKATATPISIRQYPMPHEAYQGIKPHIRRMLDQGILKPCQSPWNTPLLPVKKPGTEDYRPVQDLREVNKRVEDIHPTVPNPYNLLSTLPPSHPWYTVLDLKDAFFCLRLHSESQLLFAFEWRDPEIGLSGQLTWTRLPQGFKNSPTLFNEALHSDLADFRVRYPALVLLQYVDDLLLAAATRTECLEGTKALLETLGNKGYRASAKKAQICLQEVTYLGYSLKDGQRWLTKARKEAILSIPVPKNSRQVREFLGKAGYCRLFIPGFAELAAPLYPLTRPGTLFQWGTEQQLAFEDIKKALLSSPALGLPDITKPFELFIDENSGFAKGVLVQKLGPWKRPVAYLSKKLDTVASGWPPCLRMVAAIAILVKDAGKLTLGQPLTILTSHPVEALVRQPPNKWLSNARMTHYQAMLLDAERVHFGPTVSLNPATLLPLPSGGNHHDCLQILAETHGTRPDLTDQPLPDADLTWYTDGSSFIRNGEREAGAAVTTESEVIWAAPLPPGTSAQRAELIALTQALKMAEGKKLTVYTDSRYAFATTHVHGEIYRRRGWLTSEGKEIKNKNEILALLEALFLPKRLSIIHCPGHQKGDSPQAKGNRLADDTAKKAATETHSSLTVLPAGKRTADGSEFEKRTADGSEFESPKKKAKVE

SEQ ID NO: 1216 - protein, 2093 aa, synthetic construct
MPAAKRVKLDGGDKKYSIGLDIGTNSVGWAVITDEYKVPSKKFKVLGNTDRHSIKKNLIGALLFDSGETAEATRLKRTARRRYTRRKNRICYLQEIFSNEMAKVDDSFFHRLEESFLVEEDKKHERHPIFGNIVDEVAYHEKYPTIYHLRKKLVDSTDKADLRLIYLALAHMIKFRGHFLIEGDLNPDNSDVDKLFIQLVQTYNQLFEENPINASGVDAKAILSARLSKSRRLENLIAQLPGEKKNGLFGNLIALSLGLTPNFKSNFDLAEDAKLQLSKDTYDDDLDNLLAQIGDQYADLFLAAKNLSDAILLSDILRVNTEITKAPLSASMIKRYDEHHQDLTLLKALVRQQLPEKYKEIFFDQSKNGYAGYIDGGASQEEFYKFIKPILEKMDGTEELLVKLNREDLLRKQRTFDNGSIPHQIHLGELHAILRRQEDFYPFLKDNREKIEKILTFRIPYYVGPLARGNSRFAWMTRKSEETITPWNFEEVVDKGASAQSFIERMTNFDKNLPNEKVLPKHSLLYEYFTVYNELTKVKYVTEGMRKPAFLSGEQKKAIVDLLFKTNRKVTVKQLKEDYFKKIECFDSVEISGVEDRFNASLGTYHDLLKIIKDKDFLDNEENEDILEDIVLTLTLFEDREMIEERLKTYAHLFDDKVMKQLKRRRYTGWGRLSRKLINGIRDKQSGKTILDFLKSDGFANRNFMQLIHDDSLTFKEDIQKAQVSGQGDSLHEHIANLAGSPAIKKGILQTVKVVDELVKVMGRHKPENIVIEMARENQTTQKGQKNSRERMKRIEEGIKELGSQILKEHPVENTQLQNEKLYLYYLQNGRDMYVDQELDINRLSDYDVDHIVPQSFLKDDSIDNKVLTRSDKARGKSDNVPSEEVVKKMKNYWRQLLNAKLITQRKFDNLTKAERGGLSELDKAGFIKRQLVETRQITKHVAQILDSRMNTKYDENDKLIREVKVITLKSKLVSDFRKDFQFYKVREINNYHHAHDAYLNAVVGTALIKKYPKLESEFVYGDYKVYDVRKMIAKSEQEIGKATAKYFFYSNIMNFFKTEITLANGEIRKRPLIETNGETGEIVWDKGRDFATVRKVLSMPQVNIVKKTEVQTGGFSKESILPKRNSDKLIARKKDWDPKKYGGFDSPTVAYSVLVVAKVEKGKSKKLKSVKELLGITIMERSSFEKNPIDFLEAKGYKEVKKDLIIKLPKYSLFELENGRKRMLASAGELQKGNELALPSKYVNFLYLASHYEKLKGSPEDNEQKQLFVEQHKHYLDEIIEQISEFSKRVILADANLDKVLSAYNKHRDKPIREQAENIIHLFTLTNLGAPAAFKYFDTTIDRKRYTSTKEVLDATLIHQSITGLYETRIDLSQLGGDGGPAPAPAPAPGGTLQLEEEYRLFEPESTQKQEMDIWLKNFPQAWAETGGMGTAHCQAPVLIQLKATATPISIRQYPMPHEAYQGIKPHIRRMLDQGILKPCQSPWNTPLLPVKKPGTEDYRPVQDLREVNKRVEDIHPTVPNPYNLLSTLPPSHPWYTVLDLKDAFFCLRLHSESQLLFAFEWRDPEIGLSGQLTWTRLPQGFKNSPTLFNEALHSDLADFRVRYPALVLLQYVDDLLLAAATRTECLEGTKALLETLGNKGYRASAKKAQICLQEVTYLGYSLKDGQRWLTKARKEAILSIPVPKNSRQVREFLGKAGYCRLFIPGFAELAAPLYPLTRPGTLFQWGTEQQLAFEDIKKALLSSPALGLPDITKPFELFIDENSGFAKGVLVQKLGPWKRPVAYLSKKLDTVASGWPPCLRMVAAIAILVKDAGKLTLGQPLTILTSHPVEALVRQPPNKWLSNARMTHYQAMLLDAERVHFGPTVSLNPATLLPLPSGGNHHDCLQILAETHGTRPDLTDQPLPDADLTWYTDGSSFIRNGEREAGAAVTTESEVIWAAPLPPGTSAQRAELIALTQALKMAEGKKLTVYTDSRYAFATTHVHGEIYRRRGWLTSEGKEIKNKNEILALLEALFLPKRLSIIHCPGHQKGDSPQAKGNRLADDTAKKAATETHSSLTVLPAGKRTADGSEFEKRTADGSEFESPKKKAKVE

SEQ ID NO: 1217 - protein, 2089 aa, synthetic construct
MPAAKRVKLDGGDKKYSIGLDIGTNSVGWAVITDEYKVPSKKFKVLGNTDRHSIKKNLIGALLFDSGETAEATRLKRTARRRYTRRKNRICYLQEIFSNEMAKVDDSFFHRLEESFLVEEDKKHERHPIFGNIVDEVAYHEKYPTIYHLRKKLVDSTDKADLRLIYLALAHMIKFRGHFLIEGDLNPDNSDVDKLFIQLVQTYNQLFEENPINASGVDAKAILSARLSKSRRLENLIAQLPGEKKNGLFGNLIALSLGLTPNFKSNFDLAEDAKLQLSKDTYDDDLDNLLAQIGDQYADLFLAAKNLSDAILLSDILRVNTEITKAPLSASMIKRYDEHHQDLTLLKALVRQQLPEKYKEIFFDQSKNGYAGYIDGGASQEEFYKFIKPILEKMDGTEELLVKLNREDLLRKQRTFDNGSIPHQIHLGELHAILRRQEDFYPFLKDNREKIEKILTFRIPYYVGPLARGNSRFAWMTRKSEETITPWNFEEVVDKGASAQSFIERMTNFDKNLPNEKVLPKHSLLYEYFTVYNELTKVKYVTEGMRKPAFLSGEQKKAIVDLLFKTNRKVTVKQLKEDYFKKIECFDSVEISGVEDRFNASLGTYHDLLKIIKDKDFLDNEENEDILEDIVLTLTLFEDREMIEERLKTYAHLFDDKVMKQLKRRRYTGWGRLSRKLINGIRDKQSGKTILDFLKSDGFANRNFMQLIHDDSLTFKEDIQKAQVSGQGDSLHEHIANLAGSPAIKKGILQTVKVVDELVKVMGRHKPENIVIEMARENQTTQKGQKNSRERMKRIEEGIKELGSQILKEHPVENTQLQNEKLYLYYLQNGRDMYVDQELDINRLSDYDVDHIVPQSFLKDDSIDNKVLTRSDKARGKSDNVPSEEVVKKMKNYWRQLLNAKLITQRKFDNLTKAERGGLSELDKAGFIKRQLVETRQITKHVAQILDSRMNTKYDENDKLIREVKVITLKSKLVSDFRKDFQFYKVREINNYHHAHDAYLNAVVGTALIKKYPKLESEFVYGDYKVYDVRKMIAKSEQEIGKATAKYFFYSNIMNFFKTEITLANGEIRKRPLIETNGETGEIVWDKGRDFATVRKVLSMPQVNIVKKTEVQTGGFSKESILPKRNSDKLIARKKDWDPKKYGGFDSPTVAYSVLVVAKVEKGKSKKLKSVKELLGITIMERSSFEKNPIDFLEAKGYKEVKKDLIIKLPKYSLFELENGRKRMLASAGELQKGNELALPSKYVNFLYLASHYEKLKGSPEDNEQKQLFVEQHKHYLDEIIEQISEFSKRVILADANLDKVLSAYNKHRDKPIREQAENIIHLFTLTNLGAPAAFKYFDTTIDRKRYTSTKEVLDATLIHQSITGLYETRIDLSQLGGDGGGGGGGGGTLQLEEEYRLFEPESTQKQEMDIWLKNFPQAWAETGGMGTAHCQAPVLIQLKATATPISIRQYPMPHEAYQGIKPHIRRMLDQGILKPCQSPWNTPLLPVKKPGTEDYRPVQDLREVNKRVEDIHPTVPNPYNLLSTLPPSHPWYTVLDLKDAFFCLRLHSESQLLFAFEWRDPEIGLSGQLTWTRLPQGFKNSPTLFNEALHSDLADFRVRYPALVLLQYVDDLLLAAATRTECLEGTKALLETLGNKGYRASAKKAQICLQEVTYLGYSLKDGQRWLTKARKEAILSIPVPKNSRQVREFLGKAGYCRLFIPGFAELAAPLYPLTRPGTLFQWGTEQQLAFEDIKKALLSSPALGLPDITKPFELFIDENSGFAKGVLVQKLGPWKRPVAYLSKKLDTVASGWPPCLRMVAAIAILVKDAGKLTLGQPLTILTSHPVEALVRQPPNKWLSNARMTHYQAMLLDAERVHFGPTVSLNPATLLPLPSGGNHHDCLQILAETHGTRPDLTDQPLPDADLTWYTDGSSFIRNGEREAGAAVTTESEVIWAAPLPPGTSAQRAELIALTQALKMAEGKKLTVYTDSRYAFATTHVHGEIYRRRGWLTSEGKEIKNKNEILALLEALFLPKRLSIIHCPGHQKGDSPQAKGNRLADDTAKKAATETHSSLTVLPAGKRTADGSEFEKRTADGSEFESPKKKAKVE

SEQ ID NO: 1218 - protein, 2095 aa, synthetic construct
MPAAKRVKLDGGDKKYSIGLDIGTNSVGWAVITDEYKVPSKKFKVLGNTDRHSIKKNLIGALLFDSGETAEATRLKRTARRRYTRRKNRICYLQEIFSNEMAKVDDSFFHRLEESFLVEEDKKHERHPIFGNIVDEVAYHEKYPTIYHLRKKLVDSTDKADLRLIYLALAHMIKFRGHFLIEGDLNPDNSDVDKLFIQLVQTYNQLFEENPINASGVDAKAILSARLSKSRRLENLIAQLPGEKKNGLFGNLIALSLGLTPNFKSNFDLAEDAKLQLSKDTYDDDLDNLLAQIGDQYADLFLAAKNLSDAILLSDILRVNTEITKAPLSASMIKRYDEHHQDLTLLKALVRQQLPEKYKEIFFDQSKNGYAGYIDGGASQEEFYKFIKPILEKMDGTEELLVKLNREDLLRKQRTFDNGSIPHQIHLGELHAILRRQEDFYPFLKDNREKIEKILTFRIPYYVGPLARGNSRFAWMTRKSEETITPWNFEEVVDKGASAQSFIERMTNFDKNLPNEKVLPKHSLLYEYFTVYNELTKVKYVTEGMRKPAFLSGEQKKAIVDLLFKTNRKVTVKQLKEDYFKKIECFDSVEISGVEDRFNASLGTYHDLLKIIKDKDFLDNEENEDILEDIVLTLTLFEDREMIEERLKTYAHLFDDKVMKQLKRRRYTGWGRLSRKLINGIRDKQSGKTILDFLKSDGFANRNFMQLIHDDSLTFKEDIQKAQVSGQGDSLHEHIANLAGSPAIKKGILQTVKVVDELVKVMGRHKPENIVIEMARENQTTQKGQKNSRERMKRIEEGIKELGSQILKEHPVENTQLQNEKLYLYYLQNGRDMYVDQELDINRLSDYDVDHIVPQSFLKDDSIDNKVLTRSDKARGKSDNVPSEEVVKKMKNYWRQLLNAKLITQRKFDNLTKAERGGLSELDKAGFIKRQLVETRQITKHVAQILDSRMNTKYDENDKLIREVKVITLKSKLVSDFRKDFQFYKVREINNYHHAHDAYLNAVVGTALIKKYPKLESEFVYGDYKVYDVRKMIAKSEQEIGKATAKYFFYSNIMNFFKTEITLANGEIRKRPLIETNGETGEIVWDKGRDFATVRKVLSMPQVNIVKKTEVQTGGFSKESILPKRNSDKLIARKKDWDPKKYGGFDSPTVAYSVLVVAKVEKGKSKKLKSVKELLGITIMERSSFEKNPIDFLEAKGYKEVKKDLIIKLPKYSLFELENGRKRMLASAGELQKGNELALPSKYVNFLYLASHYEKLKGSPEDNEQKQLFVEQHKHYLDEIIEQISEFSKRVILADANLDKVLSAYNKHRDKPIREQAENIIHLFTLTNLGAPAAFKYFDTTIDRKRYTSTKEVLDATLIHQSITGLYETRIDLSQLGGDGGGSSEAAAKPAPGGTLQLEEEYRLFEPESTQKQEMDIWLKNFPQAWAETGGMGTAHCQAPVLIQLKATATPISIRQYPMPHEAYQGIKPHIRRMLDQGILKPCQSPWNTPLLPVKKPGTEDYRPVQDLREVNKRVEDIHPTVPNPYNLLSTLPPSHPWYTVLDLKDAFFCLRLHSESQLLFAFEWRDPEIGLSGQLTWTRLPQGFKNSPTLFNEALHSDLADFRVRYPALVLLQYVDDLLLAAATRTECLEGTKALLETLGNKGYRASAKKAQICLQEVTYLGYSLKDGQRWLTKARKEAILSIPVPKNSRQVREFLGKAGYCRLFIPGFAELAAPLYPLTRPGTLFQWGTEQQLAFEDIKKALLSSPALGLPDITKPFELFIDENSGFAKGVLVQKLGPWKRPVAYLSKKLDTVASGWPPCLRMVAAIAILVKDAGKLTLGQPLTILTSHPVEALVRQPPNKWLSNARMTHYQAMLLDAERVHFGPTVSLNPATLLPLPSGGNHHDCLQILAETHGTRPDLTDQPLPDADLTWYTDGSSFIRNGEREAGAAVTTESEVIWAAPLPPGTSAQRAELIALTQALKMAEGKKLTVYTDSRYAFATTHVHGEIYRRRGWLTSEGKEIKNKNEILALLEALFLPKRLSIIHCPGHQKGDSPQAKGNRLADDTAKKAATETHSSLTVLPAGKRTADGSEFEKRTADGSEFESPKKKAKVE

SEQ ID NO: 1219 - protein, 2097 aa, synthetic construct
MPAAKRVKLDGGDKKYSIGLDIGTNSVGWAVITDEYKVPSKKFKVLGNTDRHSIKKNLIGALLFDSGETAEATRLKRTARRRYTRRKNRICYLQEIFSNEMAKVDDSFFHRLEESFLVEEDKKHERHPIFGNIVDEVAYHEKYPTIYHLRKKLVDSTDKADLRLIYLALAHMIKFRGHFLIEGDLNPDNSDVDKLFIQLVQTYNQLFEENPINASGVDAKAILSARLSKSRRLENLIAQLPGEKKNGLFGNLIALSLGLTPNFKSNFDLAEDAKLQLSKDTYDDDLDNLLAQIGDQYADLFLAAKNLSDAILLSDILRVNTEITKAPLSASMIKRYDEHHQDLTLLKALVRQQLPEKYKEIFFDQSKNGYAGYIDGGASQEEFYKFIKPILEKMDGTEELLVKLNREDLLRKQRTFDNGSIPHQIHLGELHAILRRQEDFYPFLKDNREKIEKILTFRIPYYVGPLARGNSRFAWMTRKSEETITPWNFEEVVDKGASAQSFIERMTNFDKNLPNEKVLPKHSLLYEYFTVYNELTKVKYVTEGMRKPAFLSGEQKKAIVDLLFKTNRKVTVKQLKEDYFKKIECFDSVEISGVEDRFNASLGTYHDLLKIIKDKDFLDNEENEDILEDIVLTLTLFEDREMIEERLKTYAHLFDDKVMKQLKRRRYTGWGRLSRKLINGIRDKQSGKTILDFLKSDGFANRNFMQLIHDDSLTFKEDIQKAQVSGQGDSLHEHIANLAGSPAIKKGILQTVKVVDELVKVMGRHKPENIVIEMARENQTTQKGQKNSRERMKRIEEGIKELGSQILKEHPVENTQLQNEKLYLYYLQNGRDMYVDQELDINRLSDYDVDHIVPQSFLKDDSIDNKVLTRSDKARGKSDNVPSEEVVKKMKNYWRQLLNAKLITQRKFDNLTKAERGGLSELDKAGFIKRQLVETRQITKHVAQILDSRMNTKYDENDKLIREVKVITLKSKLVSDFRKDFQFYKVREINNYHHAHDAYLNAVVGTALIKKYPKLESEFVYGDYKVYDVRKMIAKSEQEIGKATAKYFFYSNIMNFFKTEITLANGEIRKRPLIETNGETGEIVWDKGRDFATVRKVLSMPQVNIVKKTEVQTGGFSKESILPKRNSDKLIARKKDWDPKKYGGFDSPTVAYSVLVVAKVEKGKSKKLKSVKELLGITIMERSSFEKNPIDFLEAKGYKEVKKDLIIKLPKYSLFELENGRKRMLASAGELQKGNELALPSKYVNFLYLASHYEKLKGSPEDNEQKQLFVEQHKHYLDEIIEQISEFSKRVILADANLDKVLSAYNKHRDKPIREQAENIIHLFTLTNLGAPAAFKYFDTTIDRKRYTSTKEVLDATLIHQSITGLYETRIDLSQLGGDGGPAPAPAPAPAPAPGGTLQLEEEYRLFEPESTQKQEMDIWLKNFPQAWAETGGMGTAHCQAPVLIQLKATATPISIRQYPMPHEAYQGIKPHIRRMLDQGILKPCQSPWNTPLLPVKKPGTEDYRPVQDLREVNKRVEDIHPTVPNPYNLLSTLPPSHPWYTVLDLKDAFFCLRLHSESQLLFAFEWRDPEIGLSGQLTWTRLPQGFKNSPTLFNEALHSDLADFRVRYPALVLLQYVDDLLLAAATRTECLEGTKALLETLGNKGYRASAKKAQICLQEVTYLGYSLKDGQRWLTKARKEAILSIPVPKNSRQVREFLGKAGYCRLFIPGFAELAAPLYPLTRPGTLFQWGTEQQLAFEDIKKALLSSPALGLPDITKPFELFIDENSGFAKGVLVQKLGPWKRPVAYLSKKLDTVASGWPPCLRMVAAIAILVKDAGKLTLGQPLTILTSHPVEALVRQPPNKWLSNARMTHYQAMLLDAERVHFGPTVSLNPATLLPLPSGGNHHDCLQILAETHGTRPDLTDQPLPDADLTWYTDGSSFIRNGEREAGAAVTTESEVIWAAPLPPGTSAQRAELIALTQALKMAEGKKLTVYTDSRYAFATTHVHGEIYRRRGWLTSEGKEIKNKNEILALLEALFLPKRLSIIHCPGHQKGDSPQAKGNRLADDTAKKAATETHSSLTVLPAGKRTADGSEFEKRTADGSEFESPKKKAKVE

SEQ ID NO: 1220 - protein, 2095 aa, synthetic construct
MPAAKRVKLDGGDKKYSIGLDIGTNSVGWAVITDEYKVPSKKFKVLGNTDRHSIKKNLIGALLFDSGETAEATRLKRTARRRYTRRKNRICYLQEIFSNEMAKVDDSFFHRLEESFLVEEDKKHERHPIFGNIVDEVAYHEKYPTIYHLRKKLVDSTDKADLRLIYLALAHMIKFRGHFLIEGDLNPDNSDVDKLFIQLVQTYNQLFEENPINASGVDAKAILSARLSKSRRLENLIAQLPGEKKNGLFGNLIALSLGLTPNFKSNFDLAEDAKLQLSKDTYDDDLDNLLAQIGDQYADLFLAAKNLSDAILLSDILRVNTEITKAPLSASMIKRYDEHHQDLTLLKALVRQQLPEKYKEIFFDQSKNGYAGYIDGGASQEEFYKFIKPILEKMDGTEELLVKLNREDLLRKQRTFDNGSIPHQIHLGELHAILRRQEDFYPFLKDNREKIEKILTFRIPYYVGPLARGNSRFAWMTRKSEETITPWNFEEVVDKGASAQSFIERMTNFDKNLPNEKVLPKHSLLYEYFTVYNELTKVKYVTEGMRKPAFLSGEQKKAIVDLLFKTNRKVTVKQLKEDYFKKIECFDSVEISGVEDRFNASLGTYHDLLKIIKDKDFLDNEENEDILEDIVLTLTLFEDREMIEERLKTYAHLFDDKVMKQLKRRRYTGWGRLSRKLINGIRDKQSGKTILDFLKSDGFANRNFMQLIHDDSLTFKEDIQKAQVSGQGDSLHEHIANLAGSPAIKKGILQTVKVVDELVKVMGRHKPENIVIEMARENQTTQKGQKNSRERMKRIEEGIKELGSQILKEHPVENTQLQNEKLYLYYLQNGRDMYVDQELDINRLSDYDVDHIVPQSFLKDDSIDNKVLTRSDKARGKSDNVPSEEVVKKMKNYWRQLLNAKLITQRKFDNLTKAERGGLSELDKAGFIKRQLVETRQITKHVAQILDSRMNTKYDENDKLIREVKVITLKSKLVSDFRKDFQFYKVREINNYHHAHDAYLNAVVGTALIKKYPKLESEFVYGDYKVYDVRKMIAKSEQEIGKATAKYFFYSNIMNFFKTEITLANGEIRKRPLIETNGETGEIVWDKGRDFATVRKVLSMPQVNIVKKTEVQTGGFSKESILPKRNSDKLIARKKDWDPKKYGGFDSPTVAYSVLVVAKVEKGKSKKLKSVKELLGITIMERSSFEKNPIDFLEAKGYKEVKKDLIIKLPKYSLFELENGRKRMLASAGELQKGNELALPSKYVNFLYLASHYEKLKGSPEDNEQKQLFVEQHKHYLDEIIEQISEFSKRVILADANLDKVLSAYNKHRDKPIREQAENIIHLFTLTNLGAPAAFKYFDTTIDRKRYTSTKEVLDATLIHQSITGLYETRIDLSQLGGDGGGGSGSSEAAAKGGTLQLEEEYRLFEPESTQKQEMDIWLKNFPQAWAETGGMGTAHCQAPVLIQLKATATPISIRQYPMPHEAYQGIKPHIRRMLDQGILKPCQSPWNTPLLPVKKPGTEDYRPVQDLREVNKRVEDIHPTVPNPYNLLSTLPPSHPWYTVLDLKDAFFCLRLHSESQLLFAFEWRDPEIGLSGQLTWTRLPQGFKNSPTLFNEALHSDLADFRVRYPALVLLQYVDDLLLAAATRTECLEGTKALLETLGNKGYRASAKKAQICLQEVTYLGYSLKDGQRWLTKARKEAILSIPVPKNSRQVREFLGKAGYCRLFIPGFAELAAPLYPLTRPGTLFQWGTEQQLAFEDIKKALLSSPALGLPDITKPFELFIDENSGFAKGVLVQKLGPWKRPVAYLSKKLDTVASGWPPCLRMVAAIAILVKDAGKLTLGQPLTILTSHPVEALVRQPPNKWLSNARMTHYQAMLLDAERVHFGPTVSLNPATLLPLPSGGNHHDCLQILAETHGTRPDLTDQPLPDADLTWYTDGSSFIRNGEREAGAAVTTESEVIWAAPLPPGTSAQRAELIALTQALKMAEGKKLTVYTDSRYAFATTHVHGEIYRRRGWLTSEGKEIKNKNEILALLEALFLPKRLSIIHCPGHQKGDSPQAKGNRLADDTAKKAATETHSSLTVLPAGKRTADGSEFEKRTADGSEFESPKKKAKVE

SEQ ID NO: 1221 - protein, 2095 aa, synthetic construct
MPAAKRVKLDGGDKKYSIGLDIGTNSVGWAVITDEYKVPSKKFKVLGNTDRHSIKKNLIGALLFDSGETAEATRLKRTARRRYTRRKNRICYLQEIFSNEMAKVDDSFFHRLEESFLVEEDKKHERHPIFGNIVDEVAYHEKYPTIYHLRKKLVDSTDKADLRLIYLALAHMIKFRGHFLIEGDLNPDNSDVDKLFIQLVQTYNQLFEENPINASGVDAKAILSARLSKSRRLENLIAQLPGEKKNGLFGNLIALSLGLTPNFKSNFDLAEDAKLQLSKDTYDDDLDNLLAQIGDQYADLFLAAKNLSDAILLSDILRVNTEITKAPLSASMIKRYDEHHQDLTLLKALVRQQLPEKYKEIFFDQSKNGYAGYIDGGASQEEFYKFIKPILEKMDGTEELLVKLNREDLLRKQRTFDNGSIPHQIHLGELHAILRRQEDFYPFLKDNREKIEKILTFRIPYYVGPLARGNSRFAWMTRKSEETITPWNFEEVVDKGASAQSFIERMTNFDKNLPNEKVLPKHSLLYEYFTVYNELTKVKYVTEGMRKPAFLSGEQKKAIVDLLFKTNRKVTVKQLKEDYFKKIECFDSVEISGVEDRFNASLGTYHDLLKIIKDKDFLDNEENEDILEDIVLTLTLFEDREMIEERLKTYAHLFDDKVMKQLKRRRYTGWGRLSRKLINGIRDKQSGKTILDFLKSDGFANRNFMQLIHDDSLTFKEDIQKAQVSGQGDSLHEHIANLAGSPAIKKGILQTVKVVDELVKVMGRHKPENIVIEMARENQTTQKGQKNSRERMKRIEEGIKELGSQILKEHPVENTQLQNEKLYLYYLQNGRDMYVDQELDINRLSDYDVDHIVPQSFLKDDSIDNKVLTRSDKARGKSDNVPSEEVVKKMKNYWRQLLNAKLITQRKFDNLTKAERGGLSELDKAGFIKRQLVETRQITKHVAQILDSRMNTKYDENDKLIREVKVITLKSKLVSDFRKDFQFYKVREINNYHHAHDAYLNAVVGTALIKKYPKLESEFVYGDYKVYDVRKMIAKSEQEIGKATAKYFFYSNIMNFFKTEITLANGEIRKRPLIETNGETGEIVWDKGRDFATVRKVLSMPQVNIVKKTEVQTGGFSKESILPKRNSDKLIARKKDWDPKKYGGFDSPTVAYSVLVVAKVEKGKSKKLKSVKELLGITIMERSSFEKNPIDFLEAKGYKEVKKDLIIKLPKYSLFELENGRKRMLASAGELQKGNELALPSKYVNFLYLASHYEKLKGSPEDNEQKQLFVEQHKHYLDEIIEQISEFSKRVILADANLDKVLSAYNKHRDKPIREQAENIIHLFTLTNLGAPAAFKYFDTTIDRKRYTSTKEVLDATLIHQSITGLYETRIDLSQLGGDGGGGGPAPEAAAKGGTLQLEEEYRLFEPESTQKQEMDIWLKNFPQAWAETGGMGTAHCQAPVLIQLKATATPISIRQYPMPHEAYQGIKPHIRRMLDQGILKPCQSPWNTPLLPVKKPGTEDYRPVQDLREVNKRVEDIHPTVPNPYNLLSTLPPSHPWYTVLDLKDAFFCLRLHSESQLLFAFEWRDPEIGLSGQLTWTRLPQGFKNSPTLFNEALHSDLADFRVRYPALVLLQYVDDLLLAAATRTECLEGTKALLETLGNKGYRASAKKAQICLQEVTYLGYSLKDGQRWLTKARKEAILSIPVPKNSRQVREFLGKAGYCRLFIPGFAELAAPLYPLTRPGTLFQWGTEQQLAFEDIKKALLSSPALGLPDITKPFELFIDENSGFAKGVLVQKLGPWKRPVAYLSKKLDTVASGWPPCLRMVAAIAILVKDAGKLTLGQPLTILTSHPVEALVRQPPNKWLSNARMTHYQAMLLDAERVHFGPTVSLNPATLLPLPSGGNHHDCLQILAETHGTRPDLTDQPLPDADLTWYTDGSSFIRNGEREAGAAVTTESEVIWAAPLPPGTSAQRAELIALTQALKMAEGKKLTVYTDSRYAFATTHVHGEIYRRRGWLTSEGKEIKNKNEILALLEALFLPKRLSIIHCPGHQKGDSPQAKGNRLADDTAKKAATETHSSLTVLPAGKRTADGSEFEKRTADGSEFESPKKKAKVE

SEQ ID NO: 1222 - protein, 2117 aa, synthetic construct
MPAAKRVKLDGGDKKYSIGLDIGTNSVGWAVITDEYKVPSKKFKVLGNTDRHSIKKNLIGALLFDSGETAEATRLKRTARRRYTRRKNRICYLQEIFSNEMAKVDDSFFHRLEESFLVEEDKKHERHPIFGNIVDEVAYHEKYPTIYHLRKKLVDSTDKADLRLIYLALAHMIKFRGHFLIEGDLNPDNSDVDKLFIQLVQTYNQLFEENPINASGVDAKAILSARLSKSRRLENLIAQLPGEKKNGLFGNLIALSLGLTPNFKSNFDLAEDAKLQLSKDTYDDDLDNLLAQIGDQYADLFLAAKNLSDAILLSDILRVNTEITKAPLSASMIKRYDEHHQDLTLLKALVRQQLPEKYKEIFFDQSKNGYAGYIDGGASQEEFYKFIKPILEKMDGTEELLVKLNREDLLRKQRTFDNGSIPHQIHLGELHAILRRQEDFYPFLKDNREKIEKILTFRIPYYVGPLARGNSRFAWMTRKSEETITPWNFEEVVDKGASAQSFIERMTNFDKNLPNEKVLPKHSLLYEYFTVYNELTKVKYVTEGMRKPAFLSGEQKKAIVDLLFKTNRKVTVKQLKEDYFKKIECFDSVEISGVEDRFNASLGTYHDLLKIIKDKDFLDNEENEDILEDIVLTLTLFEDREMIEERLKTYAHLFDDKVMKQLKRRRYTGWGRLSRKLINGIRDKQSGKTILDFLKSDGFANRNFMQLIHDDSLTFKEDIQKAQVSGQGDSLHEHIANLAGSPAIKKGILQTVKVVDELVKVMGRHKPENIVIEMARENQTTQKGQKNSRERMKRIEEGIKELGSQILKEHPVENTQLQNEKLYLYYLQNGRDMYVDQELDINRLSDYDVDHIVPQSFLKDDSIDNKVLTRSDKARGKSDNVPSEEVVKKMKNYWRQLLNAKLITQRKFDNLTKAERGGLSELDKAGFIKRQLVETRQITKHVAQILDSRMNTKYDENDKLIREVKVITLKSKLVSDFRKDFQFYKVREINNYHHAHDAYLNAVVGTALIKKYPKLESEFVYGDYKVYDVRKMIAKSEQEIGKATAKYFFYSNIMNFFKTEITLANGEIRKRPLIETNGETGEIVWDKGRDFATVRKVLSMPQVNIVKKTEVQTGGFSKESILPKRNSDKLIARKKDWDPKKYGGFDSPTVAYSVLVVAKVEKGKSKKLKSVKELLGITIMERSSFEKNPIDFLEAKGYKEVKKDLIIKLPKYSLFELENGRKRMLASAGELQKGNELALPSKYVNFLYLASHYEKLKGSPEDNEQKQLFVEQHKHYLDEIIEQISEFSKRVILADANLDKVLSAYNKHRDKPIREQAENIIHLFTLTNLGAPAAFKYFDTTIDRKRYTSTKEVLDATLIHQSITGLYETRIDLSQLGGDGGSGGSSGGSSGSETPGTSESATPESSGGSSGGSSGGTLQLEEEYRLFEPESTQKQEMDIWLKNFPQAWAETGGMGTAHCQAPVLIQLKATATPISIRQYPMPHEAYQGIKPHIRRMLDQGILKPCQSPWNTPLLPVKKPGTEDYRPVQDLREVNKRVEDIHPTVPNPYNLLSTLPPSHPWYTVLDLKDAFFCLRLHSESQLLFAFEWRDPEIGLSGQLTWTRLPQGFKNSPTLFNEALHSDLADFRVRYPALVLLQYVDDLLLAAATRTECLEGTKALLETLGNKGYRASAKKAQICLQEVTYLGYSLKDGQRWLTKARKEAILSIPVPKNSRQVREFLGKAGYCRLFIPGFAELAAPLYPLTRPGTLFQWGTEQQLAFEDIKKALLSSPALGLPDITKPFELFIDENSGFAKGVLVQKLGPWKRPVAYLSKKLDTVASGWPPCLRMVAAIAILVKDAGKLTLGQPLTILTSHPVEALVRQPPNKWLSNARMTHYQAMLLDAERVHFGPTVSLNPATLLPLPSGGNHHDCLQILAETHGTRPDLTDQPLPDADLTWYTDGSSFIRNGEREAGAAVTTESEVIWAAPLPPGTSAQRAELIALTQALKMAEGKKLTVYTDSRYAFATTHVHGEIYRRRGWLTSEGKEIKNKNEILALLEALFLPKRLSIIHCPGHQKGDSPQAKGNRLADDTAKKAATETHSSLTVLPAGKRTADGSEFEKRTADGSEFESPKKKAKVE

SEQ ID NO: 1223 - protein, 2087 aa, synthetic construct
MPAAKRVKLDGGDKKYSIGLDIGTNSVGWAVITDEYKVPSKKFKVLGNTDRHSIKKNLIGALLFDSGETAEATRLKRTARRRYTRRKNRICYLQEIFSNEMAKVDDSFFHRLEESFLVEEDKKHERHPIFGNIVDEVAYHEKYPTIYHLRKKLVDSTDKADLRLIYLALAHMIKFRGHFLIEGDLNPDNSDVDKLFIQLVQTYNQLFEENPINASGVDAKAILSARLSKSRRLENLIAQLPGEKKNGLFGNLIALSLGLTPNFKSNFDLAEDAKLQLSKDTYDDDLDNLLAQIGDQYADLFLAAKNLSDAILLSDILRVNTEITKAPLSASMIKRYDEHHQDLTLLKALVRQQLPEKYKEIFFDQSKNGYAGYIDGGASQEEFYKFIKPILEKMDGTEELLVKLNREDLLRKQRTFDNGSIPHQIHLGELHAILRRQEDFYPFLKDNREKIEKILTFRIPYYVGPLARGNSRFAWMTRKSEETITPWNFEEVVDKGASAQSFIERMTNFDKNLPNEKVLPKHSLLYEYFTVYNELTKVKYVTEGMRKPAFLSGEQKKAIVDLLFKTNRKVTVKQLKEDYFKKIECFDSVEISGVEDRFNASLGTYHDLLKIIKDKDFLDNEENEDILEDIVLTLTLFEDREMIEERLKTYAHLFDDKVMKQLKRRRYTGWGRLSRKLINGIRDKQSGKTILDFLKSDGFANRNFMQLIHDDSLTFKEDIQKAQVSGQGDSLHEHIANLAGSPAIKKGILQTVKVVDELVKVMGRHKPENIVIEMARENQTTQKGQKNSRERMKRIEEGIKELGSQILKEHPVENTQLQNEKLYLYYLQNGRDMYVDQELDINRLSDYDVDHIVPQSFLKDDSIDNKVLTRSDKARGKSDNVPSEEVVKKMKNYWRQLLNAKLITQRKFDNLTKAERGGLSELDKAGFIKRQLVETRQITKHVAQILDSRMNTKYDENDKLIREVKVITLKSKLVSDFRKDFQFYKVREINNYHHAHDAYLNAVVGTALIKKYPKLESEFVYGDYKVYDVRKMIAKSEQEIGKATAKYFFYSNIMNFFKTEITLANGEIRKRPLIETNGETGEIVWDKGRDFATVRKVLSMPQVNIVKKTEVQTGGFSKESILPKRNSDKLIARKKDWDPKKYGGFDSPTVAYSVLVVAKVEKGKSKKLKSVKELLGITIMERSSFEKNPIDFLEAKGYKEVKKDLIIKLPKYSLFELENGRKRMLASAGELQKGNELALPSKYVNFLYLASHYEKLKGSPEDNEQKQLFVEQHKHYLDEIIEQISEFSKRVILADANLDKVLSAYNKHRDKPIREQAENIIHLFTLTNLGAPAAFKYFDTTIDRKRYTSTKEVLDATLIHQSITGLYETRIDLSQLGGDGGPAPGGTLQLEEEYRLFEPESTQKQEMDIWLKNFPQAWAETGGMGTAHCQAPVLIQLKATATPISIRQYPMPHEAYQGIKPHIRRMLDQGILKPCQSPWNTPLLPVKKPGTEDYRPVQDLREVNKRVEDIHPTVPNPYNLLSTLPPSHPWYTVLDLKDAFFCLRLHSESQLLFAFEWRDPEIGLSGQLTWTRLPQGFKNSPTLFNEALHSDLADFRVRYPALVLLQYVDDLLLAAATRTECLEGTKALLETLGNKGYRASAKKAQICLQEVTYLGYSLKDGQRWLTKARKEAILSIPVPKNSRQVREFLGKAGYCRLFIPGFAELAAPLYPLTRPGTLFQWGTEQQLAFEDIKKALLSSPALGLPDITKPFELFIDENSGFAKGVLVQKLGPWKRPVAYLSKKLDTVASGWPPCLRMVAAIAILVKDAGKLTLGQPLTILTSHPVEALVRQPPNKWLSNARMTHYQAMLLDAERVHFGPTVSLNPATLLPLPSGGNHHDCLQILAETHGTRPDLTDQPLPDADLTWYTDGSSFIRNGEREAGAAVTTESEVIWAAPLPPGTSAQRAELIALTQALKMAEGKKLTVYTDSRYAFATTHVHGEIYRRRGWLTSEGKEIKNKNEILALLEALFLPKRLSIIHCPGHQKGDSPQAKGNRLADDTAKKAATETHSSLTVLPAGKRTADGSEFEKRTADGSEFESPKKKAKVE

SEQ ID NO: 1224 - protein, 2093 aa, synthetic construct
MPAAKRVKLDGGDKKYSIGLDIGTNSVGWAVITDEYKVPSKKFKVLGNTDRHSIKKNLIGALLFDSGETAEATRLKRTARRRYTRRKNRICYLQEIFSNEMAKVDDSFFHRLEESFLVEEDKKHERHPIFGNIVDEVAYHEKYPTIYHLRKKLVDSTDKADLRLIYLALAHMIKFRGHFLIEGDLNPDNSDVDKLFIQLVQTYNQLFEENPINASGVDAKAILSARLSKSRRLENLIAQLPGEKKNGLFGNLIALSLGLTPNFKSNFDLAEDAKLQLSKDTYDDDLDNLLAQIGDQYADLFLAAKNLSDAILLSDILRVNTEITKAPLSASMIKRYDEHHQDLTLLKALVRQQLPEKYKEIFFDQSKNGYAGYIDGGASQEEFYKFIKPILEKMDGTEELLVKLNREDLLRKQRTFDNGSIPHQIHLGELHAILRRQEDFYPFLKDNREKIEKILTFRIPYYVGPLARGNSRFAWMTRKSEETITPWNFEEVVDKGASAQSFIERMTNFDKNLPNEKVLPKHSLLYEYFTVYNELTKVKYVTEGMRKPAFLSGEQKKAIVDLLFKTNRKVTVKQLKEDYFKKIECFDSVEISGVEDRFNASLGTYHDLLKIIKDKDFLDNEENEDILEDIVLTLTLFEDREMIEERLKTYAHLFDDKVMKQLKRRRYTGWGRLSRKLINGIRDKQSGKTILDFLKSDGFANRNFMQLIHDDSLTFKEDIQKAQVSGQGDSLHEHIANLAGSPAIKKGILQTVKVVDELVKVMGRHKPENIVIEMARENQTTQKGQKNSRERMKRIEEGIKELGSQILKEHPVENTQLQNEKLYLYYLQNGRDMYVDQELDINRLSDYDVDHIVPQSFLKDDSIDNKVLTRSDKARGKSDNVPSEEVVKKMKNYWRQLLNAKLITQRKFDNLTKAERGGLSELDKAGFIKRQLVETRQITKHVAQILDSRMNTKYDENDKLIREVKVITLKSKLVSDFRKDFQFYKVREINNYHHAHDAYLNAVVGTALIKKYPKLESEFVYGDYKVYDVRKMIAKSEQEIGKATAKYFFYSNIMNFFKTEITLANGEIRKRPLIETNGETGEIVWDKGRDFATVRKVLSMPQVNIVKKTEVQTGGFSKESILPKRNSDKLIARKKDWDPKKYGGFDSPTVAYSVLVVAKVEKGKSKKLKSVKELLGITIMERSSFEKNPIDFLEAKGYKEVKKDLIIKLPKYSLFELENGRKRMLASAGELQKGNELALPSKYVNFLYLASHYEKLKGSPEDNEQKQLFVEQHKHYLDEIIEQISEFSKRVILADANLDKVLSAYNKHRDKPIREQAENIIHLFTLTNLGAPAAFKYFDTTIDRKRYTSTKEVLDATLIHQSITGLYETRIDLSQLGGDGGGSSPAPGGGGGTLQLEEEYRLFEPESTQKQEMDIWLKNFPQAWAETGGMGTAHCQAPVLIQLKATATPISIRQYPMPHEAYQGIKPHIRRMLDQGILKPCQSPWNTPLLPVKKPGTEDYRPVQDLREVNKRVEDIHPTVPNPYNLLSTLPPSHPWYTVLDLKDAFFCLRLHSESQLLFAFEWRDPEIGLSGQLTWTRLPQGFKNSPTLFNEALHSDLADFRVRYPALVLLQYVDDLLLAAATRTECLEGTKALLETLGNKGYRASAKKAQICLQEVTYLGYSLKDGQRWLTKARKEAILSIPVPKNSRQVREFLGKAGYCRLFIPGFAELAAPLYPLTRPGTLFQWGTEQQLAFEDIKKALLSSPALGLPDITKPFELFIDENSGFAKGVLVQKLGPWKRPVAYLSKKLDTVASGWPPCLRMVAAIAILVKDAGKLTLGQPLTILTSHPVEALVRQPPNKWLSNARMTHYQAMLLDAERVHFGPTVSLNPATLLPLPSGGNHHDCLQILAETHGTRPDLTDQPLPDADLTWYTDGSSFIRNGEREAGAAVTTESEVIWAAPLPPGTSAQRAELIALTQALKMAEGKKLTVYTDSRYAFATTHVHGEIYRRRGWLTSEGKEIKNKNEILALLEALFLPKRLSIIHCPGHQKGDSPQAKGNRLADDTAKKAATETHSSLTVLPAGKRTADGSEFEKRTADGSEFESPKKKAKVE

SEQ ID NO: 1225 - protein, 2095 aa, synthetic construct
MPAAKRVKLDGGDKKYSIGLDIGTNSVGWAVITDEYKVPSKKFKVLGNTDRHSIKKNLIGALLFDSGETAEATRLKRTARRRYTRRKNRICYLQEIFSNEMAKVDDSFFHRLEESFLVEEDKKHERHPIFGNIVDEVAYHEKYPTIYHLRKKLVDSTDKADLRLIYLALAHMIKFRGHFLIEGDLNPDNSDVDKLFIQLVQTYNQLFEENPINASGVDAKAILSARLSKSRRLENLIAQLPGEKKNGLFGNLIALSLGLTPNFKSNFDLAEDAKLQLSKDTYDDDLDNLLAQIGDQYADLFLAAKNLSDAILLSDILRVNTEITKAPLSASMIKRYDEHHQDLTLLKALVRQQLPEKYKEIFFDQSKNGYAGYIDGGASQEEFYKFIKPILEKMDGTEELLVKLNREDLLRKQRTFDNGSIPHQIHLGELHAILRRQEDFYPFLKDNREKIEKILTFRIPYYVGPLARGNSRFAWMTRKSEETITPWNFEEVVDKGASAQSFIERMTNFDKNLPNEKVLPKHSLLYEYFTVYNELTKVKYVTEGMRKPAFLSGEQKKAIVDLLFKTNRKVTVKQLKEDYFKKIECFDSVEISGVEDRFNASLGTYHDLLKIIKDKDFLDNEENEDILEDIVLTLTLFEDREMIEERLKTYAHLFDDKVMKQLKRRRYTGWGRLSRKLINGIRDKQSGKTILDFLKSDGFANRNFMQLIHDDSLTFKEDIQKAQVSGQGDSLHEHIANLAGSPAIKKGILQTVKVVDELVKVMGRHKPENIVIEMARENQTTQKGQKNSRERMKRIEEGIKELGSQILKEHPVENTQLQNEKLYLYYLQNGRDMYVDQELDINRLSDYDVDHIVPQSFLKDDSIDNKVLTRSDKARGKSDNVPSEEVVKKMKNYWRQLLNAKLITQRKFDNLTKAERGGLSELDKAGFIKRQLVETRQITKHVAQILDSRMNTKYDENDKLIREVKVITLKSKLVSDFRKDFQFYKVREINNYHHAHDAYLNAVVGTALIKKYPKLESEFVYGDYKVYDVRKMIAKSEQEIGKATAKYFFYSNIMNFFKTEITLANGEIRKRPLIETNGETGEIVWDKGRDFATVRKVLSMPQVNIVKKTEVQTGGFSKESILPKRNSDKLIARKKDWDPKKYGGFDSPTVAYSVLVVAKVEKGKSKKLKSVKELLGITIMERSSFEKNPIDFLEAKGYKEVKKDLIIKLPKYSLFELENGRKRMLASAGELQKGNELALPSKYVNFLYLASHYEKLKGSPEDNEQKQLFVEQHKHYLDEIIEQISEFSKRVILADANLDKVLSAYNKHRDKPIREQAENIIHLFTLTNLGAPAAFKYFDTTIDRKRYTSTKEVLDATLIHQSITGLYETRIDLSQLGGDGGGSSPAPEAAAKGGTLQLEEEYRLFEPESTQKQEMDIWLKNFPQAWAETGGMGTAHCQAPVLIQLKATATPISIRQYPMPHEAYQGIKPHIRRMLDQGILKPCQSPWNTPLLPVKKPGTEDYRPVQDLREVNKRVEDIHPTVPNPYNLLSTLPPSHPWYTVLDLKDAFFCLRLHSESQLLFAFEWRDPEIGLSGQLTWTRLPQGFKNSPTLFNEALHSDLADFRVRYPALVLLQYVDDLLLAAATRTECLEGTKALLETLGNKGYRASAKKAQICLQEVTYLGYSLKDGQRWLTKARKEAILSIPVPKNSRQVREFLGKAGYCRLFIPGFAELAAPLYPLTRPGTLFQWGTEQQLAFEDIKKALLSSPALGLPDITKPFELFIDENSGFAKGVLVQKLGPWKRPVAYLSKKLDTVASGWPPCLRMVAAIAILVKDAGKLTLGQPLTILTSHPVEALVRQPPNKWLSNARMTHYQAMLLDAERVHFGPTVSLNPATLLPLPSGGNHHDCLQILAETHGTRPDLTDQPLPDADLTWYTDGSSFIRNGEREAGAAVTTESEVIWAAPLPPGTSAQRAELIALTQALKMAEGKKLTVYTDSRYAFATTHVHGEIYRRRGWLTSEGKEIKNKNEILALLEALFLPKRLSIIHCPGHQKGDSPQAKGNRLADDTAKKAATETHSSLTVLPAGKRTADGSEFEKRTADGSEFESPKKKAKVE

SEQ ID NO: 1226 - protein, 2087 aa, synthetic construct
MPAAKRVKLDGGDKKYSIGLDIGTNSVGWAVITDEYKVPSKKFKVLGNTDRHSIKKNLIGALLFDSGETAEATRLKRTARRRYTRRKNRICYLQEIFSNEMAKVDDSFFHRLEESFLVEEDKKHERHPIFGNIVDEVAYHEKYPTIYHLRKKLVDSTDKADLRLIYLALAHMIKFRGHFLIEGDLNPDNSDVDKLFIQLVQTYNQLFEENPINASGVDAKAILSARLSKSRRLENLIAQLPGEKKNGLFGNLIALSLGLTPNFKSNFDLAEDAKLQLSKDTYDDDLDNLLAQIGDQYADLFLAAKNLSDAILLSDILRVNTEITKAPLSASMIKRYDEHHQDLTLLKALVRQQLPEKYKEIFFDQSKNGYAGYIDGGASQEEFYKFIKPILEKMDGTEELLVKLNREDLLRKQRTFDNGSIPHQIHLGELHAILRRQEDFYPFLKDNREKIEKILTFRIPYYVGPLARGNSRFAWMTRKSEETITPWNFEEVVDKGASAQSFIERMTNFDKNLPNEKVLPKHSLLYEYFTVYNELTKVKYVTEGMRKPAFLSGEQKKAIVDLLFKTNRKVTVKQLKEDYFKKIECFDSVEISGVEDRFNASLGTYHDLLKIIKDKDFLDNEENEDILEDIVLTLTLFEDREMIEERLKTYAHLFDDKVMKQLKRRRYTGWGRLSRKLINGIRDKQSGKTILDFLKSDGFANRNFMQLIHDDSLTFKEDIQKAQVSGQGDSLHEHIANLAGSPAIKKGILQTVKVVDELVKVMGRHKPENIVIEMARENQTTQKGQKNSRERMKRIEEGIKELGSQILKEHPVENTQLQNEKLYLYYLQNGRDMYVDQELDINRLSDYDVDHIVPQSFLKDDSIDNKVLTRSDKARGKSDNVPSEEVVKKMKNYWRQLLNAKLITQRKFDNLTKAERGGLSELDKAGFIKRQLVETRQITKHVAQILDSRMNTKYDENDKLIREVKVITLKSKLVSDFRKDFQFYKVREINNYHHAHDAYLNAVVGTALIKKYPKLESEFVYGDYKVYDVRKMIAKSEQEIGKATAKYFFYSNIMNFFKTEITLANGEIRKRPLIETNGETGEIVWDKGRDFATVRKVLSMPQVNIVKKTEVQTGGFSKESILPKRNSDKLIARKKDWDPKKYGGFDSPTVAYSVLVVAKVEKGKSKKLKSVKELLGITIMERSSFEKNPIDFLEAKGYKEVKKDLIIKLPKYSLFELENGRKRMLASAGELQKGNELALPSKYVNFLYLASHYEKLKGSPEDNEQKQLFVEQHKHYLDEIIEQISEFSKRVILADANLDKVLSAYNKHRDKPIREQAENIIHLFTLTNLGAPAAFKYFDTTIDRKRYTSTKEVLDATLIHQSITGLYETRIDLSQLGGDGGGSSGGTLQLEEEYRLFEPESTQKQEMDIWLKNFPQAWAETGGMGTAHCQAPVLIQLKATATPISIRQYPMPHEAYQGIKPHIRRMLDQGILKPCQSPWNTPLLPVKKPGTEDYRPVQDLREVNKRVEDIHPTVPNPYNLLSTLPPSHPWYTVLDLKDAFFCLRLHSESQLLFAFEWRDPEIGLSGQLTWTRLPQGFKNSPTLFNEALHSDLADFRVRYPALVLLQYVDDLLLAAATRTECLEGTKALLETLGNKGYRASAKKAQICLQEVTYLGYSLKDGQRWLTKARKEAILSIPVPKNSRQVREFLGKAGYCRLFIPGFAELAAPLYPLTRPGTLFQWGTEQQLAFEDIKKALLSSPALGLPDITKPFELFIDENSGFAKGVLVQKLGPWKRPVAYLSKKLDTVASGWPPCLRMVAAIAILVKDAGKLTLGQPLTILTSHPVEALVRQPPNKWLSNARMTHYQAMLLDAERVHFGPTVSLNPATLLPLPSGGNHHDCLQILAETHGTRPDLTDQPLPDADLTWYTDGSSFIRNGEREAGAAVTTESEVIWAAPLPPGTSAQRAELIALTQALKMAEGKKLTVYTDSRYAFATTHVHGEIYRRRGWLTSEGKEIKNKNEILALLEALFLPKRLSIIHCPGHQKGDSPQAKGNRLADDTAKKAATETHSSLTVLPAGKRTADGSEFEKRTADGSEFESPKKKAKVE

SEQ ID NO: 1227 - protein, 2095 aa, synthetic construct
MPAAKRVKLDGGDKKYSIGLDIGTNSVGWAVITDEYKVPSKKFKVLGNTDRHSIKKNLIGALLFDSGETAEATRLKRTARRRYTRRKNRICYLQEIFSNEMAKVDDSFFHRLEESFLVEEDKKHERHPIFGNIVDEVAYHEKYPTIYHLRKKLVDSTDKADLRLIYLALAHMIKFRGHFLIEGDLNPDNSDVDKLFIQLVQTYNQLFEENPINASGVDAKAILSARLSKSRRLENLIAQLPGEKKNGLFGNLIALSLGLTPNFKSNFDLAEDAKLQLSKDTYDDDLDNLLAQIGDQYADLFLAAKNLSDAILLSDILRVNTEITKAPLSASMIKRYDEHHQDLTLLKALVRQQLPEKYKEIFFDQSKNGYAGYIDGGASQEEFYKFIKPILEKMDGTEELLVKLNREDLLRKQRTFDNGSIPHQIHLGELHAILRRQEDFYPFLKDNREKIEKILTFRIPYYVGPLARGNSRFAWMTRKSEETITPWNFEEVVDKGASAQSFIERMTNFDKNLPNEKVLPKHSLLYEYFTVYNELTKVKYVTEGMRKPAFLSGEQKKAIVDLLFKTNRKVTVKQLKEDYFKKIECFDSVEISGVEDRFNASLGTYHDLLKIIKDKDFLDNEENEDILEDIVLTLTLFEDREMIEERLKTYAHLFDDKVMKQLKRRRYTGWGRLSRKLINGIRDKQSGKTILDFLKSDGFANRNFMQLIHDDSLTFKEDIQKAQVSGQGDSLHEHIANLAGSPAIKKGILQTVKVVDELVKVMGRHKPENIVIEMARENQTTQKGQKNSRERMKRIEEGIKELGSQILKEHPVENTQLQNEKLYLYYLQNGRDMYVDQELDINRLSDYDVDHIVPQSFLKDDSIDNKVLTRSDKARGKSDNVPSEEVVKKMKNYWRQLLNAKLITQRKFDNLTKAERGGLSELDKAGFIKRQLVETRQITKHVAQILDSRMNTKYDENDKLIREVKVITLKSKLVSDFRKDFQFYKVREINNYHHAHDAYLNAVVGTALIKKYPKLESEFVYGDYKVYDVRKMIAKSEQEIGKATAKYFFYSNIMNFFKTEITLANGEIRKRPLIETNGETGEIVWDKGRDFATVRKVLSMPQVNIVKKTEVQTGGFSKESILPKRNSDKLIARKKDWDPKKYGGFDSPTVAYSVLVVAKVEKGKSKKLKSVKELLGITIMERSSFEKNPIDFLEAKGYKEVKKDLIIKLPKYSLFELENGRKRMLASAGELQKGNELALPSKYVNFLYLASHYEKLKGSPEDNEQKQLFVEQHKHYLDEIIEQISEFSKRVILADANLDKVLSAYNKHRDKPIREQAENIIHLFTLTNLGAPAAFKYFDTTIDRKRYTSTKEVLDATLIHQSITGLYETRIDLSQLGGDGGGSSGGGEAAAKGGTLQLEEEYRLFEPESTQKQEMDIWLKNFPQAWAETGGMGTAHCQAPVLIQLKATATPISIRQYPMPHEAYQGIKPHIRRMLDQGILKPCQSPWNTPLLPVKKPGTEDYRPVQDLREVNKRVEDIHPTVPNPYNLLSTLPPSHPWYTVLDLKDAFFCLRLHSESQLLFAFEWRDPEIGLSGQLTWTRLPQGFKNSPTLFNEALHSDLADFRVRYPALVLLQYVDDLLLAAATRTECLEGTKALLETLGNKGYRASAKKAQICLQEVTYLGYSLKDGQRWLTKARKEAILSIPVPKNSRQVREFLGKAGYCRLFIPGFAELAAPLYPLTRPGTLFQWGTEQQLAFEDIKKALLSSPALGLPDITKPFELFIDENSGFAKGVLVQKLGPWKRPVAYLSKKLDTVASGWPPCLRMVAAIAILVKDAGKLTLGQPLTILTSHPVEALVRQPPNKWLSNARMTHYQAMLLDAERVHFGPTVSLNPATLLPLPSGGNHHDCLQILAETHGTRPDLTDQPLPDADLTWYTDGSSFIRNGEREAGAAVTTESEVIWAAPLPPGTSAQRAELIALTQALKMAEGKKLTVYTDSRYAFATTHVHGEIYRRRGWLTSEGKEIKNKNEILALLEALFLPKRLSIIHCPGHQKGDSPQAKGNRLADDTAKKAATETHSSLTVLPAGKRTADGSEFEKRTADGSEFESPKKKAKVE

SEQ ID NO: 1228 - protein, 2090 aa, synthetic construct
MPAAKRVKLDGGDKKYSIGLDIGTNSVGWAVITDEYKVPSKKFKVLGNTDRHSIKKNLIGALLFDSGETAEATRLKRTARRRYTRRKNRICYLQEIFSNEMAKVDDSFFHRLEESFLVEEDKKHERHPIFGNIVDEVAYHEKYPTIYHLRKKLVDSTDKADLRLIYLALAHMIKFRGHFLIEGDLNPDNSDVDKLFIQLVQTYNQLFEENPINASGVDAKAILSARLSKSRRLENLIAQLPGEKKNGLFGNLIALSLGLTPNFKSNFDLAEDAKLQLSKDTYDDDLDNLLAQIGDQYADLFLAAKNLSDAILLSDILRVNTEITKAPLSASMIKRYDEHHQDLTLLKALVRQQLPEKYKEIFFDQSKNGYAGYIDGGASQEEFYKFIKPILEKMDGTEELLVKLNREDLLRKQRTFDNGSIPHQIHLGELHAILRRQEDFYPFLKDNREKIEKILTFRIPYYVGPLARGNSRFAWMTRKSEETITPWNFEEVVDKGASAQSFIERMTNFDKNLPNEKVLPKHSLLYEYFTVYNELTKVKYVTEGMRKPAFLSGEQKKAIVDLLFKTNRKVTVKQLKEDYFKKIECFDSVEISGVEDRFNASLGTYHDLLKIIKDKDFLDNEENEDILEDIVLTLTLFEDREMIEERLKTYAHLFDDKVMKQLKRRRYTGWGRLSRKLINGIRDKQSGKTILDFLKSDGFANRNFMQLIHDDSLTFKEDIQKAQVSGQGDSLHEHIANLAGSPAIKKGILQTVKVVDELVKVMGRHKPENIVIEMARENQTTQKGQKNSRERMKRIEEGIKELGSQILKEHPVENTQLQNEKLYLYYLQNGRDMYVDQELDINRLSDYDVDHIVPQSFLKDDSIDNKVLTRSDKARGKSDNVPSEEVVKKMKNYWRQLLNAKLITQRKFDNLTKAERGGLSELDKAGFIKRQLVETRQITKHVAQILDSRMNTKYDENDKLIREVKVITLKSKLVSDFRKDFQFYKVREINNYHHAHDAYLNAVVGTALIKKYPKLESEFVYGDYKVYDVRKMIAKSEQEIGKATAKYFFYSNIMNFFKTEITLANGEIRKRPLIETNGETGEIVWDKGRDFATVRKVLSMPQVNIVKKTEVQTGGFSKESILPKRNSDKLIARKKDWDPKKYGGFDSPTVAYSVLVVAKVEKGKSKKLKSVKELLGITIMERSSFEKNPIDFLEAKGYKEVKKDLIIKLPKYSLFELENGRKRMLASAGELQKGNELALPSKYVNFLYLASHYEKLKGSPEDNEQKQLFVEQHKHYLDEIIEQISEFSKRVILADANLDKVLSAYNKHRDKPIREQAENIIHLFTLTNLGAPAAFKYFDTTIDRKRYTSTKEVLDATLIHQSITGLYETRIDLSQLGGDGGPAPGGSGGTLQLEEEYRLFEPESTQKQEMDIWLKNFPQAWAETGGMGTAHCQAPVLIQLKATATPISIRQYPMPHEAYQGIKPHIRRMLDQGILKPCQSPWNTPLLPVKKPGTEDYRPVQDLREVNKRVEDIHPTVPNPYNLLSTLPPSHPWYTVLDLKDAFFCLRLHSESQLLFAFEWRDPEIGLSGQLTWTRLPQGFKNSPTLFNEALHSDLADFRVRYPALVLLQYVDDLLLAAATRTECLEGTKALLETLGNKGYRASAKKAQICLQEVTYLGYSLKDGQRWLTKARKEAILSIPVPKNSRQVREFLGKAGYCRLFIPGFAELAAPLYPLTRPGTLFQWGTEQQLAFEDIKKALLSSPALGLPDITKPFELFIDENSGFAKGVLVQKLGPWKRPVAYLSKKLDTVASGWPPCLRMVAAIAILVKDAGKLTLGQPLTILTSHPVEALVRQPPNKWLSNARMTHYQAMLLDAERVHFGPTVSLNPATLLPLPSGGNHHDCLQILAETHGTRPDLTDQPLPDADLTWYTDGSSFIRNGEREAGAAVTTESEVIWAAPLPPGTSAQRAELIALTQALKMAEGKKLTVYTDSRYAFATTHVHGEIYRRRGWLTSEGKEIKNKNEILALLEALFLPKRLSIIHCPGHQKGDSPQAKGNRLADDTAKKAATETHSSLTVLPAGKRTADGSEFEKRTADGSEFESPKKKAKVE

SEQ ID NO: 1229 - protein, 2090 aa, synthetic construct
MPAAKRVKLDGGDKKYSIGLDIGTNSVGWAVITDEYKVPSKKFKVLGNTDRHSIKKNLIGALLFDSGETAEATRLKRTARRRYTRRKNRICYLQEIFSNEMAKVDDSFFHRLEESFLVEEDKKHERHPIFGNIVDEVAYHEKYPTIYHLRKKLVDSTDKADLRLIYLALAHMIKFRGHFLIEGDLNPDNSDVDKLFIQLVQTYNQLFEENPINASGVDAKAILSARLSKSRRLENLIAQLPGEKKNGLFGNLIALSLGLTPNFKSNFDLAEDAKLQLSKDTYDDDLDNLLAQIGDQYADLFLAAKNLSDAILLSDILRVNTEITKAPLSASMIKRYDEHHQDLTLLKALVRQQLPEKYKEIFFDQSKNGYAGYIDGGASQEEFYKFIKPILEKMDGTEELLVKLNREDLLRKQRTFDNGSIPHQIHLGELHAILRRQEDFYPFLKDNREKIEKILTFRIPYYVGPLARGNSRFAWMTRKSEETITPWNFEEVVDKGASAQSFIERMTNFDKNLPNEKVLPKHSLLYEYFTVYNELTKVKYVTEGMRKPAFLSGEQKKAIVDLLFKTNRKVTVKQLKEDYFKKIECFDSVEISGVEDRFNASLGTYHDLLKIIKDKDFLDNEENEDILEDIVLTLTLFEDREMIEERLKTYAHLFDDKVMKQLKRRRYTGWGRLSRKLINGIRDKQSGKTILDFLKSDGFANRNFMQLIHDDSLTFKEDIQKAQVSGQGDSLHEHIANLAGSPAIKKGILQTVKVVDELVKVMGRHKPENIVIEMARENQTTQKGQKNSRERMKRIEEGIKELGSQILKEHPVENTQLQNEKLYLYYLQNGRDMYVDQELDINRLSDYDVDHIVPQSFLKDDSIDNKVLTRSDKARGKSDNVPSEEVVKKMKNYWRQLLNAKLITQRKFDNLTKAERGGLSELDKAGFIKRQLVETRQITKHVAQILDSRMNTKYDENDKLIREVKVITLKSKLVSDFRKDFQFYKVREINNYHHAHDAYLNAVVGTALIKKYPKLESEFVYGDYKVYDVRKMIAKSEQEIGKATAKYFFYSNIMNFFKTEITLANGEIRKRPLIETNGETGEIVWDKGRDFATVRKVLSMPQVNIVKKTEVQTGGFSKESILPKRNSDKLIARKKDWDPKKYGGFDSPTVAYSVLVVAKVEKGKSKKLKSVKELLGITIMERSSFEKNPIDFLEAKGYKEVKKDLIIKLPKYSLFELENGRKRMLASAGELQKGNELALPSKYVNFLYLASHYEKLKGSPEDNEQKQLFVEQHKHYLDEIIEQISEFSKRVILADANLDKVLSAYNKHRDKPIREQAENIIHLFTLTNLGAPAAFKYFDTTIDRKRYTSTKEVLDATLIHQSITGLYETRIDLSQLGGDGGGGGPAPGGTLQLEEEYRLFEPESTQKQEMDIWLKNFPQAWAETGGMGTAHCQAPVLIQLKATATPISIRQYPMPHEAYQGIKPHIRRMLDQGILKPCQSPWNTPLLPVKKPGTEDYRPVQDLREVNKRVEDIHPTVPNPYNLLSTLPPSHPWYTVLDLKDAFFCLRLHSESQLLFAFEWRDPEIGLSGQLTWTRLPQGFKNSPTLFNEALHSDLADFRVRYPALVLLQYVDDLLLAAATRTECLEGTKALLETLGNKGYRASAKKAQICLQEVTYLGYSLKDGQRWLTKARKEAILSIPVPKNSRQVREFLGKAGYCRLFIPGFAELAAPLYPLTRPGTLFQWGTEQQLAFEDIKKALLSSPALGLPDITKPFELFIDENSGFAKGVLVQKLGPWKRPVAYLSKKLDTVASGWPPCLRMVAAIAILVKDAGKLTLGQPLTILTSHPVEALVRQPPNKWLSNARMTHYQAMLLDAERVHFGPTVSLNPATLLPLPSGGNHHDCLQILAETHGTRPDLTDQPLPDADLTWYTDGSSFIRNGEREAGAAVTTESEVIWAAPLPPGTSAQRAELIALTQALKMAEGKKLTVYTDSRYAFATTHVHGEIYRRRGWLTSEGKEIKNKNEILALLEALFLPKRLSIIHCPGHQKGDSPQAKGNRLADDTAKKAATETHSSLTVLPAGKRTADGSEFEKRTADGSEFESPKKKAKVE

SEQ ID NO: 1230 - protein, 2092 aa, synthetic construct
MPAAKRVKLDGGDKKYSIGLDIGTNSVGWAVITDEYKVPSKKFKVLGNTDRHSIKKNLIGALLFDSGETAEATRLKRTARRRYTRRKNRICYLQEIFSNEMAKVDDSFFHRLEESFLVEEDKKHERHPIFGNIVDEVAYHEKYPTIYHLRKKLVDSTDKADLRLIYLALAHMIKFRGHFLIEGDLNPDNSDVDKLFIQLVQTYNQLFEENPINASGVDAKAILSARLSKSRRLENLIAQLPGEKKNGLFGNLIALSLGLTPNFKSNFDLAEDAKLQLSKDTYDDDLDNLLAQIGDQYADLFLAAKNLSDAILLSDILRVNTEITKAPLSASMIKRYDEHHQDLTLLKALVRQQLPEKYKEIFFDQSKNGYAGYIDGGASQEEFYKFIKPILEKMDGTEELLVKLNREDLLRKQRTFDNGSIPHQIHLGELHAILRRQEDFYPFLKDNREKIEKILTFRIPYYVGPLARGNSRFAWMTRKSEETITPWNFEEVVDKGASAQSFIERMTNFDKNLPNEKVLPKHSLLYEYFTVYNELTKVKYVTEGMRKPAFLSGEQKKAIVDLLFKTNRKVTVKQLKEDYFKKIECFDSVEISGVEDRFNASLGTYHDLLKIIKDKDFLDNEENEDILEDIVLTLTLFEDREMIEERLKTYAHLFDDKVMKQLKRRRYTGWGRLSRKLINGIRDKQSGKTILDFLKSDGFANRNFMQLIHDDSLTFKEDIQKAQVSGQGDSLHEHIANLAGSPAIKKGILQTVKVVDELVKVMGRHKPENIVIEMARENQTTQKGQKNSRERMKRIEEGIKELGSQILKEHPVENTQLQNEKLYLYYLQNGRDMYVDQELDINRLSDYDVDHIVPQSFLKDDSIDNKVLTRSDKARGKSDNVPSEEVVKKMKNYWRQLLNAKLITQRKFDNLTKAERGGLSELDKAGFIKRQLVETRQITKHVAQILDSRMNTKYDENDKLIREVKVITLKSKLVSDFRKDFQFYKVREINNYHHAHDAYLNAVVGTALIKKYPKLESEFVYGDYKVYDVRKMIAKSEQEIGKATAKYFFYSNIMNFFKTEITLANGEIRKRPLIETNGETGEIVWDKGRDFATVRKVLSMPQVNIVKKTEVQTGGFSKESILPKRNSDKLIARKKDWDPKKYGGFDSPTVAYSVLVVAKVEKGKSKKLKSVKELLGITIMERSSFEKNPIDFLEAKGYKEVKKDLIIKLPKYSLFELENGRKRMLASAGELQKGNELALPSKYVNFLYLASHYEKLKGSPEDNEQKQLFVEQHKHYLDEIIEQISEFSKRVILADANLDKVLSAYNKHRDKPIREQAENIIHLFTLTNLGAPAAFKYFDTTIDRKRYTSTKEVLDATLIHQSITGLYETRIDLSQLGGDGGPAPEAAAKGGTLQLEEEYRLFEPESTQKQEMDIWLKNFPQAWAETGGMGTAHCQAPVLIQLKATATPISIRQYPMPHEAYQGIKPHIRRMLDQGILKPCQSPWNTPLLPVKKPGTEDYRPVQDLREVNKRVEDIHPTVPNPYNLLSTLPPSHPWYTVLDLKDAFFCLRLHSESQLLFAFEWRDPEIGLSGQLTWTRLPQGFKNSPTLFNEALHSDLADFRVRYPALVLLQYVDDLLLAAATRTECLEGTKALLETLGNKGYRASAKKAQICLQEVTYLGYSLKDGQRWLTKARKEAILSIPVPKNSRQVREFLGKAGYCRLFIPGFAELAAPLYPLTRPGTLFQWGTEQQLAFEDIKKALLSSPALGLPDITKPFELFIDENSGFAKGVLVQKLGPWKRPVAYLSKKLDTVASGWPPCLRMVAAIAILVKDAGKLTLGQPLTILTSHPVEALVRQPPNKWLSNARMTHYQAMLLDAERVHFGPTVSLNPATLLPLPSGGNHHDCLQILAETHGTRPDLTDQPLPDADLTWYTDGSSFIRNGEREAGAAVTTESEVIWAAPLPPGTSAQRAELIALTQALKMAEGKKLTVYTDSRYAFATTHVHGEIYRRRGWLTSEGKEIKNKNEILALLEALFLPKRLSIIHCPGHQKGDSPQAKGNRLADDTAKKAATETHSSLTVLPAGKRTADGSEFEKRTADGSEFESPKKKAKVE

SEQ ID NO: 1231 - protein, 2099 aa, synthetic construct
MPAAKRVKLDGGDKKYSIGLDIGTNSVGWAVITDEYKVPSKKFKVLGNTDRHSIKKNLIGALLFDSGETAEATRLKRTARRRYTRRKNRICYLQEIFSNEMAKVDDSFFHRLEESFLVEEDKKHERHPIFGNIVDEVAYHEKYPTIYHLRKKLVDSTDKADLRLIYLALAHMIKFRGHFLIEGDLNPDNSDVDKLFIQLVQTYNQLFEENPINASGVDAKAILSARLSKSRRLENLIAQLPGEKKNGLFGNLIALSLGLTPNFKSNFDLAEDAKLQLSKDTYDDDLDNLLAQIGDQYADLFLAAKNLSDAILLSDILRVNTEITKAPLSASMIKRYDEHHQDLTLLKALVRQQLPEKYKEIFFDQSKNGYAGYIDGGASQEEFYKFIKPILEKMDGTEELLVKLNREDLLRKQRTFDNGSIPHQIHLGELHAILRRQEDFYPFLKDNREKIEKILTFRIPYYVGPLARGNSRFAWMTRKSEETITPWNFEEVVDKGASAQSFIERMTNFDKNLPNEKVLPKHSLLYEYFTVYNELTKVKYVTEGMRKPAFLSGEQKKAIVDLLFKTNRKVTVKQLKEDYFKKIECFDSVEISGVEDRFNASLGTYHDLLKIIKDKDFLDNEENEDILEDIVLTLTLFEDREMIEERLKTYAHLFDDKVMKQLKRRRYTGWGRLSRKLINGIRDKQSGKTILDFLKSDGFANRNFMQLIHDDSLTFKEDIQKAQVSGQGDSLHEHIANLAGSPAIKKGILQTVKVVDELVKVMGRHKPENIVIEMARENQTTQKGQKNSRERMKRIEEGIKELGSQILKEHPVENTQLQNEKLYLYYLQNGRDMYVDQELDINRLSDYDVDHIVPQSFLKDDSIDNKVLTRSDKARGKSDNVPSEEVVKKMKNYWRQLLNAKLITQRKFDNLTKAERGGLSELDKAGFIKRQLVETRQITKHVAQILDSRMNTKYDENDKLIREVKVITLKSKLVSDFRKDFQFYKVREINNYHHAHDAYLNAVVGTALIKKYPKLESEFVYGDYKVYDVRKMIAKSEQEIGKATAKYFFYSNIMNFFKTEITLANGEIRKRPLIETNGETGEIVWDKGRDFATVRKVLSMPQVNIVKKTEVQTGGFSKESILPKRNSDKLIARKKDWDPKKYGGFDSPTVAYSVLVVAKVEKGKSKKLKSVKELLGITIMERSSFEKNPIDFLEAKGYKEVKKDLIIKLPKYSLFELENGRKRMLASAGELQKGNELALPSKYVNFLYLASHYEKLKGSPEDNEQKQLFVEQHKHYLDEIIEQISEFSKRVILADANLDKVLSAYNKHRDKPIREQAENIIHLFTLTNLGAPAAFKYFDTTIDRKRYTSTKEVLDATLIHQSITGLYETRIDLSQLGGDGGGGGGSGGGGSGGGGSGGTLQLEEEYRLFEPESTQKQEMDIWLKNFPQAWAETGGMGTAHCQAPVLIQLKATATPISIRQYPMPHEAYQGIKPHIRRMLDQGILKPCQSPWNTPLLPVKKPGTEDYRPVQDLREVNKRVEDIHPTVPNPYNLLSTLPPSHPWYTVLDLKDAFFCLRLHSESQLLFAFEWRDPEIGLSGQLTWTRLPQGFKNSPTLFNEALHSDLADFRVRYPALVLLQYVDDLLLAAATRTECLEGTKALLETLGNKGYRASAKKAQICLQEVTYLGYSLKDGQRWLTKARKEAILSIPVPKNSRQVREFLGKAGYCRLFIPGFAELAAPLYPLTRPGTLFQWGTEQQLAFEDIKKALLSSPALGLPDITKPFELFIDENSGFAKGVLVQKLGPWKRPVAYLSKKLDTVASGWPPCLRMVAAIAILVKDAGKLTLGQPLTILTSHPVEALVRQPPNKWLSNARMTHYQAMLLDAERVHFGPTVSLNPATLLPLPSGGNHHDCLQILAETHGTRPDLTDQPLPDADLTWYTDGSSFIRNGEREAGAAVTTESEVIWAAPLPPGTSAQRAELIALTQALKMAEGKKLTVYTDSRYAFATTHVHGEIYRRRGWLTSEGKEIKNKNEILALLEALFLPKRLSIIHCPGHQKGDSPQAKGNRLADDTAKKAATETHSSLTVLPAGKRTADGSEFEKRTADGSEFESPKKKAKVE

SEQ ID NO: 1232 - protein, 2095 aa, synthetic construct
MPAAKRVKLDGGDKKYSIGLDIGTNSVGWAVITDEYKVPSKKFKVLGNTDRHSIKKNLIGALLFDSGETAEATRLKRTARRRYTRRKNRICYLQEIFSNEMAKVDDSFFHRLEESFLVEEDKKHERHPIFGNIVDEVAYHEKYPTIYHLRKKLVDSTDKADLRLIYLALAHMIKFRGHFLIEGDLNPDNSDVDKLFIQLVQTYNQLFEENPINASGVDAKAILSARLSKSRRLENLIAQLPGEKKNGLFGNLIALSLGLTPNFKSNFDLAEDAKLQLSKDTYDDDLDNLLAQIGDQYADLFLAAKNLSDAILLSDILRVNTEITKAPLSASMIKRYDEHHQDLTLLKALVRQQLPEKYKEIFFDQSKNGYAGYIDGGASQEEFYKFIKPILEKMDGTEELLVKLNREDLLRKQRTFDNGSIPHQIHLGELHAILRRQEDFYPFLKDNREKIEKILTFRIPYYVGPLARGNSRFAWMTRKSEETITPWNFEEVVDKGASAQSFIERMTNFDKNLPNEKVLPKHSLLYEYFTVYNELTKVKYVTEGMRKPAFLSGEQKKAIVDLLFKTNRKVTVKQLKEDYFKKIECFDSVEISGVEDRFNASLGTYHDLLKIIKDKDFLDNEENEDILEDIVLTLTLFEDREMIEERLKTYAHLFDDKVMKQLKRRRYTGWGRLSRKLINGIRDKQSGKTILDFLKSDGFANRNFMQLIHDDSLTFKEDIQKAQVSGQGDSLHEHIANLAGSPAIKKGILQTVKVVDELVKVMGRHKPENIVIEMARENQTTQKGQKNSRERMKRIEEGIKELGSQILKEHPVENTQLQNEKLYLYYLQNGRDMYVDQELDINRLSDYDVDHIVPQSFLKDDSIDNKVLTRSDKARGKSDNVPSEEVVKKMKNYWRQLLNAKLITQRKFDNLTKAERGGLSELDKAGFIKRQLVETRQITKHVAQILDSRMNTKYDENDKLIREVKVITLKSKLVSDFRKDFQFYKVREINNYHHAHDAYLNAVVGTALIKKYPKLESEFVYGDYKVYDVRKMIAKSEQEIGKATAKYFFYSNIMNFFKTEITLANGEIRKRPLIETNGETGEIVWDKGRDFATVRKVLSMPQVNIVKKTEVQTGGFSKESILPKRNSDKLIARKKDWDPKKYGGFDSPTVAYSVLVVAKVEKGKSKKLKSVKELLGITIMERSSFEKNPIDFLEAKGYKEVKKDLIIKLPKYSLFELENGRKRMLASAGELQKGNELALPSKYVNFLYLASHYEKLKGSPEDNEQKQLFVEQHKHYLDEIIEQISEFSKRVILADANLDKVLSAYNKHRDKPIREQAENIIHLFTLTNLGAPAAFKYFDTTIDRKRYTSTKEVLDATLIHQSITGLYETRIDLSQLGGDGGPAPAPAPAPAPGGTLQLEEEYRLFEPESTQKQEMDIWLKNFPQAWAETGGMGTAHCQAPVLIQLKATATPISIRQYPMPHEAYQGIKPHIRRMLDQGILKPCQSPWNTPLLPVKKPGTEDYRPVQDLREVNKRVEDIHPTVPNPYNLLSTLPPSHPWYTVLDLKDAFFCLRLHSESQLLFAFEWRDPEIGLSGQLTWTRLPQGFKNSPTLFNEALHSDLADFRVRYPALVLLQYVDDLLLAAATRTECLEGTKALLETLGNKGYRASAKKAQICLQEVTYLGYSLKDGQRWLTKARKEAILSIPVPKNSRQVREFLGKAGYCRLFIPGFAELAAPLYPLTRPGTLFQWGTEQQLAFEDIKKALLSSPALGLPDITKPFELFIDENSGFAKGVLVQKLGPWKRPVAYLSKKLDTVASGWPPCLRMVAAIAILVKDAGKLTLGQPLTILTSHPVEALVRQPPNKWLSNARMTHYQAMLLDAERVHFGPTVSLNPATLLPLPSGGNHHDCLQILAETHGTRPDLTDQPLPDADLTWYTDGSSFIRNGEREAGAAVTTESEVIWAAPLPPGTSAQRAELIALTQALKMAEGKKLTVYTDSRYAFATTHVHGEIYRRRGWLTSEGKEIKNKNEILALLEALFLPKRLSIIHCPGHQKGDSPQAKGNRLADDTAKKAATETHSSLTVLPAGKRTADGSEFEKRTADGSEFESPKKKAKVE

SEQ ID NO: 1233 - protein, 2094 aa, synthetic construct
MPAAKRVKLDGGDKKYSIGLDIGTNSVGWAVITDEYKVPSKKFKVLGNTDRHSIKKNLIGALLFDSGETAEATRLKRTARRRYTRRKNRICYLQEIFSNEMAKVDDSFFHRLEESFLVEEDKKHERHPIFGNIVDEVAYHEKYPTIYHLRKKLVDSTDKADLRLIYLALAHMIKFRGHFLIEGDLNPDNSDVDKLFIQLVQTYNQLFEENPINASGVDAKAILSARLSKSRRLENLIAQLPGEKKNGLFGNLIALSLGLTPNFKSNFDLAEDAKLQLSKDTYDDDLDNLLAQIGDQYADLFLAAKNLSDAILLSDILRVNTEITKAPLSASMIKRYDEHHQDLTLLKALVRQQLPEKYKEIFFDQSKNGYAGYIDGGASQEEFYKFIKPILEKMDGTEELLVKLNREDLLRKQRTFDNGSIPHQIHLGELHAILRRQEDFYPFLKDNREKIEKILTFRIPYYVGPLARGNSRFAWMTRKSEETITPWNFEEVVDKGASAQSFIERMTNFDKNLPNEKVLPKHSLLYEYFTVYNELTKVKYVTEGMRKPAFLSGEQKKAIVDLLFKTNRKVTVKQLKEDYFKKIECFDSVEISGVEDRFNASLGTYHDLLKIIKDKDFLDNEENEDILEDIVLTLTLFEDREMIEERLKTYAHLFDDKVMKQLKRRRYTGWGRLSRKLINGIRDKQSGKTILDFLKSDGFANRNFMQLIHDDSLTFKEDIQKAQVSGQGDSLHEHIANLAGSPAIKKGILQTVKVVDELVKVMGRHKPENIVIEMARENQTTQKGQKNSRERMKRIEEGIKELGSQILKEHPVENTQLQNEKLYLYYLQNGRDMYVDQELDINRLSDYDVDHIVPQSFLKDDSIDNKVLTRSDKARGKSDNVPSEEVVKKMKNYWRQLLNAKLITQRKFDNLTKAERGGLSELDKAGFIKRQLVETRQITKHVAQILDSRMNTKYDENDKLIREVKVITLKSKLVSDFRKDFQFYKVREINNYHHAHDAYLNAVVGTALIKKYPKLESEFVYGDYKVYDVRKMIAKSEQEIGKATAKYFFYSNIMNFFKTEITLANGEIRKRPLIETNGETGEIVWDKGRDFATVRKVLSMPQVNIVKKTEVQTGGFSKESILPKRNSDKLIARKKDWDPKKYGGFDSPTVAYSVLVVAKVEKGKSKKLKSVKELLGITIMERSSFEKNPIDFLEAKGYKEVKKDLIIKLPKYSLFELENGRKRMLASAGELQKGNELALPSKYVNFLYLASHYEKLKGSPEDNEQKQLFVEQHKHYLDEIIEQISEFSKRVILADANLDKVLSAYNKHRDKPIREQAENIIHLFTLTNLGAPAAFKYFDTTIDRKRYTSTKEVLDATLIHQSITGLYETRIDLSQLGGDGGGGGGSGGGGSGGTLQLEEEYRLFEPESTQKQEMDIWLKNFPQAWAETGGMGTAHCQAPVLIQLKATATPISIRQYPMPHEAYQGIKPHIRRMLDQGILKPCQSPWNTPLLPVKKPGTEDYRPVQDLREVNKRVEDIHPTVPNPYNLLSTLPPSHPWYTVLDLKDAFFCLRLHSESQLLFAFEWRDPEIGLSGQLTWTRLPQGFKNSPTLFNEALHSDLADFRVRYPALVLLQYVDDLLLAAATRTECLEGTKALLETLGNKGYRASAKKAQICLQEVTYLGYSLKDGQRWLTKARKEAILSIPVPKNSRQVREFLGKAGYCRLFIPGFAELAAPLYPLTRPGTLFQWGTEQQLAFEDIKKALLSSPALGLPDITKPFELFIDENSGFAKGVLVQKLGPWKRPVAYLSKKLDTVASGWPPCLRMVAAIAILVKDAGKLTLGQPLTILTSHPVEALVRQPPNKWLSNARMTHYQAMLLDAERVHFGPTVSLNPATLLPLPSGGNHHDCLQILAETHGTRPDLTDQPLPDADLTWYTDGSSFIRNGEREAGAAVTTESEVIWAAPLPPGTSAQRAELIALTQALKMAEGKKLTVYTDSRYAFATTHVHGEIYRRRGWLTSEGKEIKNKNEILALLEALFLPKRLSIIHCPGHQKGDSPQAKGNRLADDTAKKAATETHSSLTVLPAGKRTADGSEFEKRTADGSEFESPKKKAKVE

SEQ ID NO: 1234 - protein, 2095 aa, synthetic construct
MPAAKRVKLDGGDKKYSIGLDIGTNSVGWAVITDEYKVPSKKFKVLGNTDRHSIKKNLIGALLFDSGETAEATRLKRTARRRYTRRKNRICYLQEIFSNEMAKVDDSFFHRLEESFLVEEDKKHERHPIFGNIVDEVAYHEKYPTIYHLRKKLVDSTDKADLRLIYLALAHMIKFRGHFLIEGDLNPDNSDVDKLFIQLVQTYNQLFEENPINASGVDAKAILSARLSKSRRLENLIAQLPGEKKNGLFGNLIALSLGLTPNFKSNFDLAEDAKLQLSKDTYDDDLDNLLAQIGDQYADLFLAAKNLSDAILLSDILRVNTEITKAPLSASMIKRYDEHHQDLTLLKALVRQQLPEKYKEIFFDQSKNGYAGYIDGGASQEEFYKFIKPILEKMDGTEELLVKLNREDLLRKQRTFDNGSIPHQIHLGELHAILRRQEDFYPFLKDNREKIEKILTFRIPYYVGPLARGNSRFAWMTRKSEETITPWNFEEVVDKGASAQSFIERMTNFDKNLPNEKVLPKHSLLYEYFTVYNELTKVKYVTEGMRKPAFLSGEQKKAIVDLLFKTNRKVTVKQLKEDYFKKIECFDSVEISGVEDRFNASLGTYHDLLKIIKDKDFLDNEENEDILEDIVLTLTLFEDREMIEERLKTYAHLFDDKVMKQLKRRRYTGWGRLSRKLINGIRDKQSGKTILDFLKSDGFANRNFMQLIHDDSLTFKEDIQKAQVSGQGDSLHEHIANLAGSPAIKKGILQTVKVVDELVKVMGRHKPENIVIEMARENQTTQKGQKNSRERMKRIEEGIKELGSQILKEHPVENTQLQNEKLYLYYLQNGRDMYVDQELDINRLSDYDVDHIVPQSFLKDDSIDNKVLTRSDKARGKSDNVPSEEVVKKMKNYWRQLLNAKLITQRKFDNLTKAERGGLSELDKAGFIKRQLVETRQITKHVAQILDSRMNTKYDENDKLIREVKVITLKSKLVSDFRKDFQFYKVREINNYHHAHDAYLNAVVGTALIKKYPKLESEFVYGDYKVYDVRKMIAKSEQEIGKATAKYFFYSNIMNFFKTEITLANGEIRKRPLIETNGETGEIVWDKGRDFATVRKVLSMPQVNIVKKTEVQTGGFSKESILPKRNSDKLIARKKDWDPKKYGGFDSPTVAYSVLVVAKVEKGKSKKLKSVKELLGITIMERSSFEKNPIDFLEAKGYKEVKKDLIIKLPKYSLFELENGRKRMLASAGELQKGNELALPSKYVNFLYLASHYEKLKGSPEDNEQKQLFVEQHKHYLDEIIEQISEFSKRVILADANLDKVLSAYNKHRDKPIREQAENIIHLFTLTNLGAPAAFKYFDTTIDRKRYTSTKEVLDATLIHQSITGLYETRIDLSQLGGDGGEAAAKGSSGGSGGTLQLEEEYRLFEPESTQKQEMDIWLKNFPQAWAETGGMGTAHCQAPVLIQLKATATPISIRQYPMPHEAYQGIKPHIRRMLDQGILKPCQSPWNTPLLPVKKPGTEDYRPVQDLREVNKRVEDIHPTVPNPYNLLSTLPPSHPWYTVLDLKDAFFCLRLHSESQLLFAFEWRDPEIGLSGQLTWTRLPQGFKNSPTLFNEALHSDLADFRVRYPALVLLQYVDDLLLAAATRTECLEGTKALLETLGNKGYRASAKKAQICLQEVTYLGYSLKDGQRWLTKARKEAILSIPVPKNSRQVREFLGKAGYCRLFIPGFAELAAPLYPLTRPGTLFQWGTEQQLAFEDIKKALLSSPALGLPDITKPFELFIDENSGFAKGVLVQKLGPWKRPVAYLSKKLDTVASGWPPCLRMVAAIAILVKDAGKLTLGQPLTILTSHPVEALVRQPPNKWLSNARMTHYQAMLLDAERVHFGPTVSLNPATLLPLPSGGNHHDCLQILAETHGTRPDLTDQPLPDADLTWYTDGSSFIRNGEREAGAAVTTESEVIWAAPLPPGTSAQRAELIALTQALKMAEGKKLTVYTDSRYAFATTHVHGEIYRRRGWLTSEGKEIKNKNEILALLEALFLPKRLSIIHCPGHQKGDSPQAKGNRLADDTAKKAATETHSSLTVLPAGKRTADGSEFEKRTADGSEFESPKKKAKVE

SEQ ID NO: 1235 - protein, 2095 aa, synthetic construct
MPAAKRVKLDGGDKKYSIGLDIGTNSVGWAVITDEYKVPSKKFKVLGNTDRHSIKKNLIGALLFDSGETAEATRLKRTARRRYTRRKNRICYLQEIFSNEMAKVDDSFFHRLEESFLVEEDKKHERHPIFGNIVDEVAYHEKYPTIYHLRKKLVDSTDKADLRLIYLALAHMIKFRGHFLIEGDLNPDNSDVDKLFIQLVQTYNQLFEENPINASGVDAKAILSARLSKSRRLENLIAQLPGEKKNGLFGNLIALSLGLTPNFKSNFDLAEDAKLQLSKDTYDDDLDNLLAQIGDQYADLFLAAKNLSDAILLSDILRVNTEITKAPLSASMIKRYDEHHQDLTLLKALVRQQLPEKYKEIFFDQSKNGYAGYIDGGASQEEFYKFIKPILEKMDGTEELLVKLNREDLLRKQRTFDNGSIPHQIHLGELHAILRRQEDFYPFLKDNREKIEKILTFRIPYYVGPLARGNSRFAWMTRKSEETITPWNFEEVVDKGASAQSFIERMTNFDKNLPNEKVLPKHSLLYEYFTVYNELTKVKYVTEGMRKPAFLSGEQKKAIVDLLFKTNRKVTVKQLKEDYFKKIECFDSVEISGVEDRFNASLGTYHDLLKIIKDKDFLDNEENEDILEDIVLTLTLFEDREMIEERLKTYAHLFDDKVMKQLKRRRYTGWGRLSRKLINGIRDKQSGKTILDFLKSDGFANRNFMQLIHDDSLTFKEDIQKAQVSGQGDSLHEHIANLAGSPAIKKGILQTVKVVDELVKVMGRHKPENIVIEMARENQTTQKGQKNSRERMKRIEEGIKELGSQILKEHPVENTQLQNEKLYLYYLQNGRDMYVDQELDINRLSDYDVDHIVPQSFLKDDSIDNKVLTRSDKARGKSDNVPSEEVVKKMKNYWRQLLNAKLITQRKFDNLTKAERGGLSELDKAGFIKRQLVETRQITKHVAQILDSRMNTKYDENDKLIREVKVITLKSKLVSDFRKDFQFYKVREINNYHHAHDAYLNAVVGTALIKKYPKLESEFVYGDYKVYDVRKMIAKSEQEIGKATAKYFFYSNIMNFFKTEITLANGEIRKRPLIETNGETGEIVWDKGRDFATVRKVLSMPQVNIVKKTEVQTGGFSKESILPKRNSDKLIARKKDWDPKKYGGFDSPTVAYSVLVVAKVEKGKSKKLKSVKELLGITIMERSSFEKNPIDFLEAKGYKEVKKDLIIKLPKYSLFELENGRKRMLASAGELQKGNELALPSKYVNFLYLASHYEKLKGSPEDNEQKQLFVEQHKHYLDEIIEQISEFSKRVILADANLDKVLSAYNKHRDKPIREQAENIIHLFTLTNLGAPAAFKYFDTTIDRKRYTSTKEVLDATLIHQSITGLYETRIDLSQLGGDGGEAAAKGGGGGSGGTLQLEEEYRLFEPESTQKQEMDIWLKNFPQAWAETGGMGTAHCQAPVLIQLKATATPISIRQYPMPHEAYQGIKPHIRRMLDQGILKPCQSPWNTPLLPVKKPGTEDYRPVQDLREVNKRVEDIHPTVPNPYNLLSTLPPSHPWYTVLDLKDAFFCLRLHSESQLLFAFEWRDPEIGLSGQLTWTRLPQGFKNSPTLFNEALHSDLADFRVRYPALVLLQYVDDLLLAAATRTECLEGTKALLETLGNKGYRASAKKAQICLQEVTYLGYSLKDGQRWLTKARKEAILSIPVPKNSRQVREFLGKAGYCRLFIPGFAELAAPLYPLTRPGTLFQWGTEQQLAFEDIKKALLSSPALGLPDITKPFELFIDENSGFAKGVLVQKLGPWKRPVAYLSKKLDTVASGWPPCLRMVAAIAILVKDAGKLTLGQPLTILTSHPVEALVRQPPNKWLSNARMTHYQAMLLDAERVHFGPTVSLNPATLLPLPSGGNHHDCLQILAETHGTRPDLTDQPLPDADLTWYTDGSSFIRNGEREAGAAVTTESEVIWAAPLPPGTSAQRAELIALTQALKMAEGKKLTVYTDSRYAFATTHVHGEIYRRRGWLTSEGKEIKNKNEILALLEALFLPKRLSIIHCPGHQKGDSPQAKGNRLADDTAKKAATETHSSLTVLPAGKRTADGSEFEKRTADGSEFESPKKKAKVE

SEQ ID NO: 1236 - protein, 2092 aa, synthetic construct
MPAAKRVKLDGGDKKYSIGLDIGTNSVGWAVITDEYKVPSKKFKVLGNTDRHSIKKNLIGALLFDSGETAEATRLKRTARRRYTRRKNRICYLQEIFSNEMAKVDDSFFHRLEESFLVEEDKKHERHPIFGNIVDEVAYHEKYPTIYHLRKKLVDSTDKADLRLIYLALAHMIKFRGHFLIEGDLNPDNSDVDKLFIQLVQTYNQLFEENPINASGVDAKAILSARLSKSRRLENLIAQLPGEKKNGLFGNLIALSLGLTPNFKSNFDLAEDAKLQLSKDTYDDDLDNLLAQIGDQYADLFLAAKNLSDAILLSDILRVNTEITKAPLSASMIKRYDEHHQDLTLLKALVRQQLPEKYKEIFFDQSKNGYAGYIDGGASQEEFYKFIKPILEKMDGTEELLVKLNREDLLRKQRTFDNGSIPHQIHLGELHAILRRQEDFYPFLKDNREKIEKILTFRIPYYVGPLARGNSRFAWMTRKSEETITPWNFEEVVDKGASAQSFIERMTNFDKNLPNEKVLPKHSLLYEYFTVYNELTKVKYVTEGMRKPAFLSGEQKKAIVDLLFKTNRKVTVKQLKEDYFKKIECFDSVEISGVEDRFNASLGTYHDLLKIIKDKDFLDNEENEDILEDIVLTLTLFEDREMIEERLKTYAHLFDDKVMKQLKRRRYTGWGRLSRKLINGIRDKQSGKTILDFLKSDGFANRNFMQLIHDDSLTFKEDIQKAQVSGQGDSLHEHIANLAGSPAIKKGILQTVKVVDELVKVMGRHKPENIVIEMARENQTTQKGQKNSRERMKRIEEGIKELGSQILKEHPVENTQLQNEKLYLYYLQNGRDMYVDQELDINRLSDYDVDHIVPQSFLKDDSIDNKVLTRSDKARGKSDNVPSEEVVKKMKNYWRQLLNAKLITQRKFDNLTKAERGGLSELDKAGFIKRQLVETRQITKHVAQILDSRMNTKYDENDKLIREVKVITLKSKLVSDFRKDFQFYKVREINNYHHAHDAYLNAVVGTALIKKYPKLESEFVYGDYKVYDVRKMIAKSEQEIGKATAKYFFYSNIMNFFKTEITLANGEIRKRPLIETNGETGEIVWDKGRDFATVRKVLSMPQVNIVKKTEVQTGGFSKESILPKRNSDKLIARKKDWDPKKYGGFDSPTVAYSVLVVAKVEKGKSKKLKSVKELLGITIMERSSFEKNPIDFLEAKGYKEVKKDLIIKLPKYSLFELENGRKRMLASAGELQKGNELALPSKYVNFLYLASHYEKLKGSPEDNEQKQLFVEQHKHYLDEIIEQISEFSKRVILADANLDKVLSAYNKHRDKPIREQAENIIHLFTLTNLGAPAAFKYFDTTIDRKRYTSTKEVLDATLIHQSITGLYETRIDLSQLGGDGGGSSEAAAKGGTLQLEEEYRLFEPESTQKQEMDIWLKNFPQAWAETGGMGTAHCQAPVLIQLKATATPISIRQYPMPHEAYQGIKPHIRRMLDQGILKPCQSPWNTPLLPVKKPGTEDYRPVQDLREVNKRVEDIHPTVPNPYNLLSTLPPSHPWYTVLDLKDAFFCLRLHSESQLLFAFEWRDPEIGLSGQLTWTRLPQGFKNSPTLFNEALHSDLADFRVRYPALVLLQYVDDLLLAAATRTECLEGTKALLETLGNKGYRASAKKAQICLQEVTYLGYSLKDGQRWLTKARKEAILSIPVPKNSRQVREFLGKAGYCRLFIPGFAELAAPLYPLTRPGTLFQWGTEQQLAFEDIKKALLSSPALGLPDITKPFELFIDENSGFAKGVLVQKLGPWKRPVAYLSKKLDTVASGWPPCLRMVAAIAILVKDAGKLTLGQPLTILTSHPVEALVRQPPNKWLSNARMTHYQAMLLDAERVHFGPTVSLNPATLLPLPSGGNHHDCLQILAETHGTRPDLTDQPLPDADLTWYTDGSSFIRNGEREAGAAVTTESEVIWAAPLPPGTSAQRAELIALTQALKMAEGKKLTVYTDSRYAFATTHVHGEIYRRRGWLTSEGKEIKNKNEILALLEALFLPKRLSIIHCPGHQKGDSPQAKGNRLADDTAKKAATETHSSLTVLPAGKRTADGSEFEKRTADGSEFESPKKKAKVE

SEQ ID NO: 1237 - protein, 2095 aa, synthetic construct
MPAAKRVKLDGGDKKYSIGLDIGTNSVGWAVITDEYKVPSKKFKVLGNTDRHSIKKNLIGALLFDSGETAEATRLKRTARRRYTRRKNRICYLQEIFSNEMAKVDDSFFHRLEESFLVEEDKKHERHPIFGNIVDEVAYHEKYPTIYHLRKKLVDSTDKADLRLIYLALAHMIKFRGHFLIEGDLNPDNSDVDKLFIQLVQTYNQLFEENPINASGVDAKAILSARLSKSRRLENLIAQLPGEKKNGLFGNLIALSLGLTPNFKSNFDLAEDAKLQLSKDTYDDDLDNLLAQIGDQYADLFLAAKNLSDAILLSDILRVNTEITKAPLSASMIKRYDEHHQDLTLLKALVRQQLPEKYKEIFFDQSKNGYAGYIDGGASQEEFYKFIKPILEKMDGTEELLVKLNREDLLRKQRTFDNGSIPHQIHLGELHAILRRQEDFYPFLKDNREKIEKILTFRIPYYVGPLARGNSRFAWMTRKSEETITPWNFEEVVDKGASAQSFIERMTNFDKNLPNEKVLPKHSLLYEYFTVYNELTKVKYVTEGMRKPAFLSGEQKKAIVDLLFKTNRKVTVKQLKEDYFKKIECFDSVEISGVEDRFNASLGTYHDLLKIIKDKDFLDNEENEDILEDIVLTLTLFEDREMIEERLKTYAHLFDDKVMKQLKRRRYTGWGRLSRKLINGIRDKQSGKTILDFLKSDGFANRNFMQLIHDDSLTFKEDIQKAQVSGQGDSLHEHIANLAGSPAIKKGILQTVKVVDELVKVMGRHKPENIVIEMARENQTTQKGQKNSRERMKRIEEGIKELGSQILKEHPVENTQLQNEKLYLYYLQNGRDMYVDQELDINRLSDYDVDHIVPQSFLKDDSIDNKVLTRSDKARGKSDNVPSEEVVKKMKNYWRQLLNAKLITQRKFDNLTKAERGGLSELDKAGFIKRQLVETRQITKHVAQILDSRMNTKYDENDKLIREVKVITLKSKLVSDFRKDFQFYKVREINNYHHAHDAYLNAVVGTALIKKYPKLESEFVYGDYKVYDVRKMIAKSEQEIGKATAKYFFYSNIMNFFKTEITLANGEIRKRPLIETNGETGEIVWDKGRDFATVRKVLSMPQVNIVKKTEVQTGGFSKESILPKRNSDKLIARKKDWDPKKYGGFDSPTVAYSVLVVAKVEKGKSKKLKSVKELLGITIMERSSFEKNPIDFLEAKGYKEVKKDLIIKLPKYSLFELENGRKRMLASAGELQKGNELALPSKYVNFLYLASHYEKLKGSPEDNEQKQLFVEQHKHYLDEIIEQISEFSKRVILADANLDKVLSAYNKHRDKPIREQAENIIHLFTLTNLGAPAAFKYFDTTIDRKRYTSTKEVLDATLIHQSITGLYETRIDLSQLGGDGGGGSEAAAKGGGGGTLQLEEEYRLFEPESTQKQEMDIWLKNFPQAWAETGGMGTAHCQAPVLIQLKATATPISIRQYPMPHEAYQGIKPHIRRMLDQGILKPCQSPWNTPLLPVKKPGTEDYRPVQDLREVNKRVEDIHPTVPNPYNLLSTLPPSHPWYTVLDLKDAFFCLRLHSESQLLFAFEWRDPEIGLSGQLTWTRLPQGFKNSPTLFNEALHSDLADFRVRYPALVLLQYVDDLLLAAATRTECLEGTKALLETLGNKGYRASAKKAQICLQEVTYLGYSLKDGQRWLTKARKEAILSIPVPKNSRQVREFLGKAGYCRLFIPGFAELAAPLYPLTRPGTLFQWGTEQQLAFEDIKKALLSSPALGLPDITKPFELFIDENSGFAKGVLVQKLGPWKRPVAYLSKKLDTVASGWPPCLRMVAAIAILVKDAGKLTLGQPLTILTSHPVEALVRQPPNKWLSNARMTHYQAMLLDAERVHFGPTVSLNPATLLPLPSGGNHHDCLQILAETHGTRPDLTDQPLPDADLTWYTDGSSFIRNGEREAGAAVTTESEVIWAAPLPPGTSAQRAELIALTQALKMAEGKKLTVYTDSRYAFATTHVHGEIYRRRGWLTSEGKEIKNKNEILALLEALFLPKRLSIIHCPGHQKGDSPQAKGNRLADDTAKKAATETHSSLTVLPAGKRTADGSEFEKRTADGSEFESPKKKAKVE

SEQ ID NO: 1238 - protein, 2093 aa, synthetic construct
MPAAKRVKLDGGDKKYSIGLDIGTNSVGWAVITDEYKVPSKKFKVLGNTDRHSIKKNLIGALLFDSGETAEATRLKRTARRRYTRRKNRICYLQEIFSNEMAKVDDSFFHRLEESFLVEEDKKHERHPIFGNIVDEVAYHEKYPTIYHLRKKLVDSTDKADLRLIYLALAHMIKFRGHFLIEGDLNPDNSDVDKLFIQLVQTYNQLFEENPINASGVDAKAILSARLSKSRRLENLIAQLPGEKKNGLFGNLIALSLGLTPNFKSNFDLAEDAKLQLSKDTYDDDLDNLLAQIGDQYADLFLAAKNLSDAILLSDILRVNTEITKAPLSASMIKRYDEHHQDLTLLKALVRQQLPEKYKEIFFDQSKNGYAGYIDGGASQEEFYKFIKPILEKMDGTEELLVKLNREDLLRKQRTFDNGSIPHQIHLGELHAILRRQEDFYPFLKDNREKIEKILTFRIPYYVGPLARGNSRFAWMTRKSEETITPWNFEEVVDKGASAQSFIERMTNFDKNLPNEKVLPKHSLLYEYFTVYNELTKVKYVTEGMRKPAFLSGEQKKAIVDLLFKTNRKVTVKQLKEDYFKKIECFDSVEISGVEDRFNASLGTYHDLLKIIKDKDFLDNEENEDILEDIVLTLTLFEDREMIEERLKTYAHLFDDKVMKQLKRRRYTGWGRLSRKLINGIRDKQSGKTILDFLKSDGFANRNFMQLIHDDSLTFKEDIQKAQVSGQGDSLHEHIANLAGSPAIKKGILQTVKVVDELVKVMGRHKPENIVIEMARENQTTQKGQKNSRERMKRIEEGIKELGSQILKEHPVENTQLQNEKLYLYYLQNGRDMYVDQELDINRLSDYDVDHIVPQSFLKDDSIDNKVLTRSDKARGKSDNVPSEEVVKKMKNYWRQLLNAKLITQRKFDNLTKAERGGLSELDKAGFIKRQLVETRQITKHVAQILDSRMNTKYDENDKLIREVKVITLKSKLVSDFRKDFQFYKVREINNYHHAHDAYLNAVVGTALIKKYPKLESEFVYGDYKVYDVRKMIAKSEQEIGKATAKYFFYSNIMNFFKTEITLANGEIRKRPLIETNGETGEIVWDKGRDFATVRKVLSMPQVNIVKKTEVQTGGFSKESILPKRNSDKLIARKKDWDPKKYGGFDSPTVAYSVLVVAKVEKGKSKKLKSVKELLGITIMERSSFEKNPIDFLEAKGYKEVKKDLIIKLPKYSLFELENGRKRMLASAGELQKGNELALPSKYVNFLYLASHYEKLKGSPEDNEQKQLFVEQHKHYLDEIIEQISEFSKRVILADANLDKVLSAYNKHRDKPIREQAENIIHLFTLTNLGAPAAFKYFDTTIDRKRYTSTKEVLDATLIHQSITGLYETRIDLSQLGGDGGPAPGSSGGGGGTLQLEEEYRLFEPESTQKQEMDIWLKNFPQAWAETGGMGTAHCQAPVLIQLKATATPISIRQYPMPHEAYQGIKPHIRRMLDQGILKPCQSPWNTPLLPVKKPGTEDYRPVQDLREVNKRVEDIHPTVPNPYNLLSTLPPSHPWYTVLDLKDAFFCLRLHSESQLLFAFEWRDPEIGLSGQLTWTRLPQGFKNSPTLFNEALHSDLADFRVRYPALVLLQYVDDLLLAAATRTECLEGTKALLETLGNKGYRASAKKAQICLQEVTYLGYSLKDGQRWLTKARKEAILSIPVPKNSRQVREFLGKAGYCRLFIPGFAELAAPLYPLTRPGTLFQWGTEQQLAFEDIKKALLSSPALGLPDITKPFELFIDENSGFAKGVLVQKLGPWKRPVAYLSKKLDTVASGWPPCLRMVAAIAILVKDAGKLTLGQPLTILTSHPVEALVRQPPNKWLSNARMTHYQAMLLDAERVHFGPTVSLNPATLLPLPSGGNHHDCLQILAETHGTRPDLTDQPLPDADLTWYTDGSSFIRNGEREAGAAVTTESEVIWAAPLPPGTSAQRAELIALTQALKMAEGKKLTVYTDSRYAFATTHVHGEIYRRRGWLTSEGKEIKNKNEILALLEALFLPKRLSIIHCPGHQKGDSPQAKGNRLADDTAKKAATETHSSLTVLPAGKRTADGSEFEKRTADGSEFESPKKKAKVE

SEQ ID NO: 1239 - protein, 2095 aa, synthetic construct
MPAAKRVKLDGGDKKYSIGLDIGTNSVGWAVITDEYKVPSKKFKVLGNTDRHSIKKNLIGALLFDSGETAEATRLKRTARRRYTRRKNRICYLQEIFSNEMAKVDDSFFHRLEESFLVEEDKKHERHPIFGNIVDEVAYHEKYPTIYHLRKKLVDSTDKADLRLIYLALAHMIKFRGHFLIEGDLNPDNSDVDKLFIQLVQTYNQLFEENPINASGVDAKAILSARLSKSRRLENLIAQLPGEKKNGLFGNLIALSLGLTPNFKSNFDLAEDAKLQLSKDTYDDDLDNLLAQIGDQYADLFLAAKNLSDAILLSDILRVNTEITKAPLSASMIKRYDEHHQDLTLLKALVRQQLPEKYKEIFFDQSKNGYAGYIDGGASQEEFYKFIKPILEKMDGTEELLVKLNREDLLRKQRTFDNGSIPHQIHLGELHAILRRQEDFYPFLKDNREKIEKILTFRIPYYVGPLARGNSRFAWMTRKSEETITPWNFEEVVDKGASAQSFIERMTNFDKNLPNEKVLPKHSLLYEYFTVYNELTKVKYVTEGMRKPAFLSGEQKKAIVDLLFKTNRKVTVKQLKEDYFKKIECFDSVEISGVEDRFNASLGTYHDLLKIIKDKDFLDNEENEDILEDIVLTLTLFEDREMIEERLKTYAHLFDDKVMKQLKRRRYTGWGRLSRKLINGIRDKQSGKTILDFLKSDGFANRNFMQLIHDDSLTFKEDIQKAQVSGQGDSLHEHIANLAGSPAIKKGILQTVKVVDELVKVMGRHKPENIVIEMARENQTTQKGQKNSRERMKRIEEGIKELGSQILKEHPVENTQLQNEKLYLYYLQNGRDMYVDQELDINRLSDYDVDHIVPQSFLKDDSIDNKVLTRSDKARGKSDNVPSEEVVKKMKNYWRQLLNAKLITQRKFDNLTKAERGGLSELDKAGFIKRQLVETRQITKHVAQILDSRMNTKYDENDKLIREVKVITLKSKLVSDFRKDFQFYKVREINNYHHAHDAYLNAVVGTALIKKYPKLESEFVYGDYKVYDVRKMIAKSEQEIGKATAKYFFYSNIMNFFKTEITLANGEIRKRPLIETNGETGEIVWDKGRDFATVRKVLSMPQVNIVKKTEVQTGGFSKESILPKRNSDKLIARKKDWDPKKYGGFDSPTVAYSVLVVAKVEKGKSKKLKSVKELLGITIMERSSFEKNPIDFLEAKGYKEVKKDLIIKLPKYSLFELENGRKRMLASAGELQKGNELALPSKYVNFLYLASHYEKLKGSPEDNEQKQLFVEQHKHYLDEIIEQISEFSKRVILADANLDKVLSAYNKHRDKPIREQAENIIHLFTLTNLGAPAAFKYFDTTIDRKRYTSTKEVLDATLIHQSITGLYETRIDLSQLGGDGGPAPGGSEAAAKGGTLQLEEEYRLFEPESTQKQEMDIWLKNFPQAWAETGGMGTAHCQAPVLIQLKATATPISIRQYPMPHEAYQGIKPHIRRMLDQGILKPCQSPWNTPLLPVKKPGTEDYRPVQDLREVNKRVEDIHPTVPNPYNLLSTLPPSHPWYTVLDLKDAFFCLRLHSESQLLFAFEWRDPEIGLSGQLTWTRLPQGFKNSPTLFNEALHSDLADFRVRYPALVLLQYVDDLLLAAATRTECLEGTKALLETLGNKGYRASAKKAQICLQEVTYLGYSLKDGQRWLTKARKEAILSIPVPKNSRQVREFLGKAGYCRLFIPGFAELAAPLYPLTRPGTLFQWGTEQQLAFEDIKKALLSSPALGLPDITKPFELFIDENSGFAKGVLVQKLGPWKRPVAYLSKKLDTVASGWPPCLRMVAAIAILVKDAGKLTLGQPLTILTSHPVEALVRQPPNKWLSNARMTHYQAMLLDAERVHFGPTVSLNPATLLPLPSGGNHHDCLQILAETHGTRPDLTDQPLPDADLTWYTDGSSFIRNGEREAGAAVTTESEVIWAAPLPPGTSAQRAELIALTQALKMAEGKKLTVYTDSRYAFATTHVHGEIYRRRGWLTSEGKEIKNKNEILALLEALFLPKRLSIIHCPGHQKGDSPQAKGNRLADDTAKKAATETHSSLTVLPAGKRTADGSEFEKRTADGSEFESPKKKAKVE

SEQ ID NO: 1240 - protein, 2093 aa, synthetic construct
MPAAKRVKLDGGDKKYSIGLDIGTNSVGWAVITDEYKVPSKKFKVLGNTDRHSIKKNLIGALLFDSGETAEATRLKRTARRRYTRRKNRICYLQEIFSNEMAKVDDSFFHRLEESFLVEEDKKHERHPIFGNIVDEVAYHEKYPTIYHLRKKLVDSTDKADLRLIYLALAHMIKFRGHFLIEGDLNPDNSDVDKLFIQLVQTYNQLFEENPINASGVDAKAILSARLSKSRRLENLIAQLPGEKKNGLFGNLIALSLGLTPNFKSNFDLAEDAKLQLSKDTYDDDLDNLLAQIGDQYADLFLAAKNLSDAILLSDILRVNTEITKAPLSASMIKRYDEHHQDLTLLKALVRQQLPEKYKEIFFDQSKNGYAGYIDGGASQEEFYKFIKPILEKMDGTEELLVKLNREDLLRKQRTFDNGSIPHQIHLGELHAILRRQEDFYPFLKDNREKIEKILTFRIPYYVGPLARGNSRFAWMTRKSEETITPWNFEEVVDKGASAQSFIERMTNFDKNLPNEKVLPKHSLLYEYFTVYNELTKVKYVTEGMRKPAFLSGEQKKAIVDLLFKTNRKVTVKQLKEDYFKKIECFDSVEISGVEDRFNASLGTYHDLLKIIKDKDFLDNEENEDILEDIVLTLTLFEDREMIEERLKTYAHLFDDKVMKQLKRRRYTGWGRLSRKLINGIRDKQSGKTILDFLKSDGFANRNFMQLIHDDSLTFKEDIQKAQVSGQGDSLHEHIANLAGSPAIKKGILQTVKVVDELVKVMGRHKPENIVIEMARENQTTQKGQKNSRERMKRIEEGIKELGSQILKEHPVENTQLQNEKLYLYYLQNGRDMYVDQELDINRLSDYDVDHIVPQSFLKDDSIDNKVLTRSDKARGKSDNVPSEEVVKKMKNYWRQLLNAKLITQRKFDNLTKAERGGLSELDKAGFIKRQLVETRQITKHVAQILDSRMNTKYDENDKLIREVKVITLKSKLVSDFRKDFQFYKVREINNYHHAHDAYLNAVVGTALIKKYPKLESEFVYGDYKVYDVRKMIAKSEQEIGKATAKYFFYSNIMNFFKTEITLANGEIRKRPLIETNGETGEIVWDKGRDFATVRKVLSMPQVNIVKKTEVQTGGFSKESILPKRNSDKLIARKKDWDPKKYGGFDSPTVAYSVLVVAKVEKGKSKKLKSVKELLGITIMERSSFEKNPIDFLEAKGYKEVKKDLIIKLPKYSLFELENGRKRMLASAGELQKGNELALPSKYVNFLYLASHYEKLKGSPEDNEQKQLFVEQHKHYLDEIIEQISEFSKRVILADANLDKVLSAYNKHRDKPIREQAENIIHLFTLTNLGAPAAFKYFDTTIDRKRYTSTKEVLDATLIHQSITGLYETRIDLSQLGGDGGGSSGGGPAPGGTLQLEEEYRLFEPESTQKQEMDIWLKNFPQAWAETGGMGTAHCQAPVLIQLKATATPISIRQYPMPHEAYQGIKPHIRRMLDQGILKPCQSPWNTPLLPVKKPGTEDYRPVQDLREVNKRVEDIHPTVPNPYNLLSTLPPSHPWYTVLDLKDAFFCLRLHSESQLLFAFEWRDPEIGLSGQLTWTRLPQGFKNSPTLFNEALHSDLADFRVRYPALVLLQYVDDLLLAAATRTECLEGTKALLETLGNKGYRASAKKAQICLQEVTYLGYSLKDGQRWLTKARKEAILSIPVPKNSRQVREFLGKAGYCRLFIPGFAELAAPLYPLTRPGTLFQWGTEQQLAFEDIKKALLSSPALGLPDITKPFELFIDENSGFAKGVLVQKLGPWKRPVAYLSKKLDTVASGWPPCLRMVAAIAILVKDAGKLTLGQPLTILTSHPVEALVRQPPNKWLSNARMTHYQAMLLDAERVHFGPTVSLNPATLLPLPSGGNHHDCLQILAETHGTRPDLTDQPLPDADLTWYTDGSSFIRNGEREAGAAVTTESEVIWAAPLPPGTSAQRAELIALTQALKMAEGKKLTVYTDSRYAFATTHVHGEIYRRRGWLTSEGKEIKNKNEILALLEALFLPKRLSIIHCPGHQKGDSPQAKGNRLADDTAKKAATETHSSLTVLPAGKRTADGSEFEKRTADGSEFESPKKKAKVE

SEQ ID NO: 1241 - protein, 2095 aa, synthetic construct
MPAAKRVKLDGGDKKYSIGLDIGTNSVGWAVITDEYKVPSKKFKVLGNTDRHSIKKNLIGALLFDSGETAEATRLKRTARRRYTRRKNRICYLQEIFSNEMAKVDDSFFHRLEESFLVEEDKKHERHPIFGNIVDEVAYHEKYPTIYHLRKKLVDSTDKADLRLIYLALAHMIKFRGHFLIEGDLNPDNSDVDKLFIQLVQTYNQLFEENPINASGVDAKAILSARLSKSRRLENLIAQLPGEKKNGLFGNLIALSLGLTPNFKSNFDLAEDAKLQLSKDTYDDDLDNLLAQIGDQYADLFLAAKNLSDAILLSDILRVNTEITKAPLSASMIKRYDEHHQDLTLLKALVRQQLPEKYKEIFFDQSKNGYAGYIDGGASQEEFYKFIKPILEKMDGTEELLVKLNREDLLRKQRTFDNGSIPHQIHLGELHAILRRQEDFYPFLKDNREKIEKILTFRIPYYVGPLARGNSRFAWMTRKSEETITPWNFEEVVDKGASAQSFIERMTNFDKNLPNEKVLPKHSLLYEYFTVYNELTKVKYVTEGMRKPAFLSGEQKKAIVDLLFKTNRKVTVKQLKEDYFKKIECFDSVEISGVEDRFNASLGTYHDLLKIIKDKDFLDNEENEDILEDIVLTLTLFEDREMIEERLKTYAHLFDDKVMKQLKRRRYTGWGRLSRKLINGIRDKQSGKTILDFLKSDGFANRNFMQLIHDDSLTFKEDIQKAQVSGQGDSLHEHIANLAGSPAIKKGILQTVKVVDELVKVMGRHKPENIVIEMARENQTTQKGQKNSRERMKRIEEGIKELGSQILKEHPVENTQLQNEKLYLYYLQNGRDMYVDQELDINRLSDYDVDHIVPQSFLKDDSIDNKVLTRSDKARGKSDNVPSEEVVKKMKNYWRQLLNAKLITQRKFDNLTKAERGGLSELDKAGFIKRQLVETRQITKHVAQILDSRMNTKYDENDKLIREVKVITLKSKLVSDFRKDFQFYKVREINNYHHAHDAYLNAVVGTALIKKYPKLESEFVYGDYKVYDVRKMIAKSEQEIGKATAKYFFYSNIMNFFKTEITLANGEIRKRPLIETNGETGEIVWDKGRDFATVRKVLSMPQVNIVKKTEVQTGGFSKESILPKRNSDKLIARKKDWDPKKYGGFDSPTVAYSVLVVAKVEKGKSKKLKSVKELLGITIMERSSFEKNPIDFLEAKGYKEVKKDLIIKLPKYSLFELENGRKRMLASAGELQKGNELALPSKYVNFLYLASHYEKLKGSPEDNEQKQLFVEQHKHYLDEIIEQISEFSKRVILADANLDKVLSAYNKHRDKPIREQAENIIHLFTLTNLGAPAAFKYFDTTIDRKRYTSTKEVLDATLIHQSITGLYETRIDLSQLGGDGGEAAAKGGSGSSGGTLQLEEEYRLFEPESTQKQEMDIWLKNFPQAWAETGGMGTAHCQAPVLIQLKATATPISIRQYPMPHEAYQGIKPHIRRMLDQGILKPCQSPWNTPLLPVKKPGTEDYRPVQDLREVNKRVEDIHPTVPNPYNLLSTLPPSHPWYTVLDLKDAFFCLRLHSESQLLFAFEWRDPEIGLSGQLTWTRLPQGFKNSPTLFNEALHSDLADFRVRYPALVLLQYVDDLLLAAATRTECLEGTKALLETLGNKGYRASAKKAQICLQEVTYLGYSLKDGQRWLTKARKEAILSIPVPKNSRQVREFLGKAGYCRLFIPGFAELAAPLYPLTRPGTLFQWGTEQQLAFEDIKKALLSSPALGLPDITKPFELFIDENSGFAKGVLVQKLGPWKRPVAYLSKKLDTVASGWPPCLRMVAAIAILVKDAGKLTLGQPLTILTSHPVEALVRQPPNKWLSNARMTHYQAMLLDAERVHFGPTVSLNPATLLPLPSGGNHHDCLQILAETHGTRPDLTDQPLPDADLTWYTDGSSFIRNGEREAGAAVTTESEVIWAAPLPPGTSAQRAELIALTQALKMAEGKKLTVYTDSRYAFATTHVHGEIYRRRGWLTSEGKEIKNKNEILALLEALFLPKRLSIIHCPGHQKGDSPQAKGNRLADDTAKKAATETHSSLTVLPAGKRTADGSEFEKRTADGSEFESPKKKAKVE

SEQ ID NO: 1242 - protein, 2095 aa, synthetic construct
MPAAKRVKLDGGDKKYSIGLDIGTNSVGWAVITDEYKVPSKKFKVLGNTDRHSIKKNLIGALLFDSGETAEATRLKRTARRRYTRRKNRICYLQEIFSNEMAKVDDSFFHRLEESFLVEEDKKHERHPIFGNIVDEVAYHEKYPTIYHLRKKLVDSTDKADLRLIYLALAHMIKFRGHFLIEGDLNPDNSDVDKLFIQLVQTYNQLFEENPINASGVDAKAILSARLSKSRRLENLIAQLPGEKKNGLFGNLIALSLGLTPNFKSNFDLAEDAKLQLSKDTYDDDLDNLLAQIGDQYADLFLAAKNLSDAILLSDILRVNTEITKAPLSASMIKRYDEHHQDLTLLKALVRQQLPEKYKEIFFDQSKNGYAGYIDGGASQEEFYKFIKPILEKMDGTEELLVKLNREDLLRKQRTFDNGSIPHQIHLGELHAILRRQEDFYPFLKDNREKIEKILTFRIPYYVGPLARGNSRFAWMTRKSEETITPWNFEEVVDKGASAQSFIERMTNFDKNLPNEKVLPKHSLLYEYFTVYNELTKVKYVTEGMRKPAFLSGEQKKAIVDLLFKTNRKVTVKQLKEDYFKKIECFDSVEISGVEDRFNASLGTYHDLLKIIKDKDFLDNEENEDILEDIVLTLTLFEDREMIEERLKTYAHLFDDKVMKQLKRRRYTGWGRLSRKLINGIRDKQSGKTILDFLKSDGFANRNFMQLIHDDSLTFKEDIQKAQVSGQGDSLHEHIANLAGSPAIKKGILQTVKVVDELVKVMGRHKPENIVIEMARENQTTQKGQKNSRERMKRIEEGIKELGSQILKEHPVENTQLQNEKLYLYYLQNGRDMYVDQELDINRLSDYDVDHIVPQSFLKDDSIDNKVLTRSDKARGKSDNVPSEEVVKKMKNYWRQLLNAKLITQRKFDNLTKAERGGLSELDKAGFIKRQLVETRQITKHVAQILDSRMNTKYDENDKLIREVKVITLKSKLVSDFRKDFQFYKVREINNYHHAHDAYLNAVVGTALIKKYPKLESEFVYGDYKVYDVRKMIAKSEQEIGKATAKYFFYSNIMNFFKTEITLANGEIRKRPLIETNGETGEIVWDKGRDFATVRKVLSMPQVNIVKKTEVQTGGFSKESILPKRNSDKLIARKKDWDPKKYGGFDSPTVAYSVLVVAKVEKGKSKKLKSVKELLGITIMERSSFEKNPIDFLEAKGYKEVKKDLIIKLPKYSLFELENGRKRMLASAGELQKGNELALPSKYVNFLYLASHYEKLKGSPEDNEQKQLFVEQHKHYLDEIIEQISEFSKRVILADANLDKVLSAYNKHRDKPIREQAENIIHLFTLTNLGAPAAFKYFDTTIDRKRYTSTKEVLDATLIHQSITGLYETRIDLSQLGGDGGGSSGGSEAAAKGGTLQLEEEYRLFEPESTQKQEMDIWLKNFPQAWAETGGMGTAHCQAPVLIQLKATATPISIRQYPMPHEAYQGIKPHIRRMLDQGILKPCQSPWNTPLLPVKKPGTEDYRPVQDLREVNKRVEDIHPTVPNPYNLLSTLPPSHPWYTVLDLKDAFFCLRLHSESQLLFAFEWRDPEIGLSGQLTWTRLPQGFKNSPTLFNEALHSDLADFRVRYPALVLLQYVDDLLLAAATRTECLEGTKALLETLGNKGYRASAKKAQICLQEVTYLGYSLKDGQRWLTKARKEAILSIPVPKNSRQVREFLGKAGYCRLFIPGFAELAAPLYPLTRPGTLFQWGTEQQLAFEDIKKALLSSPALGLPDITKPFELFIDENSGFAKGVLVQKLGPWKRPVAYLSKKLDTVASGWPPCLRMVAAIAILVKDAGKLTLGQPLTILTSHPVEALVRQPPNKWLSNARMTHYQAMLLDAERVHFGPTVSLNPATLLPLPSGGNHHDCLQILAETHGTRPDLTDQPLPDADLTWYTDGSSFIRNGEREAGAAVTTESEVIWAAPLPPGTSAQRAELIALTQALKMAEGKKLTVYTDSRYAFATTHVHGEIYRRRGWLTSEGKEIKNKNEILALLEALFLPKRLSIIHCPGHQKGDSPQAKGNRLADDTAKKAATETHSSLTVLPAGKRTADGSEFEKRTADGSEFESPKKKAKVE

SEQ ID NO: 1243 - protein, 2099 aa, synthetic construct
MPAAKRVKLDGGDKKYSIGLDIGTNSVGWAVITDEYKVPSKKFKVLGNTDRHSIKKNLIGALLFDSGETAEATRLKRTARRRYTRRKNRICYLQEIFSNEMAKVDDSFFHRLEESFLVEEDKKHERHPIFGNIVDEVAYHEKYPTIYHLRKKLVDSTDKADLRLIYLALAHMIKFRGHFLIEGDLNPDNSDVDKLFIQLVQTYNQLFEENPINASGVDAKAILSARLSKSRRLENLIAQLPGEKKNGLFGNLIALSLGLTPNFKSNFDLAEDAKLQLSKDTYDDDLDNLLAQIGDQYADLFLAAKNLSDAILLSDILRVNTEITKAPLSASMIKRYDEHHQDLTLLKALVRQQLPEKYKEIFFDQSKNGYAGYIDGGASQEEFYKFIKPILEKMDGTEELLVKLNREDLLRKQRTFDNGSIPHQIHLGELHAILRRQEDFYPFLKDNREKIEKILTFRIPYYVGPLARGNSRFAWMTRKSEETITPWNFEEVVDKGASAQSFIERMTNFDKNLPNEKVLPKHSLLYEYFTVYNELTKVKYVTEGMRKPAFLSGEQKKAIVDLLFKTNRKVTVKQLKEDYFKKIECFDSVEISGVEDRFNASLGTYHDLLKIIKDKDFLDNEENEDILEDIVLTLTLFEDREMIEERLKTYAHLFDDKVMKQLKRRRYTGWGRLSRKLINGIRDKQSGKTILDFLKSDGFANRNFMQLIHDDSLTFKEDIQKAQVSGQGDSLHEHIANLAGSPAIKKGILQTVKVVDELVKVMGRHKPENIVIEMARENQTTQKGQKNSRERMKRIEEGIKELGSQILKEHPVENTQLQNEKLYLYYLQNGRDMYVDQELDINRLSDYDVDHIVPQSFLKDDSIDNKVLTRSDKARGKSDNVPSEEVVKKMKNYWRQLLNAKLITQRKFDNLTKAERGGLSELDKAGFIKRQLVETRQITKHVAQILDSRMNTKYDENDKLIREVKVITLKSKLVSDFRKDFQFYKVREINNYHHAHDAYLNAVVGTALIKKYPKLESEFVYGDYKVYDVRKMIAKSEQEIGKATAKYFFYSNIMNFFKTEITLANGEIRKRPLIETNGETGEIVWDKGRDFATVRKVLSMPQVNIVKKTEVQTGGFSKESILPKRNSDKLIARKKDWDPKKYGGFDSPTVAYSVLVVAKVEKGKSKKLKSVKELLGITIMERSSFEKNPIDFLEAKGYKEVKKDLIIKLPKYSLFELENGRKRMLASAGELQKGNELALPSKYVNFLYLASHYEKLKGSPEDNEQKQLFVEQHKHYLDEIIEQISEFSKRVILADANLDKVLSAYNKHRDKPIREQAENIIHLFTLTNLGAPAAFKYFDTTIDRKRYTSTKEVLDATLIHQSITGLYETRIDLSQLGGDGGEAAAKGGGGSEAAAKGGTLQLEEEYRLFEPESTQKQEMDIWLKNFPQAWAETGGMGTAHCQAPVLIQLKATATPISIRQYPMPHEAYQGIKPHIRRMLDQGILKPCQSPWNTPLLPVKKPGTEDYRPVQDLREVNKRVEDIHPTVPNPYNLLSTLPPSHPWYTVLDLKDAFFCLRLHSESQLLFAFEWRDPEIGLSGQLTWTRLPQGFKNSPTLFNEALHSDLADFRVRYPALVLLQYVDDLLLAAATRTECLEGTKALLETLGNKGYRASAKKAQICLQEVTYLGYSLKDGQRWLTKARKEAILSIPVPKNSRQVREFLGKAGYCRLFIPGFAELAAPLYPLTRPGTLFQWGTEQQLAFEDIKKALLSSPALGLPDITKPFELFIDENSGFAKGVLVQKLGPWKRPVAYLSKKLDTVASGWPPCLRMVAAIAILVKDAGKLTLGQPLTILTSHPVEALVRQPPNKWLSNARMTHYQAMLLDAERVHFGPTVSLNPATLLPLPSGGNHHDCLQILAETHGTRPDLTDQPLPDADLTWYTDGSSFIRNGEREAGAAVTTESEVIWAAPLPPGTSAQRAELIALTQALKMAEGKKLTVYTDSRYAFATTHVHGEIYRRRGWLTSEGKEIKNKNEILALLEALFLPKRLSIIHCPGHQKGDSPQAKGNRLADDTAKKAATETHSSLTVLPAGKRTADGSEFEKRTADGSEFESPKKKAKVE

SEQ ID NO: 1244 - protein, 2093 aa, synthetic construct
MPAAKRVKLDGGDKKYSIGLDIGTNSVGWAVITDEYKVPSKKFKVLGNTDRHSIKKNLIGALLFDSGETAEATRLKRTARRRYTRRKNRICYLQEIFSNEMAKVDDSFFHRLEESFLVEEDKKHERHPIFGNIVDEVAYHEKYPTIYHLRKKLVDSTDKADLRLIYLALAHMIKFRGHFLIEGDLNPDNSDVDKLFIQLVQTYNQLFEENPINASGVDAKAILSARLSKSRRLENLIAQLPGEKKNGLFGNLIALSLGLTPNFKSNFDLAEDAKLQLSKDTYDDDLDNLLAQIGDQYADLFLAAKNLSDAILLSDILRVNTEITKAPLSASMIKRYDEHHQDLTLLKALVRQQLPEKYKEIFFDQSKNGYAGYIDGGASQEEFYKFIKPILEKMDGTEELLVKLNREDLLRKQRTFDNGSIPHQIHLGELHAILRRQEDFYPFLKDNREKIEKILTFRIPYYVGPLARGNSRFAWMTRKSEETITPWNFEEVVDKGASAQSFIERMTNFDKNLPNEKVLPKHSLLYEYFTVYNELTKVKYVTEGMRKPAFLSGEQKKAIVDLLFKTNRKVTVKQLKEDYFKKIECFDSVEISGVEDRFNASLGTYHDLLKIIKDKDFLDNEENEDILEDIVLTLTLFEDREMIEERLKTYAHLFDDKVMKQLKRRRYTGWGRLSRKLINGIRDKQSGKTILDFLKSDGFANRNFMQLIHDDSLTFKEDIQKAQVSGQGDSLHEHIANLAGSPAIKKGILQTVKVVDELVKVMGRHKPENIVIEMARENQTTQKGQKNSRERMKRIEEGIKELGSQILKEHPVENTQLQNEKLYLYYLQNGRDMYVDQELDINRLSDYDVDHIVPQSFLKDDSIDNKVLTRSDKARGKSDNVPSEEVVKKMKNYWRQLLNAKLITQRKFDNLTKAERGGLSELDKAGFIKRQLVETRQITKHVAQILDSRMNTKYDENDKLIREVKVITLKSKLVSDFRKDFQFYKVREINNYHHAHDAYLNAVVGTALIKKYPKLESEFVYGDYKVYDVRKMIAKSEQEIGKATAKYFFYSNIMNFFKTEITLANGEIRKRPLIETNGETGEIVWDKGRDFATVRKVLSMPQVNIVKKTEVQTGGFSKESILPKRNSDKLIARKKDWDPKKYGGFDSPTVAYSVLVVAKVEKGKSKKLKSVKELLGITIMERSSFEKNPIDFLEAKGYKEVKKDLIIKLPKYSLFELENGRKRMLASAGELQKGNELALPSKYVNFLYLASHYEKLKGSPEDNEQKQLFVEQHKHYLDEIIEQISEFSKRVILADANLDKVLSAYNKHRDKPIREQAENIIHLFTLTNLGAPAAFKYFDTTIDRKRYTSTKEVLDATLIHQSITGLYETRIDLSQLGGDGGGGSGSSPAPGGTLQLEEEYRLFEPESTQKQEMDIWLKNFPQAWAETGGMGTAHCQAPVLIQLKATATPISIRQYPMPHEAYQGIKPHIRRMLDQGILKPCQSPWNTPLLPVKKPGTEDYRPVQDLREVNKRVEDIHPTVPNPYNLLSTLPPSHPWYTVLDLKDAFFCLRLHSESQLLFAFEWRDPEIGLSGQLTWTRLPQGFKNSPTLFNEALHSDLADFRVRYPALVLLQYVDDLLLAAATRTECLEGTKALLETLGNKGYRASAKKAQICLQEVTYLGYSLKDGQRWLTKARKEAILSIPVPKNSRQVREFLGKAGYCRLFIPGFAELAAPLYPLTRPGTLFQWGTEQQLAFEDIKKALLSSPALGLPDITKPFELFIDENSGFAKGVLVQKLGPWKRPVAYLSKKLDTVASGWPPCLRMVAAIAILVKDAGKLTLGQPLTILTSHPVEALVRQPPNKWLSNARMTHYQAMLLDAERVHFGPTVSLNPATLLPLPSGGNHHDCLQILAETHGTRPDLTDQPLPDADLTWYTDGSSFIRNGEREAGAAVTTESEVIWAAPLPPGTSAQRAELIALTQALKMAEGKKLTVYTDSRYAFATTHVHGEIYRRRGWLTSEGKEIKNKNEILALLEALFLPKRLSIIHCPGHQKGDSPQAKGNRLADDTAKKAATETHSSLTVLPAGKRTADGSEFEKRTADGSEFESPKKKAKVE

SEQ ID NO: 1245 - protein, 2090 aa, synthetic construct
MPAAKRVKLDGGDKKYSIGLDIGTNSVGWAVITDEYKVPSKKFKVLGNTDRHSIKKNLIGALLFDSGETAEATRLKRTARRRYTRRKNRICYLQEIFSNEMAKVDDSFFHRLEESFLVEEDKKHERHPIFGNIVDEVAYHEKYPTIYHLRKKLVDSTDKADLRLIYLALAHMIKFRGHFLIEGDLNPDNSDVDKLFIQLVQTYNQLFEENPINASGVDAKAILSARLSKSRRLENLIAQLPGEKKNGLFGNLIALSLGLTPNFKSNFDLAEDAKLQLSKDTYDDDLDNLLAQIGDQYADLFLAAKNLSDAILLSDILRVNTEITKAPLSASMIKRYDEHHQDLTLLKALVRQQLPEKYKEIFFDQSKNGYAGYIDGGASQEEFYKFIKPILEKMDGTEELLVKLNREDLLRKQRTFDNGSIPHQIHLGELHAILRRQEDFYPFLKDNREKIEKILTFRIPYYVGPLARGNSRFAWMTRKSEETITPWNFEEVVDKGASAQSFIERMTNFDKNLPNEKVLPKHSLLYEYFTVYNELTKVKYVTEGMRKPAFLSGEQKKAIVDLLFKTNRKVTVKQLKEDYFKKIECFDSVEISGVEDRFNASLGTYHDLLKIIKDKDFLDNEENEDILEDIVLTLTLFEDREMIEERLKTYAHLFDDKVMKQLKRRRYTGWGRLSRKLINGIRDKQSGKTILDFLKSDGFANRNFMQLIHDDSLTFKEDIQKAQVSGQGDSLHEHIANLAGSPAIKKGILQTVKVVDELVKVMGRHKPENIVIEMARENQTTQKGQKNSRERMKRIEEGIKELGSQILKEHPVENTQLQNEKLYLYYLQNGRDMYVDQELDINRLSDYDVDHIVPQSFLKDDSIDNKVLTRSDKARGKSDNVPSEEVVKKMKNYWRQLLNAKLITQRKFDNLTKAERGGLSELDKAGFIKRQLVETRQITKHVAQILDSRMNTKYDENDKLIREVKVITLKSKLVSDFRKDFQFYKVREINNYHHAHDAYLNAVVGTALIKKYPKLESEFVYGDYKVYDVRKMIAKSEQEIGKATAKYFFYSNIMNFFKTEITLANGEIRKRPLIETNGETGEIVWDKGRDFATVRKVLSMPQVNIVKKTEVQTGGFSKESILPKRNSDKLIARKKDWDPKKYGGFDSPTVAYSVLVVAKVEKGKSKKLKSVKELLGITIMERSSFEKNPIDFLEAKGYKEVKKDLIIKLPKYSLFELENGRKRMLASAGELQKGNELALPSKYVNFLYLASHYEKLKGSPEDNEQKQLFVEQHKHYLDEIIEQISEFSKRVILADANLDKVLSAYNKHRDKPIREQAENIIHLFTLTNLGAPAAFKYFDTTIDRKRYTSTKEVLDATLIHQSITGLYETRIDLSQLGGDGGGSSPAPGGTLQLEEEYRLFEPESTQKQEMDIWLKNFPQAWAETGGMGTAHCQAPVLIQLKATATPISIRQYPMPHEAYQGIKPHIRRMLDQGILKPCQSPWNTPLLPVKKPGTEDYRPVQDLREVNKRVEDIHPTVPNPYNLLSTLPPSHPWYTVLDLKDAFFCLRLHSESQLLFAFEWRDPEIGLSGQLTWTRLPQGFKNSPTLFNEALHSDLADFRVRYPALVLLQYVDDLLLAAATRTECLEGTKALLETLGNKGYRASAKKAQICLQEVTYLGYSLKDGQRWLTKARKEAILSIPVPKNSRQVREFLGKAGYCRLFIPGFAELAAPLYPLTRPGTLFQWGTEQQLAFEDIKKALLSSPALGLPDITKPFELFIDENSGFAKGVLVQKLGPWKRPVAYLSKKLDTVASGWPPCLRMVAAIAILVKDAGKLTLGQPLTILTSHPVEALVRQPPNKWLSNARMTHYQAMLLDAERVHFGPTVSLNPATLLPLPSGGNHHDCLQILAETHGTRPDLTDQPLPDADLTWYTDGSSFIRNGEREAGAAVTTESEVIWAAPLPPGTSAQRAELIALTQALKMAEGKKLTVYTDSRYAFATTHVHGEIYRRRGWLTSEGKEIKNKNEILALLEALFLPKRLSIIHCPGHQKGDSPQAKGNRLADDTAKKAATETHSSLTVLPAGKRTADGSEFEKRTADGSEFESPKKKAKVE

SEQ ID NO: 1246 - protein, 2089 aa, synthetic construct
MPAAKRVKLDGGDKKYSIGLDIGTNSVGWAVITDEYKVPSKKFKVLGNTDRHSIKKNLIGALLFDSGETAEATRLKRTARRRYTRRKNRICYLQEIFSNEMAKVDDSFFHRLEESFLVEEDKKHERHPIFGNIVDEVAYHEKYPTIYHLRKKLVDSTDKADLRLIYLALAHMIKFRGHFLIEGDLNPDNSDVDKLFIQLVQTYNQLFEENPINASGVDAKAILSARLSKSRRLENLIAQLPGEKKNGLFGNLIALSLGLTPNFKSNFDLAEDAKLQLSKDTYDDDLDNLLAQIGDQYADLFLAAKNLSDAILLSDILRVNTEITKAPLSASMIKRYDEHHQDLTLLKALVRQQLPEKYKEIFFDQSKNGYAGYIDGGASQEEFYKFIKPILEKMDGTEELLVKLNREDLLRKQRTFDNGSIPHQIHLGELHAILRRQEDFYPFLKDNREKIEKILTFRIPYYVGPLARGNSRFAWMTRKSEETITPWNFEEVVDKGASAQSFIERMTNFDKNLPNEKVLPKHSLLYEYFTVYNELTKVKYVTEGMRKPAFLSGEQKKAIVDLLFKTNRKVTVKQLKEDYFKKIECFDSVEISGVEDRFNASLGTYHDLLKIIKDKDFLDNEENEDILEDIVLTLTLFEDREMIEERLKTYAHLFDDKVMKQLKRRRYTGWGRLSRKLINGIRDKQSGKTILDFLKSDGFANRNFMQLIHDDSLTFKEDIQKAQVSGQGDSLHEHIANLAGSPAIKKGILQTVKVVDELVKVMGRHKPENIVIEMARENQTTQKGQKNSRERMKRIEEGIKELGSQILKEHPVENTQLQNEKLYLYYLQNGRDMYVDQELDINRLSDYDVDHIVPQSFLKDDSIDNKVLTRSDKARGKSDNVPSEEVVKKMKNYWRQLLNAKLITQRKFDNLTKAERGGLSELDKAGFIKRQLVETRQITKHVAQILDSRMNTKYDENDKLIREVKVITLKSKLVSDFRKDFQFYKVREINNYHHAHDAYLNAVVGTALIKKYPKLESEFVYGDYKVYDVRKMIAKSEQEIGKATAKYFFYSNIMNFFKTEITLANGEIRKRPLIETNGETGEIVWDKGRDFATVRKVLSMPQVNIVKKTEVQTGGFSKESILPKRNSDKLIARKKDWDPKKYGGFDSPTVAYSVLVVAKVEKGKSKKLKSVKELLGITIMERSSFEKNPIDFLEAKGYKEVKKDLIIKLPKYSLFELENGRKRMLASAGELQKGNELALPSKYVNFLYLASHYEKLKGSPEDNEQKQLFVEQHKHYLDEIIEQISEFSKRVILADANLDKVLSAYNKHRDKPIREQAENIIHLFTLTNLGAPAAFKYFDTTIDRKRYTSTKEVLDATLIHQSITGLYETRIDLSQLGGDGGPAPAPGGTLQLEEEYRLFEPESTQKQEMDIWLKNFPQAWAETGGMGTAHCQAPVLIQLKATATPISIRQYPMPHEAYQGIKPHIRRMLDQGILKPCQSPWNTPLLPVKKPGTEDYRPVQDLREVNKRVEDIHPTVPNPYNLLSTLPPSHPWYTVLDLKDAFFCLRLHSESQLLFAFEWRDPEIGLSGQLTWTRLPQGFKNSPTLFNEALHSDLADFRVRYPALVLLQYVDDLLLAAATRTECLEGTKALLETLGNKGYRASAKKAQICLQEVTYLGYSLKDGQRWLTKARKEAILSIPVPKNSRQVREFLGKAGYCRLFIPGFAELAAPLYPLTRPGTLFQWGTEQQLAFEDIKKALLSSPALGLPDITKPFELFIDENSGFAKGVLVQKLGPWKRPVAYLSKKLDTVASGWPPCLRMVAAIAILVKDAGKLTLGQPLTILTSHPVEALVRQPPNKWLSNARMTHYQAMLLDAERVHFGPTVSLNPATLLPLPSGGNHHDCLQILAETHGTRPDLTDQPLPDADLTWYTDGSSFIRNGEREAGAAVTTESEVIWAAPLPPGTSAQRAELIALTQALKMAEGKKLTVYTDSRYAFATTHVHGEIYRRRGWLTSEGKEIKNKNEILALLEALFLPKRLSIIHCPGHQKGDSPQAKGNRLADDTAKKAATETHSSLTVLPAGKRTADGSEFEKRTADGSEFESPKKKAKVE

SEQ ID NO: 1247 - protein, 2093 aa, synthetic construct
MPAAKRVKLDGGDKKYSIGLDIGTNSVGWAVITDEYKVPSKKFKVLGNTDRHSIKKNLIGALLFDSGETAEATRLKRTARRRYTRRKNRICYLQEIFSNEMAKVDDSFFHRLEESFLVEEDKKHERHPIFGNIVDEVAYHEKYPTIYHLRKKLVDSTDKADLRLIYLALAHMIKFRGHFLIEGDLNPDNSDVDKLFIQLVQTYNQLFEENPINASGVDAKAILSARLSKSRRLENLIAQLPGEKKNGLFGNLIALSLGLTPNFKSNFDLAEDAKLQLSKDTYDDDLDNLLAQIGDQYADLFLAAKNLSDAILLSDILRVNTEITKAPLSASMIKRYDEHHQDLTLLKALVRQQLPEKYKEIFFDQSKNGYAGYIDGGASQEEFYKFIKPILEKMDGTEELLVKLNREDLLRKQRTFDNGSIPHQIHLGELHAILRRQEDFYPFLKDNREKIEKILTFRIPYYVGPLARGNSRFAWMTRKSEETITPWNFEEVVDKGASAQSFIERMTNFDKNLPNEKVLPKHSLLYEYFTVYNELTKVKYVTEGMRKPAFLSGEQKKAIVDLLFKTNRKVTVKQLKEDYFKKIECFDSVEISGVEDRFNASLGTYHDLLKIIKDKDFLDNEENEDILEDIVLTLTLFEDREMIEERLKTYAHLFDDKVMKQLKRRRYTGWGRLSRKLINGIRDKQSGKTILDFLKSDGFANRNFMQLIHDDSLTFKEDIQKAQVSGQGDSLHEHIANLAGSPAIKKGILQTVKVVDELVKVMGRHKPENIVIEMARENQTTQKGQKNSRERMKRIEEGIKELGSQILKEHPVENTQLQNEKLYLYYLQNGRDMYVDQELDINRLSDYDVDHIVPQSFLKDDSIDNKVLTRSDKARGKSDNVPSEEVVKKMKNYWRQLLNAKLITQRKFDNLTKAERGGLSELDKAGFIKRQLVETRQITKHVAQILDSRMNTKYDENDKLIREVKVITLKSKLVSDFRKDFQFYKVREINNYHHAHDAYLNAVVGTALIKKYPKLESEFVYGDYKVYDVRKMIAKSEQEIGKATAKYFFYSNIMNFFKTEITLANGEIRKRPLIETNGETGEIVWDKGRDFATVRKVLSMPQVNIVKKTEVQTGGFSKESILPKRNSDKLIARKKDWDPKKYGGFDSPTVAYSVLVVAKVEKGKSKKLKSVKELLGITIMERSSFEKNPIDFLEAKGYKEVKKDLIIKLPKYSLFELENGRKRMLASAGELQKGNELALPSKYVNFLYLASHYEKLKGSPEDNEQKQLFVEQHKHYLDEIIEQISEFSKRVILADANLDKVLSAYNKHRDKPIREQAENIIHLFTLTNLGAPAAFKYFDTTIDRKRYTSTKEVLDATLIHQSITGLYETRIDLSQLGGDGGGGGGSSGGSGGTLQLEEEYRLFEPESTQKQEMDIWLKNFPQAWAETGGMGTAHCQAPVLIQLKATATPISIRQYPMPHEAYQGIKPHIRRMLDQGILKPCQSPWNTPLLPVKKPGTEDYRPVQDLREVNKRVEDIHPTVPNPYNLLSTLPPSHPWYTVLDLKDAFFCLRLHSESQLLFAFEWRDPEIGLSGQLTWTRLPQGFKNSPTLFNEALHSDLADFRVRYPALVLLQYVDDLLLAAATRTECLEGTKALLETLGNKGYRASAKKAQICLQEVTYLGYSLKDGQRWLTKARKEAILSIPVPKNSRQVREFLGKAGYCRLFIPGFAELAAPLYPLTRPGTLFQWGTEQQLAFEDIKKALLSSPALGLPDITKPFELFIDENSGFAKGVLVQKLGPWKRPVAYLSKKLDTVASGWPPCLRMVAAIAILVKDAGKLTLGQPLTILTSHPVEALVRQPPNKWLSNARMTHYQAMLLDAERVHFGPTVSLNPATLLPLPSGGNHHDCLQILAETHGTRPDLTDQPLPDADLTWYTDGSSFIRNGEREAGAAVTTESEVIWAAPLPPGTSAQRAELIALTQALKMAEGKKLTVYTDSRYAFATTHVHGEIYRRRGWLTSEGKEIKNKNEILALLEALFLPKRLSIIHCPGHQKGDSPQAKGNRLADDTAKKAATETHSSLTVLPAGKRTADGSEFEKRTADGSEFESPKKKAKVE

SEQ ID NO: 1248 - protein, 2090 aa, synthetic construct
MPAAKRVKLDGGDKKYSIGLDIGTNSVGWAVITDEYKVPSKKFKVLGNTDRHSIKKNLIGALLFDSGETAEATRLKRTARRRYTRRKNRICYLQEIFSNEMAKVDDSFFHRLEESFLVEEDKKHERHPIFGNIVDEVAYHEKYPTIYHLRKKLVDSTDKADLRLIYLALAHMIKFRGHFLIEGDLNPDNSDVDKLFIQLVQTYNQLFEENPINASGVDAKAILSARLSKSRRLENLIAQLPGEKKNGLFGNLIALSLGLTPNFKSNFDLAEDAKLQLSKDTYDDDLDNLLAQIGDQYADLFLAAKNLSDAILLSDILRVNTEITKAPLSASMIKRYDEHHQDLTLLKALVRQQLPEKYKEIFFDQSKNGYAGYIDGGASQEEFYKFIKPILEKMDGTEELLVKLNREDLLRKQRTFDNGSIPHQIHLGELHAILRRQEDFYPFLKDNREKIEKILTFRIPYYVGPLARGNSRFAWMTRKSEETITPWNFEEVVDKGASAQSFIERMTNFDKNLPNEKVLPKHSLLYEYFTVYNELTKVKYVTEGMRKPAFLSGEQKKAIVDLLFKTNRKVTVKQLKEDYFKKIECFDSVEISGVEDRFNASLGTYHDLLKIIKDKDFLDNEENEDILEDIVLTLTLFEDREMIEERLKTYAHLFDDKVMKQLKRRRYTGWGRLSRKLINGIRDKQSGKTILDFLKSDGFANRNFMQLIHDDSLTFKEDIQKAQVSGQGDSLHEHIANLAGSPAIKKGILQTVKVVDELVKVMGRHKPENIVIEMARENQTTQKGQKNSRERMKRIEEGIKELGSQILKEHPVENTQLQNEKLYLYYLQNGRDMYVDQELDINRLSDYDVDHIVPQSFLKDDSIDNKVLTRSDKARGKSDNVPSEEVVKKMKNYWRQLLNAKLITQRKFDNLTKAERGGLSELDKAGFIKRQLVETRQITKHVAQILDSRMNTKYDENDKLIREVKVITLKSKLVSDFRKDFQFYKVREINNYHHAHDAYLNAVVGTALIKKYPKLESEFVYGDYKVYDVRKMIAKSEQEIGKATAKYFFYSNIMNFFKTEITLANGEIRKRPLIETNGETGEIVWDKGRDFATVRKVLSMPQVNIVKKTEVQTGGFSKESILPKRNSDKLIARKKDWDPKKYGGFDSPTVAYSVLVVAKVEKGKSKKLKSVKELLGITIMERSSFEKNPIDFLEAKGYKEVKKDLIIKLPKYSLFELENGRKRMLASAGELQKGNELALPSKYVNFLYLASHYEKLKGSPEDNEQKQLFVEQHKHYLDEIIEQISEFSKRVILADANLDKVLSAYNKHRDKPIREQAENIIHLFTLTNLGAPAAFKYFDTTIDRKRYTSTKEVLDATLIHQSITGLYETRIDLSQLGGDGGPAPGGGGGTLQLEEEYRLFEPESTQKQEMDIWLKNFPQAWAETGGMGTAHCQAPVLIQLKATATPISIRQYPMPHEAYQGIKPHIRRMLDQGILKPCQSPWNTPLLPVKKPGTEDYRPVQDLREVNKRVEDIHPTVPNPYNLLSTLPPSHPWYTVLDLKDAFFCLRLHSESQLLFAFEWRDPEIGLSGQLTWTRLPQGFKNSPTLFNEALHSDLADFRVRYPALVLLQYVDDLLLAAATRTECLEGTKALLETLGNKGYRASAKKAQICLQEVTYLGYSLKDGQRWLTKARKEAILSIPVPKNSRQVREFLGKAGYCRLFIPGFAELAAPLYPLTRPGTLFQWGTEQQLAFEDIKKALLSSPALGLPDITKPFELFIDENSGFAKGVLVQKLGPWKRPVAYLSKKLDTVASGWPPCLRMVAAIAILVKDAGKLTLGQPLTILTSHPVEALVRQPPNKWLSNARMTHYQAMLLDAERVHFGPTVSLNPATLLPLPSGGNHHDCLQILAETHGTRPDLTDQPLPDADLTWYTDGSSFIRNGEREAGAAVTTESEVIWAAPLPPGTSAQRAELIALTQALKMAEGKKLTVYTDSRYAFATTHVHGEIYRRRGWLTSEGKEIKNKNEILALLEALFLPKRLSIIHCPGHQKGDSPQAKGNRLADDTAKKAATETHSSLTVLPAGKRTADGSEFEKRTADGSEFESPKKKAKVE

SEQ ID NO: 1249 - protein, 2090 aa, synthetic construct
MPAAKRVKLDGGDKKYSIGLDIGTNSVGWAVITDEYKVPSKKFKVLGNTDRHSIKKNLIGALLFDSGETAEATRLKRTARRRYTRRKNRICYLQEIFSNEMAKVDDSFFHRLEESFLVEEDKKHERHPIFGNIVDEVAYHEKYPTIYHLRKKLVDSTDKADLRLIYLALAHMIKFRGHFLIEGDLNPDNSDVDKLFIQLVQTYNQLFEENPINASGVDAKAILSARLSKSRRLENLIAQLPGEKKNGLFGNLIALSLGLTPNFKSNFDLAEDAKLQLSKDTYDDDLDNLLAQIGDQYADLFLAAKNLSDAILLSDILRVNTEITKAPLSASMIKRYDEHHQDLTLLKALVRQQLPEKYKEIFFDQSKNGYAGYIDGGASQEEFYKFIKPILEKMDGTEELLVKLNREDLLRKQRTFDNGSIPHQIHLGELHAILRRQEDFYPFLKDNREKIEKILTFRIPYYVGPLARGNSRFAWMTRKSEETITPWNFEEVVDKGASAQSFIERMTNFDKNLPNEKVLPKHSLLYEYFTVYNELTKVKYVTEGMRKPAFLSGEQKKAIVDLLFKTNRKVTVKQLKEDYFKKIECFDSVEISGVEDRFNASLGTYHDLLKIIKDKDFLDNEENEDILEDIVLTLTLFEDREMIEERLKTYAHLFDDKVMKQLKRRRYTGWGRLSRKLINGIRDKQSGKTILDFLKSDGFANRNFMQLIHDDSLTFKEDIQKAQVSGQGDSLHEHIANLAGSPAIKKGILQTVKVVDELVKVMGRHKPENIVIEMARENQTTQKGQKNSRERMKRIEEGIKELGSQILKEHPVENTQLQNEKLYLYYLQNGRDMYVDQELDINRLSDYDVDHIVPQSFLKDDSIDNKVLTRSDKARGKSDNVPSEEVVKKMKNYWRQLLNAKLITQRKFDNLTKAERGGLSELDKAGFIKRQLVETRQITKHVAQILDSRMNTKYDENDKLIREVKVITLKSKLVSDFRKDFQFYKVREINNYHHAHDAYLNAVVGTALIKKYPKLESEFVYGDYKVYDVRKMIAKSEQEIGKATAKYFFYSNIMNFFKTEITLANGEIRKRPLIETNGETGEIVWDKGRDFATVRKVLSMPQVNIVKKTEVQTGGFSKESILPKRNSDKLIARKKDWDPKKYGGFDSPTVAYSVLVVAKVEKGKSKKLKSVKELLGITIMERSSFEKNPIDFLEAKGYKEVKKDLIIKLPKYSLFELENGRKRMLASAGELQKGNELALPSKYVNFLYLASHYEKLKGSPEDNEQKQLFVEQHKHYLDEIIEQISEFSKRVILADANLDKVLSAYNKHRDKPIREQAENIIHLFTLTNLGAPAAFKYFDTTIDRKRYTSTKEVLDATLIHQSITGLYETRIDLSQLGGDGGGSSGGGGGTLQLEEEYRLFEPESTQKQEMDIWLKNFPQAWAETGGMGTAHCQAPVLIQLKATATPISIRQYPMPHEAYQGIKPHIRRMLDQGILKPCQSPWNTPLLPVKKPGTEDYRPVQDLREVNKRVEDIHPTVPNPYNLLSTLPPSHPWYTVLDLKDAFFCLRLHSESQLLFAFEWRDPEIGLSGQLTWTRLPQGFKNSPTLFNEALHSDLADFRVRYPALVLLQYVDDLLLAAATRTECLEGTKALLETLGNKGYRASAKKAQICLQEVTYLGYSLKDGQRWLTKARKEAILSIPVPKNSRQVREFLGKAGYCRLFIPGFAELAAPLYPLTRPGTLFQWGTEQQLAFEDIKKALLSSPALGLPDITKPFELFIDENSGFAKGVLVQKLGPWKRPVAYLSKKLDTVASGWPPCLRMVAAIAILVKDAGKLTLGQPLTILTSHPVEALVRQPPNKWLSNARMTHYQAMLLDAERVHFGPTVSLNPATLLPLPSGGNHHDCLQILAETHGTRPDLTDQPLPDADLTWYTDGSSFIRNGEREAGAAVTTESEVIWAAPLPPGTSAQRAELIALTQALKMAEGKKLTVYTDSRYAFATTHVHGEIYRRRGWLTSEGKEIKNKNEILALLEALFLPKRLSIIHCPGHQKGDSPQAKGNRLADDTAKKAATETHSSLTVLPAGKRTADGSEFEKRTADGSEFESPKKKAKVE

SEQ ID NO: 1250 - protein, 2090 aa, synthetic construct
MPAAKRVKLDGGDKKYSIGLDIGTNSVGWAVITDEYKVPSKKFKVLGNTDRHSIKKNLIGALLFDSGETAEATRLKRTARRRYTRRKNRICYLQEIFSNEMAKVDDSFFHRLEESFLVEEDKKHERHPIFGNIVDEVAYHEKYPTIYHLRKKLVDSTDKADLRLIYLALAHMIKFRGHFLIEGDLNPDNSDVDKLFIQLVQTYNQLFEENPINASGVDAKAILSARLSKSRRLENLIAQLPGEKKNGLFGNLIALSLGLTPNFKSNFDLAEDAKLQLSKDTYDDDLDNLLAQIGDQYADLFLAAKNLSDAILLSDILRVNTEITKAPLSASMIKRYDEHHQDLTLLKALVRQQLPEKYKEIFFDQSKNGYAGYIDGGASQEEFYKFIKPILEKMDGTEELLVKLNREDLLRKQRTFDNGSIPHQIHLGELHAILRRQEDFYPFLKDNREKIEKILTFRIPYYVGPLARGNSRFAWMTRKSEETITPWNFEEVVDKGASAQSFIERMTNFDKNLPNEKVLPKHSLLYEYFTVYNELTKVKYVTEGMRKPAFLSGEQKKAIVDLLFKTNRKVTVKQLKEDYFKKIECFDSVEISGVEDRFNASLGTYHDLLKIIKDKDFLDNEENEDILEDIVLTLTLFEDREMIEERLKTYAHLFDDKVMKQLKRRRYTGWGRLSRKLINGIRDKQSGKTILDFLKSDGFANRNFMQLIHDDSLTFKEDIQKAQVSGQGDSLHEHIANLAGSPAIKKGILQTVKVVDELVKVMGRHKPENIVIEMARENQTTQKGQKNSRERMKRIEEGIKELGSQILKEHPVENTQLQNEKLYLYYLQNGRDMYVDQELDINRLSDYDVDHIVPQSFLKDDSIDNKVLTRSDKARGKSDNVPSEEVVKKMKNYWRQLLNAKLITQRKFDNLTKAERGGLSELDKAGFIKRQLVETRQITKHVAQILDSRMNTKYDENDKLIREVKVITLKSKLVSDFRKDFQFYKVREINNYHHAHDAYLNAVVGTALIKKYPKLESEFVYGDYKVYDVRKMIAKSEQEIGKATAKYFFYSNIMNFFKTEITLANGEIRKRPLIETNGETGEIVWDKGRDFATVRKVLSMPQVNIVKKTEVQTGGFSKESILPKRNSDKLIARKKDWDPKKYGGFDSPTVAYSVLVVAKVEKGKSKKLKSVKELLGITIMERSSFEKNPIDFLEAKGYKEVKKDLIIKLPKYSLFELENGRKRMLASAGELQKGNELALPSKYVNFLYLASHYEKLKGSPEDNEQKQLFVEQHKHYLDEIIEQISEFSKRVILADANLDKVLSAYNKHRDKPIREQAENIIHLFTLTNLGAPAAFKYFDTTIDRKRYTSTKEVLDATLIHQSITGLYETRIDLSQLGGDGGGSSGSSGGTLQLEEEYRLFEPESTQKQEMDIWLKNFPQAWAETGGMGTAHCQAPVLIQLKATATPISIRQYPMPHEAYQGIKPHIRRMLDQGILKPCQSPWNTPLLPVKKPGTEDYRPVQDLREVNKRVEDIHPTVPNPYNLLSTLPPSHPWYTVLDLKDAFFCLRLHSESQLLFAFEWRDPEIGLSGQLTWTRLPQGFKNSPTLFNEALHSDLADFRVRYPALVLLQYVDDLLLAAATRTECLEGTKALLETLGNKGYRASAKKAQICLQEVTYLGYSLKDGQRWLTKARKEAILSIPVPKNSRQVREFLGKAGYCRLFIPGFAELAAPLYPLTRPGTLFQWGTEQQLAFEDIKKALLSSPALGLPDITKPFELFIDENSGFAKGVLVQKLGPWKRPVAYLSKKLDTVASGWPPCLRMVAAIAILVKDAGKLTLGQPLTILTSHPVEALVRQPPNKWLSNARMTHYQAMLLDAERVHFGPTVSLNPATLLPLPSGGNHHDCLQILAETHGTRPDLTDQPLPDADLTWYTDGSSFIRNGEREAGAAVTTESEVIWAAPLPPGTSAQRAELIALTQALKMAEGKKLTVYTDSRYAFATTHVHGEIYRRRGWLTSEGKEIKNKNEILALLEALFLPKRLSIIHCPGHQKGDSPQAKGNRLADDTAKKAATETHSSLTVLPAGKRTADGSEFEKRTADGSEFESPKKKAKVE

SEQ ID NO: 1251 - protein, 2088 aa, synthetic construct
MPAAKRVKLDGGDKKYSIGLDIGTNSVGWAVITDEYKVPSKKFKVLGNTDRHSIKKNLIGALLFDSGETAEATRLKRTARRRYTRRKNRICYLQEIFSNEMAKVDDSFFHRLEESFLVEEDKKHERHPIFGNIVDEVAYHEKYPTIYHLRKKLVDSTDKADLRLIYLALAHMIKFRGHFLIEGDLNPDNSDVDKLFIQLVQTYNQLFEENPINASGVDAKAILSARLSKSRRLENLIAQLPGEKKNGLFGNLIALSLGLTPNFKSNFDLAEDAKLQLSKDTYDDDLDNLLAQIGDQYADLFLAAKNLSDAILLSDILRVNTEITKAPLSASMIKRYDEHHQDLTLLKALVRQQLPEKYKEIFFDQSKNGYAGYIDGGASQEEFYKFIKPILEKMDGTEELLVKLNREDLLRKQRTFDNGSIPHQIHLGELHAILRRQEDFYPFLKDNREKIEKILTFRIPYYVGPLARGNSRFAWMTRKSEETITPWNFEEVVDKGASAQSFIERMTNFDKNLPNEKVLPKHSLLYEYFTVYNELTKVKYVTEGMRKPAFLSGEQKKAIVDLLFKTNRKVTVKQLKEDYFKKIECFDSVEISGVEDRFNASLGTYHDLLKIIKDKDFLDNEENEDILEDIVLTLTLFEDREMIEERLKTYAHLFDDKVMKQLKRRRYTGWGRLSRKLINGIRDKQSGKTILDFLKSDGFANRNFMQLIHDDSLTFKEDIQKAQVSGQGDSLHEHIANLAGSPAIKKGILQTVKVVDELVKVMGRHKPENIVIEMARENQTTQKGQKNSRERMKRIEEGIKELGSQILKEHPVENTQLQNEKLYLYYLQNGRDMYVDQELDINRLSDYDVDHIVPQSFLKDDSIDNKVLTRSDKARGKSDNVPSEEVVKKMKNYWRQLLNAKLITQRKFDNLTKAERGGLSELDKAGFIKRQLVETRQITKHVAQILDSRMNTKYDENDKLIREVKVITLKSKLVSDFRKDFQFYKVREINNYHHAHDAYLNAVVGTALIKKYPKLESEFVYGDYKVYDVRKMIAKSEQEIGKATAKYFFYSNIMNFFKTEITLANGEIRKRPLIETNGETGEIVWDKGRDFATVRKVLSMPQVNIVKKTEVQTGGFSKESILPKRNSDKLIARKKDWDPKKYGGFDSPTVAYSVLVVAKVEKGKSKKLKSVKELLGITIMERSSFEKNPIDFLEAKGYKEVKKDLIIKLPKYSLFELENGRKRMLASAGELQKGNELALPSKYVNFLYLASHYEKLKGSPEDNEQKQLFVEQHKHYLDEIIEQISEFSKRVILADANLDKVLSAYNKHRDKPIREQAENIIHLFTLTNLGAPAAFKYFDTTIDRKRYTSTKEVLDATLIHQSITGLYETRIDLSQLGGDGGGGGGGGTLQLEEEYRLFEPESTQKQEMDIWLKNFPQAWAETGGMGTAHCQAPVLIQLKATATPISIRQYPMPHEAYQGIKPHIRRMLDQGILKPCQSPWNTPLLPVKKPGTEDYRPVQDLREVNKRVEDIHPTVPNPYNLLSTLPPSHPWYTVLDLKDAFFCLRLHSESQLLFAFEWRDPEIGLSGQLTWTRLPQGFKNSPTLFNEALHSDLADFRVRYPALVLLQYVDDLLLAAATRTECLEGTKALLETLGNKGYRASAKKAQICLQEVTYLGYSLKDGQRWLTKARKEAILSIPVPKNSRQVREFLGKAGYCRLFIPGFAELAAPLYPLTRPGTLFQWGTEQQLAFEDIKKALLSSPALGLPDITKPFELFIDENSGFAKGVLVQKLGPWKRPVAYLSKKLDTVASGWPPCLRMVAAIAILVKDAGKLTLGQPLTILTSHPVEALVRQPPNKWLSNARMTHYQAMLLDAERVHFGPTVSLNPATLLPLPSGGNHHDCLQILAETHGTRPDLTDQPLPDADLTWYTDGSSFIRNGEREAGAAVTTESEVIWAAPLPPGTSAQRAELIALTQALKMAEGKKLTVYTDSRYAFATTHVHGEIYRRRGWLTSEGKEIKNKNEILALLEALFLPKRLSIIHCPGHQKGDSPQAKGNRLADDTAKKAATETHSSLTVLPAGKRTADGSEFEKRTADGSEFESPKKKAKVE

SEQ ID NO: 1252 - protein, 2090 aa, synthetic construct
MPAAKRVKLDGGDKKYSIGLDIGTNSVGWAVITDEYKVPSKKFKVLGNTDRHSIKKNLIGALLFDSGETAEATRLKRTARRRYTRRKNRICYLQEIFSNEMAKVDDSFFHRLEESFLVEEDKKHERHPIFGNIVDEVAYHEKYPTIYHLRKKLVDSTDKADLRLIYLALAHMIKFRGHFLIEGDLNPDNSDVDKLFIQLVQTYNQLFEENPINASGVDAKAILSARLSKSRRLENLIAQLPGEKKNGLFGNLIALSLGLTPNFKSNFDLAEDAKLQLSKDTYDDDLDNLLAQIGDQYADLFLAAKNLSDAILLSDILRVNTEITKAPLSASMIKRYDEHHQDLTLLKALVRQQLPEKYKEIFFDQSKNGYAGYIDGGASQEEFYKFIKPILEKMDGTEELLVKLNREDLLRKQRTFDNGSIPHQIHLGELHAILRRQEDFYPFLKDNREKIEKILTFRIPYYVGPLARGNSRFAWMTRKSEETITPWNFEEVVDKGASAQSFIERMTNFDKNLPNEKVLPKHSLLYEYFTVYNELTKVKYVTEGMRKPAFLSGEQKKAIVDLLFKTNRKVTVKQLKEDYFKKIECFDSVEISGVEDRFNASLGTYHDLLKIIKDKDFLDNEENEDILEDIVLTLTLFEDREMIEERLKTYAHLFDDKVMKQLKRRRYTGWGRLSRKLINGIRDKQSGKTILDFLKSDGFANRNFMQLIHDDSLTFKEDIQKAQVSGQGDSLHEHIANLAGSPAIKKGILQTVKVVDELVKVMGRHKPENIVIEMARENQTTQKGQKNSRERMKRIEEGIKELGSQILKEHPVENTQLQNEKLYLYYLQNGRDMYVDQELDINRLSDYDVDHIVPQSFLKDDSIDNKVLTRSDKARGKSDNVPSEEVVKKMKNYWRQLLNAKLITQRKFDNLTKAERGGLSELDKAGFIKRQLVETRQITKHVAQILDSRMNTKYDENDKLIREVKVITLKSKLVSDFRKDFQFYKVREINNYHHAHDAYLNAVVGTALIKKYPKLESEFVYGDYKVYDVRKMIAKSEQEIGKATAKYFFYSNIMNFFKTEITLANGEIRKRPLIETNGETGEIVWDKGRDFATVRKVLSMPQVNIVKKTEVQTGGFSKESILPKRNSDKLIARKKDWDPKKYGGFDSPTVAYSVLVVAKVEKGKSKKLKSVKELLGITIMERSSFEKNPIDFLEAKGYKEVKKDLIIKLPKYSLFELENGRKRMLASAGELQKGNELALPSKYVNFLYLASHYEKLKGSPEDNEQKQLFVEQHKHYLDEIIEQISEFSKRVILADANLDKVLSAYNKHRDKPIREQAENIIHLFTLTNLGAPAAFKYFDTTIDRKRYTSTKEVLDATLIHQSITGLYETRIDLSQLGGDGGPAPGSSGGTLQLEEEYRLFEPESTQKQEMDIWLKNFPQAWAETGGMGTAHCQAPVLIQLKATATPISIRQYPMPHEAYQGIKPHIRRMLDQGILKPCQSPWNTPLLPVKKPGTEDYRPVQDLREVNKRVEDIHPTVPNPYNLLSTLPPSHPWYTVLDLKDAFFCLRLHSESQLLFAFEWRDPEIGLSGQLTWTRLPQGFKNSPTLFNEALHSDLADFRVRYPALVLLQYVDDLLLAAATRTECLEGTKALLETLGNKGYRASAKKAQICLQEVTYLGYSLKDGQRWLTKARKEAILSIPVPKNSRQVREFLGKAGYCRLFIPGFAELAAPLYPLTRPGTLFQWGTEQQLAFEDIKKALLSSPALGLPDITKPFELFIDENSGFAKGVLVQKLGPWKRPVAYLSKKLDTVASGWPPCLRMVAAIAILVKDAGKLTLGQPLTILTSHPVEALVRQPPNKWLSNARMTHYQAMLLDAERVHFGPTVSLNPATLLPLPSGGNHHDCLQILAETHGTRPDLTDQPLPDADLTWYTDGSSFIRNGEREAGAAVTTESEVIWAAPLPPGTSAQRAELIALTQALKMAEGKKLTVYTDSRYAFATTHVHGEIYRRRGWLTSEGKEIKNKNEILALLEALFLPKRLSIIHCPGHQKGDSPQAKGNRLADDTAKKAATETHSSLTVLPAGKRTADGSEFEKRTADGSEFESPKKKAKVE

SEQ ID NO: 1253 - protein, 2095 aa, synthetic construct
MPAAKRVKLDGGDKKYSIGLDIGTNSVGWAVITDEYKVPSKKFKVLGNTDRHSIKKNLIGALLFDSGETAEATRLKRTARRRYTRRKNRICYLQEIFSNEMAKVDDSFFHRLEESFLVEEDKKHERHPIFGNIVDEVAYHEKYPTIYHLRKKLVDSTDKADLRLIYLALAHMIKFRGHFLIEGDLNPDNSDVDKLFIQLVQTYNQLFEENPINASGVDAKAILSARLSKSRRLENLIAQLPGEKKNGLFGNLIALSLGLTPNFKSNFDLAEDAKLQLSKDTYDDDLDNLLAQIGDQYADLFLAAKNLSDAILLSDILRVNTEITKAPLSASMIKRYDEHHQDLTLLKALVRQQLPEKYKEIFFDQSKNGYAGYIDGGASQEEFYKFIKPILEKMDGTEELLVKLNREDLLRKQRTFDNGSIPHQIHLGELHAILRRQEDFYPFLKDNREKIEKILTFRIPYYVGPLARGNSRFAWMTRKSEETITPWNFEEVVDKGASAQSFIERMTNFDKNLPNEKVLPKHSLLYEYFTVYNELTKVKYVTEGMRKPAFLSGEQKKAIVDLLFKTNRKVTVKQLKEDYFKKIECFDSVEISGVEDRFNASLGTYHDLLKIIKDKDFLDNEENEDILEDIVLTLTLFEDREMIEERLKTYAHLFDDKVMKQLKRRRYTGWGRLSRKLINGIRDKQSGKTILDFLKSDGFANRNFMQLIHDDSLTFKEDIQKAQVSGQGDSLHEHIANLAGSPAIKKGILQTVKVVDELVKVMGRHKPENIVIEMARENQTTQKGQKNSRERMKRIEEGIKELGSQILKEHPVENTQLQNEKLYLYYLQNGRDMYVDQELDINRLSDYDVDHIVPQSFLKDDSIDNKVLTRSDKARGKSDNVPSEEVVKKMKNYWRQLLNAKLITQRKFDNLTKAERGGLSELDKAGFIKRQLVETRQITKHVAQILDSRMNTKYDENDKLIREVKVITLKSKLVSDFRKDFQFYKVREINNYHHAHDAYLNAVVGTALIKKYPKLESEFVYGDYKVYDVRKMIAKSEQEIGKATAKYFFYSNIMNFFKTEITLANGEIRKRPLIETNGETGEIVWDKGRDFATVRKVLSMPQVNIVKKTEVQTGGFSKESILPKRNSDKLIARKKDWDPKKYGGFDSPTVAYSVLVVAKVEKGKSKKLKSVKELLGITIMERSSFEKNPIDFLEAKGYKEVKKDLIIKLPKYSLFELENGRKRMLASAGELQKGNELALPSKYVNFLYLASHYEKLKGSPEDNEQKQLFVEQHKHYLDEIIEQISEFSKRVILADANLDKVLSAYNKHRDKPIREQAENIIHLFTLTNLGAPAAFKYFDTTIDRKRYTSTKEVLDATLIHQSITGLYETRIDLSQLGGDGGEAAAKGGGPAPGGTLQLEEEYRLFEPESTQKQEMDIWLKNFPQAWAETGGMGTAHCQAPVLIQLKATATPISIRQYPMPHEAYQGIKPHIRRMLDQGILKPCQSPWNTPLLPVKKPGTEDYRPVQDLREVNKRVEDIHPTVPNPYNLLSTLPPSHPWYTVLDLKDAFFCLRLHSESQLLFAFEWRDPEIGLSGQLTWTRLPQGFKNSPTLFNEALHSDLADFRVRYPALVLLQYVDDLLLAAATRTECLEGTKALLETLGNKGYRASAKKAQICLQEVTYLGYSLKDGQRWLTKARKEAILSIPVPKNSRQVREFLGKAGYCRLFIPGFAELAAPLYPLTRPGTLFQWGTEQQLAFEDIKKALLSSPALGLPDITKPFELFIDENSGFAKGVLVQKLGPWKRPVAYLSKKLDTVASGWPPCLRMVAAIAILVKDAGKLTLGQPLTILTSHPVEALVRQPPNKWLSNARMTHYQAMLLDAERVHFGPTVSLNPATLLPLPSGGNHHDCLQILAETHGTRPDLTDQPLPDADLTWYTDGSSFIRNGEREAGAAVTTESEVIWAAPLPPGTSAQRAELIALTQALKMAEGKKLTVYTDSRYAFATTHVHGEIYRRRGWLTSEGKEIKNKNEILALLEALFLPKRLSIIHCPGHQKGDSPQAKGNRLADDTAKKAATETHSSLTVLPAGKRTADGSEFEKRTADGSEFESPKKKAKVE

SEQ ID NO: 1254 - protein, 2095 aa, synthetic construct
MPAAKRVKLDGGDKKYSIGLDIGTNSVGWAVITDEYKVPSKKFKVLGNTDRHSIKKNLIGALLFDSGETAEATRLKRTARRRYTRRKNRICYLQEIFSNEMAKVDDSFFHRLEESFLVEEDKKHERHPIFGNIVDEVAYHEKYPTIYHLRKKLVDSTDKADLRLIYLALAHMIKFRGHFLIEGDLNPDNSDVDKLFIQLVQTYNQLFEENPINASGVDAKAILSARLSKSRRLENLIAQLPGEKKNGLFGNLIALSLGLTPNFKSNFDLAEDAKLQLSKDTYDDDLDNLLAQIGDQYADLFLAAKNLSDAILLSDILRVNTEITKAPLSASMIKRYDEHHQDLTLLKALVRQQLPEKYKEIFFDQSKNGYAGYIDGGASQEEFYKFIKPILEKMDGTEELLVKLNREDLLRKQRTFDNGSIPHQIHLGELHAILRRQEDFYPFLKDNREKIEKILTFRIPYYVGPLARGNSRFAWMTRKSEETITPWNFEEVVDKGASAQSFIERMTNFDKNLPNEKVLPKHSLLYEYFTVYNELTKVKYVTEGMRKPAFLSGEQKKAIVDLLFKTNRKVTVKQLKEDYFKKIECFDSVEISGVEDRFNASLGTYHDLLKIIKDKDFLDNEENEDILEDIVLTLTLFEDREMIEERLKTYAHLFDDKVMKQLKRRRYTGWGRLSRKLINGIRDKQSGKTILDFLKSDGFANRNFMQLIHDDSLTFKEDIQKAQVSGQGDSLHEHIANLAGSPAIKKGILQTVKVVDELVKVMGRHKPENIVIEMARENQTTQKGQKNSRERMKRIEEGIKELGSQILKEHPVENTQLQNEKLYLYYLQNGRDMYVDQELDINRLSDYDVDHIVPQSFLKDDSIDNKVLTRSDKARGKSDNVPSEEVVKKMKNYWRQLLNAKLITQRKFDNLTKAERGGLSELDKAGFIKRQLVETRQITKHVAQILDSRMNTKYDENDKLIREVKVITLKSKLVSDFRKDFQFYKVREINNYHHAHDAYLNAVVGTALIKKYPKLESEFVYGDYKVYDVRKMIAKSEQEIGKATAKYFFYSNIMNFFKTEITLANGEIRKRPLIETNGETGEIVWDKGRDFATVRKVLSMPQVNIVKKTEVQTGGFSKESILPKRNSDKLIARKKDWDPKKYGGFDSPTVAYSVLVVAKVEKGKSKKLKSVKELLGITIMERSSFEKNPIDFLEAKGYKEVKKDLIIKLPKYSLFELENGRKRMLASAGELQKGNELALPSKYVNFLYLASHYEKLKGSPEDNEQKQLFVEQHKHYLDEIIEQISEFSKRVILADANLDKVLSAYNKHRDKPIREQAENIIHLFTLTNLGAPAAFKYFDTTIDRKRYTSTKEVLDATLIHQSITGLYETRIDLSQLGGDGGEAAAKPAPGGSGGTLQLEEEYRLFEPESTQKQEMDIWLKNFPQAWAETGGMGTAHCQAPVLIQLKATATPISIRQYPMPHEAYQGIKPHIRRMLDQGILKPCQSPWNTPLLPVKKPGTEDYRPVQDLREVNKRVEDIHPTVPNPYNLLSTLPPSHPWYTVLDLKDAFFCLRLHSESQLLFAFEWRDPEIGLSGQLTWTRLPQGFKNSPTLFNEALHSDLADFRVRYPALVLLQYVDDLLLAAATRTECLEGTKALLETLGNKGYRASAKKAQICLQEVTYLGYSLKDGQRWLTKARKEAILSIPVPKNSRQVREFLGKAGYCRLFIPGFAELAAPLYPLTRPGTLFQWGTEQQLAFEDIKKALLSSPALGLPDITKPFELFIDENSGFAKGVLVQKLGPWKRPVAYLSKKLDTVASGWPPCLRMVAAIAILVKDAGKLTLGQPLTILTSHPVEALVRQPPNKWLSNARMTHYQAMLLDAERVHFGPTVSLNPATLLPLPSGGNHHDCLQILAETHGTRPDLTDQPLPDADLTWYTDGSSFIRNGEREAGAAVTTESEVIWAAPLPPGTSAQRAELIALTQALKMAEGKKLTVYTDSRYAFATTHVHGEIYRRRGWLTSEGKEIKNKNEILALLEALFLPKRLSIIHCPGHQKGDSPQAKGNRLADDTAKKAATETHSSLTVLPAGKRTADGSEFEKRTADGSEFESPKKKAKVE

SEQ ID NO: 1255 - protein, 2093 aa, synthetic construct
MPAAKRVKLDGGDKKYSIGLDIGTNSVGWAVITDEYKVPSKKFKVLGNTDRHSIKKNLIGALLFDSGETAEATRLKRTARRRYTRRKNRICYLQEIFSNEMAKVDDSFFHRLEESFLVEEDKKHERHPIFGNIVDEVAYHEKYPTIYHLRKKLVDSTDKADLRLIYLALAHMIKFRGHFLIEGDLNPDNSDVDKLFIQLVQTYNQLFEENPINASGVDAKAILSARLSKSRRLENLIAQLPGEKKNGLFGNLIALSLGLTPNFKSNFDLAEDAKLQLSKDTYDDDLDNLLAQIGDQYADLFLAAKNLSDAILLSDILRVNTEITKAPLSASMIKRYDEHHQDLTLLKALVRQQLPEKYKEIFFDQSKNGYAGYIDGGASQEEFYKFIKPILEKMDGTEELLVKLNREDLLRKQRTFDNGSIPHQIHLGELHAILRRQEDFYPFLKDNREKIEKILTFRIPYYVGPLARGNSRFAWMTRKSEETITPWNFEEVVDKGASAQSFIERMTNFDKNLPNEKVLPKHSLLYEYFTVYNELTKVKYVTEGMRKPAFLSGEQKKAIVDLLFKTNRKVTVKQLKEDYFKKIECFDSVEISGVEDRFNASLGTYHDLLKIIKDKDFLDNEENEDILEDIVLTLTLFEDREMIEERLKTYAHLFDDKVMKQLKRRRYTGWGRLSRKLINGIRDKQSGKTILDFLKSDGFANRNFMQLIHDDSLTFKEDIQKAQVSGQGDSLHEHIANLAGSPAIKKGILQTVKVVDELVKVMGRHKPENIVIEMARENQTTQKGQKNSRERMKRIEEGIKELGSQILKEHPVENTQLQNEKLYLYYLQNGRDMYVDQELDINRLSDYDVDHIVPQSFLKDDSIDNKVLTRSDKARGKSDNVPSEEVVKKMKNYWRQLLNAKLITQRKFDNLTKAERGGLSELDKAGFIKRQLVETRQITKHVAQILDSRMNTKYDENDKLIREVKVITLKSKLVSDFRKDFQFYKVREINNYHHAHDAYLNAVVGTALIKKYPKLESEFVYGDYKVYDVRKMIAKSEQEIGKATAKYFFYSNIMNFFKTEITLANGEIRKRPLIETNGETGEIVWDKGRDFATVRKVLSMPQVNIVKKTEVQTGGFSKESILPKRNSDKLIARKKDWDPKKYGGFDSPTVAYSVLVVAKVEKGKSKKLKSVKELLGITIMERSSFEKNPIDFLEAKGYKEVKKDLIIKLPKYSLFELENGRKRMLASAGELQKGNELALPSKYVNFLYLASHYEKLKGSPEDNEQKQLFVEQHKHYLDEIIEQISEFSKRVILADANLDKVLSAYNKHRDKPIREQAENIIHLFTLTNLGAPAAFKYFDTTIDRKRYTSTKEVLDATLIHQSITGLYETRIDLSQLGGDGGGSSGSSGSSGGTLQLEEEYRLFEPESTQKQEMDIWLKNFPQAWAETGGMGTAHCQAPVLIQLKATATPISIRQYPMPHEAYQGIKPHIRRMLDQGILKPCQSPWNTPLLPVKKPGTEDYRPVQDLREVNKRVEDIHPTVPNPYNLLSTLPPSHPWYTVLDLKDAFFCLRLHSESQLLFAFEWRDPEIGLSGQLTWTRLPQGFKNSPTLFNEALHSDLADFRVRYPALVLLQYVDDLLLAAATRTECLEGTKALLETLGNKGYRASAKKAQICLQEVTYLGYSLKDGQRWLTKARKEAILSIPVPKNSRQVREFLGKAGYCRLFIPGFAELAAPLYPLTRPGTLFQWGTEQQLAFEDIKKALLSSPALGLPDITKPFELFIDENSGFAKGVLVQKLGPWKRPVAYLSKKLDTVASGWPPCLRMVAAIAILVKDAGKLTLGQPLTILTSHPVEALVRQPPNKWLSNARMTHYQAMLLDAERVHFGPTVSLNPATLLPLPSGGNHHDCLQILAETHGTRPDLTDQPLPDADLTWYTDGSSFIRNGEREAGAAVTTESEVIWAAPLPPGTSAQRAELIALTQALKMAEGKKLTVYTDSRYAFATTHVHGEIYRRRGWLTSEGKEIKNKNEILALLEALFLPKRLSIIHCPGHQKGDSPQAKGNRLADDTAKKAATETHSSLTVLPAGKRTADGSEFEKRTADGSEFESPKKKAKVE

SEQ ID NO: 1256 - protein, 2093 aa, synthetic construct
MPAAKRVKLDGGDKKYSIGLDIGTNSVGWAVITDEYKVPSKKFKVLGNTDRHSIKKNLIGALLFDSGETAEATRLKRTARRRYTRRKNRICYLQEIFSNEMAKVDDSFFHRLEESFLVEEDKKHERHPIFGNIVDEVAYHEKYPTIYHLRKKLVDSTDKADLRLIYLALAHMIKFRGHFLIEGDLNPDNSDVDKLFIQLVQTYNQLFEENPINASGVDAKAILSARLSKSRRLENLIAQLPGEKKNGLFGNLIALSLGLTPNFKSNFDLAEDAKLQLSKDTYDDDLDNLLAQIGDQYADLFLAAKNLSDAILLSDILRVNTEITKAPLSASMIKRYDEHHQDLTLLKALVRQQLPEKYKEIFFDQSKNGYAGYIDGGASQEEFYKFIKPILEKMDGTEELLVKLNREDLLRKQRTFDNGSIPHQIHLGELHAILRRQEDFYPFLKDNREKIEKILTFRIPYYVGPLARGNSRFAWMTRKSEETITPWNFEEVVDKGASAQSFIERMTNFDKNLPNEKVLPKHSLLYEYFTVYNELTKVKYVTEGMRKPAFLSGEQKKAIVDLLFKTNRKVTVKQLKEDYFKKIECFDSVEISGVEDRFNASLGTYHDLLKIIKDKDFLDNEENEDILEDIVLTLTLFEDREMIEERLKTYAHLFDDKVMKQLKRRRYTGWGRLSRKLINGIRDKQSGKTILDFLKSDGFANRNFMQLIHDDSLTFKEDIQKAQVSGQGDSLHEHIANLAGSPAIKKGILQTVKVVDELVKVMGRHKPENIVIEMARENQTTQKGQKNSRERMKRIEEGIKELGSQILKEHPVENTQLQNEKLYLYYLQNGRDMYVDQELDINRLSDYDVDHIVPQSFLKDDSIDNKVLTRSDKARGKSDNVPSEEVVKKMKNYWRQLLNAKLITQRKFDNLTKAERGGLSELDKAGFIKRQLVETRQITKHVAQILDSRMNTKYDENDKLIREVKVITLKSKLVSDFRKDFQFYKVREINNYHHAHDAYLNAVVGTALIKKYPKLESEFVYGDYKVYDVRKMIAKSEQEIGKATAKYFFYSNIMNFFKTEITLANGEIRKRPLIETNGETGEIVWDKGRDFATVRKVLSMPQVNIVKKTEVQTGGFSKESILPKRNSDKLIARKKDWDPKKYGGFDSPTVAYSVLVVAKVEKGKSKKLKSVKELLGITIMERSSFEKNPIDFLEAKGYKEVKKDLIIKLPKYSLFELENGRKRMLASAGELQKGNELALPSKYVNFLYLASHYEKLKGSPEDNEQKQLFVEQHKHYLDEIIEQISEFSKRVILADANLDKVLSAYNKHRDKPIREQAENIIHLFTLTNLGAPAAFKYFDTTIDRKRYTSTKEVLDATLIHQSITGLYETRIDLSQLGGDGGPAPGGSGGGGGTLQLEEEYRLFEPESTQKQEMDIWLKNFPQAWAETGGMGTAHCQAPVLIQLKATATPISIRQYPMPHEAYQGIKPHIRRMLDQGILKPCQSPWNTPLLPVKKPGTEDYRPVQDLREVNKRVEDIHPTVPNPYNLLSTLPPSHPWYTVLDLKDAFFCLRLHSESQLLFAFEWRDPEIGLSGQLTWTRLPQGFKNSPTLFNEALHSDLADFRVRYPALVLLQYVDDLLLAAATRTECLEGTKALLETLGNKGYRASAKKAQICLQEVTYLGYSLKDGQRWLTKARKEAILSIPVPKNSRQVREFLGKAGYCRLFIPGFAELAAPLYPLTRPGTLFQWGTEQQLAFEDIKKALLSSPALGLPDITKPFELFIDENSGFAKGVLVQKLGPWKRPVAYLSKKLDTVASGWPPCLRMVAAIAILVKDAGKLTLGQPLTILTSHPVEALVRQPPNKWLSNARMTHYQAMLLDAERVHFGPTVSLNPATLLPLPSGGNHHDCLQILAETHGTRPDLTDQPLPDADLTWYTDGSSFIRNGEREAGAAVTTESEVIWAAPLPPGTSAQRAELIALTQALKMAEGKKLTVYTDSRYAFATTHVHGEIYRRRGWLTSEGKEIKNKNEILALLEALFLPKRLSIIHCPGHQKGDSPQAKGNRLADDTAKKAATETHSSLTVLPAGKRTADGSEFEKRTADGSEFESPKKKAKVE

SEQ ID NO: 1257 - protein, 2093 aa, synthetic construct
MPAAKRVKLDGGDKKYSIGLDIGTNSVGWAVITDEYKVPSKKFKVLGNTDRHSIKKNLIGALLFDSGETAEATRLKRTARRRYTRRKNRICYLQEIFSNEMAKVDDSFFHRLEESFLVEEDKKHERHPIFGNIVDEVAYHEKYPTIYHLRKKLVDSTDKADLRLIYLALAHMIKFRGHFLIEGDLNPDNSDVDKLFIQLVQTYNQLFEENPINASGVDAKAILSARLSKSRRLENLIAQLPGEKKNGLFGNLIALSLGLTPNFKSNFDLAEDAKLQLSKDTYDDDLDNLLAQIGDQYADLFLAAKNLSDAILLSDILRVNTEITKAPLSASMIKRYDEHHQDLTLLKALVRQQLPEKYKEIFFDQSKNGYAGYIDGGASQEEFYKFIKPILEKMDGTEELLVKLNREDLLRKQRTFDNGSIPHQIHLGELHAILRRQEDFYPFLKDNREKIEKILTFRIPYYVGPLARGNSRFAWMTRKSEETITPWNFEEVVDKGASAQSFIERMTNFDKNLPNEKVLPKHSLLYEYFTVYNELTKVKYVTEGMRKPAFLSGEQKKAIVDLLFKTNRKVTVKQLKEDYFKKIECFDSVEISGVEDRFNASLGTYHDLLKIIKDKDFLDNEENEDILEDIVLTLTLFEDREMIEERLKTYAHLFDDKVMKQLKRRRYTGWGRLSRKLINGIRDKQSGKTILDFLKSDGFANRNFMQLIHDDSLTFKEDIQKAQVSGQGDSLHEHIANLAGSPAIKKGILQTVKVVDELVKVMGRHKPENIVIEMARENQTTQKGQKNSRERMKRIEEGIKELGSQILKEHPVENTQLQNEKLYLYYLQNGRDMYVDQELDINRLSDYDVDHIVPQSFLKDDSIDNKVLTRSDKARGKSDNVPSEEVVKKMKNYWRQLLNAKLITQRKFDNLTKAERGGLSELDKAGFIKRQLVETRQITKHVAQILDSRMNTKYDENDKLIREVKVITLKSKLVSDFRKDFQFYKVREINNYHHAHDAYLNAVVGTALIKKYPKLESEFVYGDYKVYDVRKMIAKSEQEIGKATAKYFFYSNIMNFFKTEITLANGEIRKRPLIETNGETGEIVWDKGRDFATVRKVLSMPQVNIVKKTEVQTGGFSKESILPKRNSDKLIARKKDWDPKKYGGFDSPTVAYSVLVVAKVEKGKSKKLKSVKELLGITIMERSSFEKNPIDFLEAKGYKEVKKDLIIKLPKYSLFELENGRKRMLASAGELQKGNELALPSKYVNFLYLASHYEKLKGSPEDNEQKQLFVEQHKHYLDEIIEQISEFSKRVILADANLDKVLSAYNKHRDKPIREQAENIIHLFTLTNLGAPAAFKYFDTTIDRKRYTSTKEVLDATLIHQSITGLYETRIDLSQLGGDGGGGSPAPGGGGGTLQLEEEYRLFEPESTQKQEMDIWLKNFPQAWAETGGMGTAHCQAPVLIQLKATATPISIRQYPMPHEAYQGIKPHIRRMLDQGILKPCQSPWNTPLLPVKKPGTEDYRPVQDLREVNKRVEDIHPTVPNPYNLLSTLPPSHPWYTVLDLKDAFFCLRLHSESQLLFAFEWRDPEIGLSGQLTWTRLPQGFKNSPTLFNEALHSDLADFRVRYPALVLLQYVDDLLLAAATRTECLEGTKALLETLGNKGYRASAKKAQICLQEVTYLGYSLKDGQRWLTKARKEAILSIPVPKNSRQVREFLGKAGYCRLFIPGFAELAAPLYPLTRPGTLFQWGTEQQLAFEDIKKALLSSPALGLPDITKPFELFIDENSGFAKGVLVQKLGPWKRPVAYLSKKLDTVASGWPPCLRMVAAIAILVKDAGKLTLGQPLTILTSHPVEALVRQPPNKWLSNARMTHYQAMLLDAERVHFGPTVSLNPATLLPLPSGGNHHDCLQILAETHGTRPDLTDQPLPDADLTWYTDGSSFIRNGEREAGAAVTTESEVIWAAPLPPGTSAQRAELIALTQALKMAEGKKLTVYTDSRYAFATTHVHGEIYRRRGWLTSEGKEIKNKNEILALLEALFLPKRLSIIHCPGHQKGDSPQAKGNRLADDTAKKAATETHSSLTVLPAGKRTADGSEFEKRTADGSEFESPKKKAKVE

SEQ ID NO: 1258 - protein, 2093 aa, synthetic construct
MPAAKRVKLDGGDKKYSIGLDIGTNSVGWAVITDEYKVPSKKFKVLGNTDRHSIKKNLIGALLFDSGETAEATRLKRTARRRYTRRKNRICYLQEIFSNEMAKVDDSFFHRLEESFLVEEDKKHERHPIFGNIVDEVAYHEKYPTIYHLRKKLVDSTDKADLRLIYLALAHMIKFRGHFLIEGDLNPDNSDVDKLFIQLVQTYNQLFEENPINASGVDAKAILSARLSKSRRLENLIAQLPGEKKNGLFGNLIALSLGLTPNFKSNFDLAEDAKLQLSKDTYDDDLDNLLAQIGDQYADLFLAAKNLSDAILLSDILRVNTEITKAPLSASMIKRYDEHHQDLTLLKALVRQQLPEKYKEIFFDQSKNGYAGYIDGGASQEEFYKFIKPILEKMDGTEELLVKLNREDLLRKQRTFDNGSIPHQIHLGELHAILRRQEDFYPFLKDNREKIEKILTFRIPYYVGPLARGNSRFAWMTRKSEETITPWNFEEVVDKGASAQSFIERMTNFDKNLPNEKVLPKHSLLYEYFTVYNELTKVKYVTEGMRKPAFLSGEQKKAIVDLLFKTNRKVTVKQLKEDYFKKIECFDSVEISGVEDRFNASLGTYHDLLKIIKDKDFLDNEENEDILEDIVLTLTLFEDREMIEERLKTYAHLFDDKVMKQLKRRRYTGWGRLSRKLINGIRDKQSGKTILDFLKSDGFANRNFMQLIHDDSLTFKEDIQKAQVSGQGDSLHEHIANLAGSPAIKKGILQTVKVVDELVKVMGRHKPENIVIEMARENQTTQKGQKNSRERMKRIEEGIKELGSQILKEHPVENTQLQNEKLYLYYLQNGRDMYVDQELDINRLSDYDVDHIVPQSFLKDDSIDNKVLTRSDKARGKSDNVPSEEVVKKMKNYWRQLLNAKLITQRKFDNLTKAERGGLSELDKAGFIKRQLVETRQITKHVAQILDSRMNTKYDENDKLIREVKVITLKSKLVSDFRKDFQFYKVREINNYHHAHDAYLNAVVGTALIKKYPKLESEFVYGDYKVYDVRKMIAKSEQEIGKATAKYFFYSNIMNFFKTEITLANGEIRKRPLIETNGETGEIVWDKGRDFATVRKVLSMPQVNIVKKTEVQTGGFSKESILPKRNSDKLIARKKDWDPKKYGGFDSPTVAYSVLVVAKVEKGKSKKLKSVKELLGITIMERSSFEKNPIDFLEAKGYKEVKKDLIIKLPKYSLFELENGRKRMLASAGELQKGNELALPSKYVNFLYLASHYEKLKGSPEDNEQKQLFVEQHKHYLDEIIEQISEFSKRVILADANLDKVLSAYNKHRDKPIREQAENIIHLFTLTNLGAPAAFKYFDTTIDRKRYTSTKEVLDATLIHQSITGLYETRIDLSQLGGDGGGSSGGGGGSGGTLQLEEEYRLFEPESTQKQEMDIWLKNFPQAWAETGGMGTAHCQAPVLIQLKATATPISIRQYPMPHEAYQGIKPHIRRMLDQGILKPCQSPWNTPLLPVKKPGTEDYRPVQDLREVNKRVEDIHPTVPNPYNLLSTLPPSHPWYTVLDLKDAFFCLRLHSESQLLFAFEWRDPEIGLSGQLTWTRLPQGFKNSPTLFNEALHSDLADFRVRYPALVLLQYVDDLLLAAATRTECLEGTKALLETLGNKGYRASAKKAQICLQEVTYLGYSLKDGQRWLTKARKEAILSIPVPKNSRQVREFLGKAGYCRLFIPGFAELAAPLYPLTRPGTLFQWGTEQQLAFEDIKKALLSSPALGLPDITKPFELFIDENSGFAKGVLVQKLGPWKRPVAYLSKKLDTVASGWPPCLRMVAAIAILVKDAGKLTLGQPLTILTSHPVEALVRQPPNKWLSNARMTHYQAMLLDAERVHFGPTVSLNPATLLPLPSGGNHHDCLQILAETHGTRPDLTDQPLPDADLTWYTDGSSFIRNGEREAGAAVTTESEVIWAAPLPPGTSAQRAELIALTQALKMAEGKKLTVYTDSRYAFATTHVHGEIYRRRGWLTSEGKEIKNKNEILALLEALFLPKRLSIIHCPGHQKGDSPQAKGNRLADDTAKKAATETHSSLTVLPAGKRTADGSEFEKRTADGSEFESPKKKAKVE

SEQ ID NO: 1259 - protein, 2095 aa, synthetic construct
MPAAKRVKLDGGDKKYSIGLDIGTNSVGWAVITDEYKVPSKKFKVLGNTDRHSIKKNLIGALLFDSGETAEATRLKRTARRRYTRRKNRICYLQEIFSNEMAKVDDSFFHRLEESFLVEEDKKHERHPIFGNIVDEVAYHEKYPTIYHLRKKLVDSTDKADLRLIYLALAHMIKFRGHFLIEGDLNPDNSDVDKLFIQLVQTYNQLFEENPINASGVDAKAILSARLSKSRRLENLIAQLPGEKKNGLFGNLIALSLGLTPNFKSNFDLAEDAKLQLSKDTYDDDLDNLLAQIGDQYADLFLAAKNLSDAILLSDILRVNTEITKAPLSASMIKRYDEHHQDLTLLKALVRQQLPEKYKEIFFDQSKNGYAGYIDGGASQEEFYKFIKPILEKMDGTEELLVKLNREDLLRKQRTFDNGSIPHQIHLGELHAILRRQEDFYPFLKDNREKIEKILTFRIPYYVGPLARGNSRFAWMTRKSEETITPWNFEEVVDKGASAQSFIERMTNFDKNLPNEKVLPKHSLLYEYFTVYNELTKVKYVTEGMRKPAFLSGEQKKAIVDLLFKTNRKVTVKQLKEDYFKKIECFDSVEISGVEDRFNASLGTYHDLLKIIKDKDFLDNEENEDILEDIVLTLTLFEDREMIEERLKTYAHLFDDKVMKQLKRRRYTGWGRLSRKLINGIRDKQSGKTILDFLKSDGFANRNFMQLIHDDSLTFKEDIQKAQVSGQGDSLHEHIANLAGSPAIKKGILQTVKVVDELVKVMGRHKPENIVIEMARENQTTQKGQKNSRERMKRIEEGIKELGSQILKEHPVENTQLQNEKLYLYYLQNGRDMYVDQELDINRLSDYDVDHIVPQSFLKDDSIDNKVLTRSDKARGKSDNVPSEEVVKKMKNYWRQLLNAKLITQRKFDNLTKAERGGLSELDKAGFIKRQLVETRQITKHVAQILDSRMNTKYDENDKLIREVKVITLKSKLVSDFRKDFQFYKVREINNYHHAHDAYLNAVVGTALIKKYPKLESEFVYGDYKVYDVRKMIAKSEQEIGKATAKYFFYSNIMNFFKTEITLANGEIRKRPLIETNGETGEIVWDKGRDFATVRKVLSMPQVNIVKKTEVQTGGFSKESILPKRNSDKLIARKKDWDPKKYGGFDSPTVAYSVLVVAKVEKGKSKKLKSVKELLGITIMERSSFEKNPIDFLEAKGYKEVKKDLIIKLPKYSLFELENGRKRMLASAGELQKGNELALPSKYVNFLYLASHYEKLKGSPEDNEQKQLFVEQHKHYLDEIIEQISEFSKRVILADANLDKVLSAYNKHRDKPIREQAENIIHLFTLTNLGAPAAFKYFDTTIDRKRYTSTKEVLDATLIHQSITGLYETRIDLSQLGGDGGGGGEAAAKGGSGGTLQLEEEYRLFEPESTQKQEMDIWLKNFPQAWAETGGMGTAHCQAPVLIQLKATATPISIRQYPMPHEAYQGIKPHIRRMLDQGILKPCQSPWNTPLLPVKKPGTEDYRPVQDLREVNKRVEDIHPTVPNPYNLLSTLPPSHPWYTVLDLKDAFFCLRLHSESQLLFAFEWRDPEIGLSGQLTWTRLPQGFKNSPTLFNEALHSDLADFRVRYPALVLLQYVDDLLLAAATRTECLEGTKALLETLGNKGYRASAKKAQICLQEVTYLGYSLKDGQRWLTKARKEAILSIPVPKNSRQVREFLGKAGYCRLFIPGFAELAAPLYPLTRPGTLFQWGTEQQLAFEDIKKALLSSPALGLPDITKPFELFIDENSGFAKGVLVQKLGPWKRPVAYLSKKLDTVASGWPPCLRMVAAIAILVKDAGKLTLGQPLTILTSHPVEALVRQPPNKWLSNARMTHYQAMLLDAERVHFGPTVSLNPATLLPLPSGGNHHDCLQILAETHGTRPDLTDQPLPDADLTWYTDGSSFIRNGEREAGAAVTTESEVIWAAPLPPGTSAQRAELIALTQALKMAEGKKLTVYTDSRYAFATTHVHGEIYRRRGWLTSEGKEIKNKNEILALLEALFLPKRLSIIHCPGHQKGDSPQAKGNRLADDTAKKAATETHSSLTVLPAGKRTADGSEFEKRTADGSEFESPKKKAKVE

SEQ ID NO: 1260 - protein, 2089 aa, synthetic construct
MPAAKRVKLDGGDKKYSIGLDIGTNSVGWAVITDEYKVPSKKFKVLGNTDRHSIKKNLIGALLFDSGETAEATRLKRTARRRYTRRKNRICYLQEIFSNEMAKVDDSFFHRLEESFLVEEDKKHERHPIFGNIVDEVAYHEKYPTIYHLRKKLVDSTDKADLRLIYLALAHMIKFRGHFLIEGDLNPDNSDVDKLFIQLVQTYNQLFEENPINASGVDAKAILSARLSKSRRLENLIAQLPGEKKNGLFGNLIALSLGLTPNFKSNFDLAEDAKLQLSKDTYDDDLDNLLAQIGDQYADLFLAAKNLSDAILLSDILRVNTEITKAPLSASMIKRYDEHHQDLTLLKALVRQQLPEKYKEIFFDQSKNGYAGYIDGGASQEEFYKFIKPILEKMDGTEELLVKLNREDLLRKQRTFDNGSIPHQIHLGELHAILRRQEDFYPFLKDNREKIEKILTFRIPYYVGPLARGNSRFAWMTRKSEETITPWNFEEVVDKGASAQSFIERMTNFDKNLPNEKVLPKHSLLYEYFTVYNELTKVKYVTEGMRKPAFLSGEQKKAIVDLLFKTNRKVTVKQLKEDYFKKIECFDSVEISGVEDRFNASLGTYHDLLKIIKDKDFLDNEENEDILEDIVLTLTLFEDREMIEERLKTYAHLFDDKVMKQLKRRRYTGWGRLSRKLINGIRDKQSGKTILDFLKSDGFANRNFMQLIHDDSLTFKEDIQKAQVSGQGDSLHEHIANLAGSPAIKKGILQTVKVVDELVKVMGRHKPENIVIEMARENQTTQKGQKNSRERMKRIEEGIKELGSQILKEHPVENTQLQNEKLYLYYLQNGRDMYVDQELDINRLSDYDVDHIVPQSFLKDDSIDNKVLTRSDKARGKSDNVPSEEVVKKMKNYWRQLLNAKLITQRKFDNLTKAERGGLSELDKAGFIKRQLVETRQITKHVAQILDSRMNTKYDENDKLIREVKVITLKSKLVSDFRKDFQFYKVREINNYHHAHDAYLNAVVGTALIKKYPKLESEFVYGDYKVYDVRKMIAKSEQEIGKATAKYFFYSNIMNFFKTEITLANGEIRKRPLIETNGETGEIVWDKGRDFATVRKVLSMPQVNIVKKTEVQTGGFSKESILPKRNSDKLIARKKDWDPKKYGGFDSPTVAYSVLVVAKVEKGKSKKLKSVKELLGITIMERSSFEKNPIDFLEAKGYKEVKKDLIIKLPKYSLFELENGRKRMLASAGELQKGNELALPSKYVNFLYLASHYEKLKGSPEDNEQKQLFVEQHKHYLDEIIEQISEFSKRVILADANLDKVLSAYNKHRDKPIREQAENIIHLFTLTNLGAPAAFKYFDTTIDRKRYTSTKEVLDATLIHQSITGLYETRIDLSQLGGDGGEAAAKGGTLQLEEEYRLFEPESTQKQEMDIWLKNFPQAWAETGGMGTAHCQAPVLIQLKATATPISIRQYPMPHEAYQGIKPHIRRMLDQGILKPCQSPWNTPLLPVKKPGTEDYRPVQDLREVNKRVEDIHPTVPNPYNLLSTLPPSHPWYTVLDLKDAFFCLRLHSESQLLFAFEWRDPEIGLSGQLTWTRLPQGFKNSPTLFNEALHSDLADFRVRYPALVLLQYVDDLLLAAATRTECLEGTKALLETLGNKGYRASAKKAQICLQEVTYLGYSLKDGQRWLTKARKEAILSIPVPKNSRQVREFLGKAGYCRLFIPGFAELAAPLYPLTRPGTLFQWGTEQQLAFEDIKKALLSSPALGLPDITKPFELFIDENSGFAKGVLVQKLGPWKRPVAYLSKKLDTVASGWPPCLRMVAAIAILVKDAGKLTLGQPLTILTSHPVEALVRQPPNKWLSNARMTHYQAMLLDAERVHFGPTVSLNPATLLPLPSGGNHHDCLQILAETHGTRPDLTDQPLPDADLTWYTDGSSFIRNGEREAGAAVTTESEVIWAAPLPPGTSAQRAELIALTQALKMAEGKKLTVYTDSRYAFATTHVHGEIYRRRGWLTSEGKEIKNKNEILALLEALFLPKRLSIIHCPGHQKGDSPQAKGNRLADDTAKKAATETHSSLTVLPAGKRTADGSEFEKRTADGSEFESPKKKAKVE

SEQ ID NO: 1261 - protein, 2095 aa, synthetic construct
MPAAKRVKLDGGDKKYSIGLDIGTNSVGWAVITDEYKVPSKKFKVLGNTDRHSIKKNLIGALLFDSGETAEATRLKRTARRRYTRRKNRICYLQEIFSNEMAKVDDSFFHRLEESFLVEEDKKHERHPIFGNIVDEVAYHEKYPTIYHLRKKLVDSTDKADLRLIYLALAHMIKFRGHFLIEGDLNPDNSDVDKLFIQLVQTYNQLFEENPINASGVDAKAILSARLSKSRRLENLIAQLPGEKKNGLFGNLIALSLGLTPNFKSNFDLAEDAKLQLSKDTYDDDLDNLLAQIGDQYADLFLAAKNLSDAILLSDILRVNTEITKAPLSASMIKRYDEHHQDLTLLKALVRQQLPEKYKEIFFDQSKNGYAGYIDGGASQEEFYKFIKPILEKMDGTEELLVKLNREDLLRKQRTFDNGSIPHQIHLGELHAILRRQEDFYPFLKDNREKIEKILTFRIPYYVGPLARGNSRFAWMTRKSEETITPWNFEEVVDKGASAQSFIERMTNFDKNLPNEKVLPKHSLLYEYFTVYNELTKVKYVTEGMRKPAFLSGEQKKAIVDLLFKTNRKVTVKQLKEDYFKKIECFDSVEISGVEDRFNASLGTYHDLLKIIKDKDFLDNEENEDILEDIVLTLTLFEDREMIEERLKTYAHLFDDKVMKQLKRRRYTGWGRLSRKLINGIRDKQSGKTILDFLKSDGFANRNFMQLIHDDSLTFKEDIQKAQVSGQGDSLHEHIANLAGSPAIKKGILQTVKVVDELVKVMGRHKPENIVIEMARENQTTQKGQKNSRERMKRIEEGIKELGSQILKEHPVENTQLQNEKLYLYYLQNGRDMYVDQELDINRLSDYDVDHIVPQSFLKDDSIDNKVLTRSDKARGKSDNVPSEEVVKKMKNYWRQLLNAKLITQRKFDNLTKAERGGLSELDKAGFIKRQLVETRQITKHVAQILDSRMNTKYDENDKLIREVKVITLKSKLVSDFRKDFQFYKVREINNYHHAHDAYLNAVVGTALIKKYPKLESEFVYGDYKVYDVRKMIAKSEQEIGKATAKYFFYSNIMNFFKTEITLANGEIRKRPLIETNGETGEIVWDKGRDFATVRKVLSMPQVNIVKKTEVQTGGFSKESILPKRNSDKLIARKKDWDPKKYGGFDSPTVAYSVLVVAKVEKGKSKKLKSVKELLGITIMERSSFEKNPIDFLEAKGYKEVKKDLIIKLPKYSLFELENGRKRMLASAGELQKGNELALPSKYVNFLYLASHYEKLKGSPEDNEQKQLFVEQHKHYLDEIIEQISEFSKRVILADANLDKVLSAYNKHRDKPIREQAENIIHLFTLTNLGAPAAFKYFDTTIDRKRYTSTKEVLDATLIHQSITGLYETRIDLSQLGGDGGGGGGSSEAAAKGGTLQLEEEYRLFEPESTQKQEMDIWLKNFPQAWAETGGMGTAHCQAPVLIQLKATATPISIRQYPMPHEAYQGIKPHIRRMLDQGILKPCQSPWNTPLLPVKKPGTEDYRPVQDLREVNKRVEDIHPTVPNPYNLLSTLPPSHPWYTVLDLKDAFFCLRLHSESQLLFAFEWRDPEIGLSGQLTWTRLPQGFKNSPTLFNEALHSDLADFRVRYPALVLLQYVDDLLLAAATRTECLEGTKALLETLGNKGYRASAKKAQICLQEVTYLGYSLKDGQRWLTKARKEAILSIPVPKNSRQVREFLGKAGYCRLFIPGFAELAAPLYPLTRPGTLFQWGTEQQLAFEDIKKALLSSPALGLPDITKPFELFIDENSGFAKGVLVQKLGPWKRPVAYLSKKLDTVASGWPPCLRMVAAIAILVKDAGKLTLGQPLTILTSHPVEALVRQPPNKWLSNARMTHYQAMLLDAERVHFGPTVSLNPATLLPLPSGGNHHDCLQILAETHGTRPDLTDQPLPDADLTWYTDGSSFIRNGEREAGAAVTTESEVIWAAPLPPGTSAQRAELIALTQALKMAEGKKLTVYTDSRYAFATTHVHGEIYRRRGWLTSEGKEIKNKNEILALLEALFLPKRLSIIHCPGHQKGDSPQAKGNRLADDTAKKAATETHSSLTVLPAGKRTADGSEFEKRTADGSEFESPKKKAKVE

SEQ ID NO: 1262 - protein, 2095 aa, synthetic construct
MPAAKRVKLDGGDKKYSIGLDIGTNSVGWAVITDEYKVPSKKFKVLGNTDRHSIKKNLIGALLFDSGETAEATRLKRTARRRYTRRKNRICYLQEIFSNEMAKVDDSFFHRLEESFLVEEDKKHERHPIFGNIVDEVAYHEKYPTIYHLRKKLVDSTDKADLRLIYLALAHMIKFRGHFLIEGDLNPDNSDVDKLFIQLVQTYNQLFEENPINASGVDAKAILSARLSKSRRLENLIAQLPGEKKNGLFGNLIALSLGLTPNFKSNFDLAEDAKLQLSKDTYDDDLDNLLAQIGDQYADLFLAAKNLSDAILLSDILRVNTEITKAPLSASMIKRYDEHHQDLTLLKALVRQQLPEKYKEIFFDQSKNGYAGYIDGGASQEEFYKFIKPILEKMDGTEELLVKLNREDLLRKQRTFDNGSIPHQIHLGELHAILRRQEDFYPFLKDNREKIEKILTFRIPYYVGPLARGNSRFAWMTRKSEETITPWNFEEVVDKGASAQSFIERMTNFDKNLPNEKVLPKHSLLYEYFTVYNELTKVKYVTEGMRKPAFLSGEQKKAIVDLLFKTNRKVTVKQLKEDYFKKIECFDSVEISGVEDRFNASLGTYHDLLKIIKDKDFLDNEENEDILEDIVLTLTLFEDREMIEERLKTYAHLFDDKVMKQLKRRRYTGWGRLSRKLINGIRDKQSGKTILDFLKSDGFANRNFMQLIHDDSLTFKEDIQKAQVSGQGDSLHEHIANLAGSPAIKKGILQTVKVVDELVKVMGRHKPENIVIEMARENQTTQKGQKNSRERMKRIEEGIKELGSQILKEHPVENTQLQNEKLYLYYLQNGRDMYVDQELDINRLSDYDVDHIVPQSFLKDDSIDNKVLTRSDKARGKSDNVPSEEVVKKMKNYWRQLLNAKLITQRKFDNLTKAERGGLSELDKAGFIKRQLVETRQITKHVAQILDSRMNTKYDENDKLIREVKVITLKSKLVSDFRKDFQFYKVREINNYHHAHDAYLNAVVGTALIKKYPKLESEFVYGDYKVYDVRKMIAKSEQEIGKATAKYFFYSNIMNFFKTEITLANGEIRKRPLIETNGETGEIVWDKGRDFATVRKVLSMPQVNIVKKTEVQTGGFSKESILPKRNSDKLIARKKDWDPKKYGGFDSPTVAYSVLVVAKVEKGKSKKLKSVKELLGITIMERSSFEKNPIDFLEAKGYKEVKKDLIIKLPKYSLFELENGRKRMLASAGELQKGNELALPSKYVNFLYLASHYEKLKGSPEDNEQKQLFVEQHKHYLDEIIEQISEFSKRVILADANLDKVLSAYNKHRDKPIREQAENIIHLFTLTNLGAPAAFKYFDTTIDRKRYTSTKEVLDATLIHQSITGLYETRIDLSQLGGDGGGGGEAAAKPAPGGTLQLEEEYRLFEPESTQKQEMDIWLKNFPQAWAETGGMGTAHCQAPVLIQLKATATPISIRQYPMPHEAYQGIKPHIRRMLDQGILKPCQSPWNTPLLPVKKPGTEDYRPVQDLREVNKRVEDIHPTVPNPYNLLSTLPPSHPWYTVLDLKDAFFCLRLHSESQLLFAFEWRDPEIGLSGQLTWTRLPQGFKNSPTLFNEALHSDLADFRVRYPALVLLQYVDDLLLAAATRTECLEGTKALLETLGNKGYRASAKKAQICLQEVTYLGYSLKDGQRWLTKARKEAILSIPVPKNSRQVREFLGKAGYCRLFIPGFAELAAPLYPLTRPGTLFQWGTEQQLAFEDIKKALLSSPALGLPDITKPFELFIDENSGFAKGVLVQKLGPWKRPVAYLSKKLDTVASGWPPCLRMVAAIAILVKDAGKLTLGQPLTILTSHPVEALVRQPPNKWLSNARMTHYQAMLLDAERVHFGPTVSLNPATLLPLPSGGNHHDCLQILAETHGTRPDLTDQPLPDADLTWYTDGSSFIRNGEREAGAAVTTESEVIWAAPLPPGTSAQRAELIALTQALKMAEGKKLTVYTDSRYAFATTHVHGEIYRRRGWLTSEGKEIKNKNEILALLEALFLPKRLSIIHCPGHQKGDSPQAKGNRLADDTAKKAATETHSSLTVLPAGKRTADGSEFEKRTADGSEFESPKKKAKVE

SEQ ID NO: 1263 - protein, 2093 aa, synthetic construct
MPAAKRVKLDGGDKKYSIGLDIGTNSVGWAVITDEYKVPSKKFKVLGNTDRHSIKKNLIGALLFDSGETAEATRLKRTARRRYTRRKNRICYLQEIFSNEMAKVDDSFFHRLEESFLVEEDKKHERHPIFGNIVDEVAYHEKYPTIYHLRKKLVDSTDKADLRLIYLALAHMIKFRGHFLIEGDLNPDNSDVDKLFIQLVQTYNQLFEENPINASGVDAKAILSARLSKSRRLENLIAQLPGEKKNGLFGNLIALSLGLTPNFKSNFDLAEDAKLQLSKDTYDDDLDNLLAQIGDQYADLFLAAKNLSDAILLSDILRVNTEITKAPLSASMIKRYDEHHQDLTLLKALVRQQLPEKYKEIFFDQSKNGYAGYIDGGASQEEFYKFIKPILEKMDGTEELLVKLNREDLLRKQRTFDNGSIPHQIHLGELHAILRRQEDFYPFLKDNREKIEKILTFRIPYYVGPLARGNSRFAWMTRKSEETITPWNFEEVVDKGASAQSFIERMTNFDKNLPNEKVLPKHSLLYEYFTVYNELTKVKYVTEGMRKPAFLSGEQKKAIVDLLFKTNRKVTVKQLKEDYFKKIECFDSVEISGVEDRFNASLGTYHDLLKIIKDKDFLDNEENEDILEDIVLTLTLFEDREMIEERLKTYAHLFDDKVMKQLKRRRYTGWGRLSRKLINGIRDKQSGKTILDFLKSDGFANRNFMQLIHDDSLTFKEDIQKAQVSGQGDSLHEHIANLAGSPAIKKGILQTVKVVDELVKVMGRHKPENIVIEMARENQTTQKGQKNSRERMKRIEEGIKELGSQILKEHPVENTQLQNEKLYLYYLQNGRDMYVDQELDINRLSDYDVDHIVPQSFLKDDSIDNKVLTRSDKARGKSDNVPSEEVVKKMKNYWRQLLNAKLITQRKFDNLTKAERGGLSELDKAGFIKRQLVETRQITKHVAQILDSRMNTKYDENDKLIREVKVITLKSKLVSDFRKDFQFYKVREINNYHHAHDAYLNAVVGTALIKKYPKLESEFVYGDYKVYDVRKMIAKSEQEIGKATAKYFFYSNIMNFFKTEITLANGEIRKRPLIETNGETGEIVWDKGRDFATVRKVLSMPQVNIVKKTEVQTGGFSKESILPKRNSDKLIARKKDWDPKKYGGFDSPTVAYSVLVVAKVEKGKSKKLKSVKELLGITIMERSSFEKNPIDFLEAKGYKEVKKDLIIKLPKYSLFELENGRKRMLASAGELQKGNELALPSKYVNFLYLASHYEKLKGSPEDNEQKQLFVEQHKHYLDEIIEQISEFSKRVILADANLDKVLSAYNKHRDKPIREQAENIIHLFTLTNLGAPAAFKYFDTTIDRKRYTSTKEVLDATLIHQSITGLYETRIDLSQLGGDGGGGSPAPGSSGGTLQLEEEYRLFEPESTQKQEMDIWLKNFPQAWAETGGMGTAHCQAPVLIQLKATATPISIRQYPMPHEAYQGIKPHIRRMLDQGILKPCQSPWNTPLLPVKKPGTEDYRPVQDLREVNKRVEDIHPTVPNPYNLLSTLPPSHPWYTVLDLKDAFFCLRLHSESQLLFAFEWRDPEIGLSGQLTWTRLPQGFKNSPTLFNEALHSDLADFRVRYPALVLLQYVDDLLLAAATRTECLEGTKALLETLGNKGYRASAKKAQICLQEVTYLGYSLKDGQRWLTKARKEAILSIPVPKNSRQVREFLGKAGYCRLFIPGFAELAAPLYPLTRPGTLFQWGTEQQLAFEDIKKALLSSPALGLPDITKPFELFIDENSGFAKGVLVQKLGPWKRPVAYLSKKLDTVASGWPPCLRMVAAIAILVKDAGKLTLGQPLTILTSHPVEALVRQPPNKWLSNARMTHYQAMLLDAERVHFGPTVSLNPATLLPLPSGGNHHDCLQILAETHGTRPDLTDQPLPDADLTWYTDGSSFIRNGEREAGAAVTTESEVIWAAPLPPGTSAQRAELIALTQALKMAEGKKLTVYTDSRYAFATTHVHGEIYRRRGWLTSEGKEIKNKNEILALLEALFLPKRLSIIHCPGHQKGDSPQAKGNRLADDTAKKAATETHSSLTVLPAGKRTADGSEFEKRTADGSEFESPKKKAKVE

SEQ ID NO: 1264 - protein, 2095 aa, synthetic construct
MPAAKRVKLDGGDKKYSIGLDIGTNSVGWAVITDEYKVPSKKFKVLGNTDRHSIKKNLIGALLFDSGETAEATRLKRTARRRYTRRKNRICYLQEIFSNEMAKVDDSFFHRLEESFLVEEDKKHERHPIFGNIVDEVAYHEKYPTIYHLRKKLVDSTDKADLRLIYLALAHMIKFRGHFLIEGDLNPDNSDVDKLFIQLVQTYNQLFEENPINASGVDAKAILSARLSKSRRLENLIAQLPGEKKNGLFGNLIALSLGLTPNFKSNFDLAEDAKLQLSKDTYDDDLDNLLAQIGDQYADLFLAAKNLSDAILLSDILRVNTEITKAPLSASMIKRYDEHHQDLTLLKALVRQQLPEKYKEIFFDQSKNGYAGYIDGGASQEEFYKFIKPILEKMDGTEELLVKLNREDLLRKQRTFDNGSIPHQIHLGELHAILRRQEDFYPFLKDNREKIEKILTFRIPYYVGPLARGNSRFAWMTRKSEETITPWNFEEVVDKGASAQSFIERMTNFDKNLPNEKVLPKHSLLYEYFTVYNELTKVKYVTEGMRKPAFLSGEQKKAIVDLLFKTNRKVTVKQLKEDYFKKIECFDSVEISGVEDRFNASLGTYHDLLKIIKDKDFLDNEENEDILEDIVLTLTLFEDREMIEERLKTYAHLFDDKVMKQLKRRRYTGWGRLSRKLINGIRDKQSGKTILDFLKSDGFANRNFMQLIHDDSLTFKEDIQKAQVSGQGDSLHEHIANLAGSPAIKKGILQTVKVVDELVKVMGRHKPENIVIEMARENQTTQKGQKNSRERMKRIEEGIKELGSQILKEHPVENTQLQNEKLYLYYLQNGRDMYVDQELDINRLSDYDVDHIVPQSFLKDDSIDNKVLTRSDKARGKSDNVPSEEVVKKMKNYWRQLLNAKLITQRKFDNLTKAERGGLSELDKAGFIKRQLVETRQITKHVAQILDSRMNTKYDENDKLIREVKVITLKSKLVSDFRKDFQFYKVREINNYHHAHDAYLNAVVGTALIKKYPKLESEFVYGDYKVYDVRKMIAKSEQEIGKATAKYFFYSNIMNFFKTEITLANGEIRKRPLIETNGETGEIVWDKGRDFATVRKVLSMPQVNIVKKTEVQTGGFSKESILPKRNSDKLIARKKDWDPKKYGGFDSPTVAYSVLVVAKVEKGKSKKLKSVKELLGITIMERSSFEKNPIDFLEAKGYKEVKKDLIIKLPKYSLFELENGRKRMLASAGELQKGNELALPSKYVNFLYLASHYEKLKGSPEDNEQKQLFVEQHKHYLDEIIEQISEFSKRVILADANLDKVLSAYNKHRDKPIREQAENIIHLFTLTNLGAPAAFKYFDTTIDRKRYTSTKEVLDATLIHQSITGLYETRIDLSQLGGDGGPAPEAAAKGGSGGTLQLEEEYRLFEPESTQKQEMDIWLKNFPQAWAETGGMGTAHCQAPVLIQLKATATPISIRQYPMPHEAYQGIKPHIRRMLDQGILKPCQSPWNTPLLPVKKPGTEDYRPVQDLREVNKRVEDIHPTVPNPYNLLSTLPPSHPWYTVLDLKDAFFCLRLHSESQLLFAFEWRDPEIGLSGQLTWTRLPQGFKNSPTLFNEALHSDLADFRVRYPALVLLQYVDDLLLAAATRTECLEGTKALLETLGNKGYRASAKKAQICLQEVTYLGYSLKDGQRWLTKARKEAILSIPVPKNSRQVREFLGKAGYCRLFIPGFAELAAPLYPLTRPGTLFQWGTEQQLAFEDIKKALLSSPALGLPDITKPFELFIDENSGFAKGVLVQKLGPWKRPVAYLSKKLDTVASGWPPCLRMVAAIAILVKDAGKLTLGQPLTILTSHPVEALVRQPPNKWLSNARMTHYQAMLLDAERVHFGPTVSLNPATLLPLPSGGNHHDCLQILAETHGTRPDLTDQPLPDADLTWYTDGSSFIRNGEREAGAAVTTESEVIWAAPLPPGTSAQRAELIALTQALKMAEGKKLTVYTDSRYAFATTHVHGEIYRRRGWLTSEGKEIKNKNEILALLEALFLPKRLSIIHCPGHQKGDSPQAKGNRLADDTAKKAATETHSSLTVLPAGKRTADGSEFEKRTADGSEFESPKKKAKVE

SEQ ID NO: 1265 - protein, 2095 aa, synthetic construct
MPAAKRVKLDGGDKKYSIGLDIGTNSVGWAVITDEYKVPSKKFKVLGNTDRHSIKKNLIGALLFDSGETAEATRLKRTARRRYTRRKNRICYLQEIFSNEMAKVDDSFFHRLEESFLVEEDKKHERHPIFGNIVDEVAYHEKYPTIYHLRKKLVDSTDKADLRLIYLALAHMIKFRGHFLIEGDLNPDNSDVDKLFIQLVQTYNQLFEENPINASGVDAKAILSARLSKSRRLENLIAQLPGEKKNGLFGNLIALSLGLTPNFKSNFDLAEDAKLQLSKDTYDDDLDNLLAQIGDQYADLFLAAKNLSDAILLSDILRVNTEITKAPLSASMIKRYDEHHQDLTLLKALVRQQLPEKYKEIFFDQSKNGYAGYIDGGASQEEFYKFIKPILEKMDGTEELLVKLNREDLLRKQRTFDNGSIPHQIHLGELHAILRRQEDFYPFLKDNREKIEKILTFRIPYYVGPLARGNSRFAWMTRKSEETITPWNFEEVVDKGASAQSFIERMTNFDKNLPNEKVLPKHSLLYEYFTVYNELTKVKYVTEGMRKPAFLSGEQKKAIVDLLFKTNRKVTVKQLKEDYFKKIECFDSVEISGVEDRFNASLGTYHDLLKIIKDKDFLDNEENEDILEDIVLTLTLFEDREMIEERLKTYAHLFDDKVMKQLKRRRYTGWGRLSRKLINGIRDKQSGKTILDFLKSDGFANRNFMQLIHDDSLTFKEDIQKAQVSGQGDSLHEHIANLAGSPAIKKGILQTVKVVDELVKVMGRHKPENIVIEMARENQTTQKGQKNSRERMKRIEEGIKELGSQILKEHPVENTQLQNEKLYLYYLQNGRDMYVDQELDINRLSDYDVDHIVPQSFLKDDSIDNKVLTRSDKARGKSDNVPSEEVVKKMKNYWRQLLNAKLITQRKFDNLTKAERGGLSELDKAGFIKRQLVETRQITKHVAQILDSRMNTKYDENDKLIREVKVITLKSKLVSDFRKDFQFYKVREINNYHHAHDAYLNAVVGTALIKKYPKLESEFVYGDYKVYDVRKMIAKSEQEIGKATAKYFFYSNIMNFFKTEITLANGEIRKRPLIETNGETGEIVWDKGRDFATVRKVLSMPQVNIVKKTEVQTGGFSKESILPKRNSDKLIARKKDWDPKKYGGFDSPTVAYSVLVVAKVEKGKSKKLKSVKELLGITIMERSSFEKNPIDFLEAKGYKEVKKDLIIKLPKYSLFELENGRKRMLASAGELQKGNELALPSKYVNFLYLASHYEKLKGSPEDNEQKQLFVEQHKHYLDEIIEQISEFSKRVILADANLDKVLSAYNKHRDKPIREQAENIIHLFTLTNLGAPAAFKYFDTTIDRKRYTSTKEVLDATLIHQSITGLYETRIDLSQLGGDGGGSSEAAAKGGSGGTLQLEEEYRLFEPESTQKQEMDIWLKNFPQAWAETGGMGTAHCQAPVLIQLKATATPISIRQYPMPHEAYQGIKPHIRRMLDQGILKPCQSPWNTPLLPVKKPGTEDYRPVQDLREVNKRVEDIHPTVPNPYNLLSTLPPSHPWYTVLDLKDAFFCLRLHSESQLLFAFEWRDPEIGLSGQLTWTRLPQGFKNSPTLFNEALHSDLADFRVRYPALVLLQYVDDLLLAAATRTECLEGTKALLETLGNKGYRASAKKAQICLQEVTYLGYSLKDGQRWLTKARKEAILSIPVPKNSRQVREFLGKAGYCRLFIPGFAELAAPLYPLTRPGTLFQWGTEQQLAFEDIKKALLSSPALGLPDITKPFELFIDENSGFAKGVLVQKLGPWKRPVAYLSKKLDTVASGWPPCLRMVAAIAILVKDAGKLTLGQPLTILTSHPVEALVRQPPNKWLSNARMTHYQAMLLDAERVHFGPTVSLNPATLLPLPSGGNHHDCLQILAETHGTRPDLTDQPLPDADLTWYTDGSSFIRNGEREAGAAVTTESEVIWAAPLPPGTSAQRAELIALTQALKMAEGKKLTVYTDSRYAFATTHVHGEIYRRRGWLTSEGKEIKNKNEILALLEALFLPKRLSIIHCPGHQKGDSPQAKGNRLADDTAKKAATETHSSLTVLPAGKRTADGSEFEKRTADGSEFESPKKKAKVE

SEQ ID NO: 1266 - protein, 2095 aa, synthetic construct
MPAAKRVKLDGGDKKYSIGLDIGTNSVGWAVITDEYKVPSKKFKVLGNTDRHSIKKNLIGALLFDSGETAEATRLKRTARRRYTRRKNRICYLQEIFSNEMAKVDDSFFHRLEESFLVEEDKKHERHPIFGNIVDEVAYHEKYPTIYHLRKKLVDSTDKADLRLIYLALAHMIKFRGHFLIEGDLNPDNSDVDKLFIQLVQTYNQLFEENPINASGVDAKAILSARLSKSRRLENLIAQLPGEKKNGLFGNLIALSLGLTPNFKSNFDLAEDAKLQLSKDTYDDDLDNLLAQIGDQYADLFLAAKNLSDAILLSDILRVNTEITKAPLSASMIKRYDEHHQDLTLLKALVRQQLPEKYKEIFFDQSKNGYAGYIDGGASQEEFYKFIKPILEKMDGTEELLVKLNREDLLRKQRTFDNGSIPHQIHLGELHAILRRQEDFYPFLKDNREKIEKILTFRIPYYVGPLARGNSRFAWMTRKSEETITPWNFEEVVDKGASAQSFIERMTNFDKNLPNEKVLPKHSLLYEYFTVYNELTKVKYVTEGMRKPAFLSGEQKKAIVDLLFKTNRKVTVKQLKEDYFKKIECFDSVEISGVEDRFNASLGTYHDLLKIIKDKDFLDNEENEDILEDIVLTLTLFEDREMIEERLKTYAHLFDDKVMKQLKRRRYTGWGRLSRKLINGIRDKQSGKTILDFLKSDGFANRNFMQLIHDDSLTFKEDIQKAQVSGQGDSLHEHIANLAGSPAIKKGILQTVKVVDELVKVMGRHKPENIVIEMARENQTTQKGQKNSRERMKRIEEGIKELGSQILKEHPVENTQLQNEKLYLYYLQNGRDMYVDQELDINRLSDYDVDHIVPQSFLKDDSIDNKVLTRSDKARGKSDNVPSEEVVKKMKNYWRQLLNAKLITQRKFDNLTKAERGGLSELDKAGFIKRQLVETRQITKHVAQILDSRMNTKYDENDKLIREVKVITLKSKLVSDFRKDFQFYKVREINNYHHAHDAYLNAVVGTALIKKYPKLESEFVYGDYKVYDVRKMIAKSEQEIGKATAKYFFYSNIMNFFKTEITLANGEIRKRPLIETNGETGEIVWDKGRDFATVRKVLSMPQVNIVKKTEVQTGGFSKESILPKRNSDKLIARKKDWDPKKYGGFDSPTVAYSVLVVAKVEKGKSKKLKSVKELLGITIMERSSFEKNPIDFLEAKGYKEVKKDLIIKLPKYSLFELENGRKRMLASAGELQKGNELALPSKYVNFLYLASHYEKLKGSPEDNEQKQLFVEQHKHYLDEIIEQISEFSKRVILADANLDKVLSAYNKHRDKPIREQAENIIHLFTLTNLGAPAAFKYFDTTIDRKRYTSTKEVLDATLIHQSITGLYETRIDLSQLGGDGGGGSPAPEAAAKGGTLQLEEEYRLFEPESTQKQEMDIWLKNFPQAWAETGGMGTAHCQAPVLIQLKATATPISIRQYPMPHEAYQGIKPHIRRMLDQGILKPCQSPWNTPLLPVKKPGTEDYRPVQDLREVNKRVEDIHPTVPNPYNLLSTLPPSHPWYTVLDLKDAFFCLRLHSESQLLFAFEWRDPEIGLSGQLTWTRLPQGFKNSPTLFNEALHSDLADFRVRYPALVLLQYVDDLLLAAATRTECLEGTKALLETLGNKGYRASAKKAQICLQEVTYLGYSLKDGQRWLTKARKEAILSIPVPKNSRQVREFLGKAGYCRLFIPGFAELAAPLYPLTRPGTLFQWGTEQQLAFEDIKKALLSSPALGLPDITKPFELFIDENSGFAKGVLVQKLGPWKRPVAYLSKKLDTVASGWPPCLRMVAAIAILVKDAGKLTLGQPLTILTSHPVEALVRQPPNKWLSNARMTHYQAMLLDAERVHFGPTVSLNPATLLPLPSGGNHHDCLQILAETHGTRPDLTDQPLPDADLTWYTDGSSFIRNGEREAGAAVTTESEVIWAAPLPPGTSAQRAELIALTQALKMAEGKKLTVYTDSRYAFATTHVHGEIYRRRGWLTSEGKEIKNKNEILALLEALFLPKRLSIIHCPGHQKGDSPQAKGNRLADDTAKKAATETHSSLTVLPAGKRTADGSEFEKRTADGSEFESPKKKAKVE

SEQ ID NO: 1267 - protein, 2092 aa, synthetic construct
MPAAKRVKLDGGDKKYSIGLDIGTNSVGWAVITDEYKVPSKKFKVLGNTDRHSIKKNLIGALLFDSGETAEATRLKRTARRRYTRRKNRICYLQEIFSNEMAKVDDSFFHRLEESFLVEEDKKHERHPIFGNIVDEVAYHEKYPTIYHLRKKLVDSTDKADLRLIYLALAHMIKFRGHFLIEGDLNPDNSDVDKLFIQLVQTYNQLFEENPINASGVDAKAILSARLSKSRRLENLIAQLPGEKKNGLFGNLIALSLGLTPNFKSNFDLAEDAKLQLSKDTYDDDLDNLLAQIGDQYADLFLAAKNLSDAILLSDILRVNTEITKAPLSASMIKRYDEHHQDLTLLKALVRQQLPEKYKEIFFDQSKNGYAGYIDGGASQEEFYKFIKPILEKMDGTEELLVKLNREDLLRKQRTFDNGSIPHQIHLGELHAILRRQEDFYPFLKDNREKIEKILTFRIPYYVGPLARGNSRFAWMTRKSEETITPWNFEEVVDKGASAQSFIERMTNFDKNLPNEKVLPKHSLLYEYFTVYNELTKVKYVTEGMRKPAFLSGEQKKAIVDLLFKTNRKVTVKQLKEDYFKKIECFDSVEISGVEDRFNASLGTYHDLLKIIKDKDFLDNEENEDILEDIVLTLTLFEDREMIEERLKTYAHLFDDKVMKQLKRRRYTGWGRLSRKLINGIRDKQSGKTILDFLKSDGFANRNFMQLIHDDSLTFKEDIQKAQVSGQGDSLHEHIANLAGSPAIKKGILQTVKVVDELVKVMGRHKPENIVIEMARENQTTQKGQKNSRERMKRIEEGIKELGSQILKEHPVENTQLQNEKLYLYYLQNGRDMYVDQELDINRLSDYDVDHIVPQSFLKDDSIDNKVLTRSDKARGKSDNVPSEEVVKKMKNYWRQLLNAKLITQRKFDNLTKAERGGLSELDKAGFIKRQLVETRQITKHVAQILDSRMNTKYDENDKLIREVKVITLKSKLVSDFRKDFQFYKVREINNYHHAHDAYLNAVVGTALIKKYPKLESEFVYGDYKVYDVRKMIAKSEQEIGKATAKYFFYSNIMNFFKTEITLANGEIRKRPLIETNGETGEIVWDKGRDFATVRKVLSMPQVNIVKKTEVQTGGFSKESILPKRNSDKLIARKKDWDPKKYGGFDSPTVAYSVLVVAKVEKGKSKKLKSVKELLGITIMERSSFEKNPIDFLEAKGYKEVKKDLIIKLPKYSLFELENGRKRMLASAGELQKGNELALPSKYVNFLYLASHYEKLKGSPEDNEQKQLFVEQHKHYLDEIIEQISEFSKRVILADANLDKVLSAYNKHRDKPIREQAENIIHLFTLTNLGAPAAFKYFDTTIDRKRYTSTKEVLDATLIHQSITGLYETRIDLSQLGGDGGEAAAKPAPGGTLQLEEEYRLFEPESTQKQEMDIWLKNFPQAWAETGGMGTAHCQAPVLIQLKATATPISIRQYPMPHEAYQGIKPHIRRMLDQGILKPCQSPWNTPLLPVKKPGTEDYRPVQDLREVNKRVEDIHPTVPNPYNLLSTLPPSHPWYTVLDLKDAFFCLRLHSESQLLFAFEWRDPEIGLSGQLTWTRLPQGFKNSPTLFNEALHSDLADFRVRYPALVLLQYVDDLLLAAATRTECLEGTKALLETLGNKGYRASAKKAQICLQEVTYLGYSLKDGQRWLTKARKEAILSIPVPKNSRQVREFLGKAGYCRLFIPGFAELAAPLYPLTRPGTLFQWGTEQQLAFEDIKKALLSSPALGLPDITKPFELFIDENSGFAKGVLVQKLGPWKRPVAYLSKKLDTVASGWPPCLRMVAAIAILVKDAGKLTLGQPLTILTSHPVEALVRQPPNKWLSNARMTHYQAMLLDAERVHFGPTVSLNPATLLPLPSGGNHHDCLQILAETHGTRPDLTDQPLPDADLTWYTDGSSFIRNGEREAGAAVTTESEVIWAAPLPPGTSAQRAELIALTQALKMAEGKKLTVYTDSRYAFATTHVHGEIYRRRGWLTSEGKEIKNKNEILALLEALFLPKRLSIIHCPGHQKGDSPQAKGNRLADDTAKKAATETHSSLTVLPAGKRTADGSEFEKRTADGSEFESPKKKAKVE

SEQ ID NO: 1268 - protein, 2093 aa, synthetic construct
MPAAKRVKLDGGDKKYSIGLDIGTNSVGWAVITDEYKVPSKKFKVLGNTDRHSIKKNLIGALLFDSGETAEATRLKRTARRRYTRRKNRICYLQEIFSNEMAKVDDSFFHRLEESFLVEEDKKHERHPIFGNIVDEVAYHEKYPTIYHLRKKLVDSTDKADLRLIYLALAHMIKFRGHFLIEGDLNPDNSDVDKLFIQLVQTYNQLFEENPINASGVDAKAILSARLSKSRRLENLIAQLPGEKKNGLFGNLIALSLGLTPNFKSNFDLAEDAKLQLSKDTYDDDLDNLLAQIGDQYADLFLAAKNLSDAILLSDILRVNTEITKAPLSASMIKRYDEHHQDLTLLKALVRQQLPEKYKEIFFDQSKNGYAGYIDGGASQEEFYKFIKPILEKMDGTEELLVKLNREDLLRKQRTFDNGSIPHQIHLGELHAILRRQEDFYPFLKDNREKIEKILTFRIPYYVGPLARGNSRFAWMTRKSEETITPWNFEEVVDKGASAQSFIERMTNFDKNLPNEKVLPKHSLLYEYFTVYNELTKVKYVTEGMRKPAFLSGEQKKAIVDLLFKTNRKVTVKQLKEDYFKKIECFDSVEISGVEDRFNASLGTYHDLLKIIKDKDFLDNEENEDILEDIVLTLTLFEDREMIEERLKTYAHLFDDKVMKQLKRRRYTGWGRLSRKLINGIRDKQSGKTILDFLKSDGFANRNFMQLIHDDSLTFKEDIQKAQVSGQGDSLHEHIANLAGSPAIKKGILQTVKVVDELVKVMGRHKPENIVIEMARENQTTQKGQKNSRERMKRIEEGIKELGSQILKEHPVENTQLQNEKLYLYYLQNGRDMYVDQELDINRLSDYDVDHIVPQSFLKDDSIDNKVLTRSDKARGKSDNVPSEEVVKKMKNYWRQLLNAKLITQRKFDNLTKAERGGLSELDKAGFIKRQLVETRQITKHVAQILDSRMNTKYDENDKLIREVKVITLKSKLVSDFRKDFQFYKVREINNYHHAHDAYLNAVVGTALIKKYPKLESEFVYGDYKVYDVRKMIAKSEQEIGKATAKYFFYSNIMNFFKTEITLANGEIRKRPLIETNGETGEIVWDKGRDFATVRKVLSMPQVNIVKKTEVQTGGFSKESILPKRNSDKLIARKKDWDPKKYGGFDSPTVAYSVLVVAKVEKGKSKKLKSVKELLGITIMERSSFEKNPIDFLEAKGYKEVKKDLIIKLPKYSLFELENGRKRMLASAGELQKGNELALPSKYVNFLYLASHYEKLKGSPEDNEQKQLFVEQHKHYLDEIIEQISEFSKRVILADANLDKVLSAYNKHRDKPIREQAENIIHLFTLTNLGAPAAFKYFDTTIDRKRYTSTKEVLDATLIHQSITGLYETRIDLSQLGGDGGGGGPAPGGSGGTLQLEEEYRLFEPESTQKQEMDIWLKNFPQAWAETGGMGTAHCQAPVLIQLKATATPISIRQYPMPHEAYQGIKPHIRRMLDQGILKPCQSPWNTPLLPVKKPGTEDYRPVQDLREVNKRVEDIHPTVPNPYNLLSTLPPSHPWYTVLDLKDAFFCLRLHSESQLLFAFEWRDPEIGLSGQLTWTRLPQGFKNSPTLFNEALHSDLADFRVRYPALVLLQYVDDLLLAAATRTECLEGTKALLETLGNKGYRASAKKAQICLQEVTYLGYSLKDGQRWLTKARKEAILSIPVPKNSRQVREFLGKAGYCRLFIPGFAELAAPLYPLTRPGTLFQWGTEQQLAFEDIKKALLSSPALGLPDITKPFELFIDENSGFAKGVLVQKLGPWKRPVAYLSKKLDTVASGWPPCLRMVAAIAILVKDAGKLTLGQPLTILTSHPVEALVRQPPNKWLSNARMTHYQAMLLDAERVHFGPTVSLNPATLLPLPSGGNHHDCLQILAETHGTRPDLTDQPLPDADLTWYTDGSSFIRNGEREAGAAVTTESEVIWAAPLPPGTSAQRAELIALTQALKMAEGKKLTVYTDSRYAFATTHVHGEIYRRRGWLTSEGKEIKNKNEILALLEALFLPKRLSIIHCPGHQKGDSPQAKGNRLADDTAKKAATETHSSLTVLPAGKRTADGSEFEKRTADGSEFESPKKKAKVE

SEQ ID NO: 1269 - protein, 2095 aa, synthetic construct
MPAAKRVKLDGGDKKYSIGLDIGTNSVGWAVITDEYKVPSKKFKVLGNTDRHSIKKNLIGALLFDSGETAEATRLKRTARRRYTRRKNRICYLQEIFSNEMAKVDDSFFHRLEESFLVEEDKKHERHPIFGNIVDEVAYHEKYPTIYHLRKKLVDSTDKADLRLIYLALAHMIKFRGHFLIEGDLNPDNSDVDKLFIQLVQTYNQLFEENPINASGVDAKAILSARLSKSRRLENLIAQLPGEKKNGLFGNLIALSLGLTPNFKSNFDLAEDAKLQLSKDTYDDDLDNLLAQIGDQYADLFLAAKNLSDAILLSDILRVNTEITKAPLSASMIKRYDEHHQDLTLLKALVRQQLPEKYKEIFFDQSKNGYAGYIDGGASQEEFYKFIKPILEKMDGTEELLVKLNREDLLRKQRTFDNGSIPHQIHLGELHAILRRQEDFYPFLKDNREKIEKILTFRIPYYVGPLARGNSRFAWMTRKSEETITPWNFEEVVDKGASAQSFIERMTNFDKNLPNEKVLPKHSLLYEYFTVYNELTKVKYVTEGMRKPAFLSGEQKKAIVDLLFKTNRKVTVKQLKEDYFKKIECFDSVEISGVEDRFNASLGTYHDLLKIIKDKDFLDNEENEDILEDIVLTLTLFEDREMIEERLKTYAHLFDDKVMKQLKRRRYTGWGRLSRKLINGIRDKQSGKTILDFLKSDGFANRNFMQLIHDDSLTFKEDIQKAQVSGQGDSLHEHIANLAGSPAIKKGILQTVKVVDELVKVMGRHKPENIVIEMARENQTTQKGQKNSRERMKRIEEGIKELGSQILKEHPVENTQLQNEKLYLYYLQNGRDMYVDQELDINRLSDYDVDHIVPQSFLKDDSIDNKVLTRSDKARGKSDNVPSEEVVKKMKNYWRQLLNAKLITQRKFDNLTKAERGGLSELDKAGFIKRQLVETRQITKHVAQILDSRMNTKYDENDKLIREVKVITLKSKLVSDFRKDFQFYKVREINNYHHAHDAYLNAVVGTALIKKYPKLESEFVYGDYKVYDVRKMIAKSEQEIGKATAKYFFYSNIMNFFKTEITLANGEIRKRPLIETNGETGEIVWDKGRDFATVRKVLSMPQVNIVKKTEVQTGGFSKESILPKRNSDKLIARKKDWDPKKYGGFDSPTVAYSVLVVAKVEKGKSKKLKSVKELLGITIMERSSFEKNPIDFLEAKGYKEVKKDLIIKLPKYSLFELENGRKRMLASAGELQKGNELALPSKYVNFLYLASHYEKLKGSPEDNEQKQLFVEQHKHYLDEIIEQISEFSKRVILADANLDKVLSAYNKHRDKPIREQAENIIHLFTLTNLGAPAAFKYFDTTIDRKRYTSTKEVLDATLIHQSITGLYETRIDLSQLGGDGGGGSGGGEAAAKGGTLQLEEEYRLFEPESTQKQEMDIWLKNFPQAWAETGGMGTAHCQAPVLIQLKATATPISIRQYPMPHEAYQGIKPHIRRMLDQGILKPCQSPWNTPLLPVKKPGTEDYRPVQDLREVNKRVEDIHPTVPNPYNLLSTLPPSHPWYTVLDLKDAFFCLRLHSESQLLFAFEWRDPEIGLSGQLTWTRLPQGFKNSPTLFNEALHSDLADFRVRYPALVLLQYVDDLLLAAATRTECLEGTKALLETLGNKGYRASAKKAQICLQEVTYLGYSLKDGQRWLTKARKEAILSIPVPKNSRQVREFLGKAGYCRLFIPGFAELAAPLYPLTRPGTLFQWGTEQQLAFEDIKKALLSSPALGLPDITKPFELFIDENSGFAKGVLVQKLGPWKRPVAYLSKKLDTVASGWPPCLRMVAAIAILVKDAGKLTLGQPLTILTSHPVEALVRQPPNKWLSNARMTHYQAMLLDAERVHFGPTVSLNPATLLPLPSGGNHHDCLQILAETHGTRPDLTDQPLPDADLTWYTDGSSFIRNGEREAGAAVTTESEVIWAAPLPPGTSAQRAELIALTQALKMAEGKKLTVYTDSRYAFATTHVHGEIYRRRGWLTSEGKEIKNKNEILALLEALFLPKRLSIIHCPGHQKGDSPQAKGNRLADDTAKKAATETHSSLTVLPAGKRTADGSEFEKRTADGSEFESPKKKAKVE

SEQ ID NO: 1270 - protein, 2093 aa, synthetic construct
MPAAKRVKLDGGDKKYSIGLDIGTNSVGWAVITDEYKVPSKKFKVLGNTDRHSIKKNLIGALLFDSGETAEATRLKRTARRRYTRRKNRICYLQEIFSNEMAKVDDSFFHRLEESFLVEEDKKHERHPIFGNIVDEVAYHEKYPTIYHLRKKLVDSTDKADLRLIYLALAHMIKFRGHFLIEGDLNPDNSDVDKLFIQLVQTYNQLFEENPINASGVDAKAILSARLSKSRRLENLIAQLPGEKKNGLFGNLIALSLGLTPNFKSNFDLAEDAKLQLSKDTYDDDLDNLLAQIGDQYADLFLAAKNLSDAILLSDILRVNTEITKAPLSASMIKRYDEHHQDLTLLKALVRQQLPEKYKEIFFDQSKNGYAGYIDGGASQEEFYKFIKPILEKMDGTEELLVKLNREDLLRKQRTFDNGSIPHQIHLGELHAILRRQEDFYPFLKDNREKIEKILTFRIPYYVGPLARGNSRFAWMTRKSEETITPWNFEEVVDKGASAQSFIERMTNFDKNLPNEKVLPKHSLLYEYFTVYNELTKVKYVTEGMRKPAFLSGEQKKAIVDLLFKTNRKVTVKQLKEDYFKKIECFDSVEISGVEDRFNASLGTYHDLLKIIKDKDFLDNEENEDILEDIVLTLTLFEDREMIEERLKTYAHLFDDKVMKQLKRRRYTGWGRLSRKLINGIRDKQSGKTILDFLKSDGFANRNFMQLIHDDSLTFKEDIQKAQVSGQGDSLHEHIANLAGSPAIKKGILQTVKVVDELVKVMGRHKPENIVIEMARENQTTQKGQKNSRERMKRIEEGIKELGSQILKEHPVENTQLQNEKLYLYYLQNGRDMYVDQELDINRLSDYDVDHIVPQSFLKDDSIDNKVLTRSDKARGKSDNVPSEEVVKKMKNYWRQLLNAKLITQRKFDNLTKAERGGLSELDKAGFIKRQLVETRQITKHVAQILDSRMNTKYDENDKLIREVKVITLKSKLVSDFRKDFQFYKVREINNYHHAHDAYLNAVVGTALIKKYPKLESEFVYGDYKVYDVRKMIAKSEQEIGKATAKYFFYSNIMNFFKTEITLANGEIRKRPLIETNGETGEIVWDKGRDFATVRKVLSMPQVNIVKKTEVQTGGFSKESILPKRNSDKLIARKKDWDPKKYGGFDSPTVAYSVLVVAKVEKGKSKKLKSVKELLGITIMERSSFEKNPIDFLEAKGYKEVKKDLIIKLPKYSLFELENGRKRMLASAGELQKGNELALPSKYVNFLYLASHYEKLKGSPEDNEQKQLFVEQHKHYLDEIIEQISEFSKRVILADANLDKVLSAYNKHRDKPIREQAENIIHLFTLTNLGAPAAFKYFDTTIDRKRYTSTKEVLDATLIHQSITGLYETRIDLSQLGGDGGGGSGSSGGGGGTLQLEEEYRLFEPESTQKQEMDIWLKNFPQAWAETGGMGTAHCQAPVLIQLKATATPISIRQYPMPHEAYQGIKPHIRRMLDQGILKPCQSPWNTPLLPVKKPGTEDYRPVQDLREVNKRVEDIHPTVPNPYNLLSTLPPSHPWYTVLDLKDAFFCLRLHSESQLLFAFEWRDPEIGLSGQLTWTRLPQGFKNSPTLFNEALHSDLADFRVRYPALVLLQYVDDLLLAAATRTECLEGTKALLETLGNKGYRASAKKAQICLQEVTYLGYSLKDGQRWLTKARKEAILSIPVPKNSRQVREFLGKAGYCRLFIPGFAELAAPLYPLTRPGTLFQWGTEQQLAFEDIKKALLSSPALGLPDITKPFELFIDENSGFAKGVLVQKLGPWKRPVAYLSKKLDTVASGWPPCLRMVAAIAILVKDAGKLTLGQPLTILTSHPVEALVRQPPNKWLSNARMTHYQAMLLDAERVHFGPTVSLNPATLLPLPSGGNHHDCLQILAETHGTRPDLTDQPLPDADLTWYTDGSSFIRNGEREAGAAVTTESEVIWAAPLPPGTSAQRAELIALTQALKMAEGKKLTVYTDSRYAFATTHVHGEIYRRRGWLTSEGKEIKNKNEILALLEALFLPKRLSIIHCPGHQKGDSPQAKGNRLADDTAKKAATETHSSLTVLPAGKRTADGSEFEKRTADGSEFESPKKKAKVE

SEQ ID NO: 1271 - protein, 2092 aa, synthetic construct
MPAAKRVKLDGGDKKYSIGLDIGTNSVGWAVITDEYKVPSKKFKVLGNTDRHSIKKNLIGALLFDSGETAEATRLKRTARRRYTRRKNRICYLQEIFSNEMAKVDDSFFHRLEESFLVEEDKKHERHPIFGNIVDEVAYHEKYPTIYHLRKKLVDSTDKADLRLIYLALAHMIKFRGHFLIEGDLNPDNSDVDKLFIQLVQTYNQLFEENPINASGVDAKAILSARLSKSRRLENLIAQLPGEKKNGLFGNLIALSLGLTPNFKSNFDLAEDAKLQLSKDTYDDDLDNLLAQIGDQYADLFLAAKNLSDAILLSDILRVNTEITKAPLSASMIKRYDEHHQDLTLLKALVRQQLPEKYKEIFFDQSKNGYAGYIDGGASQEEFYKFIKPILEKMDGTEELLVKLNREDLLRKQRTFDNGSIPHQIHLGELHAILRRQEDFYPFLKDNREKIEKILTFRIPYYVGPLARGNSRFAWMTRKSEETITPWNFEEVVDKGASAQSFIERMTNFDKNLPNEKVLPKHSLLYEYFTVYNELTKVKYVTEGMRKPAFLSGEQKKAIVDLLFKTNRKVTVKQLKEDYFKKIECFDSVEISGVEDRFNASLGTYHDLLKIIKDKDFLDNEENEDILEDIVLTLTLFEDREMIEERLKTYAHLFDDKVMKQLKRRRYTGWGRLSRKLINGIRDKQSGKTILDFLKSDGFANRNFMQLIHDDSLTFKEDIQKAQVSGQGDSLHEHIANLAGSPAIKKGILQTVKVVDELVKVMGRHKPENIVIEMARENQTTQKGQKNSRERMKRIEEGIKELGSQILKEHPVENTQLQNEKLYLYYLQNGRDMYVDQELDINRLSDYDVDHIVPQSFLKDDSIDNKVLTRSDKARGKSDNVPSEEVVKKMKNYWRQLLNAKLITQRKFDNLTKAERGGLSELDKAGFIKRQLVETRQITKHVAQILDSRMNTKYDENDKLIREVKVITLKSKLVSDFRKDFQFYKVREINNYHHAHDAYLNAVVGTALIKKYPKLESEFVYGDYKVYDVRKMIAKSEQEIGKATAKYFFYSNIMNFFKTEITLANGEIRKRPLIETNGETGEIVWDKGRDFATVRKVLSMPQVNIVKKTEVQTGGFSKESILPKRNSDKLIARKKDWDPKKYGGFDSPTVAYSVLVVAKVEKGKSKKLKSVKELLGITIMERSSFEKNPIDFLEAKGYKEVKKDLIIKLPKYSLFELENGRKRMLASAGELQKGNELALPSKYVNFLYLASHYEKLKGSPEDNEQKQLFVEQHKHYLDEIIEQISEFSKRVILADANLDKVLSAYNKHRDKPIREQAENIIHLFTLTNLGAPAAFKYFDTTIDRKRYTSTKEVLDATLIHQSITGLYETRIDLSQLGGDGGEAAAKGGGGGTLQLEEEYRLFEPESTQKQEMDIWLKNFPQAWAETGGMGTAHCQAPVLIQLKATATPISIRQYPMPHEAYQGIKPHIRRMLDQGILKPCQSPWNTPLLPVKKPGTEDYRPVQDLREVNKRVEDIHPTVPNPYNLLSTLPPSHPWYTVLDLKDAFFCLRLHSESQLLFAFEWRDPEIGLSGQLTWTRLPQGFKNSPTLFNEALHSDLADFRVRYPALVLLQYVDDLLLAAATRTECLEGTKALLETLGNKGYRASAKKAQICLQEVTYLGYSLKDGQRWLTKARKEAILSIPVPKNSRQVREFLGKAGYCRLFIPGFAELAAPLYPLTRPGTLFQWGTEQQLAFEDIKKALLSSPALGLPDITKPFELFIDENSGFAKGVLVQKLGPWKRPVAYLSKKLDTVASGWPPCLRMVAAIAILVKDAGKLTLGQPLTILTSHPVEALVRQPPNKWLSNARMTHYQAMLLDAERVHFGPTVSLNPATLLPLPSGGNHHDCLQILAETHGTRPDLTDQPLPDADLTWYTDGSSFIRNGEREAGAAVTTESEVIWAAPLPPGTSAQRAELIALTQALKMAEGKKLTVYTDSRYAFATTHVHGEIYRRRGWLTSEGKEIKNKNEILALLEALFLPKRLSIIHCPGHQKGDSPQAKGNRLADDTAKKAATETHSSLTVLPAGKRTADGSEFEKRTADGSEFESPKKKAKVE

SEQ ID NO: 1272 - protein, 2090 aa, synthetic construct
MPAAKRVKLDGGDKKYSIGLDIGTNSVGWAVITDEYKVPSKKFKVLGNTDRHSIKKNLIGALLFDSGETAEATRLKRTARRRYTRRKNRICYLQEIFSNEMAKVDDSFFHRLEESFLVEEDKKHERHPIFGNIVDEVAYHEKYPTIYHLRKKLVDSTDKADLRLIYLALAHMIKFRGHFLIEGDLNPDNSDVDKLFIQLVQTYNQLFEENPINASGVDAKAILSARLSKSRRLENLIAQLPGEKKNGLFGNLIALSLGLTPNFKSNFDLAEDAKLQLSKDTYDDDLDNLLAQIGDQYADLFLAAKNLSDAILLSDILRVNTEITKAPLSASMIKRYDEHHQDLTLLKALVRQQLPEKYKEIFFDQSKNGYAGYIDGGASQEEFYKFIKPILEKMDGTEELLVKLNREDLLRKQRTFDNGSIPHQIHLGELHAILRRQEDFYPFLKDNREKIEKILTFRIPYYVGPLARGNSRFAWMTRKSEETITPWNFEEVVDKGASAQSFIERMTNFDKNLPNEKVLPKHSLLYEYFTVYNELTKVKYVTEGMRKPAFLSGEQKKAIVDLLFKTNRKVTVKQLKEDYFKKIECFDSVEISGVEDRFNASLGTYHDLLKIIKDKDFLDNEENEDILEDIVLTLTLFEDREMIEERLKTYAHLFDDKVMKQLKRRRYTGWGRLSRKLINGIRDKQSGKTILDFLKSDGFANRNFMQLIHDDSLTFKEDIQKAQVSGQGDSLHEHIANLAGSPAIKKGILQTVKVVDELVKVMGRHKPENIVIEMARENQTTQKGQKNSRERMKRIEEGIKELGSQILKEHPVENTQLQNEKLYLYYLQNGRDMYVDQELDINRLSDYDVDHIVPQSFLKDDSIDNKVLTRSDKARGKSDNVPSEEVVKKMKNYWRQLLNAKLITQRKFDNLTKAERGGLSELDKAGFIKRQLVETRQITKHVAQILDSRMNTKYDENDKLIREVKVITLKSKLVSDFRKDFQFYKVREINNYHHAHDAYLNAVVGTALIKKYPKLESEFVYGDYKVYDVRKMIAKSEQEIGKATAKYFFYSNIMNFFKTEITLANGEIRKRPLIETNGETGEIVWDKGRDFATVRKVLSMPQVNIVKKTEVQTGGFSKESILPKRNSDKLIARKKDWDPKKYGGFDSPTVAYSVLVVAKVEKGKSKKLKSVKELLGITIMERSSFEKNPIDFLEAKGYKEVKKDLIIKLPKYSLFELENGRKRMLASAGELQKGNELALPSKYVNFLYLASHYEKLKGSPEDNEQKQLFVEQHKHYLDEIIEQISEFSKRVILADANLDKVLSAYNKHRDKPIREQAENIIHLFTLTNLGAPAAFKYFDTTIDRKRYTSTKEVLDATLIHQSITGLYETRIDLSQLGGDGGGGGGSSGGTLQLEEEYRLFEPESTQKQEMDIWLKNFPQAWAETGGMGTAHCQAPVLIQLKATATPISIRQYPMPHEAYQGIKPHIRRMLDQGILKPCQSPWNTPLLPVKKPGTEDYRPVQDLREVNKRVEDIHPTVPNPYNLLSTLPPSHPWYTVLDLKDAFFCLRLHSESQLLFAFEWRDPEIGLSGQLTWTRLPQGFKNSPTLFNEALHSDLADFRVRYPALVLLQYVDDLLLAAATRTECLEGTKALLETLGNKGYRASAKKAQICLQEVTYLGYSLKDGQRWLTKARKEAILSIPVPKNSRQVREFLGKAGYCRLFIPGFAELAAPLYPLTRPGTLFQWGTEQQLAFEDIKKALLSSPALGLPDITKPFELFIDENSGFAKGVLVQKLGPWKRPVAYLSKKLDTVASGWPPCLRMVAAIAILVKDAGKLTLGQPLTILTSHPVEALVRQPPNKWLSNARMTHYQAMLLDAERVHFGPTVSLNPATLLPLPSGGNHHDCLQILAETHGTRPDLTDQPLPDADLTWYTDGSSFIRNGEREAGAAVTTESEVIWAAPLPPGTSAQRAELIALTQALKMAEGKKLTVYTDSRYAFATTHVHGEIYRRRGWLTSEGKEIKNKNEILALLEALFLPKRLSIIHCPGHQKGDSPQAKGNRLADDTAKKAATETHSSLTVLPAGKRTADGSEFEKRTADGSEFESPKKKAKVE

SEQ ID NO: 1273 - protein, 2089 aa, synthetic construct
MPAAKRVKLDGGDKKYSIGLDIGTNSVGWAVITDEYKVPSKKFKVLGNTDRHSIKKNLIGALLFDSGETAEATRLKRTARRRYTRRKNRICYLQEIFSNEMAKVDDSFFHRLEESFLVEEDKKHERHPIFGNIVDEVAYHEKYPTIYHLRKKLVDSTDKADLRLIYLALAHMIKFRGHFLIEGDLNPDNSDVDKLFIQLVQTYNQLFEENPINASGVDAKAILSARLSKSRRLENLIAQLPGEKKNGLFGNLIALSLGLTPNFKSNFDLAEDAKLQLSKDTYDDDLDNLLAQIGDQYADLFLAAKNLSDAILLSDILRVNTEITKAPLSASMIKRYDEHHQDLTLLKALVRQQLPEKYKEIFFDQSKNGYAGYIDGGASQEEFYKFIKPILEKMDGTEELLVKLNREDLLRKQRTFDNGSIPHQIHLGELHAILRRQEDFYPFLKDNREKIEKILTFRIPYYVGPLARGNSRFAWMTRKSEETITPWNFEEVVDKGASAQSFIERMTNFDKNLPNEKVLPKHSLLYEYFTVYNELTKVKYVTEGMRKPAFLSGEQKKAIVDLLFKTNRKVTVKQLKEDYFKKIECFDSVEISGVEDRFNASLGTYHDLLKIIKDKDFLDNEENEDILEDIVLTLTLFEDREMIEERLKTYAHLFDDKVMKQLKRRRYTGWGRLSRKLINGIRDKQSGKTILDFLKSDGFANRNFMQLIHDDSLTFKEDIQKAQVSGQGDSLHEHIANLAGSPAIKKGILQTVKVVDELVKVMGRHKPENIVIEMARENQTTQKGQKNSRERMKRIEEGIKELGSQILKEHPVENTQLQNEKLYLYYLQNGRDMYVDQELDINRLSDYDVDHIVPQSFLKDDSIDNKVLTRSDKARGKSDNVPSEEVVKKMKNYWRQLLNAKLITQRKFDNLTKAERGGLSELDKAGFIKRQLVETRQITKHVAQILDSRMNTKYDENDKLIREVKVITLKSKLVSDFRKDFQFYKVREINNYHHAHDAYLNAVVGTALIKKYPKLESEFVYGDYKVYDVRKMIAKSEQEIGKATAKYFFYSNIMNFFKTEITLANGEIRKRPLIETNGETGEIVWDKGRDFATVRKVLSMPQVNIVKKTEVQTGGFSKESILPKRNSDKLIARKKDWDPKKYGGFDSPTVAYSVLVVAKVEKGKSKKLKSVKELLGITIMERSSFEKNPIDFLEAKGYKEVKKDLIIKLPKYSLFELENGRKRMLASAGELQKGNELALPSKYVNFLYLASHYEKLKGSPEDNEQKQLFVEQHKHYLDEIIEQISEFSKRVILADANLDKVLSAYNKHRDKPIREQAENIIHLFTLTNLGAPAAFKYFDTTIDRKRYTSTKEVLDATLIHQSITGLYETRIDLSQLGGDGGGGGGSGGTLQLEEEYRLFEPESTQKQEMDIWLKNFPQAWAETGGMGTAHCQAPVLIQLKATATPISIRQYPMPHEAYQGIKPHIRRMLDQGILKPCQSPWNTPLLPVKKPGTEDYRPVQDLREVNKRVEDIHPTVPNPYNLLSTLPPSHPWYTVLDLKDAFFCLRLHSESQLLFAFEWRDPEIGLSGQLTWTRLPQGFKNSPTLFNEALHSDLADFRVRYPALVLLQYVDDLLLAAATRTECLEGTKALLETLGNKGYRASAKKAQICLQEVTYLGYSLKDGQRWLTKARKEAILSIPVPKNSRQVREFLGKAGYCRLFIPGFAELAAPLYPLTRPGTLFQWGTEQQLAFEDIKKALLSSPALGLPDITKPFELFIDENSGFAKGVLVQKLGPWKRPVAYLSKKLDTVASGWPPCLRMVAAIAILVKDAGKLTLGQPLTILTSHPVEALVRQPPNKWLSNARMTHYQAMLLDAERVHFGPTVSLNPATLLPLPSGGNHHDCLQILAETHGTRPDLTDQPLPDADLTWYTDGSSFIRNGEREAGAAVTTESEVIWAAPLPPGTSAQRAELIALTQALKMAEGKKLTVYTDSRYAFATTHVHGEIYRRRGWLTSEGKEIKNKNEILALLEALFLPKRLSIIHCPGHQKGDSPQAKGNRLADDTAKKAATETHSSLTVLPAGKRTADGSEFEKRTADGSEFESPKKKAKVE

SEQ ID NO: 1274 - protein, 2099 aa, synthetic construct
MPAAKRVKLDGGDKKYSIGLDIGTNSVGWAVITDEYKVPSKKFKVLGNTDRHSIKKNLIGALLFDSGETAEATRLKRTARRRYTRRKNRICYLQEIFSNEMAKVDDSFFHRLEESFLVEEDKKHERHPIFGNIVDEVAYHEKYPTIYHLRKKLVDSTDKADLRLIYLALAHMIKFRGHFLIEGDLNPDNSDVDKLFIQLVQTYNQLFEENPINASGVDAKAILSARLSKSRRLENLIAQLPGEKKNGLFGNLIALSLGLTPNFKSNFDLAEDAKLQLSKDTYDDDLDNLLAQIGDQYADLFLAAKNLSDAILLSDILRVNTEITKAPLSASMIKRYDEHHQDLTLLKALVRQQLPEKYKEIFFDQSKNGYAGYIDGGASQEEFYKFIKPILEKMDGTEELLVKLNREDLLRKQRTFDNGSIPHQIHLGELHAILRRQEDFYPFLKDNREKIEKILTFRIPYYVGPLARGNSRFAWMTRKSEETITPWNFEEVVDKGASAQSFIERMTNFDKNLPNEKVLPKHSLLYEYFTVYNELTKVKYVTEGMRKPAFLSGEQKKAIVDLLFKTNRKVTVKQLKEDYFKKIECFDSVEISGVEDRFNASLGTYHDLLKIIKDKDFLDNEENEDILEDIVLTLTLFEDREMIEERLKTYAHLFDDKVMKQLKRRRYTGWGRLSRKLINGIRDKQSGKTILDFLKSDGFANRNFMQLIHDDSLTFKEDIQKAQVSGQGDSLHEHIANLAGSPAIKKGILQTVKVVDELVKVMGRHKPENIVIEMARENQTTQKGQKNSRERMKRIEEGIKELGSQILKEHPVENTQLQNEKLYLYYLQNGRDMYVDQELDINRLSDYDVDHIVPQSFLKDDSIDNKVLTRSDKARGKSDNVPSEEVVKKMKNYWRQLLNAKLITQRKFDNLTKAERGGLSELDKAGFIKRQLVETRQITKHVAQILDSRMNTKYDENDKLIREVKVITLKSKLVSDFRKDFQFYKVREINNYHHAHDAYLNAVVGTALIKKYPKLESEFVYGDYKVYDVRKMIAKSEQEIGKATAKYFFYSNIMNFFKTEITLANGEIRKRPLIETNGETGEIVWDKGRDFATVRKVLSMPQVNIVKKTEVQTGGFSKESILPKRNSDKLIARKKDWDPKKYGGFDSPTVAYSVLVVAKVEKGKSKKLKSVKELLGITIMERSSFEKNPIDFLEAKGYKEVKKDLIIKLPKYSLFELENGRKRMLASAGELQKGNELALPSKYVNFLYLASHYEKLKGSPEDNEQKQLFVEQHKHYLDEIIEQISEFSKRVILADANLDKVLSAYNKHRDKPIREQAENIIHLFTLTNLGAPAAFKYFDTTIDRKRYTSTKEVLDATLIHQSITGLYETRIDLSQLGGDGGGSSGSSGSSGSSGSSGGTLQLEEEYRLFEPESTQKQEMDIWLKNFPQAWAETGGMGTAHCQAPVLIQLKATATPISIRQYPMPHEAYQGIKPHIRRMLDQGILKPCQSPWNTPLLPVKKPGTEDYRPVQDLREVNKRVEDIHPTVPNPYNLLSTLPPSHPWYTVLDLKDAFFCLRLHSESQLLFAFEWRDPEIGLSGQLTWTRLPQGFKNSPTLFNEALHSDLADFRVRYPALVLLQYVDDLLLAAATRTECLEGTKALLETLGNKGYRASAKKAQICLQEVTYLGYSLKDGQRWLTKARKEAILSIPVPKNSRQVREFLGKAGYCRLFIPGFAELAAPLYPLTRPGTLFQWGTEQQLAFEDIKKALLSSPALGLPDITKPFELFIDENSGFAKGVLVQKLGPWKRPVAYLSKKLDTVASGWPPCLRMVAAIAILVKDAGKLTLGQPLTILTSHPVEALVRQPPNKWLSNARMTHYQAMLLDAERVHFGPTVSLNPATLLPLPSGGNHHDCLQILAETHGTRPDLTDQPLPDADLTWYTDGSSFIRNGEREAGAAVTTESEVIWAAPLPPGTSAQRAELIALTQALKMAEGKKLTVYTDSRYAFATTHVHGEIYRRRGWLTSEGKEIKNKNEILALLEALFLPKRLSIIHCPGHQKGDSPQAKGNRLADDTAKKAATETHSSLTVLPAGKRTADGSEFEKRTADGSEFESPKKKAKVE

SEQ ID NO: 1275 - protein, 2093 aa, synthetic construct
MPAAKRVKLDGGDKKYSIGLDIGTNSVGWAVITDEYKVPSKKFKVLGNTDRHSIKKNLIGALLFDSGETAEATRLKRTARRRYTRRKNRICYLQEIFSNEMAKVDDSFFHRLEESFLVEEDKKHERHPIFGNIVDEVAYHEKYPTIYHLRKKLVDSTDKADLRLIYLALAHMIKFRGHFLIEGDLNPDNSDVDKLFIQLVQTYNQLFEENPINASGVDAKAILSARLSKSRRLENLIAQLPGEKKNGLFGNLIALSLGLTPNFKSNFDLAEDAKLQLSKDTYDDDLDNLLAQIGDQYADLFLAAKNLSDAILLSDILRVNTEITKAPLSASMIKRYDEHHQDLTLLKALVRQQLPEKYKEIFFDQSKNGYAGYIDGGASQEEFYKFIKPILEKMDGTEELLVKLNREDLLRKQRTFDNGSIPHQIHLGELHAILRRQEDFYPFLKDNREKIEKILTFRIPYYVGPLARGNSRFAWMTRKSEETITPWNFEEVVDKGASAQSFIERMTNFDKNLPNEKVLPKHSLLYEYFTVYNELTKVKYVTEGMRKPAFLSGEQKKAIVDLLFKTNRKVTVKQLKEDYFKKIECFDSVEISGVEDRFNASLGTYHDLLKIIKDKDFLDNEENEDILEDIVLTLTLFEDREMIEERLKTYAHLFDDKVMKQLKRRRYTGWGRLSRKLINGIRDKQSGKTILDFLKSDGFANRNFMQLIHDDSLTFKEDIQKAQVSGQGDSLHEHIANLAGSPAIKKGILQTVKVVDELVKVMGRHKPENIVIEMARENQTTQKGQKNSRERMKRIEEGIKELGSQILKEHPVENTQLQNEKLYLYYLQNGRDMYVDQELDINRLSDYDVDHIVPQSFLKDDSIDNKVLTRSDKARGKSDNVPSEEVVKKMKNYWRQLLNAKLITQRKFDNLTKAERGGLSELDKAGFIKRQLVETRQITKHVAQILDSRMNTKYDENDKLIREVKVITLKSKLVSDFRKDFQFYKVREINNYHHAHDAYLNAVVGTALIKKYPKLESEFVYGDYKVYDVRKMIAKSEQEIGKATAKYFFYSNIMNFFKTEITLANGEIRKRPLIETNGETGEIVWDKGRDFATVRKVLSMPQVNIVKKTEVQTGGFSKESILPKRNSDKLIARKKDWDPKKYGGFDSPTVAYSVLVVAKVEKGKSKKLKSVKELLGITIMERSSFEKNPIDFLEAKGYKEVKKDLIIKLPKYSLFELENGRKRMLASAGELQKGNELALPSKYVNFLYLASHYEKLKGSPEDNEQKQLFVEQHKHYLDEIIEQISEFSKRVILADANLDKVLSAYNKHRDKPIREQAENIIHLFTLTNLGAPAAFKYFDTTIDRKRYTSTKEVLDATLIHQSITGLYETRIDLSQLGGDGGGGSGGGGSSGGTLQLEEEYRLFEPESTQKQEMDIWLKNFPQAWAETGGMGTAHCQAPVLIQLKATATPISIRQYPMPHEAYQGIKPHIRRMLDQGILKPCQSPWNTPLLPVKKPGTEDYRPVQDLREVNKRVEDIHPTVPNPYNLLSTLPPSHPWYTVLDLKDAFFCLRLHSESQLLFAFEWRDPEIGLSGQLTWTRLPQGFKNSPTLFNEALHSDLADFRVRYPALVLLQYVDDLLLAAATRTECLEGTKALLETLGNKGYRASAKKAQICLQEVTYLGYSLKDGQRWLTKARKEAILSIPVPKNSRQVREFLGKAGYCRLFIPGFAELAAPLYPLTRPGTLFQWGTEQQLAFEDIKKALLSSPALGLPDITKPFELFIDENSGFAKGVLVQKLGPWKRPVAYLSKKLDTVASGWPPCLRMVAAIAILVKDAGKLTLGQPLTILTSHPVEALVRQPPNKWLSNARMTHYQAMLLDAERVHFGPTVSLNPATLLPLPSGGNHHDCLQILAETHGTRPDLTDQPLPDADLTWYTDGSSFIRNGEREAGAAVTTESEVIWAAPLPPGTSAQRAELIALTQALKMAEGKKLTVYTDSRYAFATTHVHGEIYRRRGWLTSEGKEIKNKNEILALLEALFLPKRLSIIHCPGHQKGDSPQAKGNRLADDTAKKAATETHSSLTVLPAGKRTADGSEFEKRTADGSEFESPKKKAKVE

SEQ ID NO: 1276 - protein, 2093 aa, synthetic construct
MPAAKRVKLDGGDKKYSIGLDIGTNSVGWAVITDEYKVPSKKFKVLGNTDRHSIKKNLIGALLFDSGETAEATRLKRTARRRYTRRKNRICYLQEIFSNEMAKVDDSFFHRLEESFLVEEDKKHERHPIFGNIVDEVAYHEKYPTIYHLRKKLVDSTDKADLRLIYLALAHMIKFRGHFLIEGDLNPDNSDVDKLFIQLVQTYNQLFEENPINASGVDAKAILSARLSKSRRLENLIAQLPGEKKNGLFGNLIALSLGLTPNFKSNFDLAEDAKLQLSKDTYDDDLDNLLAQIGDQYADLFLAAKNLSDAILLSDILRVNTEITKAPLSASMIKRYDEHHQDLTLLKALVRQQLPEKYKEIFFDQSKNGYAGYIDGGASQEEFYKFIKPILEKMDGTEELLVKLNREDLLRKQRTFDNGSIPHQIHLGELHAILRRQEDFYPFLKDNREKIEKILTFRIPYYVGPLARGNSRFAWMTRKSEETITPWNFEEVVDKGASAQSFIERMTNFDKNLPNEKVLPKHSLLYEYFTVYNELTKVKYVTEGMRKPAFLSGEQKKAIVDLLFKTNRKVTVKQLKEDYFKKIECFDSVEISGVEDRFNASLGTYHDLLKIIKDKDFLDNEENEDILEDIVLTLTLFEDREMIEERLKTYAHLFDDKVMKQLKRRRYTGWGRLSRKLINGIRDKQSGKTILDFLKSDGFANRNFMQLIHDDSLTFKEDIQKAQVSGQGDSLHEHIANLAGSPAIKKGILQTVKVVDELVKVMGRHKPENIVIEMARENQTTQKGQKNSRERMKRIEEGIKELGSQILKEHPVENTQLQNEKLYLYYLQNGRDMYVDQELDINRLSDYDVDHIVPQSFLKDDSIDNKVLTRSDKARGKSDNVPSEEVVKKMKNYWRQLLNAKLITQRKFDNLTKAERGGLSELDKAGFIKRQLVETRQITKHVAQILDSRMNTKYDENDKLIREVKVITLKSKLVSDFRKDFQFYKVREINNYHHAHDAYLNAVVGTALIKKYPKLESEFVYGDYKVYDVRKMIAKSEQEIGKATAKYFFYSNIMNFFKTEITLANGEIRKRPLIETNGETGEIVWDKGRDFATVRKVLSMPQVNIVKKTEVQTGGFSKESILPKRNSDKLIARKKDWDPKKYGGFDSPTVAYSVLVVAKVEKGKSKKLKSVKELLGITIMERSSFEKNPIDFLEAKGYKEVKKDLIIKLPKYSLFELENGRKRMLASAGELQKGNELALPSKYVNFLYLASHYEKLKGSPEDNEQKQLFVEQHKHYLDEIIEQISEFSKRVILADANLDKVLSAYNKHRDKPIREQAENIIHLFTLTNLGAPAAFKYFDTTIDRKRYTSTKEVLDATLIHQSITGLYETRIDLSQLGGDGGPAPGSSGGSGGTLQLEEEYRLFEPESTQKQEMDIWLKNFPQAWAETGGMGTAHCQAPVLIQLKATATPISIRQYPMPHEAYQGIKPHIRRMLDQGILKPCQSPWNTPLLPVKKPGTEDYRPVQDLREVNKRVEDIHPTVPNPYNLLSTLPPSHPWYTVLDLKDAFFCLRLHSESQLLFAFEWRDPEIGLSGQLTWTRLPQGFKNSPTLFNEALHSDLADFRVRYPALVLLQYVDDLLLAAATRTECLEGTKALLETLGNKGYRASAKKAQICLQEVTYLGYSLKDGQRWLTKARKEAILSIPVPKNSRQVREFLGKAGYCRLFIPGFAELAAPLYPLTRPGTLFQWGTEQQLAFEDIKKALLSSPALGLPDITKPFELFIDENSGFAKGVLVQKLGPWKRPVAYLSKKLDTVASGWPPCLRMVAAIAILVKDAGKLTLGQPLTILTSHPVEALVRQPPNKWLSNARMTHYQAMLLDAERVHFGPTVSLNPATLLPLPSGGNHHDCLQILAETHGTRPDLTDQPLPDADLTWYTDGSSFIRNGEREAGAAVTTESEVIWAAPLPPGTSAQRAELIALTQALKMAEGKKLTVYTDSRYAFATTHVHGEIYRRRGWLTSEGKEIKNKNEILALLEALFLPKRLSIIHCPGHQKGDSPQAKGNRLADDTAKKAATETHSSLTVLPAGKRTADGSEFEKRTADGSEFESPKKKAKVE

SEQ ID NO: 1277 - protein, 2093 aa, synthetic construct
MPAAKRVKLDGGDKKYSIGLDIGTNSVGWAVITDEYKVPSKKFKVLGNTDRHSIKKNLIGALLFDSGETAEATRLKRTARRRYTRRKNRICYLQEIFSNEMAKVDDSFFHRLEESFLVEEDKKHERHPIFGNIVDEVAYHEKYPTIYHLRKKLVDSTDKADLRLIYLALAHMIKFRGHFLIEGDLNPDNSDVDKLFIQLVQTYNQLFEENPINASGVDAKAILSARLSKSRRLENLIAQLPGEKKNGLFGNLIALSLGLTPNFKSNFDLAEDAKLQLSKDTYDDDLDNLLAQIGDQYADLFLAAKNLSDAILLSDILRVNTEITKAPLSASMIKRYDEHHQDLTLLKALVRQQLPEKYKEIFFDQSKNGYAGYIDGGASQEEFYKFIKPILEKMDGTEELLVKLNREDLLRKQRTFDNGSIPHQIHLGELHAILRRQEDFYPFLKDNREKIEKILTFRIPYYVGPLARGNSRFAWMTRKSEETITPWNFEEVVDKGASAQSFIERMTNFDKNLPNEKVLPKHSLLYEYFTVYNELTKVKYVTEGMRKPAFLSGEQKKAIVDLLFKTNRKVTVKQLKEDYFKKIECFDSVEISGVEDRFNASLGTYHDLLKIIKDKDFLDNEENEDILEDIVLTLTLFEDREMIEERLKTYAHLFDDKVMKQLKRRRYTGWGRLSRKLINGIRDKQSGKTILDFLKSDGFANRNFMQLIHDDSLTFKEDIQKAQVSGQGDSLHEHIANLAGSPAIKKGILQTVKVVDELVKVMGRHKPENIVIEMARENQTTQKGQKNSRERMKRIEEGIKELGSQILKEHPVENTQLQNEKLYLYYLQNGRDMYVDQELDINRLSDYDVDHIVPQSFLKDDSIDNKVLTRSDKARGKSDNVPSEEVVKKMKNYWRQLLNAKLITQRKFDNLTKAERGGLSELDKAGFIKRQLVETRQITKHVAQILDSRMNTKYDENDKLIREVKVITLKSKLVSDFRKDFQFYKVREINNYHHAHDAYLNAVVGTALIKKYPKLESEFVYGDYKVYDVRKMIAKSEQEIGKATAKYFFYSNIMNFFKTEITLANGEIRKRPLIETNGETGEIVWDKGRDFATVRKVLSMPQVNIVKKTEVQTGGFSKESILPKRNSDKLIARKKDWDPKKYGGFDSPTVAYSVLVVAKVEKGKSKKLKSVKELLGITIMERSSFEKNPIDFLEAKGYKEVKKDLIIKLPKYSLFELENGRKRMLASAGELQKGNELALPSKYVNFLYLASHYEKLKGSPEDNEQKQLFVEQHKHYLDEIIEQISEFSKRVILADANLDKVLSAYNKHRDKPIREQAENIIHLFTLTNLGAPAAFKYFDTTIDRKRYTSTKEVLDATLIHQSITGLYETRIDLSQLGGDGGPAPGGGGSSGGTLQLEEEYRLFEPESTQKQEMDIWLKNFPQAWAETGGMGTAHCQAPVLIQLKATATPISIRQYPMPHEAYQGIKPHIRRMLDQGILKPCQSPWNTPLLPVKKPGTEDYRPVQDLREVNKRVEDIHPTVPNPYNLLSTLPPSHPWYTVLDLKDAFFCLRLHSESQLLFAFEWRDPEIGLSGQLTWTRLPQGFKNSPTLFNEALHSDLADFRVRYPALVLLQYVDDLLLAAATRTECLEGTKALLETLGNKGYRASAKKAQICLQEVTYLGYSLKDGQRWLTKARKEAILSIPVPKNSRQVREFLGKAGYCRLFIPGFAELAAPLYPLTRPGTLFQWGTEQQLAFEDIKKALLSSPALGLPDITKPFELFIDENSGFAKGVLVQKLGPWKRPVAYLSKKLDTVASGWPPCLRMVAAIAILVKDAGKLTLGQPLTILTSHPVEALVRQPPNKWLSNARMTHYQAMLLDAERVHFGPTVSLNPATLLPLPSGGNHHDCLQILAETHGTRPDLTDQPLPDADLTWYTDGSSFIRNGEREAGAAVTTESEVIWAAPLPPGTSAQRAELIALTQALKMAEGKKLTVYTDSRYAFATTHVHGEIYRRRGWLTSEGKEIKNKNEILALLEALFLPKRLSIIHCPGHQKGDSPQAKGNRLADDTAKKAATETHSSLTVLPAGKRTADGSEFEKRTADGSEFESPKKKAKVE

SEQ ID NO: 1278 - protein, 2095 aa, synthetic construct
MPAAKRVKLDGGDKKYSIGLDIGTNSVGWAVITDEYKVPSKKFKVLGNTDRHSIKKNLIGALLFDSGETAEATRLKRTARRRYTRRKNRICYLQEIFSNEMAKVDDSFFHRLEESFLVEEDKKHERHPIFGNIVDEVAYHEKYPTIYHLRKKLVDSTDKADLRLIYLALAHMIKFRGHFLIEGDLNPDNSDVDKLFIQLVQTYNQLFEENPINASGVDAKAILSARLSKSRRLENLIAQLPGEKKNGLFGNLIALSLGLTPNFKSNFDLAEDAKLQLSKDTYDDDLDNLLAQIGDQYADLFLAAKNLSDAILLSDILRVNTEITKAPLSASMIKRYDEHHQDLTLLKALVRQQLPEKYKEIFFDQSKNGYAGYIDGGASQEEFYKFIKPILEKMDGTEELLVKLNREDLLRKQRTFDNGSIPHQIHLGELHAILRRQEDFYPFLKDNREKIEKILTFRIPYYVGPLARGNSRFAWMTRKSEETITPWNFEEVVDKGASAQSFIERMTNFDKNLPNEKVLPKHSLLYEYFTVYNELTKVKYVTEGMRKPAFLSGEQKKAIVDLLFKTNRKVTVKQLKEDYFKKIECFDSVEISGVEDRFNASLGTYHDLLKIIKDKDFLDNEENEDILEDIVLTLTLFEDREMIEERLKTYAHLFDDKVMKQLKRRRYTGWGRLSRKLINGIRDKQSGKTILDFLKSDGFANRNFMQLIHDDSLTFKEDIQKAQVSGQGDSLHEHIANLAGSPAIKKGILQTVKVVDELVKVMGRHKPENIVIEMARENQTTQKGQKNSRERMKRIEEGIKELGSQILKEHPVENTQLQNEKLYLYYLQNGRDMYVDQELDINRLSDYDVDHIVPQSFLKDDSIDNKVLTRSDKARGKSDNVPSEEVVKKMKNYWRQLLNAKLITQRKFDNLTKAERGGLSELDKAGFIKRQLVETRQITKHVAQILDSRMNTKYDENDKLIREVKVITLKSKLVSDFRKDFQFYKVREINNYHHAHDAYLNAVVGTALIKKYPKLESEFVYGDYKVYDVRKMIAKSEQEIGKATAKYFFYSNIMNFFKTEITLANGEIRKRPLIETNGETGEIVWDKGRDFATVRKVLSMPQVNIVKKTEVQTGGFSKESILPKRNSDKLIARKKDWDPKKYGGFDSPTVAYSVLVVAKVEKGKSKKLKSVKELLGITIMERSSFEKNPIDFLEAKGYKEVKKDLIIKLPKYSLFELENGRKRMLASAGELQKGNELALPSKYVNFLYLASHYEKLKGSPEDNEQKQLFVEQHKHYLDEIIEQISEFSKRVILADANLDKVLSAYNKHRDKPIREQAENIIHLFTLTNLGAPAAFKYFDTTIDRKRYTSTKEVLDATLIHQSITGLYETRIDLSQLGGDGGGGSEAAAKGSSGGTLQLEEEYRLFEPESTQKQEMDIWLKNFPQAWAETGGMGTAHCQAPVLIQLKATATPISIRQYPMPHEAYQGIKPHIRRMLDQGILKPCQSPWNTPLLPVKKPGTEDYRPVQDLREVNKRVEDIHPTVPNPYNLLSTLPPSHPWYTVLDLKDAFFCLRLHSESQLLFAFEWRDPEIGLSGQLTWTRLPQGFKNSPTLFNEALHSDLADFRVRYPALVLLQYVDDLLLAAATRTECLEGTKALLETLGNKGYRASAKKAQICLQEVTYLGYSLKDGQRWLTKARKEAILSIPVPKNSRQVREFLGKAGYCRLFIPGFAELAAPLYPLTRPGTLFQWGTEQQLAFEDIKKALLSSPALGLPDITKPFELFIDENSGFAKGVLVQKLGPWKRPVAYLSKKLDTVASGWPPCLRMVAAIAILVKDAGKLTLGQPLTILTSHPVEALVRQPPNKWLSNARMTHYQAMLLDAERVHFGPTVSLNPATLLPLPSGGNHHDCLQILAETHGTRPDLTDQPLPDADLTWYTDGSSFIRNGEREAGAAVTTESEVIWAAPLPPGTSAQRAELIALTQALKMAEGKKLTVYTDSRYAFATTHVHGEIYRRRGWLTSEGKEIKNKNEILALLEALFLPKRLSIIHCPGHQKGDSPQAKGNRLADDTAKKAATETHSSLTVLPAGKRTADGSEFEKRTADGSEFESPKKKAKVE

SEQ ID NO: 1279 - protein, 2095 aa, synthetic construct
MPAAKRVKLDGGDKKYSIGLDIGTNSVGWAVITDEYKVPSKKFKVLGNTDRHSIKKNLIGALLFDSGETAEATRLKRTARRRYTRRKNRICYLQEIFSNEMAKVDDSFFHRLEESFLVEEDKKHERHPIFGNIVDEVAYHEKYPTIYHLRKKLVDSTDKADLRLIYLALAHMIKFRGHFLIEGDLNPDNSDVDKLFIQLVQTYNQLFEENPINASGVDAKAILSARLSKSRRLENLIAQLPGEKKNGLFGNLIALSLGLTPNFKSNFDLAEDAKLQLSKDTYDDDLDNLLAQIGDQYADLFLAAKNLSDAILLSDILRVNTEITKAPLSASMIKRYDEHHQDLTLLKALVRQQLPEKYKEIFFDQSKNGYAGYIDGGASQEEFYKFIKPILEKMDGTEELLVKLNREDLLRKQRTFDNGSIPHQIHLGELHAILRRQEDFYPFLKDNREKIEKILTFRIPYYVGPLARGNSRFAWMTRKSEETITPWNFEEVVDKGASAQSFIERMTNFDKNLPNEKVLPKHSLLYEYFTVYNELTKVKYVTEGMRKPAFLSGEQKKAIVDLLFKTNRKVTVKQLKEDYFKKIECFDSVEISGVEDRFNASLGTYHDLLKIIKDKDFLDNEENEDILEDIVLTLTLFEDREMIEERLKTYAHLFDDKVMKQLKRRRYTGWGRLSRKLINGIRDKQSGKTILDFLKSDGFANRNFMQLIHDDSLTFKEDIQKAQVSGQGDSLHEHIANLAGSPAIKKGILQTVKVVDELVKVMGRHKPENIVIEMARENQTTQKGQKNSRERMKRIEEGIKELGSQILKEHPVENTQLQNEKLYLYYLQNGRDMYVDQELDINRLSDYDVDHIVPQSFLKDDSIDNKVLTRSDKARGKSDNVPSEEVVKKMKNYWRQLLNAKLITQRKFDNLTKAERGGLSELDKAGFIKRQLVETRQITKHVAQILDSRMNTKYDENDKLIREVKVITLKSKLVSDFRKDFQFYKVREINNYHHAHDAYLNAVVGTALIKKYPKLESEFVYGDYKVYDVRKMIAKSEQEIGKATAKYFFYSNIMNFFKTEITLANGEIRKRPLIETNGETGEIVWDKGRDFATVRKVLSMPQVNIVKKTEVQTGGFSKESILPKRNSDKLIARKKDWDPKKYGGFDSPTVAYSVLVVAKVEKGKSKKLKSVKELLGITIMERSSFEKNPIDFLEAKGYKEVKKDLIIKLPKYSLFELENGRKRMLASAGELQKGNELALPSKYVNFLYLASHYEKLKGSPEDNEQKQLFVEQHKHYLDEIIEQISEFSKRVILADANLDKVLSAYNKHRDKPIREQAENIIHLFTLTNLGAPAAFKYFDTTIDRKRYTSTKEVLDATLIHQSITGLYETRIDLSQLGGDGGEAAAKGGSGGGGGTLQLEEEYRLFEPESTQKQEMDIWLKNFPQAWAETGGMGTAHCQAPVLIQLKATATPISIRQYPMPHEAYQGIKPHIRRMLDQGILKPCQSPWNTPLLPVKKPGTEDYRPVQDLREVNKRVEDIHPTVPNPYNLLSTLPPSHPWYTVLDLKDAFFCLRLHSESQLLFAFEWRDPEIGLSGQLTWTRLPQGFKNSPTLFNEALHSDLADFRVRYPALVLLQYVDDLLLAAATRTECLEGTKALLETLGNKGYRASAKKAQICLQEVTYLGYSLKDGQRWLTKARKEAILSIPVPKNSRQVREFLGKAGYCRLFIPGFAELAAPLYPLTRPGTLFQWGTEQQLAFEDIKKALLSSPALGLPDITKPFELFIDENSGFAKGVLVQKLGPWKRPVAYLSKKLDTVASGWPPCLRMVAAIAILVKDAGKLTLGQPLTILTSHPVEALVRQPPNKWLSNARMTHYQAMLLDAERVHFGPTVSLNPATLLPLPSGGNHHDCLQILAETHGTRPDLTDQPLPDADLTWYTDGSSFIRNGEREAGAAVTTESEVIWAAPLPPGTSAQRAELIALTQALKMAEGKKLTVYTDSRYAFATTHVHGEIYRRRGWLTSEGKEIKNKNEILALLEALFLPKRLSIIHCPGHQKGDSPQAKGNRLADDTAKKAATETHSSLTVLPAGKRTADGSEFEKRTADGSEFESPKKKAKVE

SEQ ID NO: 1280 - protein, 2092 aa, synthetic construct
MPAAKRVKLDGGDKKYSIGLDIGTNSVGWAVITDEYKVPSKKFKVLGNTDRHSIKKNLIGALLFDSGETAEATRLKRTARRRYTRRKNRICYLQEIFSNEMAKVDDSFFHRLEESFLVEEDKKHERHPIFGNIVDEVAYHEKYPTIYHLRKKLVDSTDKADLRLIYLALAHMIKFRGHFLIEGDLNPDNSDVDKLFIQLVQTYNQLFEENPINASGVDAKAILSARLSKSRRLENLIAQLPGEKKNGLFGNLIALSLGLTPNFKSNFDLAEDAKLQLSKDTYDDDLDNLLAQIGDQYADLFLAAKNLSDAILLSDILRVNTEITKAPLSASMIKRYDEHHQDLTLLKALVRQQLPEKYKEIFFDQSKNGYAGYIDGGASQEEFYKFIKPILEKMDGTEELLVKLNREDLLRKQRTFDNGSIPHQIHLGELHAILRRQEDFYPFLKDNREKIEKILTFRIPYYVGPLARGNSRFAWMTRKSEETITPWNFEEVVDKGASAQSFIERMTNFDKNLPNEKVLPKHSLLYEYFTVYNELTKVKYVTEGMRKPAFLSGEQKKAIVDLLFKTNRKVTVKQLKEDYFKKIECFDSVEISGVEDRFNASLGTYHDLLKIIKDKDFLDNEENEDILEDIVLTLTLFEDREMIEERLKTYAHLFDDKVMKQLKRRRYTGWGRLSRKLINGIRDKQSGKTILDFLKSDGFANRNFMQLIHDDSLTFKEDIQKAQVSGQGDSLHEHIANLAGSPAIKKGILQTVKVVDELVKVMGRHKPENIVIEMARENQTTQKGQKNSRERMKRIEEGIKELGSQILKEHPVENTQLQNEKLYLYYLQNGRDMYVDQELDINRLSDYDVDHIVPQSFLKDDSIDNKVLTRSDKARGKSDNVPSEEVVKKMKNYWRQLLNAKLITQRKFDNLTKAERGGLSELDKAGFIKRQLVETRQITKHVAQILDSRMNTKYDENDKLIREVKVITLKSKLVSDFRKDFQFYKVREINNYHHAHDAYLNAVVGTALIKKYPKLESEFVYGDYKVYDVRKMIAKSEQEIGKATAKYFFYSNIMNFFKTEITLANGEIRKRPLIETNGETGEIVWDKGRDFATVRKVLSMPQVNIVKKTEVQTGGFSKESILPKRNSDKLIARKKDWDPKKYGGFDSPTVAYSVLVVAKVEKGKSKKLKSVKELLGITIMERSSFEKNPIDFLEAKGYKEVKKDLIIKLPKYSLFELENGRKRMLASAGELQKGNELALPSKYVNFLYLASHYEKLKGSPEDNEQKQLFVEQHKHYLDEIIEQISEFSKRVILADANLDKVLSAYNKHRDKPIREQAENIIHLFTLTNLGAPAAFKYFDTTIDRKRYTSTKEVLDATLIHQSITGLYETRIDLSQLGGDGGGGGEAAAKGGTLQLEEEYRLFEPESTQKQEMDIWLKNFPQAWAETGGMGTAHCQAPVLIQLKATATPISIRQYPMPHEAYQGIKPHIRRMLDQGILKPCQSPWNTPLLPVKKPGTEDYRPVQDLREVNKRVEDIHPTVPNPYNLLSTLPPSHPWYTVLDLKDAFFCLRLHSESQLLFAFEWRDPEIGLSGQLTWTRLPQGFKNSPTLFNEALHSDLADFRVRYPALVLLQYVDDLLLAAATRTECLEGTKALLETLGNKGYRASAKKAQICLQEVTYLGYSLKDGQRWLTKARKEAILSIPVPKNSRQVREFLGKAGYCRLFIPGFAELAAPLYPLTRPGTLFQWGTEQQLAFEDIKKALLSSPALGLPDITKPFELFIDENSGFAKGVLVQKLGPWKRPVAYLSKKLDTVASGWPPCLRMVAAIAILVKDAGKLTLGQPLTILTSHPVEALVRQPPNKWLSNARMTHYQAMLLDAERVHFGPTVSLNPATLLPLPSGGNHHDCLQILAETHGTRPDLTDQPLPDADLTWYTDGSSFIRNGEREAGAAVTTESEVIWAAPLPPGTSAQRAELIALTQALKMAEGKKLTVYTDSRYAFATTHVHGEIYRRRGWLTSEGKEIKNKNEILALLEALFLPKRLSIIHCPGHQKGDSPQAKGNRLADDTAKKAATETHSSLTVLPAGKRTADGSEFEKRTADGSEFESPKKKAKVE

SEQ ID NO: 1281 - protein, 2090 aa, synthetic construct
MPAAKRVKLDGGDKKYSIGLDIGTNSVGWAVITDEYKVPSKKFKVLGNTDRHSIKKNLIGALLFDSGETAEATRLKRTARRRYTRRKNRICYLQEIFSNEMAKVDDSFFHRLEESFLVEEDKKHERHPIFGNIVDEVAYHEKYPTIYHLRKKLVDSTDKADLRLIYLALAHMIKFRGHFLIEGDLNPDNSDVDKLFIQLVQTYNQLFEENPINASGVDAKAILSARLSKSRRLENLIAQLPGEKKNGLFGNLIALSLGLTPNFKSNFDLAEDAKLQLSKDTYDDDLDNLLAQIGDQYADLFLAAKNLSDAILLSDILRVNTEITKAPLSASMIKRYDEHHQDLTLLKALVRQQLPEKYKEIFFDQSKNGYAGYIDGGASQEEFYKFIKPILEKMDGTEELLVKLNREDLLRKQRTFDNGSIPHQIHLGELHAILRRQEDFYPFLKDNREKIEKILTFRIPYYVGPLARGNSRFAWMTRKSEETITPWNFEEVVDKGASAQSFIERMTNFDKNLPNEKVLPKHSLLYEYFTVYNELTKVKYVTEGMRKPAFLSGEQKKAIVDLLFKTNRKVTVKQLKEDYFKKIECFDSVEISGVEDRFNASLGTYHDLLKIIKDKDFLDNEENEDILEDIVLTLTLFEDREMIEERLKTYAHLFDDKVMKQLKRRRYTGWGRLSRKLINGIRDKQSGKTILDFLKSDGFANRNFMQLIHDDSLTFKEDIQKAQVSGQGDSLHEHIANLAGSPAIKKGILQTVKVVDELVKVMGRHKPENIVIEMARENQTTQKGQKNSRERMKRIEEGIKELGSQILKEHPVENTQLQNEKLYLYYLQNGRDMYVDQELDINRLSDYDVDHIVPQSFLKDDSIDNKVLTRSDKARGKSDNVPSEEVVKKMKNYWRQLLNAKLITQRKFDNLTKAERGGLSELDKAGFIKRQLVETRQITKHVAQILDSRMNTKYDENDKLIREVKVITLKSKLVSDFRKDFQFYKVREINNYHHAHDAYLNAVVGTALIKKYPKLESEFVYGDYKVYDVRKMIAKSEQEIGKATAKYFFYSNIMNFFKTEITLANGEIRKRPLIETNGETGEIVWDKGRDFATVRKVLSMPQVNIVKKTEVQTGGFSKESILPKRNSDKLIARKKDWDPKKYGGFDSPTVAYSVLVVAKVEKGKSKKLKSVKELLGITIMERSSFEKNPIDFLEAKGYKEVKKDLIIKLPKYSLFELENGRKRMLASAGELQKGNELALPSKYVNFLYLASHYEKLKGSPEDNEQKQLFVEQHKHYLDEIIEQISEFSKRVILADANLDKVLSAYNKHRDKPIREQAENIIHLFTLTNLGAPAAFKYFDTTIDRKRYTSTKEVLDATLIHQSITGLYETRIDLSQLGGDGGGGGGGSGGTLQLEEEYRLFEPESTQKQEMDIWLKNFPQAWAETGGMGTAHCQAPVLIQLKATATPISIRQYPMPHEAYQGIKPHIRRMLDQGILKPCQSPWNTPLLPVKKPGTEDYRPVQDLREVNKRVEDIHPTVPNPYNLLSTLPPSHPWYTVLDLKDAFFCLRLHSESQLLFAFEWRDPEIGLSGQLTWTRLPQGFKNSPTLFNEALHSDLADFRVRYPALVLLQYVDDLLLAAATRTECLEGTKALLETLGNKGYRASAKKAQICLQEVTYLGYSLKDGQRWLTKARKEAILSIPVPKNSRQVREFLGKAGYCRLFIPGFAELAAPLYPLTRPGTLFQWGTEQQLAFEDIKKALLSSPALGLPDITKPFELFIDENSGFAKGVLVQKLGPWKRPVAYLSKKLDTVASGWPPCLRMVAAIAILVKDAGKLTLGQPLTILTSHPVEALVRQPPNKWLSNARMTHYQAMLLDAERVHFGPTVSLNPATLLPLPSGGNHHDCLQILAETHGTRPDLTDQPLPDADLTWYTDGSSFIRNGEREAGAAVTTESEVIWAAPLPPGTSAQRAELIALTQALKMAEGKKLTVYTDSRYAFATTHVHGEIYRRRGWLTSEGKEIKNKNEILALLEALFLPKRLSIIHCPGHQKGDSPQAKGNRLADDTAKKAATETHSSLTVLPAGKRTADGSEFEKRTADGSEFESPKKKAKVE

SEQ ID NO: 1282 - protein, 2211 aa, synthetic construct
MPAAKRVKLDGGDKKYSIGLDIGTNSVGWAVITDEYKVPSKKFKVLGNTDRHSIKKNLIGALLFDSGETAEATRLKRTARRRYTRRKNRICYLQEIFSNEMAKVDDSFFHRLEESFLVEEDKKHERHPIFGNIVDEVAYHEKYPTIYHLRKKLVDSTDKADLRLIYLALAHMIKFRGHFLIEGDLNPDNSDVDKLFIQLVQTYNQLFEENPINASGVDAKAILSARLSKSRRLENLIAQLPGEKKNGLFGNLIALSLGLTPNFKSNFDLAEDAKLQLSKDTYDDDLDNLLAQIGDQYADLFLAAKNLSDAILLSDILRVNTEITKAPLSASMIKRYDEHHQDLTLLKALVRQQLPEKYKEIFFDQSKNGYAGYIDGGASQEEFYKFIKPILEKMDGTEELLVKLNREDLLRKQRTFDNGSIPHQIHLGELHAILRRQEDFYPFLKDNREKIEKILTFRIPYYVGPLARGNSRFAWMTRKSEETITPWNFEEVVDKGASAQSFIERMTNFDKNLPNEKVLPKHSLLYEYFTVYNELTKVKYVTEGMRKPAFLSGEQKKAIVDLLFKTNRKVTVKQLKEDYFKKIECFDSVEISGVEDRFNASLGTYHDLLKIIKDKDFLDNEENEDILEDIVLTLTLFEDREMIEERLKTYAHLFDDKVMKQLKRRRYTGWGRLSRKLINGIRDKQSGKTILDFLKSDGFANRNFMQLIHDDSLTFKEDIQKAQVSGQGDSLHEHIANLAGSPAIKKGILQTVKVVDELVKVMGRHKPENIVIEMARENQTTQKGQKNSRERMKRIEEGIKELGSQILKEHPVENTQLQNEKLYLYYLQNGRDMYVDQELDINRLSDYDVDHIVPQSFLKDDSIDNKVLTRSDKARGKSDNVPSEEVVKKMKNYWRQLLNAKLITQRKFDNLTKAERGGLSELDKAGFIKRQLVETRQITKHVAQILDSRMNTKYDENDKLIREVKVITLKSKLVSDFRKDFQFYKVREINNYHHAHDAYLNAVVGTALIKKYPKLESEFVYGDYKVYDVRKMIAKSEQEIGKATAKYFFYSNIMNFFKTEITLANGEIRKRPLIETNGETGEIVWDKGRDFATVRKVLSMPQVNIVKKTEVQTGGFSKESILPKRNSDKLIARKKDWDPKKYGGFDSPTVAYSVLVVAKVEKGKSKKLKSVKELLGITIMERSSFEKNPIDFLEAKGYKEVKKDLIIKLPKYSLFELENGRKRMLASAGELQKGNELALPSKYVNFLYLASHYEKLKGSPEDNEQKQLFVEQHKHYLDEIIEQISEFSKRVILADANLDKVLSAYNKHRDKPIREQAENIIHLFTLTNLGAPAAFKYFDTTIDRKRYTSTKEVLDATLIHQSITGLYETRIDLSQLGGDGGAEAAAKEAAAKEAAAKEAAAKALEAEAAAKEAAAKEAAAKEAAAKAGGMNPLQLLQPLPAEIKGTKLLAHWNSGATITCIPESFLEDEQPIKKTLIKTIHGEKQQNVYYVTFKVKGRKVEAEVIASPYEYILLSPTDVPWLTQQPLQLTILVPLQEYQEKILSKTALPEDQKQQLKTLFVKYDNLWQHWENQVGHRKIRPHNIATGDYPPRPQKQYPINPKAKPSIQIVIDDLLKQGVLTPQNSTMNTPVYPVPKPDGRWRMVLDYREVNKTIPLTAAQNQHSAGILATIVRQKYKTTLDLANGFWAHPITPESYWLTAFTWQGKQYCWTRLPQGFLNSPALFTADVVDLLKEIPNVQVYVDDIYLSHDDPKEHVQQLEKVFQILLQAGYVVSLKKSEIGQKTVEFLGFNITKEGRGLTDTFKTKLLNITPPKDLKQLQSILGLLNFARNFIPNFAELVQPLYNLIASAKGKYIEWSEENTKQLNMVIEALNTASNLEERLPEQRLVIKVNTSPSAGYVRYYNETGKKPIMYLNYVFSKAELKFSMLEKLLTTMHKALIKAMDLAMGQEILVYSPIVSMTKIQKTPLPERKALPIRWITWMTYLEDPRIQFHYDKTLPELKHIPDVYTSSQSPVKHPSQYEGVFYTDGSAIKSPDPTKSNNAGMGIVHATYKPEYQVLNQWSIPLGNHTAQMAEIAAVEFACKKALKIPGPVLVITDSFYVAESANKELPYWKSNGFVNNKKKPLKHISKWKSIAECLSMKPDITIQHEKGISLQIPVFILKGNALADKLATQGSYVVNAGKRTADGSEFEKRTADGSEFESPKKKAKVE

SEQ ID NO: 1283 - protein, 2190 aa, synthetic construct
MPAAKRVKLDGGDKKYSIGLDIGTNSVGWAVITDEYKVPSKKFKVLGNTDRHSIKKNLIGALLFDSGETAEATRLKRTARRRYTRRKNRICYLQEIFSNEMAKVDDSFFHRLEESFLVEEDKKHERHPIFGNIVDEVAYHEKYPTIYHLRKKLVDSTDKADLRLIYLALAHMIKFRGHFLIEGDLNPDNSDVDKLFIQLVQTYNQLFEENPINASGVDAKAILSARLSKSRRLENLIAQLPGEKKNGLFGNLIALSLGLTPNFKSNFDLAEDAKLQLSKDTYDDDLDNLLAQIGDQYADLFLAAKNLSDAILLSDILRVNTEITKAPLSASMIKRYDEHHQDLTLLKALVRQQLPEKYKEIFFDQSKNGYAGYIDGGASQEEFYKFIKPILEKMDGTEELLVKLNREDLLRKQRTFDNGSIPHQIHLGELHAILRRQEDFYPFLKDNREKIEKILTFRIPYYVGPLARGNSRFAWMTRKSEETITPWNFEEVVDKGASAQSFIERMTNFDKNLPNEKVLPKHSLLYEYFTVYNELTKVKYVTEGMRKPAFLSGEQKKAIVDLLFKTNRKVTVKQLKEDYFKKIECFDSVEISGVEDRFNASLGTYHDLLKIIKDKDFLDNEENEDILEDIVLTLTLFEDREMIEERLKTYAHLFDDKVMKQLKRRRYTGWGRLSRKLINGIRDKQSGKTILDFLKSDGFANRNFMQLIHDDSLTFKEDIQKAQVSGQGDSLHEHIANLAGSPAIKKGILQTVKVVDELVKVMGRHKPENIVIEMARENQTTQKGQKNSRERMKRIEEGIKELGSQILKEHPVENTQLQNEKLYLYYLQNGRDMYVDQELDINRLSDYDVDHIVPQSFLKDDSIDNKVLTRSDKARGKSDNVPSEEVVKKMKNYWRQLLNAKLITQRKFDNLTKAERGGLSELDKAGFIKRQLVETRQITKHVAQILDSRMNTKYDENDKLIREVKVITLKSKLVSDFRKDFQFYKVREINNYHHAHDAYLNAVVGTALIKKYPKLESEFVYGDYKVYDVRKMIAKSEQEIGKATAKYFFYSNIMNFFKTEITLANGEIRKRPLIETNGETGEIVWDKGRDFATVRKVLSMPQVNIVKKTEVQTGGFSKESILPKRNSDKLIARKKDWDPKKYGGFDSPTVAYSVLVVAKVEKGKSKKLKSVKELLGITIMERSSFEKNPIDFLEAKGYKEVKKDLIIKLPKYSLFELENGRKRMLASAGELQKGNELALPSKYVNFLYLASHYEKLKGSPEDNEQKQLFVEQHKHYLDEIIEQISEFSKRVILADANLDKVLSAYNKHRDKPIREQAENIIHLFTLTNLGAPAAFKYFDTTIDRKRYTSTKEVLDATLIHQSITGLYETRIDLSQLGGDGGEAAAKEAAAKEAAAKEAAAKEAAAKGGMNPLQLLQPLPAEIKGTKLLAHWNSGATITCIPESFLEDEQPIKKTLIKTIHGEKQQNVYYVTFKVKGRKVEAEVIASPYEYILLSPTDVPWLTQQPLQLTILVPLQEYQEKILSKTALPEDQKQQLKTLFVKYDNLWQHWENQVGHRKIRPHNIATGDYPPRPQKQYPINPKAKPSIQIVIDDLLKQGVLTPQNSTMNTPVYPVPKPDGRWRMVLDYREVNKTIPLTAAQNQHSAGILATIVRQKYKTTLDLANGFWAHPITPESYWLTAFTWQGKQYCWTRLPQGFLNSPALFTADVVDLLKEIPNVQVYVDDIYLSHDDPKEHVQQLEKVFQILLQAGYVVSLKKSEIGQKTVEFLGFNITKEGRGLTDTFKTKLLNITPPKDLKQLQSILGLLNFARNFIPNFAELVQPLYNLIASAKGKYIEWSEENTKQLNMVIEALNTASNLEERLPEQRLVIKVNTSPSAGYVRYYNETGKKPIMYLNYVFSKAELKFSMLEKLLTTMHKALIKAMDLAMGQEILVYSPIVSMTKIQKTPLPERKALPIRWITWMTYLEDPRIQFHYDKTLPELKHIPDVYTSSQSPVKHPSQYEGVFYTDGSAIKSPDPTKSNNAGMGIVHATYKPEYQVLNQWSIPLGNHTAQMAEIAAVEFACKKALKIPGPVLVITDSFYVAESANKELPYWKSNGFVNNKKKPLKHISKWKSIAECLSMKPDITIQHEKGISLQIPVFILKGNALADKLATQGSYVVNAGKRTADGSEFEKRTADGSEFESPKKKAKVE

SEQ ID NO: 1284 - protein, 2183 aa, synthetic construct
MPAAKRVKLDGGDKKYSIGLDIGTNSVGWAVITDEYKVPSKKFKVLGNTDRHSIKKNLIGALLFDSGETAEATRLKRTARRRYTRRKNRICYLQEIFSNEMAKVDDSFFHRLEESFLVEEDKKHERHPIFGNIVDEVAYHEKYPTIYHLRKKLVDSTDKADLRLIYLALAHMIKFRGHFLIEGDLNPDNSDVDKLFIQLVQTYNQLFEENPINASGVDAKAILSARLSKSRRLENLIAQLPGEKKNGLFGNLIALSLGLTPNFKSNFDLAEDAKLQLSKDTYDDDLDNLLAQIGDQYADLFLAAKNLSDAILLSDILRVNTEITKAPLSASMIKRYDEHHQDLTLLKALVRQQLPEKYKEIFFDQSKNGYAGYIDGGASQEEFYKFIKPILEKMDGTEELLVKLNREDLLRKQRTFDNGSIPHQIHLGELHAILRRQEDFYPFLKDNREKIEKILTFRIPYYVGPLARGNSRFAWMTRKSEETITPWNFEEVVDKGASAQSFIERMTNFDKNLPNEKVLPKHSLLYEYFTVYNELTKVKYVTEGMRKPAFLSGEQKKAIVDLLFKTNRKVTVKQLKEDYFKKIECFDSVEISGVEDRFNASLGTYHDLLKIIKDKDFLDNEENEDILEDIVLTLTLFEDREMIEERLKTYAHLFDDKVMKQLKRRRYTGWGRLSRKLINGIRDKQSGKTILDFLKSDGFANRNFMQLIHDDSLTFKEDIQKAQVSGQGDSLHEHIANLAGSPAIKKGILQTVKVVDELVKVMGRHKPENIVIEMARENQTTQKGQKNSRERMKRIEEGIKELGSQILKEHPVENTQLQNEKLYLYYLQNGRDMYVDQELDINRLSDYDVDHIVPQSFLKDDSIDNKVLTRSDKARGKSDNVPSEEVVKKMKNYWRQLLNAKLITQRKFDNLTKAERGGLSELDKAGFIKRQLVETRQITKHVAQILDSRMNTKYDENDKLIREVKVITLKSKLVSDFRKDFQFYKVREINNYHHAHDAYLNAVVGTALIKKYPKLESEFVYGDYKVYDVRKMIAKSEQEIGKATAKYFFYSNIMNFFKTEITLANGEIRKRPLIETNGETGEIVWDKGRDFATVRKVLSMPQVNIVKKTEVQTGGFSKESILPKRNSDKLIARKKDWDPKKYGGFDSPTVAYSVLVVAKVEKGKSKKLKSVKELLGITIMERSSFEKNPIDFLEAKGYKEVKKDLIIKLPKYSLFELENGRKRMLASAGELQKGNELALPSKYVNFLYLASHYEKLKGSPEDNEQKQLFVEQHKHYLDEIIEQISEFSKRVILADANLDKVLSAYNKHRDKPIREQAENIIHLFTLTNLGAPAAFKYFDTTIDRKRYTSTKEVLDATLIHQSITGLYETRIDLSQLGGDGGGSSGSSGSSGSSGSSGSSGGMNPLQLLQPLPAEIKGTKLLAHWNSGATITCIPESFLEDEQPIKKTLIKTIHGEKQQNVYYVTFKVKGRKVEAEVIASPYEYILLSPTDVPWLTQQPLQLTILVPLQEYQEKILSKTALPEDQKQQLKTLFVKYDNLWQHWENQVGHRKIRPHNIATGDYPPRPQKQYPINPKAKPSIQIVIDDLLKQGVLTPQNSTMNTPVYPVPKPDGRWRMVLDYREVNKTIPLTAAQNQHSAGILATIVRQKYKTTLDLANGFWAHPITPESYWLTAFTWQGKQYCWTRLPQGFLNSPALFTADVVDLLKEIPNVQVYVDDIYLSHDDPKEHVQQLEKVFQILLQAGYVVSLKKSEIGQKTVEFLGFNITKEGRGLTDTFKTKLLNITPPKDLKQLQSILGLLNFARNFIPNFAELVQPLYNLIASAKGKYIEWSEENTKQLNMVIEALNTASNLEERLPEQRLVIKVNTSPSAGYVRYYNETGKKPIMYLNYVFSKAELKFSMLEKLLTTMHKALIKAMDLAMGQEILVYSPIVSMTKIQKTPLPERKALPIRWITWMTYLEDPRIQFHYDKTLPELKHIPDVYTSSQSPVKHPSQYEGVFYTDGSAIKSPDPTKSNNAGMGIVHATYKPEYQVLNQWSIPLGNHTAQMAEIAAVEFACKKALKIPGPVLVITDSFYVAESANKELPYWKSNGFVNNKKKPLKHISKWKSIAECLSMKPDITIQHEKGISLQIPVFILKGNALADKLATQGSYVVNAGKRTADGSEFEKRTADGSEFESPKKKAKVE

SEQ ID NO: 1285 - protein, 2176 aa, synthetic construct
MPAAKRVKLDGGDKKYSIGLDIGTNSVGWAVITDEYKVPSKKFKVLGNTDRHSIKKNLIGALLFDSGETAEATRLKRTARRRYTRRKNRICYLQEIFSNEMAKVDDSFFHRLEESFLVEEDKKHERHPIFGNIVDEVAYHEKYPTIYHLRKKLVDSTDKADLRLIYLALAHMIKFRGHFLIEGDLNPDNSDVDKLFIQLVQTYNQLFEENPINASGVDAKAILSARLSKSRRLENLIAQLPGEKKNGLFGNLIALSLGLTPNFKSNFDLAEDAKLQLSKDTYDDDLDNLLAQIGDQYADLFLAAKNLSDAILLSDILRVNTEITKAPLSASMIKRYDEHHQDLTLLKALVRQQLPEKYKEIFFDQSKNGYAGYIDGGASQEEFYKFIKPILEKMDGTEELLVKLNREDLLRKQRTFDNGSIPHQIHLGELHAILRRQEDFYPFLKDNREKIEKILTFRIPYYVGPLARGNSRFAWMTRKSEETITPWNFEEVVDKGASAQSFIERMTNFDKNLPNEKVLPKHSLLYEYFTVYNELTKVKYVTEGMRKPAFLSGEQKKAIVDLLFKTNRKVTVKQLKEDYFKKIECFDSVEISGVEDRFNASLGTYHDLLKIIKDKDFLDNEENEDILEDIVLTLTLFEDREMIEERLKTYAHLFDDKVMKQLKRRRYTGWGRLSRKLINGIRDKQSGKTILDFLKSDGFANRNFMQLIHDDSLTFKEDIQKAQVSGQGDSLHEHIANLAGSPAIKKGILQTVKVVDELVKVMGRHKPENIVIEMARENQTTQKGQKNSRERMKRIEEGIKELGSQILKEHPVENTQLQNEKLYLYYLQNGRDMYVDQELDINRLSDYDVDHIVPQSFLKDDSIDNKVLTRSDKARGKSDNVPSEEVVKKMKNYWRQLLNAKLITQRKFDNLTKAERGGLSELDKAGFIKRQLVETRQITKHVAQILDSRMNTKYDENDKLIREVKVITLKSKLVSDFRKDFQFYKVREINNYHHAHDAYLNAVVGTALIKKYPKLESEFVYGDYKVYDVRKMIAKSEQEIGKATAKYFFYSNIMNFFKTEITLANGEIRKRPLIETNGETGEIVWDKGRDFATVRKVLSMPQVNIVKKTEVQTGGFSKESILPKRNSDKLIARKKDWDPKKYGGFDSPTVAYSVLVVAKVEKGKSKKLKSVKELLGITIMERSSFEKNPIDFLEAKGYKEVKKDLIIKLPKYSLFELENGRKRMLASAGELQKGNELALPSKYVNFLYLASHYEKLKGSPEDNEQKQLFVEQHKHYLDEIIEQISEFSKRVILADANLDKVLSAYNKHRDKPIREQAENIIHLFTLTNLGAPAAFKYFDTTIDRKRYTSTKEVLDATLIHQSITGLYETRIDLSQLGGDGGPAPAPAPAPAPGGMNPLQLLQPLPAEIKGTKLLAHWNSGATITCIPESFLEDEQPIKKTLIKTIHGEKQQNVYYVTFKVKGRKVEAEVIASPYEYILLSPTDVPWLTQQPLQLTILVPLQEYQEKILSKTALPEDQKQQLKTLFVKYDNLWQHWENQVGHRKIRPHNIATGDYPPRPQKQYPINPKAKPSIQIVIDDLLKQGVLTPQNSTMNTPVYPVPKPDGRWRMVLDYREVNKTIPLTAAQNQHSAGILATIVRQKYKTTLDLANGFWAHPITPESYWLTAFTWQGKQYCWTRLPQGFLNSPALFTADVVDLLKEIPNVQVYVDDIYLSHDDPKEHVQQLEKVFQILLQAGYVVSLKKSEIGQKTVEFLGFNITKEGRGLTDTFKTKLLNITPPKDLKQLQSILGLLNFARNFIPNFAELVQPLYNLIASAKGKYIEWSEENTKQLNMVIEALNTASNLEERLPEQRLVIKVNTSPSAGYVRYYNETGKKPIMYLNYVFSKAELKFSMLEKLLTTMHKALIKAMDLAMGQEILVYSPIVSMTKIQKTPLPERKALPIRWITWMTYLEDPRIQFHYDKTLPELKHIPDVYTSSQSPVKHPSQYEGVFYTDGSAIKSPDPTKSNNAGMGIVHATYKPEYQVLNQWSIPLGNHTAQMAEIAAVEFACKKALKIPGPVLVITDSFYVAESANKELPYWKSNGFVNNKKKPLKHISKWKSIAECLSMKPDITIQHEKGISLQIPVFILKGNALADKLATQGSYVVNAGKRTADGSEFEKRTADGSEFESPKKKAKVE

SEQ ID NO: 1286 - protein, 2176 aa, synthetic construct
MPAAKRVKLDGGDKKYSIGLDIGTNSVGWAVITDEYKVPSKKFKVLGNTDRHSIKKNLIGALLFDSGETAEATRLKRTARRRYTRRKNRICYLQEIFSNEMAKVDDSFFHRLEESFLVEEDKKHERHPIFGNIVDEVAYHEKYPTIYHLRKKLVDSTDKADLRLIYLALAHMIKFRGHFLIEGDLNPDNSDVDKLFIQLVQTYNQLFEENPINASGVDAKAILSARLSKSRRLENLIAQLPGEKKNGLFGNLIALSLGLTPNFKSNFDLAEDAKLQLSKDTYDDDLDNLLAQIGDQYADLFLAAKNLSDAILLSDILRVNTEITKAPLSASMIKRYDEHHQDLTLLKALVRQQLPEKYKEIFFDQSKNGYAGYIDGGASQEEFYKFIKPILEKMDGTEELLVKLNREDLLRKQRTFDNGSIPHQIHLGELHAILRRQEDFYPFLKDNREKIEKILTFRIPYYVGPLARGNSRFAWMTRKSEETITPWNFEEVVDKGASAQSFIERMTNFDKNLPNEKVLPKHSLLYEYFTVYNELTKVKYVTEGMRKPAFLSGEQKKAIVDLLFKTNRKVTVKQLKEDYFKKIECFDSVEISGVEDRFNASLGTYHDLLKIIKDKDFLDNEENEDILEDIVLTLTLFEDREMIEERLKTYAHLFDDKVMKQLKRRRYTGWGRLSRKLINGIRDKQSGKTILDFLKSDGFANRNFMQLIHDDSLTFKEDIQKAQVSGQGDSLHEHIANLAGSPAIKKGILQTVKVVDELVKVMGRHKPENIVIEMARENQTTQKGQKNSRERMKRIEEGIKELGSQILKEHPVENTQLQNEKLYLYYLQNGRDMYVDQELDINRLSDYDVDHIVPQSFLKDDSIDNKVLTRSDKARGKSDNVPSEEVVKKMKNYWRQLLNAKLITQRKFDNLTKAERGGLSELDKAGFIKRQLVETRQITKHVAQILDSRMNTKYDENDKLIREVKVITLKSKLVSDFRKDFQFYKVREINNYHHAHDAYLNAVVGTALIKKYPKLESEFVYGDYKVYDVRKMIAKSEQEIGKATAKYFFYSNIMNFFKTEITLANGEIRKRPLIETNGETGEIVWDKGRDFATVRKVLSMPQVNIVKKTEVQTGGFSKESILPKRNSDKLIARKKDWDPKKYGGFDSPTVAYSVLVVAKVEKGKSKKLKSVKELLGITIMERSSFEKNPIDFLEAKGYKEVKKDLIIKLPKYSLFELENGRKRMLASAGELQKGNELALPSKYVNFLYLASHYEKLKGSPEDNEQKQLFVEQHKHYLDEIIEQISEFSKRVILADANLDKVLSAYNKHRDKPIREQAENIIHLFTLTNLGAPAAFKYFDTTIDRKRYTSTKEVLDATLIHQSITGLYETRIDLSQLGGDGGGGSPAPEAAAKGGMNPLQLLQPLPAEIKGTKLLAHWNSGATITCIPESFLEDEQPIKKTLIKTIHGEKQQNVYYVTFKVKGRKVEAEVIASPYEYILLSPTDVPWLTQQPLQLTILVPLQEYQEKILSKTALPEDQKQQLKTLFVKYDNLWQHWENQVGHRKIRPHNIATGDYPPRPQKQYPINPKAKPSIQIVIDDLLKQGVLTPQNSTMNTPVYPVPKPDGRWRMVLDYREVNKTIPLTAAQNQHSAGILATIVRQKYKTTLDLANGFWAHPITPESYWLTAFTWQGKQYCWTRLPQGFLNSPALFTADVVDLLKEIPNVQVYVDDIYLSHDDPKEHVQQLEKVFQILLQAGYVVSLKKSEIGQKTVEFLGFNITKEGRGLTDTFKTKLLNITPPKDLKQLQSILGLLNFARNFIPNFAELVQPLYNLIASAKGKYIEWSEENTKQLNMVIEALNTASNLEERLPEQRLVIKVNTSPSAGYVRYYNETGKKPIMYLNYVFSKAELKFSMLEKLLTTMHKALIKAMDLAMGQEILVYSPIVSMTKIQKTPLPERKALPIRWITWMTYLEDPRIQFHYDKTLPELKHIPDVYTSSQSPVKHPSQYEGVFYTDGSAIKSPDPTKSNNAGMGIVHATYKPEYQVLNQWSIPLGNHTAQMAEIAAVEFACKKALKIPGPVLVITDSFYVAESANKELPYWKSNGFVNNKKKPLKHISKWKSIAECLSMKPDITIQHEKGISLQIPVFILKGNALADKLATQGSYVVNAGKRTADGSEFEKRTADGSEFESPKKKAKVE

SEQ ID NO: 1287 - protein, 2176 aa, synthetic construct
MPAAKRVKLDGGDKKYSIGLDIGTNSVGWAVITDEYKVPSKKFKVLGNTDRHSIKKNLIGALLFDSGETAEATRLKRTARRRYTRRKNRICYLQEIFSNEMAKVDDSFFHRLEESFLVEEDKKHERHPIFGNIVDEVAYHEKYPTIYHLRKKLVDSTDKADLRLIYLALAHMIKFRGHFLIEGDLNPDNSDVDKLFIQLVQTYNQLFEENPINASGVDAKAILSARLSKSRRLENLIAQLPGEKKNGLFGNLIALSLGLTPNFKSNFDLAEDAKLQLSKDTYDDDLDNLLAQIGDQYADLFLAAKNLSDAILLSDILRVNTEITKAPLSASMIKRYDEHHQDLTLLKALVRQQLPEKYKEIFFDQSKNGYAGYIDGGASQEEFYKFIKPILEKMDGTEELLVKLNREDLLRKQRTFDNGSIPHQIHLGELHAILRRQEDFYPFLKDNREKIEKILTFRIPYYVGPLARGNSRFAWMTRKSEETITPWNFEEVVDKGASAQSFIERMTNFDKNLPNEKVLPKHSLLYEYFTVYNELTKVKYVTEGMRKPAFLSGEQKKAIVDLLFKTNRKVTVKQLKEDYFKKIECFDSVEISGVEDRFNASLGTYHDLLKIIKDKDFLDNEENEDILEDIVLTLTLFEDREMIEERLKTYAHLFDDKVMKQLKRRRYTGWGRLSRKLINGIRDKQSGKTILDFLKSDGFANRNFMQLIHDDSLTFKEDIQKAQVSGQGDSLHEHIANLAGSPAIKKGILQTVKVVDELVKVMGRHKPENIVIEMARENQTTQKGQKNSRERMKRIEEGIKELGSQILKEHPVENTQLQNEKLYLYYLQNGRDMYVDQELDINRLSDYDVDHIVPQSFLKDDSIDNKVLTRSDKARGKSDNVPSEEVVKKMKNYWRQLLNAKLITQRKFDNLTKAERGGLSELDKAGFIKRQLVETRQITKHVAQILDSRMNTKYDENDKLIREVKVITLKSKLVSDFRKDFQFYKVREINNYHHAHDAYLNAVVGTALIKKYPKLESEFVYGDYKVYDVRKMIAKSEQEIGKATAKYFFYSNIMNFFKTEITLANGEIRKRPLIETNGETGEIVWDKGRDFATVRKVLSMPQVNIVKKTEVQTGGFSKESILPKRNSDKLIARKKDWDPKKYGGFDSPTVAYSVLVVAKVEKGKSKKLKSVKELLGITIMERSSFEKNPIDFLEAKGYKEVKKDLIIKLPKYSLFELENGRKRMLASAGELQKGNELALPSKYVNFLYLASHYEKLKGSPEDNEQKQLFVEQHKHYLDEIIEQISEFSKRVILADANLDKVLSAYNKHRDKPIREQAENIIHLFTLTNLGAPAAFKYFDTTIDRKRYTSTKEVLDATLIHQSITGLYETRIDLSQLGGDGGEAAAKGGSPAPGGMNPLQLLQPLPAEIKGTKLLAHWNSGATITCIPESFLEDEQPIKKTLIKTIHGEKQQNVYYVTFKVKGRKVEAEVIASPYEYILLSPTDVPWLTQQPLQLTILVPLQEYQEKILSKTALPEDQKQQLKTLFVKYDNLWQHWENQVGHRKIRPHNIATGDYPPRPQKQYPINPKAKPSIQIVIDDLLKQGVLTPQNSTMNTPVYPVPKPDGRWRMVLDYREVNKTIPLTAAQNQHSAGILATIVRQKYKTTLDLANGFWAHPITPESYWLTAFTWQGKQYCWTRLPQGFLNSPALFTADVVDLLKEIPNVQVYVDDIYLSHDDPKEHVQQLEKVFQILLQAGYVVSLKKSEIGQKTVEFLGFNITKEGRGLTDTFKTKLLNITPPKDLKQLQSILGLLNFARNFIPNFAELVQPLYNLIASAKGKYIEWSEENTKQLNMVIEALNTASNLEERLPEQRLVIKVNTSPSAGYVRYYNETGKKPIMYLNYVFSKAELKFSMLEKLLTTMHKALIKAMDLAMGQEILVYSPIVSMTKIQKTPLPERKALPIRWITWMTYLEDPRIQFHYDKTLPELKHIPDVYTSSQSPVKHPSQYEGVFYTDGSAIKSPDPTKSNNAGMGIVHATYKPEYQVLNQWSIPLGNHTAQMAEIAAVEFACKKALKIPGPVLVITDSFYVAESANKELPYWKSNGFVNNKKKPLKHISKWKSIAECLSMKPDITIQHEKGISLQIPVFILKGNALADKLATQGSYVVNAGKRTADGSEFEKRTADGSEFESPKKKAKVE

SEQ ID NO: 1288 - protein, 2180 aa, synthetic construct
MPAAKRVKLDGGDKKYSIGLDIGTNSVGWAVITDEYKVPSKKFKVLGNTDRHSIKKNLIGALLFDSGETAEATRLKRTARRRYTRRKNRICYLQEIFSNEMAKVDDSFFHRLEESFLVEEDKKHERHPIFGNIVDEVAYHEKYPTIYHLRKKLVDSTDKADLRLIYLALAHMIKFRGHFLIEGDLNPDNSDVDKLFIQLVQTYNQLFEENPINASGVDAKAILSARLSKSRRLENLIAQLPGEKKNGLFGNLIALSLGLTPNFKSNFDLAEDAKLQLSKDTYDDDLDNLLAQIGDQYADLFLAAKNLSDAILLSDILRVNTEITKAPLSASMIKRYDEHHQDLTLLKALVRQQLPEKYKEIFFDQSKNGYAGYIDGGASQEEFYKFIKPILEKMDGTEELLVKLNREDLLRKQRTFDNGSIPHQIHLGELHAILRRQEDFYPFLKDNREKIEKILTFRIPYYVGPLARGNSRFAWMTRKSEETITPWNFEEVVDKGASAQSFIERMTNFDKNLPNEKVLPKHSLLYEYFTVYNELTKVKYVTEGMRKPAFLSGEQKKAIVDLLFKTNRKVTVKQLKEDYFKKIECFDSVEISGVEDRFNASLGTYHDLLKIIKDKDFLDNEENEDILEDIVLTLTLFEDREMIEERLKTYAHLFDDKVMKQLKRRRYTGWGRLSRKLINGIRDKQSGKTILDFLKSDGFANRNFMQLIHDDSLTFKEDIQKAQVSGQGDSLHEHIANLAGSPAIKKGILQTVKVVDELVKVMGRHKPENIVIEMARENQTTQKGQKNSRERMKRIEEGIKELGSQILKEHPVENTQLQNEKLYLYYLQNGRDMYVDQELDINRLSDYDVDHIVPQSFLKDDSIDNKVLTRSDKARGKSDNVPSEEVVKKMKNYWRQLLNAKLITQRKFDNLTKAERGGLSELDKAGFIKRQLVETRQITKHVAQILDSRMNTKYDENDKLIREVKVITLKSKLVSDFRKDFQFYKVREINNYHHAHDAYLNAVVGTALIKKYPKLESEFVYGDYKVYDVRKMIAKSEQEIGKATAKYFFYSNIMNFFKTEITLANGEIRKRPLIETNGETGEIVWDKGRDFATVRKVLSMPQVNIVKKTEVQTGGFSKESILPKRNSDKLIARKKDWDPKKYGGFDSPTVAYSVLVVAKVEKGKSKKLKSVKELLGITIMERSSFEKNPIDFLEAKGYKEVKKDLIIKLPKYSLFELENGRKRMLASAGELQKGNELALPSKYVNFLYLASHYEKLKGSPEDNEQKQLFVEQHKHYLDEIIEQISEFSKRVILADANLDKVLSAYNKHRDKPIREQAENIIHLFTLTNLGAPAAFKYFDTTIDRKRYTSTKEVLDATLIHQSITGLYETRIDLSQLGGDGGEAAAKEAAAKEAAAKGGMNPLQLLQPLPAEIKGTKLLAHWNSGATITCIPESFLEDEQPIKKTLIKTIHGEKQQNVYYVTFKVKGRKVEAEVIASPYEYILLSPTDVPWLTQQPLQLTILVPLQEYQEKILSKTALPEDQKQQLKTLFVKYDNLWQHWENQVGHRKIRPHNIATGDYPPRPQKQYPINPKAKPSIQIVIDDLLKQGVLTPQNSTMNTPVYPVPKPDGRWRMVLDYREVNKTIPLTAAQNQHSAGILATIVRQKYKTTLDLANGFWAHPITPESYWLTAFTWQGKQYCWTRLPQGFLNSPALFTADVVDLLKEIPNVQVYVDDIYLSHDDPKEHVQQLEKVFQILLQAGYVVSLKKSEIGQKTVEFLGFNITKEGRGLTDTFKTKLLNITPPKDLKQLQSILGLLNFARNFIPNFAELVQPLYNLIASAKGKYIEWSEENTKQLNMVIEALNTASNLEERLPEQRLVIKVNTSPSAGYVRYYNETGKKPIMYLNYVFSKAELKFSMLEKLLTTMHKALIKAMDLAMGQEILVYSPIVSMTKIQKTPLPERKALPIRWITWMTYLEDPRIQFHYDKTLPELKHIPDVYTSSQSPVKHPSQYEGVFYTDGSAIKSPDPTKSNNAGMGIVHATYKPEYQVLNQWSIPLGNHTAQMAEIAAVEFACKKALKIPGPVLVITDSFYVAESANKELPYWKSNGFVNNKKKPLKHISKWKSIAECLSMKPDITIQHEKGISLQIPVFILKGNALADKLATQGSYVVNAGKRTADGSEFEKRTADGSEFESPKKKAKVE

SEQ ID NO: 1289 - protein, 2177 aa, synthetic construct
MPAAKRVKLDGGDKKYSIGLDIGTNSVGWAVITDEYKVPSKKFKVLGNTDRHSIKKNLIGALLFDSGETAEATRLKRTARRRYTRRKNRICYLQEIFSNEMAKVDDSFFHRLEESFLVEEDKKHERHPIFGNIVDEVAYHEKYPTIYHLRKKLVDSTDKADLRLIYLALAHMIKFRGHFLIEGDLNPDNSDVDKLFIQLVQTYNQLFEENPINASGVDAKAILSARLSKSRRLENLIAQLPGEKKNGLFGNLIALSLGLTPNFKSNFDLAEDAKLQLSKDTYDDDLDNLLAQIGDQYADLFLAAKNLSDAILLSDILRVNTEITKAPLSASMIKRYDEHHQDLTLLKALVRQQLPEKYKEIFFDQSKNGYAGYIDGGASQEEFYKFIKPILEKMDGTEELLVKLNREDLLRKQRTFDNGSIPHQIHLGELHAILRRQEDFYPFLKDNREKIEKILTFRIPYYVGPLARGNSRFAWMTRKSEETITPWNFEEVVDKGASAQSFIERMTNFDKNLPNEKVLPKHSLLYEYFTVYNELTKVKYVTEGMRKPAFLSGEQKKAIVDLLFKTNRKVTVKQLKEDYFKKIECFDSVEISGVEDRFNASLGTYHDLLKIIKDKDFLDNEENEDILEDIVLTLTLFEDREMIEERLKTYAHLFDDKVMKQLKRRRYTGWGRLSRKLINGIRDKQSGKTILDFLKSDGFANRNFMQLIHDDSLTFKEDIQKAQVSGQGDSLHEHIANLAGSPAIKKGILQTVKVVDELVKVMGRHKPENIVIEMARENQTTQKGQKNSRERMKRIEEGIKELGSQILKEHPVENTQLQNEKLYLYYLQNGRDMYVDQELDINRLSDYDVDHIVPQSFLKDDSIDNKVLTRSDKARGKSDNVPSEEVVKKMKNYWRQLLNAKLITQRKFDNLTKAERGGLSELDKAGFIKRQLVETRQITKHVAQILDSRMNTKYDENDKLIREVKVITLKSKLVSDFRKDFQFYKVREINNYHHAHDAYLNAVVGTALIKKYPKLESEFVYGDYKVYDVRKMIAKSEQEIGKATAKYFFYSNIMNFFKTEITLANGEIRKRPLIETNGETGEIVWDKGRDFATVRKVLSMPQVNIVKKTEVQTGGFSKESILPKRNSDKLIARKKDWDPKKYGGFDSPTVAYSVLVVAKVEKGKSKKLKSVKELLGITIMERSSFEKNPIDFLEAKGYKEVKKDLIIKLPKYSLFELENGRKRMLASAGELQKGNELALPSKYVNFLYLASHYEKLKGSPEDNEQKQLFVEQHKHYLDEIIEQISEFSKRVILADANLDKVLSAYNKHRDKPIREQAENIIHLFTLTNLGAPAAFKYFDTTIDRKRYTSTKEVLDATLIHQSITGLYETRIDLSQLGGDGGGGSGGSGGSGGSGGMNPLQLLQPLPAEIKGTKLLAHWNSGATITCIPESFLEDEQPIKKTLIKTIHGEKQQNVYYVTFKVKGRKVEAEVIASPYEYILLSPTDVPWLTQQPLQLTILVPLQEYQEKILSKTALPEDQKQQLKTLFVKYDNLWQHWENQVGHRKIRPHNIATGDYPPRPQKQYPINPKAKPSIQIVIDDLLKQGVLTPQNSTMNTPVYPVPKPDGRWRMVLDYREVNKTIPLTAAQNQHSAGILATIVRQKYKTTLDLANGFWAHPITPESYWLTAFTWQGKQYCWTRLPQGFLNSPALFTADVVDLLKEIPNVQVYVDDIYLSHDDPKEHVQQLEKVFQILLQAGYVVSLKKSEIGQKTVEFLGFNITKEGRGLTDTFKTKLLNITPPKDLKQLQSILGLLNFARNFIPNFAELVQPLYNLIASAKGKYIEWSEENTKQLNMVIEALNTASNLEERLPEQRLVIKVNTSPSAGYVRYYNETGKKPIMYLNYVFSKAELKFSMLEKLLTTMHKALIKAMDLAMGQEILVYSPIVSMTKIQKTPLPERKALPIRWITWMTYLEDPRIQFHYDKTLPELKHIPDVYTSSQSPVKHPSQYEGVFYTDGSAIKSPDPTKSNNAGMGIVHATYKPEYQVLNQWSIPLGNHTAQMAEIAAVEFACKKALKIPGPVLVITDSFYVAESANKELPYWKSNGFVNNKKKPLKHISKWKSIAECLSMKPDITIQHEKGISLQIPVFILKGNALADKLATQGSYVVNAGKRTADGSEFEKRTADGSEFESPKKKAKVE

SEQ ID NO: 1290 - protein, 2174 aa, synthetic construct
MPAAKRVKLDGGDKKYSIGLDIGTNSVGWAVITDEYKVPSKKFKVLGNTDRHSIKKNLIGALLFDSGETAEATRLKRTARRRYTRRKNRICYLQEIFSNEMAKVDDSFFHRLEESFLVEEDKKHERHPIFGNIVDEVAYHEKYPTIYHLRKKLVDSTDKADLRLIYLALAHMIKFRGHFLIEGDLNPDNSDVDKLFIQLVQTYNQLFEENPINASGVDAKAILSARLSKSRRLENLIAQLPGEKKNGLFGNLIALSLGLTPNFKSNFDLAEDAKLQLSKDTYDDDLDNLLAQIGDQYADLFLAAKNLSDAILLSDILRVNTEITKAPLSASMIKRYDEHHQDLTLLKALVRQQLPEKYKEIFFDQSKNGYAGYIDGGASQEEFYKFIKPILEKMDGTEELLVKLNREDLLRKQRTFDNGSIPHQIHLGELHAILRRQEDFYPFLKDNREKIEKILTFRIPYYVGPLARGNSRFAWMTRKSEETITPWNFEEVVDKGASAQSFIERMTNFDKNLPNEKVLPKHSLLYEYFTVYNELTKVKYVTEGMRKPAFLSGEQKKAIVDLLFKTNRKVTVKQLKEDYFKKIECFDSVEISGVEDRFNASLGTYHDLLKIIKDKDFLDNEENEDILEDIVLTLTLFEDREMIEERLKTYAHLFDDKVMKQLKRRRYTGWGRLSRKLINGIRDKQSGKTILDFLKSDGFANRNFMQLIHDDSLTFKEDIQKAQVSGQGDSLHEHIANLAGSPAIKKGILQTVKVVDELVKVMGRHKPENIVIEMARENQTTQKGQKNSRERMKRIEEGIKELGSQILKEHPVENTQLQNEKLYLYYLQNGRDMYVDQELDINRLSDYDVDHIVPQSFLKDDSIDNKVLTRSDKARGKSDNVPSEEVVKKMKNYWRQLLNAKLITQRKFDNLTKAERGGLSELDKAGFIKRQLVETRQITKHVAQILDSRMNTKYDENDKLIREVKVITLKSKLVSDFRKDFQFYKVREINNYHHAHDAYLNAVVGTALIKKYPKLESEFVYGDYKVYDVRKMIAKSEQEIGKATAKYFFYSNIMNFFKTEITLANGEIRKRPLIETNGETGEIVWDKGRDFATVRKVLSMPQVNIVKKTEVQTGGFSKESILPKRNSDKLIARKKDWDPKKYGGFDSPTVAYSVLVVAKVEKGKSKKLKSVKELLGITIMERSSFEKNPIDFLEAKGYKEVKKDLIIKLPKYSLFELENGRKRMLASAGELQKGNELALPSKYVNFLYLASHYEKLKGSPEDNEQKQLFVEQHKHYLDEIIEQISEFSKRVILADANLDKVLSAYNKHRDKPIREQAENIIHLFTLTNLGAPAAFKYFDTTIDRKRYTSTKEVLDATLIHQSITGLYETRIDLSQLGGDGGGGSGGGPAPGGMNPLQLLQPLPAEIKGTKLLAHWNSGATITCIPESFLEDEQPIKKTLIKTIHGEKQQNVYYVTFKVKGRKVEAEVIASPYEYILLSPTDVPWLTQQPLQLTILVPLQEYQEKILSKTALPEDQKQQLKTLFVKYDNLWQHWENQVGHRKIRPHNIATGDYPPRPQKQYPINPKAKPSIQIVIDDLLKQGVLTPQNSTMNTPVYPVPKPDGRWRMVLDYREVNKTIPLTAAQNQHSAGILATIVRQKYKTTLDLANGFWAHPITPESYWLTAFTWQGKQYCWTRLPQGFLNSPALFTADVVDLLKEIPNVQVYVDDIYLSHDDPKEHVQQLEKVFQILLQAGYVVSLKKSEIGQKTVEFLGFNITKEGRGLTDTFKTKLLNITPPKDLKQLQSILGLLNFARNFIPNFAELVQPLYNLIASAKGKYIEWSEENTKQLNMVIEALNTASNLEERLPEQRLVIKVNTSPSAGYVRYYNETGKKPIMYLNYVFSKAELKFSMLEKLLTTMHKALIKAMDLAMGQEILVYSPIVSMTKIQKTPLPERKALPIRWITWMTYLEDPRIQFHYDKTLPELKHIPDVYTSSQSPVKHPSQYEGVFYTDGSAIKSPDPTKSNNAGMGIVHATYKPEYQVLNQWSIPLGNHTAQMAEIAAVEFACKKALKIPGPVLVITDSFYVAESANKELPYWKSNGFVNNKKKPLKHISKWKSIAECLSMKPDITIQHEKGISLQIPVFILKGNALADKLATQGSYVVNAGKRTADGSEFEKRTADGSEFESPKKKAKVE

SEQ ID NO: 1291 - protein, 2176 aa, synthetic construct
MPAAKRVKLDGGDKKYSIGLDIGTNSVGWAVITDEYKVPSKKFKVLGNTDRHSIKKNLIGALLFDSGETAEATRLKRTARRRYTRRKNRICYLQEIFSNEMAKVDDSFFHRLEESFLVEEDKKHERHPIFGNIVDEVAYHEKYPTIYHLRKKLVDSTDKADLRLIYLALAHMIKFRGHFLIEGDLNPDNSDVDKLFIQLVQTYNQLFEENPINASGVDAKAILSARLSKSRRLENLIAQLPGEKKNGLFGNLIALSLGLTPNFKSNFDLAEDAKLQLSKDTYDDDLDNLLAQIGDQYADLFLAAKNLSDAILLSDILRVNTEITKAPLSASMIKRYDEHHQDLTLLKALVRQQLPEKYKEIFFDQSKNGYAGYIDGGASQEEFYKFIKPILEKMDGTEELLVKLNREDLLRKQRTFDNGSIPHQIHLGELHAILRRQEDFYPFLKDNREKIEKILTFRIPYYVGPLARGNSRFAWMTRKSEETITPWNFEEVVDKGASAQSFIERMTNFDKNLPNEKVLPKHSLLYEYFTVYNELTKVKYVTEGMRKPAFLSGEQKKAIVDLLFKTNRKVTVKQLKEDYFKKIECFDSVEISGVEDRFNASLGTYHDLLKIIKDKDFLDNEENEDILEDIVLTLTLFEDREMIEERLKTYAHLFDDKVMKQLKRRRYTGWGRLSRKLINGIRDKQSGKTILDFLKSDGFANRNFMQLIHDDSLTFKEDIQKAQVSGQGDSLHEHIANLAGSPAIKKGILQTVKVVDELVKVMGRHKPENIVIEMARENQTTQKGQKNSRERMKRIEEGIKELGSQILKEHPVENTQLQNEKLYLYYLQNGRDMYVDQELDINRLSDYDVDHIVPQSFLKDDSIDNKVLTRSDKARGKSDNVPSEEVVKKMKNYWRQLLNAKLITQRKFDNLTKAERGGLSELDKAGFIKRQLVETRQITKHVAQILDSRMNTKYDENDKLIREVKVITLKSKLVSDFRKDFQFYKVREINNYHHAHDAYLNAVVGTALIKKYPKLESEFVYGDYKVYDVRKMIAKSEQEIGKATAKYFFYSNIMNFFKTEITLANGEIRKRPLIETNGETGEIVWDKGRDFATVRKVLSMPQVNIVKKTEVQTGGFSKESILPKRNSDKLIARKKDWDPKKYGGFDSPTVAYSVLVVAKVEKGKSKKLKSVKELLGITIMERSSFEKNPIDFLEAKGYKEVKKDLIIKLPKYSLFELENGRKRMLASAGELQKGNELALPSKYVNFLYLASHYEKLKGSPEDNEQKQLFVEQHKHYLDEIIEQISEFSKRVILADANLDKVLSAYNKHRDKPIREQAENIIHLFTLTNLGAPAAFKYFDTTIDRKRYTSTKEVLDATLIHQSITGLYETRIDLSQLGGDGGPAPGGSEAAAKGGMNPLQLLQPLPAEIKGTKLLAHWNSGATITCIPESFLEDEQPIKKTLIKTIHGEKQQNVYYVTFKVKGRKVEAEVIASPYEYILLSPTDVPWLTQQPLQLTILVPLQEYQEKILSKTALPEDQKQQLKTLFVKYDNLWQHWENQVGHRKIRPHNIATGDYPPRPQKQYPINPKAKPSIQIVIDDLLKQGVLTPQNSTMNTPVYPVPKPDGRWRMVLDYREVNKTIPLTAAQNQHSAGILATIVRQKYKTTLDLANGFWAHPITPESYWLTAFTWQGKQYCWTRLPQGFLNSPALFTADVVDLLKEIPNVQVYVDDIYLSHDDPKEHVQQLEKVFQILLQAGYVVSLKKSEIGQKTVEFLGFNITKEGRGLTDTFKTKLLNITPPKDLKQLQSILGLLNFARNFIPNFAELVQPLYNLIASAKGKYIEWSEENTKQLNMVIEALNTASNLEERLPEQRLVIKVNTSPSAGYVRYYNETGKKPIMYLNYVFSKAELKFSMLEKLLTTMHKALIKAMDLAMGQEILVYSPIVSMTKIQKTPLPERKALPIRWITWMTYLEDPRIQFHYDKTLPELKHIPDVYTSSQSPVKHPSQYEGVFYTDGSAIKSPDPTKSNNAGMGIVHATYKPEYQVLNQWSIPLGNHTAQMAEIAAVEFACKKALKIPGPVLVITDSFYVAESANKELPYWKSNGFVNNKKKPLKHISKWKSIAECLSMKPDITIQHEKGISLQIPVFILKGNALADKLATQGSYVVNAGKRTADGSEFEKRTADGSEFESPKKKAKVE

SEQ ID NO: 1292 - protein, 2173 aa, synthetic construct
MPAAKRVKLDGGDKKYSIGLDIGTNSVGWAVITDEYKVPSKKFKVLGNTDRHSIKKNLIGALLFDSGETAEATRLKRTARRRYTRRKNRICYLQEIFSNEMAKVDDSFFHRLEESFLVEEDKKHERHPIFGNIVDEVAYHEKYPTIYHLRKKLVDSTDKADLRLIYLALAHMIKFRGHFLIEGDLNPDNSDVDKLFIQLVQTYNQLFEENPINASGVDAKAILSARLSKSRRLENLIAQLPGEKKNGLFGNLIALSLGLTPNFKSNFDLAEDAKLQLSKDTYDDDLDNLLAQIGDQYADLFLAAKNLSDAILLSDILRVNTEITKAPLSASMIKRYDEHHQDLTLLKALVRQQLPEKYKEIFFDQSKNGYAGYIDGGASQEEFYKFIKPILEKMDGTEELLVKLNREDLLRKQRTFDNGSIPHQIHLGELHAILRRQEDFYPFLKDNREKIEKILTFRIPYYVGPLARGNSRFAWMTRKSEETITPWNFEEVVDKGASAQSFIERMTNFDKNLPNEKVLPKHSLLYEYFTVYNELTKVKYVTEGMRKPAFLSGEQKKAIVDLLFKTNRKVTVKQLKEDYFKKIECFDSVEISGVEDRFNASLGTYHDLLKIIKDKDFLDNEENEDILEDIVLTLTLFEDREMIEERLKTYAHLFDDKVMKQLKRRRYTGWGRLSRKLINGIRDKQSGKTILDFLKSDGFANRNFMQLIHDDSLTFKEDIQKAQVSGQGDSLHEHIANLAGSPAIKKGILQTVKVVDELVKVMGRHKPENIVIEMARENQTTQKGQKNSRERMKRIEEGIKELGSQILKEHPVENTQLQNEKLYLYYLQNGRDMYVDQELDINRLSDYDVDHIVPQSFLKDDSIDNKVLTRSDKARGKSDNVPSEEVVKKMKNYWRQLLNAKLITQRKFDNLTKAERGGLSELDKAGFIKRQLVETRQITKHVAQILDSRMNTKYDENDKLIREVKVITLKSKLVSDFRKDFQFYKVREINNYHHAHDAYLNAVVGTALIKKYPKLESEFVYGDYKVYDVRKMIAKSEQEIGKATAKYFFYSNIMNFFKTEITLANGEIRKRPLIETNGETGEIVWDKGRDFATVRKVLSMPQVNIVKKTEVQTGGFSKESILPKRNSDKLIARKKDWDPKKYGGFDSPTVAYSVLVVAKVEKGKSKKLKSVKELLGITIMERSSFEKNPIDFLEAKGYKEVKKDLIIKLPKYSLFELENGRKRMLASAGELQKGNELALPSKYVNFLYLASHYEKLKGSPEDNEQKQLFVEQHKHYLDEIIEQISEFSKRVILADANLDKVLSAYNKHRDKPIREQAENIIHLFTLTNLGAPAAFKYFDTTIDRKRYTSTKEVLDATLIHQSITGLYETRIDLSQLGGDGGGSSEAAAKGGMNPLQLLQPLPAEIKGTKLLAHWNSGATITCIPESFLEDEQPIKKTLIKTIHGEKQQNVYYVTFKVKGRKVEAEVIASPYEYILLSPTDVPWLTQQPLQLTILVPLQEYQEKILSKTALPEDQKQQLKTLFVKYDNLWQHWENQVGHRKIRPHNIATGDYPPRPQKQYPINPKAKPSIQIVIDDLLKQGVLTPQNSTMNTPVYPVPKPDGRWRMVLDYREVNKTIPLTAAQNQHSAGILATIVRQKYKTTLDLANGFWAHPITPESYWLTAFTWQGKQYCWTRLPQGFLNSPALFTADVVDLLKEIPNVQVYVDDIYLSHDDPKEHVQQLEKVFQILLQAGYVVSLKKSEIGQKTVEFLGFNITKEGRGLTDTFKTKLLNITPPKDLKQLQSILGLLNFARNFIPNFAELVQPLYNLIASAKGKYIEWSEENTKQLNMVIEALNTASNLEERLPEQRLVIKVNTSPSAGYVRYYNETGKKPIMYLNYVFSKAELKFSMLEKLLTTMHKALIKAMDLAMGQEILVYSPIVSMTKIQKTPLPERKALPIRWITWMTYLEDPRIQFHYDKTLPELKHIPDVYTSSQSPVKHPSQYEGVFYTDGSAIKSPDPTKSNNAGMGIVHATYKPEYQVLNQWSIPLGNHTAQMAEIAAVEFACKKALKIPGPVLVITDSFYVAESANKELPYWKSNGFVNNKKKPLKHISKWKSIAECLSMKPDITIQHEKGISLQIPVFILKGNALADKLATQGSYVVNAGKRTADGSEFEKRTADGSEFESPKKKAKVE

SEQ ID NO: 1293 - protein, 2176 aa, synthetic construct
MPAAKRVKLDGGDKKYSIGLDIGTNSVGWAVITDEYKVPSKKFKVLGNTDRHSIKKNLIGALLFDSGETAEATRLKRTARRRYTRRKNRICYLQEIFSNEMAKVDDSFFHRLEESFLVEEDKKHERHPIFGNIVDEVAYHEKYPTIYHLRKKLVDSTDKADLRLIYLALAHMIKFRGHFLIEGDLNPDNSDVDKLFIQLVQTYNQLFEENPINASGVDAKAILSARLSKSRRLENLIAQLPGEKKNGLFGNLIALSLGLTPNFKSNFDLAEDAKLQLSKDTYDDDLDNLLAQIGDQYADLFLAAKNLSDAILLSDILRVNTEITKAPLSASMIKRYDEHHQDLTLLKALVRQQLPEKYKEIFFDQSKNGYAGYIDGGASQEEFYKFIKPILEKMDGTEELLVKLNREDLLRKQRTFDNGSIPHQIHLGELHAILRRQEDFYPFLKDNREKIEKILTFRIPYYVGPLARGNSRFAWMTRKSEETITPWNFEEVVDKGASAQSFIERMTNFDKNLPNEKVLPKHSLLYEYFTVYNELTKVKYVTEGMRKPAFLSGEQKKAIVDLLFKTNRKVTVKQLKEDYFKKIECFDSVEISGVEDRFNASLGTYHDLLKIIKDKDFLDNEENEDILEDIVLTLTLFEDREMIEERLKTYAHLFDDKVMKQLKRRRYTGWGRLSRKLINGIRDKQSGKTILDFLKSDGFANRNFMQLIHDDSLTFKEDIQKAQVSGQGDSLHEHIANLAGSPAIKKGILQTVKVVDELVKVMGRHKPENIVIEMARENQTTQKGQKNSRERMKRIEEGIKELGSQILKEHPVENTQLQNEKLYLYYLQNGRDMYVDQELDINRLSDYDVDHIVPQSFLKDDSIDNKVLTRSDKARGKSDNVPSEEVVKKMKNYWRQLLNAKLITQRKFDNLTKAERGGLSELDKAGFIKRQLVETRQITKHVAQILDSRMNTKYDENDKLIREVKVITLKSKLVSDFRKDFQFYKVREINNYHHAHDAYLNAVVGTALIKKYPKLESEFVYGDYKVYDVRKMIAKSEQEIGKATAKYFFYSNIMNFFKTEITLANGEIRKRPLIETNGETGEIVWDKGRDFATVRKVLSMPQVNIVKKTEVQTGGFSKESILPKRNSDKLIARKKDWDPKKYGGFDSPTVAYSVLVVAKVEKGKSKKLKSVKELLGITIMERSSFEKNPIDFLEAKGYKEVKKDLIIKLPKYSLFELENGRKRMLASAGELQKGNELALPSKYVNFLYLASHYEKLKGSPEDNEQKQLFVEQHKHYLDEIIEQISEFSKRVILADANLDKVLSAYNKHRDKPIREQAENIIHLFTLTNLGAPAAFKYFDTTIDRKRYTSTKEVLDATLIHQSITGLYETRIDLSQLGGDGGGGSGSSEAAAKGGMNPLQLLQPLPAEIKGTKLLAHWNSGATITCIPESFLEDEQPIKKTLIKTIHGEKQQNVYYVTFKVKGRKVEAEVIASPYEYILLSPTDVPWLTQQPLQLTILVPLQEYQEKILSKTALPEDQKQQLKTLFVKYDNLWQHWENQVGHRKIRPHNIATGDYPPRPQKQYPINPKAKPSIQIVIDDLLKQGVLTPQNSTMNTPVYPVPKPDGRWRMVLDYREVNKTIPLTAAQNQHSAGILATIVRQKYKTTLDLANGFWAHPITPESYWLTAFTWQGKQYCWTRLPQGFLNSPALFTADVVDLLKEIPNVQVYVDDIYLSHDDPKEHVQQLEKVFQILLQAGYVVSLKKSEIGQKTVEFLGFNITKEGRGLTDTFKTKLLNITPPKDLKQLQSILGLLNFARNFIPNFAELVQPLYNLIASAKGKYIEWSEENTKQLNMVIEALNTASNLEERLPEQRLVIKVNTSPSAGYVRYYNETGKKPIMYLNYVFSKAELKFSMLEKLLTTMHKALIKAMDLAMGQEILVYSPIVSMTKIQKTPLPERKALPIRWITWMTYLEDPRIQFHYDKTLPELKHIPDVYTSSQSPVKHPSQYEGVFYTDGSAIKSPDPTKSNNAGMGIVHATYKPEYQVLNQWSIPLGNHTAQMAEIAAVEFACKKALKIPGPVLVITDSFYVAESANKELPYWKSNGFVNNKKKPLKHISKWKSIAECLSMKPDITIQHEKGISLQIPVFILKGNALADKLATQGSYVVNAGKRTADGSEFEKRTADGSEFESPKKKAKVE

SEQ ID NO: 1294 - protein, 2171 aa, synthetic construct
MPAAKRVKLDGGDKKYSIGLDIGTNSVGWAVITDEYKVPSKKFKVLGNTDRHSIKKNLIGALLFDSGETAEATRLKRTARRRYTRRKNRICYLQEIFSNEMAKVDDSFFHRLEESFLVEEDKKHERHPIFGNIVDEVAYHEKYPTIYHLRKKLVDSTDKADLRLIYLALAHMIKFRGHFLIEGDLNPDNSDVDKLFIQLVQTYNQLFEENPINASGVDAKAILSARLSKSRRLENLIAQLPGEKKNGLFGNLIALSLGLTPNFKSNFDLAEDAKLQLSKDTYDDDLDNLLAQIGDQYADLFLAAKNLSDAILLSDILRVNTEITKAPLSASMIKRYDEHHQDLTLLKALVRQQLPEKYKEIFFDQSKNGYAGYIDGGASQEEFYKFIKPILEKMDGTEELLVKLNREDLLRKQRTFDNGSIPHQIHLGELHAILRRQEDFYPFLKDNREKIEKILTFRIPYYVGPLARGNSRFAWMTRKSEETITPWNFEEVVDKGASAQSFIERMTNFDKNLPNEKVLPKHSLLYEYFTVYNELTKVKYVTEGMRKPAFLSGEQKKAIVDLLFKTNRKVTVKQLKEDYFKKIECFDSVEISGVEDRFNASLGTYHDLLKIIKDKDFLDNEENEDILEDIVLTLTLFEDREMIEERLKTYAHLFDDKVMKQLKRRRYTGWGRLSRKLINGIRDKQSGKTILDFLKSDGFANRNFMQLIHDDSLTFKEDIQKAQVSGQGDSLHEHIANLAGSPAIKKGILQTVKVVDELVKVMGRHKPENIVIEMARENQTTQKGQKNSRERMKRIEEGIKELGSQILKEHPVENTQLQNEKLYLYYLQNGRDMYVDQELDINRLSDYDVDHIVPQSFLKDDSIDNKVLTRSDKARGKSDNVPSEEVVKKMKNYWRQLLNAKLITQRKFDNLTKAERGGLSELDKAGFIKRQLVETRQITKHVAQILDSRMNTKYDENDKLIREVKVITLKSKLVSDFRKDFQFYKVREINNYHHAHDAYLNAVVGTALIKKYPKLESEFVYGDYKVYDVRKMIAKSEQEIGKATAKYFFYSNIMNFFKTEITLANGEIRKRPLIETNGETGEIVWDKGRDFATVRKVLSMPQVNIVKKTEVQTGGFSKESILPKRNSDKLIARKKDWDPKKYGGFDSPTVAYSVLVVAKVEKGKSKKLKSVKELLGITIMERSSFEKNPIDFLEAKGYKEVKKDLIIKLPKYSLFELENGRKRMLASAGELQKGNELALPSKYVNFLYLASHYEKLKGSPEDNEQKQLFVEQHKHYLDEIIEQISEFSKRVILADANLDKVLSAYNKHRDKPIREQAENIIHLFTLTNLGAPAAFKYFDTTIDRKRYTSTKEVLDATLIHQSITGLYETRIDLSQLGGDGGGGSGGSGGMNPLQLLQPLPAEIKGTKLLAHWNSGATITCIPESFLEDEQPIKKTLIKTIHGEKQQNVYYVTFKVKGRKVEAEVIASPYEYILLSPTDVPWLTQQPLQLTILVPLQEYQEKILSKTALPEDQKQQLKTLFVKYDNLWQHWENQVGHRKIRPHNIATGDYPPRPQKQYPINPKAKPSIQIVIDDLLKQGVLTPQNSTMNTPVYPVPKPDGRWRMVLDYREVNKTIPLTAAQNQHSAGILATIVRQKYKTTLDLANGFWAHPITPESYWLTAFTWQGKQYCWTRLPQGFLNSPALFTADVVDLLKEIPNVQVYVDDIYLSHDDPKEHVQQLEKVFQILLQAGYVVSLKKSEIGQKTVEFLGFNITKEGRGLTDTFKTKLLNITPPKDLKQLQSILGLLNFARNFIPNFAELVQPLYNLIASAKGKYIEWSEENTKQLNMVIEALNTASNLEERLPEQRLVIKVNTSPSAGYVRYYNETGKKPIMYLNYVFSKAELKFSMLEKLLTTMHKALIKAMDLAMGQEILVYSPIVSMTKIQKTPLPERKALPIRWITWMTYLEDPRIQFHYDKTLPELKHIPDVYTSSQSPVKHPSQYEGVFYTDGSAIKSPDPTKSNNAGMGIVHATYKPEYQVLNQWSIPLGNHTAQMAEIAAVEFACKKALKIPGPVLVITDSFYVAESANKELPYWKSNGFVNNKKKPLKHISKWKSIAECLSMKPDITIQHEKGISLQIPVFILKGNALADKLATQGSYVVNAGKRTADGSEFEKRTADGSEFESPKKKAKVE

SEQ ID NO: 1295 - protein, 2084 aa, synthetic construct
MPAAKRVKLDGGDKKYSIGLDIGTNSVGWAVITDEYKVPSKKFKVLGNTDRHSIKKNLIGALLFDSGETAEATRLKRTARRRYTRRKNRICYLQEIFSNEMAKVDDSFFHRLEESFLVEEDKKHERHPIFGNIVDEVAYHEKYPTIYHLRKKLVDSTDKADLRLIYLALAHMIKFRGHFLIEGDLNPDNSDVDKLFIQLVQTYNQLFEENPINASGVDAKAILSARLSKSRRLENLIAQLPGEKKNGLFGNLIALSLGLTPNFKSNFDLAEDAKLQLSKDTYDDDLDNLLAQIGDQYADLFLAAKNLSDAILLSDILRVNTEITKAPLSASMIKRYDEHHQDLTLLKALVRQQLPEKYKEIFFDQSKNGYAGYIDGGASQEEFYKFIKPILEKMDGTEELLVKLNREDLLRKQRTFDNGSIPHQIHLGELHAILRRQEDFYPFLKDNREKIEKILTFRIPYYVGPLARGNSRFAWMTRKSEETITPWNFEEVVDKGASAQSFIERMTNFDKNLPNEKVLPKHSLLYEYFTVYNELTKVKYVTEGMRKPAFLSGEQKKAIVDLLFKTNRKVTVKQLKEDYFKKIECFDSVEISGVEDRFNASLGTYHDLLKIIKDKDFLDNEENEDILEDIVLTLTLFEDREMIEERLKTYAHLFDDKVMKQLKRRRYTGWGRLSRKLINGIRDKQSGKTILDFLKSDGFANRNFMQLIHDDSLTFKEDIQKAQVSGQGDSLHEHIANLAGSPAIKKGILQTVKVVDELVKVMGRHKPENIVIEMARENQTTQKGQKNSRERMKRIEEGIKELGSQILKEHPVENTQLQNEKLYLYYLQNGRDMYVDQELDINRLSDYDVDHIVPQSFLKDDSIDNKVLTRSDKARGKSDNVPSEEVVKKMKNYWRQLLNAKLITQRKFDNLTKAERGGLSELDKAGFIKRQLVETRQITKHVAQILDSRMNTKYDENDKLIREVKVITLKSKLVSDFRKDFQFYKVREINNYHHAHDAYLNAVVGTALIKKYPKLESEFVYGDYKVYDVRKMIAKSEQEIGKATAKYFFYSNIMNFFKTEITLANGEIRKRPLIETNGETGEIVWDKGRDFATVRKVLSMPQVNIVKKTEVQTGGFSKESILPKRNSDKLIARKKDWDPKKYGGFDSPTVAYSVLVVAKVEKGKSKKLKSVKELLGITIMERSSFEKNPIDFLEAKGYKEVKKDLIIKLPKYSLFELENGRKRMLASAGELQKGNELALPSKYVNFLYLASHYEKLKGSPEDNEQKQLFVEQHKHYLDEIIEQISEFSKRVILADANLDKVLSAYNKHRDKPIREQAENIIHLFTLTNLGAPAAFKYFDTTIDRKRYTSTKEVLDATLIHQSITGLYETRIDLSQLGGDGGEAAAKPAPGGVPWLTQQPLQLTILVPLQEYQEKILSKTALPEDQKQQLKTLFVKYDNLWQHWENQVGHRKIRPHNIATGDYPPRPQKQYPINPKAKPSIQIVIDDLLKQGVLTPQNSTMNTPVYPVPKPDGRWRMVLDYREVNKTIPLTAAQNQHSAGILATIVRQKYKTTLDLANGFWAHPITPESYWLTAFTWQGKQYCWTRLPQGFLNSPALFTADVVDLLKEIPNVQVYVDDIYLSHDDPKEHVQQLEKVFQILLQAGYVVSLKKSEIGQKTVEFLGFNITKEGRGLTDTFKTKLLNITPPKDLKQLQSILGLLNFARNFIPNFAELVQPLYNLIASAKGKYIEWSEENTKQLNMVIEALNTASNLEERLPEQRLVIKVNTSPSAGYVRYYNETGKKPIMYLNYVFSKAELKFSMLEKLLTTMHKALIKAMDLAMGQEILVYSPIVSMTKIQKTPLPERKALPIRWITWMTYLEDPRIQFHYDKTLPELKHIPDVYTSSQSPVKHPSQYEGVFYTDGSAIKSPDPTKSNNAGMGIVHATYKPEYQVLNQWSIPLGNHTAQMAEIAAVEFACKKALKIPGPVLVITDSFYVAESANKELPYWKSNGFVNNKKKPLKHISKWKSIAECLSMKPDITIQHEKGISLQIPVFILKGNALADKLATQGSYVVNAGKRTADGSEFEKRTADGSEFESPKKKAKVE

SEQ ID NO: 1296 - protein, 2087 aa, synthetic construct
MPAAKRVKLDGGDKKYSIGLDIGTNSVGWAVITDEYKVPSKKFKVLGNTDRHSIKKNLIGALLFDSGETAEATRLKRTARRRYTRRKNRICYLQEIFSNEMAKVDDSFFHRLEESFLVEEDKKHERHPIFGNIVDEVAYHEKYPTIYHLRKKLVDSTDKADLRLIYLALAHMIKFRGHFLIEGDLNPDNSDVDKLFIQLVQTYNQLFEENPINASGVDAKAILSARLSKSRRLENLIAQLPGEKKNGLFGNLIALSLGLTPNFKSNFDLAEDAKLQLSKDTYDDDLDNLLAQIGDQYADLFLAAKNLSDAILLSDILRVNTEITKAPLSASMIKRYDEHHQDLTLLKALVRQQLPEKYKEIFFDQSKNGYAGYIDGGASQEEFYKFIKPILEKMDGTEELLVKLNREDLLRKQRTFDNGSIPHQIHLGELHAILRRQEDFYPFLKDNREKIEKILTFRIPYYVGPLARGNSRFAWMTRKSEETITPWNFEEVVDKGASAQSFIERMTNFDKNLPNEKVLPKHSLLYEYFTVYNELTKVKYVTEGMRKPAFLSGEQKKAIVDLLFKTNRKVTVKQLKEDYFKKIECFDSVEISGVEDRFNASLGTYHDLLKIIKDKDFLDNEENEDILEDIVLTLTLFEDREMIEERLKTYAHLFDDKVMKQLKRRRYTGWGRLSRKLINGIRDKQSGKTILDFLKSDGFANRNFMQLIHDDSLTFKEDIQKAQVSGQGDSLHEHIANLAGSPAIKKGILQTVKVVDELVKVMGRHKPENIVIEMARENQTTQKGQKNSRERMKRIEEGIKELGSQILKEHPVENTQLQNEKLYLYYLQNGRDMYVDQELDINRLSDYDVDHIVPQSFLKDDSIDNKVLTRSDKARGKSDNVPSEEVVKKMKNYWRQLLNAKLITQRKFDNLTKAERGGLSELDKAGFIKRQLVETRQITKHVAQILDSRMNTKYDENDKLIREVKVITLKSKLVSDFRKDFQFYKVREINNYHHAHDAYLNAVVGTALIKKYPKLESEFVYGDYKVYDVRKMIAKSEQEIGKATAKYFFYSNIMNFFKTEITLANGEIRKRPLIETNGETGEIVWDKGRDFATVRKVLSMPQVNIVKKTEVQTGGFSKESILPKRNSDKLIARKKDWDPKKYGGFDSPTVAYSVLVVAKVEKGKSKKLKSVKELLGITIMERSSFEKNPIDFLEAKGYKEVKKDLIIKLPKYSLFELENGRKRMLASAGELQKGNELALPSKYVNFLYLASHYEKLKGSPEDNEQKQLFVEQHKHYLDEIIEQISEFSKRVILADANLDKVLSAYNKHRDKPIREQAENIIHLFTLTNLGAPAAFKYFDTTIDRKRYTSTKEVLDATLIHQSITGLYETRIDLSQLGGDGGEAAAKGSSGGSGGVPWLTQQPLQLTILVPLQEYQEKILSKTALPEDQKQQLKTLFVKYDNLWQHWENQVGHRKIRPHNIATGDYPPRPQKQYPINPKAKPSIQIVIDDLLKQGVLTPQNSTMNTPVYPVPKPDGRWRMVLDYREVNKTIPLTAAQNQHSAGILATIVRQKYKTTLDLANGFWAHPITPESYWLTAFTWQGKQYCWTRLPQGFLNSPALFTADVVDLLKEIPNVQVYVDDIYLSHDDPKEHVQQLEKVFQILLQAGYVVSLKKSEIGQKTVEFLGFNITKEGRGLTDTFKTKLLNITPPKDLKQLQSILGLLNFARNFIPNFAELVQPLYNLIASAKGKYIEWSEENTKQLNMVIEALNTASNLEERLPEQRLVIKVNTSPSAGYVRYYNETGKKPIMYLNYVFSKAELKFSMLEKLLTTMHKALIKAMDLAMGQEILVYSPIVSMTKIQKTPLPERKALPIRWITWMTYLEDPRIQFHYDKTLPELKHIPDVYTSSQSPVKHPSQYEGVFYTDGSAIKSPDPTKSNNAGMGIVHATYKPEYQVLNQWSIPLGNHTAQMAEIAAVEFACKKALKIPGPVLVITDSFYVAESANKELPYWKSNGFVNNKKKPLKHISKWKSIAECLSMKPDITIQHEKGISLQIPVFILKGNALADKLATQGSYVVNAGKRTADGSEFEKRTADGSEFESPKKKAKVE

SEQ ID NO: 1297 - protein, 2094 aa, synthetic construct
MPAAKRVKLDGGDKKYSIGLDIGTNSVGWAVITDEYKVPSKKFKVLGNTDRHSIKKNLIGALLFDSGETAEATRLKRTARRRYTRRKNRICYLQEIFSNEMAKVDDSFFHRLEESFLVEEDKKHERHPIFGNIVDEVAYHEKYPTIYHLRKKLVDSTDKADLRLIYLALAHMIKFRGHFLIEGDLNPDNSDVDKLFIQLVQTYNQLFEENPINASGVDAKAILSARLSKSRRLENLIAQLPGEKKNGLFGNLIALSLGLTPNFKSNFDLAEDAKLQLSKDTYDDDLDNLLAQIGDQYADLFLAAKNLSDAILLSDILRVNTEITKAPLSASMIKRYDEHHQDLTLLKALVRQQLPEKYKEIFFDQSKNGYAGYIDGGASQEEFYKFIKPILEKMDGTEELLVKLNREDLLRKQRTFDNGSIPHQIHLGELHAILRRQEDFYPFLKDNREKIEKILTFRIPYYVGPLARGNSRFAWMTRKSEETITPWNFEEVVDKGASAQSFIERMTNFDKNLPNEKVLPKHSLLYEYFTVYNELTKVKYVTEGMRKPAFLSGEQKKAIVDLLFKTNRKVTVKQLKEDYFKKIECFDSVEISGVEDRFNASLGTYHDLLKIIKDKDFLDNEENEDILEDIVLTLTLFEDREMIEERLKTYAHLFDDKVMKQLKRRRYTGWGRLSRKLINGIRDKQSGKTILDFLKSDGFANRNFMQLIHDDSLTFKEDIQKAQVSGQGDSLHEHIANLAGSPAIKKGILQTVKVVDELVKVMGRHKPENIVIEMARENQTTQKGQKNSRERMKRIEEGIKELGSQILKEHPVENTQLQNEKLYLYYLQNGRDMYVDQELDINRLSDYDVDHIVPQSFLKDDSIDNKVLTRSDKARGKSDNVPSEEVVKKMKNYWRQLLNAKLITQRKFDNLTKAERGGLSELDKAGFIKRQLVETRQITKHVAQILDSRMNTKYDENDKLIREVKVITLKSKLVSDFRKDFQFYKVREINNYHHAHDAYLNAVVGTALIKKYPKLESEFVYGDYKVYDVRKMIAKSEQEIGKATAKYFFYSNIMNFFKTEITLANGEIRKRPLIETNGETGEIVWDKGRDFATVRKVLSMPQVNIVKKTEVQTGGFSKESILPKRNSDKLIARKKDWDPKKYGGFDSPTVAYSVLVVAKVEKGKSKKLKSVKELLGITIMERSSFEKNPIDFLEAKGYKEVKKDLIIKLPKYSLFELENGRKRMLASAGELQKGNELALPSKYVNFLYLASHYEKLKGSPEDNEQKQLFVEQHKHYLDEIIEQISEFSKRVILADANLDKVLSAYNKHRDKPIREQAENIIHLFTLTNLGAPAAFKYFDTTIDRKRYTSTKEVLDATLIHQSITGLYETRIDLSQLGGDGGGSSGSSGSSGSSGSSGSSGGVPWLTQQPLQLTILVPLQEYQEKILSKTALPEDQKQQLKTLFVKYDNLWQHWENQVGHRKIRPHNIATGDYPPRPQKQYPINPKAKPSIQIVIDDLLKQGVLTPQNSTMNTPVYPVPKPDGRWRMVLDYREVNKTIPLTAAQNQHSAGILATIVRQKYKTTLDLANGFWAHPITPESYWLTAFTWQGKQYCWTRLPQGFLNSPALFTADVVDLLKEIPNVQVYVDDIYLSHDDPKEHVQQLEKVFQILLQAGYVVSLKKSEIGQKTVEFLGFNITKEGRGLTDTFKTKLLNITPPKDLKQLQSILGLLNFARNFIPNFAELVQPLYNLIASAKGKYIEWSEENTKQLNMVIEALNTASNLEERLPEQRLVIKVNTSPSAGYVRYYNETGKKPIMYLNYVFSKAELKFSMLEKLLTTMHKALIKAMDLAMGQEILVYSPIVSMTKIQKTPLPERKALPIRWITWMTYLEDPRIQFHYDKTLPELKHIPDVYTSSQSPVKHPSQYEGVFYTDGSAIKSPDPTKSNNAGMGIVHATYKPEYQVLNQWSIPLGNHTAQMAEIAAVEFACKKALKIPGPVLVITDSFYVAESANKELPYWKSNGFVNNKKKPLKHISKWKSIAECLSMKPDITIQHEKGISLQIPVFILKGNALADKLATQGSYVVNAGKRTADGSEFEKRTADGSEFESPKKKAKVE

SEQ ID NO: 1298 - protein, 2122 aa, synthetic construct
MPAAKRVKLDGGDKKYSIGLDIGTNSVGWAVITDEYKVPSKKFKVLGNTDRHSIKKNLIGALLFDSGETAEATRLKRTARRRYTRRKNRICYLQEIFSNEMAKVDDSFFHRLEESFLVEEDKKHERHPIFGNIVDEVAYHEKYPTIYHLRKKLVDSTDKADLRLIYLALAHMIKFRGHFLIEGDLNPDNSDVDKLFIQLVQTYNQLFEENPINASGVDAKAILSARLSKSRRLENLIAQLPGEKKNGLFGNLIALSLGLTPNFKSNFDLAEDAKLQLSKDTYDDDLDNLLAQIGDQYADLFLAAKNLSDAILLSDILRVNTEITKAPLSASMIKRYDEHHQDLTLLKALVRQQLPEKYKEIFFDQSKNGYAGYIDGGASQEEFYKFIKPILEKMDGTEELLVKLNREDLLRKQRTFDNGSIPHQIHLGELHAILRRQEDFYPFLKDNREKIEKILTFRIPYYVGPLARGNSRFAWMTRKSEETITPWNFEEVVDKGASAQSFIERMTNFDKNLPNEKVLPKHSLLYEYFTVYNELTKVKYVTEGMRKPAFLSGEQKKAIVDLLFKTNRKVTVKQLKEDYFKKIECFDSVEISGVEDRFNASLGTYHDLLKIIKDKDFLDNEENEDILEDIVLTLTLFEDREMIEERLKTYAHLFDDKVMKQLKRRRYTGWGRLSRKLINGIRDKQSGKTILDFLKSDGFANRNFMQLIHDDSLTFKEDIQKAQVSGQGDSLHEHIANLAGSPAIKKGILQTVKVVDELVKVMGRHKPENIVIEMARENQTTQKGQKNSRERMKRIEEGIKELGSQILKEHPVENTQLQNEKLYLYYLQNGRDMYVDQELDINRLSDYDVDHIVPQSFLKDDSIDNKVLTRSDKARGKSDNVPSEEVVKKMKNYWRQLLNAKLITQRKFDNLTKAERGGLSELDKAGFIKRQLVETRQITKHVAQILDSRMNTKYDENDKLIREVKVITLKSKLVSDFRKDFQFYKVREINNYHHAHDAYLNAVVGTALIKKYPKLESEFVYGDYKVYDVRKMIAKSEQEIGKATAKYFFYSNIMNFFKTEITLANGEIRKRPLIETNGETGEIVWDKGRDFATVRKVLSMPQVNIVKKTEVQTGGFSKESILPKRNSDKLIARKKDWDPKKYGGFDSPTVAYSVLVVAKVEKGKSKKLKSVKELLGITIMERSSFEKNPIDFLEAKGYKEVKKDLIIKLPKYSLFELENGRKRMLASAGELQKGNELALPSKYVNFLYLASHYEKLKGSPEDNEQKQLFVEQHKHYLDEIIEQISEFSKRVILADANLDKVLSAYNKHRDKPIREQAENIIHLFTLTNLGAPAAFKYFDTTIDRKRYTSTKEVLDATLIHQSITGLYETRIDLSQLGGDGGAEAAAKEAAAKEAAAKEAAAKALEAEAAAKEAAAKEAAAKEAAAKAGGVPWLTQQPLQLTILVPLQEYQEKILSKTALPEDQKQQLKTLFVKYDNLWQHWENQVGHRKIRPHNIATGDYPPRPQKQYPINPKAKPSIQIVIDDLLKQGVLTPQNSTMNTPVYPVPKPDGRWRMVLDYREVNKTIPLTAAQNQHSAGILATIVRQKYKTTLDLANGFWAHPITPESYWLTAFTWQGKQYCWTRLPQGFLNSPALFNADVVDLLKEIPNVQVYVDDIYLSHDDPKEHVQQLEKVFQILLQAGYVVSLKKSEIGQKTVEFLGFNITKEGRGLTDTFKTKLLNITPPKDLKQLQSILGLLNFARNFIPNFAELVQPLYNLIAPAKGKYIEWSEENTKQLNMVIEALNTASNLEERLPEQRLVIKVNTSPSAGYVRYYNETGKKPIMYLNYVFSKAELKFSMLEKLLTTMHKALIKAMDLAMGQEILVYSPIVSMTKIQKTPLPERKALPIRWITWMTYLEDPRIQFHYDKTLPELKHIPDVYTSSQSPVKHPSQYEGVFYTDGSAIKSPDPTKSNNAGMGIVHATYKPEYQVLNQWSIPLGNHTAQMAEIAAVEFACKKALKIPGPVLVITDSFYVAESANKELPYWKSNGFVNNKKKPLKHISKWKSIAECLSMKPDITIQHEKGISLQIPVFILKGNALADKLATQGSYVVNAGKRTADGSEFEKRTADGSEFESPKKKAKVE

SEQ ID NO: 1299 - protein, 2096 aa, synthetic construct
MPAAKRVKLDGGDKKYSIGLDIGTNSVGWAVITDEYKVPSKKFKVLGNTDRHSIKKNLIGALLFDSGETAEATRLKRTARRRYTRRKNRICYLQEIFSNEMAKVDDSFFHRLEESFLVEEDKKHERHPIFGNIVDEVAYHEKYPTIYHLRKKLVDSTDKADLRLIYLALAHMIKFRGHFLIEGDLNPDNSDVDKLFIQLVQTYNQLFEENPINASGVDAKAILSARLSKSRRLENLIAQLPGEKKNGLFGNLIALSLGLTPNFKSNFDLAEDAKLQLSKDTYDDDLDNLLAQIGDQYADLFLAAKNLSDAILLSDILRVNTEITKAPLSASMIKRYDEHHQDLTLLKALVRQQLPEKYKEIFFDQSKNGYAGYIDGGASQEEFYKFIKPILEKMDGTEELLVKLNREDLLRKQRTFDNGSIPHQIHLGELHAILRRQEDFYPFLKDNREKIEKILTFRIPYYVGPLARGNSRFAWMTRKSEETITPWNFEEVVDKGASAQSFIERMTNFDKNLPNEKVLPKHSLLYEYFTVYNELTKVKYVTEGMRKPAFLSGEQKKAIVDLLFKTNRKVTVKQLKEDYFKKIECFDSVEISGVEDRFNASLGTYHDLLKIIKDKDFLDNEENEDILEDIVLTLTLFEDREMIEERLKTYAHLFDDKVMKQLKRRRYTGWGRLSRKLINGIRDKQSGKTILDFLKSDGFANRNFMQLIHDDSLTFKEDIQKAQVSGQGDSLHEHIANLAGSPAIKKGILQTVKVVDELVKVMGRHKPENIVIEMARENQTTQKGQKNSRERMKRIEEGIKELGSQILKEHPVENTQLQNEKLYLYYLQNGRDMYVDQELDINRLSDYDVDHIVPQSFLKDDSIDNKVLTRSDKARGKSDNVPSEEVVKKMKNYWRQLLNAKLITQRKFDNLTKAERGGLSELDKAGFIKRQLVETRQITKHVAQILDSRMNTKYDENDKLIREVKVITLKSKLVSDFRKDFQFYKVREINNYHHAHDAYLNAVVGTALIKKYPKLESEFVYGDYKVYDVRKMIAKSEQEIGKATAKYFFYSNIMNFFKTEITLANGEIRKRPLIETNGETGEIVWDKGRDFATVRKVLSMPQVNIVKKTEVQTGGFSKESILPKRNSDKLIARKKDWDPKKYGGFDSPTVAYSVLVVAKVEKGKSKKLKSVKELLGITIMERSSFEKNPIDFLEAKGYKEVKKDLIIKLPKYSLFELENGRKRMLASAGELQKGNELALPSKYVNFLYLASHYEKLKGSPEDNEQKQLFVEQHKHYLDEIIEQISEFSKRVILADANLDKVLSAYNKHRDKPIREQAENIIHLFTLTNLGAPAAFKYFDTTIDRKRYTSTKEVLDATLIHQSITGLYETRIDLSQLGGDGGGGGGSGGGGSGGGGSGGGGSGGVPWLTQQPLQLTILVPLQEYQEKILSKTALPEDQKQQLKTLFVKYDNLWQHWENQVGHRKIRPHNIATGDYPPRPQKQYPINPKAKPSIQIVIDDLLKQGVLTPQNSTMNTPVYPVPKPDGRWRMVLDYREVNKTIPLTAAQNQHSAGILATIVRQKYKTTLDLANGFWAHPITPESYWLTAFTWQGKQYCWTRLPQGFLNSPALFNADVVDLLKEIPNVQVYVDDIYLSHDDPKEHVQQLEKVFQILLQAGYVVSLKKSEIGQKTVEFLGFNITKEGRGLTDTFKTKLLNITPPKDLKQLQSILGLLNFARNFIPNFAELVQPLYNLIAPAKGKYIEWSEENTKQLNMVIEALNTASNLEERLPEQRLVIKVNTSPSAGYVRYYNETGKKPIMYLNYVFSKAELKFSMLEKLLTTMHKALIKAMDLAMGQEILVYSPIVSMTKIQKTPLPERKALPIRWITWMTYLEDPRIQFHYDKTLPELKHIPDVYTSSQSPVKHPSQYEGVFYTDGSAIKSPDPTKSNNAGMGIVHATYKPEYQVLNQWSIPLGNHTAQMAEIAAVEFACKKALKIPGPVLVITDSFYVAESANKELPYWKSNGFVNNKKKPLKHISKWKSIAECLSMKPDITIQHEKGISLQIPVFILKGNALADKLATQGSYVVNAGKRTADGSEFEKRTADGSEFESPKKKAKVE

SEQ ID NO: 1300 - protein, 2096 aa, synthetic construct
MPAAKRVKLDGGDKKYSIGLDIGTNSVGWAVITDEYKVPSKKFKVLGNTDRHSIKKNLIGALLFDSGETAEATRLKRTARRRYTRRKNRICYLQEIFSNEMAKVDDSFFHRLEESFLVEEDKKHERHPIFGNIVDEVAYHEKYPTIYHLRKKLVDSTDKADLRLIYLALAHMIKFRGHFLIEGDLNPDNSDVDKLFIQLVQTYNQLFEENPINASGVDAKAILSARLSKSRRLENLIAQLPGEKKNGLFGNLIALSLGLTPNFKSNFDLAEDAKLQLSKDTYDDDLDNLLAQIGDQYADLFLAAKNLSDAILLSDILRVNTEITKAPLSASMIKRYDEHHQDLTLLKALVRQQLPEKYKEIFFDQSKNGYAGYIDGGASQEEFYKFIKPILEKMDGTEELLVKLNREDLLRKQRTFDNGSIPHQIHLGELHAILRRQEDFYPFLKDNREKIEKILTFRIPYYVGPLARGNSRFAWMTRKSEETITPWNFEEVVDKGASAQSFIERMTNFDKNLPNEKVLPKHSLLYEYFTVYNELTKVKYVTEGMRKPAFLSGEQKKAIVDLLFKTNRKVTVKQLKEDYFKKIECFDSVEISGVEDRFNASLGTYHDLLKIIKDKDFLDNEENEDILEDIVLTLTLFEDREMIEERLKTYAHLFDDKVMKQLKRRRYTGWGRLSRKLINGIRDKQSGKTILDFLKSDGFANRNFMQLIHDDSLTFKEDIQKAQVSGQGDSLHEHIANLAGSPAIKKGILQTVKVVDELVKVMGRHKPENIVIEMARENQTTQKGQKNSRERMKRIEEGIKELGSQILKEHPVENTQLQNEKLYLYYLQNGRDMYVDQELDINRLSDYDVDHIVPQSFLKDDSIDNKVLTRSDKARGKSDNVPSEEVVKKMKNYWRQLLNAKLITQRKFDNLTKAERGGLSELDKAGFIKRQLVETRQITKHVAQILDSRMNTKYDENDKLIREVKVITLKSKLVSDFRKDFQFYKVREINNYHHAHDAYLNAVVGTALIKKYPKLESEFVYGDYKVYDVRKMIAKSEQEIGKATAKYFFYSNIMNFFKTEITLANGEIRKRPLIETNGETGEIVWDKGRDFATVRKVLSMPQVNIVKKTEVQTGGFSKESILPKRNSDKLIARKKDWDPKKYGGFDSPTVAYSVLVVAKVEKGKSKKLKSVKELLGITIMERSSFEKNPIDFLEAKGYKEVKKDLIIKLPKYSLFELENGRKRMLASAGELQKGNELALPSKYVNFLYLASHYEKLKGSPEDNEQKQLFVEQHKHYLDEIIEQISEFSKRVILADANLDKVLSAYNKHRDKPIREQAENIIHLFTLTNLGAPAAFKYFDTTIDRKRYTSTKEVLDATLIHQSITGLYETRIDLSQLGGDGGEAAAKEAAAKEAAAKEAAAKGGVPWLTQQPLQLTILVPLQEYQEKILSKTALPEDQKQQLKTLFVKYDNLWQHWENQVGHRKIRPHNIATGDYPPRPQKQYPINPKAKPSIQIVIDDLLKQGVLTPQNSTMNTPVYPVPKPDGRWRMVLDYREVNKTIPLTAAQNQHSAGILATIVRQKYKTTLDLANGFWAHPITPESYWLTAFTWQGKQYCWTRLPQGFLNSPALFNADVVDLLKEIPNVQVYVDDIYLSHDDPKEHVQQLEKVFQILLQAGYVVSLKKSEIGQKTVEFLGFNITKEGRGLTDTFKTKLLNITPPKDLKQLQSILGLLNFARNFIPNFAELVQPLYNLIAPAKGKYIEWSEENTKQLNMVIEALNTASNLEERLPEQRLVIKVNTSPSAGYVRYYNETGKKPIMYLNYVFSKAELKFSMLEKLLTTMHKALIKAMDLAMGQEILVYSPIVSMTKIQKTPLPERKALPIRWITWMTYLEDPRIQFHYDKTLPELKHIPDVYTSSQSPVKHPSQYEGVFYTDGSAIKSPDPTKSNNAGMGIVHATYKPEYQVLNQWSIPLGNHTAQMAEIAAVEFACKKALKIPGPVLVITDSFYVAESANKELPYWKSNGFVNNKKKPLKHISKWKSIAECLSMKPDITIQHEKGISLQIPVFILKGNALADKLATQGSYVVNAGKRTADGSEFEKRTADGSEFESPKKKAKVE

SEQ ID NO: 1301 - protein, 2084 aa, synthetic construct
MPAAKRVKLDGGDKKYSIGLDIGTNSVGWAVITDEYKVPSKKFKVLGNTDRHSIKKNLIGALLFDSGETAEATRLKRTARRRYTRRKNRICYLQEIFSNEMAKVDDSFFHRLEESFLVEEDKKHERHPIFGNIVDEVAYHEKYPTIYHLRKKLVDSTDKADLRLIYLALAHMIKFRGHFLIEGDLNPDNSDVDKLFIQLVQTYNQLFEENPINASGVDAKAILSARLSKSRRLENLIAQLPGEKKNGLFGNLIALSLGLTPNFKSNFDLAEDAKLQLSKDTYDDDLDNLLAQIGDQYADLFLAAKNLSDAILLSDILRVNTEITKAPLSASMIKRYDEHHQDLTLLKALVRQQLPEKYKEIFFDQSKNGYAGYIDGGASQEEFYKFIKPILEKMDGTEELLVKLNREDLLRKQRTFDNGSIPHQIHLGELHAILRRQEDFYPFLKDNREKIEKILTFRIPYYVGPLARGNSRFAWMTRKSEETITPWNFEEVVDKGASAQSFIERMTNFDKNLPNEKVLPKHSLLYEYFTVYNELTKVKYVTEGMRKPAFLSGEQKKAIVDLLFKTNRKVTVKQLKEDYFKKIECFDSVEISGVEDRFNASLGTYHDLLKIIKDKDFLDNEENEDILEDIVLTLTLFEDREMIEERLKTYAHLFDDKVMKQLKRRRYTGWGRLSRKLINGIRDKQSGKTILDFLKSDGFANRNFMQLIHDDSLTFKEDIQKAQVSGQGDSLHEHIANLAGSPAIKKGILQTVKVVDELVKVMGRHKPENIVIEMARENQTTQKGQKNSRERMKRIEEGIKELGSQILKEHPVENTQLQNEKLYLYYLQNGRDMYVDQELDINRLSDYDVDHIVPQSFLKDDSIDNKVLTRSDKARGKSDNVPSEEVVKKMKNYWRQLLNAKLITQRKFDNLTKAERGGLSELDKAGFIKRQLVETRQITKHVAQILDSRMNTKYDENDKLIREVKVITLKSKLVSDFRKDFQFYKVREINNYHHAHDAYLNAVVGTALIKKYPKLESEFVYGDYKVYDVRKMIAKSEQEIGKATAKYFFYSNIMNFFKTEITLANGEIRKRPLIETNGETGEIVWDKGRDFATVRKVLSMPQVNIVKKTEVQTGGFSKESILPKRNSDKLIARKKDWDPKKYGGFDSPTVAYSVLVVAKVEKGKSKKLKSVKELLGITIMERSSFEKNPIDFLEAKGYKEVKKDLIIKLPKYSLFELENGRKRMLASAGELQKGNELALPSKYVNFLYLASHYEKLKGSPEDNEQKQLFVEQHKHYLDEIIEQISEFSKRVILADANLDKVLSAYNKHRDKPIREQAENIIHLFTLTNLGAPAAFKYFDTTIDRKRYTSTKEVLDATLIHQSITGLYETRIDLSQLGGDGGEAAAKPAPGGVPWLTQQPLQLTILVPLQEYQEKILSKTALPEDQKQQLKTLFVKYDNLWQHWENQVGHRKIRPHNIATGDYPPRPQKQYPINPKAKPSIQIVIDDLLKQGVLTPQNSTMNTPVYPVPKPDGRWRMVLDYREVNKTIPLTAAQNQHSAGILATIVRQKYKTTLDLANGFWAHPITPESYWLTAFTWQGKQYCWTRLPQGFLNSPALFNADVVDLLKEIPNVQVYVDDIYLSHDDPKEHVQQLEKVFQILLQAGYVVSLKKSEIGQKTVEFLGFNITKEGRGLTDTFKTKLLNITPPKDLKQLQSILGLLNFARNFIPNFAELVQPLYNLIAPAKGKYIEWSEENTKQLNMVIEALNTASNLEERLPEQRLVIKVNTSPSAGYVRYYNETGKKPIMYLNYVFSKAELKFSMLEKLLTTMHKALIKAMDLAMGQEILVYSPIVSMTKIQKTPLPERKALPIRWITWMTYLEDPRIQFHYDKTLPELKHIPDVYTSSQSPVKHPSQYEGVFYTDGSAIKSPDPTKSNNAGMGIVHATYKPEYQVLNQWSIPLGNHTAQMAEIAAVEFACKKALKIPGPVLVITDSFYVAESANKELPYWKSNGFVNNKKKPLKHISKWKSIAECLSMKPDITIQHEKGISLQIPVFILKGNALADKLATQGSYVVNAGKRTADGSEFEKRTADGSEFESPKKKAKVE

SEQ ID NO: 1302 - protein, 2087 aa, synthetic construct
MPAAKRVKLDGGDKKYSIGLDIGTNSVGWAVITDEYKVPSKKFKVLGNTDRHSIKKNLIGALLFDSGETAEATRLKRTARRRYTRRKNRICYLQEIFSNEMAKVDDSFFHRLEESFLVEEDKKHERHPIFGNIVDEVAYHEKYPTIYHLRKKLVDSTDKADLRLIYLALAHMIKFRGHFLIEGDLNPDNSDVDKLFIQLVQTYNQLFEENPINASGVDAKAILSARLSKSRRLENLIAQLPGEKKNGLFGNLIALSLGLTPNFKSNFDLAEDAKLQLSKDTYDDDLDNLLAQIGDQYADLFLAAKNLSDAILLSDILRVNTEITKAPLSASMIKRYDEHHQDLTLLKALVRQQLPEKYKEIFFDQSKNGYAGYIDGGASQEEFYKFIKPILEKMDGTEELLVKLNREDLLRKQRTFDNGSIPHQIHLGELHAILRRQEDFYPFLKDNREKIEKILTFRIPYYVGPLARGNSRFAWMTRKSEETITPWNFEEVVDKGASAQSFIERMTNFDKNLPNEKVLPKHSLLYEYFTVYNELTKVKYVTEGMRKPAFLSGEQKKAIVDLLFKTNRKVTVKQLKEDYFKKIECFDSVEISGVEDRFNASLGTYHDLLKIIKDKDFLDNEENEDILEDIVLTLTLFEDREMIEERLKTYAHLFDDKVMKQLKRRRYTGWGRLSRKLINGIRDKQSGKTILDFLKSDGFANRNFMQLIHDDSLTFKEDIQKAQVSGQGDSLHEHIANLAGSPAIKKGILQTVKVVDELVKVMGRHKPENIVIEMARENQTTQKGQKNSRERMKRIEEGIKELGSQILKEHPVENTQLQNEKLYLYYLQNGRDMYVDQELDINRLSDYDVDHIVPQSFLKDDSIDNKVLTRSDKARGKSDNVPSEEVVKKMKNYWRQLLNAKLITQRKFDNLTKAERGGLSELDKAGFIKRQLVETRQITKHVAQILDSRMNTKYDENDKLIREVKVITLKSKLVSDFRKDFQFYKVREINNYHHAHDAYLNAVVGTALIKKYPKLESEFVYGDYKVYDVRKMIAKSEQEIGKATAKYFFYSNIMNFFKTEITLANGEIRKRPLIETNGETGEIVWDKGRDFATVRKVLSMPQVNIVKKTEVQTGGFSKESILPKRNSDKLIARKKDWDPKKYGGFDSPTVAYSVLVVAKVEKGKSKKLKSVKELLGITIMERSSFEKNPIDFLEAKGYKEVKKDLIIKLPKYSLFELENGRKRMLASAGELQKGNELALPSKYVNFLYLASHYEKLKGSPEDNEQKQLFVEQHKHYLDEIIEQISEFSKRVILADANLDKVLSAYNKHRDKPIREQAENIIHLFTLTNLGAPAAFKYFDTTIDRKRYTSTKEVLDATLIHQSITGLYETRIDLSQLGGDGGPAPGSSEAAAKGGVPWLTQQPLQLTILVPLQEYQEKILSKTALPEDQKQQLKTLFVKYDNLWQHWENQVGHRKIRPHNIATGDYPPRPQKQYPINPKAKPSIQIVIDDLLKQGVLTPQNSTMNTPVYPVPKPDGRWRMVLDYREVNKTIPLTAAQNQHSAGILATIVRQKYKTTLDLANGFWAHPITPESYWLTAFTWQGKQYCWTRLPQGFLNSPALFNADVVDLLKEIPNVQVYVDDIYLSHDDPKEHVQQLEKVFQILLQAGYVVSLKKSEIGQKTVEFLGFNITKEGRGLTDTFKTKLLNITPPKDLKQLQSILGLLNFARNFIPNFAELVQPLYNLIAPAKGKYIEWSEENTKQLNMVIEALNTASNLEERLPEQRLVIKVNTSPSAGYVRYYNETGKKPIMYLNYVFSKAELKFSMLEKLLTTMHKALIKAMDLAMGQEILVYSPIVSMTKIQKTPLPERKALPIRWITWMTYLEDPRIQFHYDKTLPELKHIPDVYTSSQSPVKHPSQYEGVFYTDGSAIKSPDPTKSNNAGMGIVHATYKPEYQVLNQWSIPLGNHTAQMAEIAAVEFACKKALKIPGPVLVITDSFYVAESANKELPYWKSNGFVNNKKKPLKHISKWKSIAECLSMKPDITIQHEKGISLQIPVFILKGNALADKLATQGSYVVNAGKRTADGSEFEKRTADGSEFESPKKKAKVE

SEQ ID NO: 1303 - protein, 2091 aa, synthetic construct
MPAAKRVKLDGGDKKYSIGLDIGTNSVGWAVITDEYKVPSKKFKVLGNTDRHSIKKNLIGALLFDSGETAEATRLKRTARRRYTRRKNRICYLQEIFSNEMAKVDDSFFHRLEESFLVEEDKKHERHPIFGNIVDEVAYHEKYPTIYHLRKKLVDSTDKADLRLIYLALAHMIKFRGHFLIEGDLNPDNSDVDKLFIQLVQTYNQLFEENPINASGVDAKAILSARLSKSRRLENLIAQLPGEKKNGLFGNLIALSLGLTPNFKSNFDLAEDAKLQLSKDTYDDDLDNLLAQIGDQYADLFLAAKNLSDAILLSDILRVNTEITKAPLSASMIKRYDEHHQDLTLLKALVRQQLPEKYKEIFFDQSKNGYAGYIDGGASQEEFYKFIKPILEKMDGTEELLVKLNREDLLRKQRTFDNGSIPHQIHLGELHAILRRQEDFYPFLKDNREKIEKILTFRIPYYVGPLARGNSRFAWMTRKSEETITPWNFEEVVDKGASAQSFIERMTNFDKNLPNEKVLPKHSLLYEYFTVYNELTKVKYVTEGMRKPAFLSGEQKKAIVDLLFKTNRKVTVKQLKEDYFKKIECFDSVEISGVEDRFNASLGTYHDLLKIIKDKDFLDNEENEDILEDIVLTLTLFEDREMIEERLKTYAHLFDDKVMKQLKRRRYTGWGRLSRKLINGIRDKQSGKTILDFLKSDGFANRNFMQLIHDDSLTFKEDIQKAQVSGQGDSLHEHIANLAGSPAIKKGILQTVKVVDELVKVMGRHKPENIVIEMARENQTTQKGQKNSRERMKRIEEGIKELGSQILKEHPVENTQLQNEKLYLYYLQNGRDMYVDQELDINRLSDYDVDHIVPQSFLKDDSIDNKVLTRSDKARGKSDNVPSEEVVKKMKNYWRQLLNAKLITQRKFDNLTKAERGGLSELDKAGFIKRQLVETRQITKHVAQILDSRMNTKYDENDKLIREVKVITLKSKLVSDFRKDFQFYKVREINNYHHAHDAYLNAVVGTALIKKYPKLESEFVYGDYKVYDVRKMIAKSEQEIGKATAKYFFYSNIMNFFKTEITLANGEIRKRPLIETNGETGEIVWDKGRDFATVRKVLSMPQVNIVKKTEVQTGGFSKESILPKRNSDKLIARKKDWDPKKYGGFDSPTVAYSVLVVAKVEKGKSKKLKSVKELLGITIMERSSFEKNPIDFLEAKGYKEVKKDLIIKLPKYSLFELENGRKRMLASAGELQKGNELALPSKYVNFLYLASHYEKLKGSPEDNEQKQLFVEQHKHYLDEIIEQISEFSKRVILADANLDKVLSAYNKHRDKPIREQAENIIHLFTLTNLGAPAAFKYFDTTIDRKRYTSTKEVLDATLIHQSITGLYETRIDLSQLGGDGGGSSGSSGSSGSSGSSGGVPWLTQQPLQLTILVPLQEYQEKILSKTALPEDQKQQLKTLFVKYDNLWQHWENQVGHRKIRPHNIATGDYPPRPQKQYPINPKAKPSIQIVIDDLLKQGVLTPQNSTMNTPVYPVPKPDGRWRMVLDYREVNKTIPLTAAQNQHSAGILATIVRQKYKTTLDLANGFWAHPITPESYWLTAFTWQGKQYCWTRLPQGFLNSPALFNADVVDLLKEIPNVQVYVDDIYLSHDDPKEHVQQLEKVFQILLQAGYVVSLKKSEIGQKTVEFLGFNITKEGRGLTDTFKTKLLNITPPKDLKQLQSILGLLNFARNFIPNFAELVQPLYNLIAPAKGKYIEWSEENTKQLNMVIEALNTASNLEERLPEQRLVIKVNTSPSAGYVRYYNETGKKPIMYLNYVFSKAELKFSMLEKLLTTMHKALIKAMDLAMGQEILVYSPIVSMTKIQKTPLPERKALPIRWITWMTYLEDPRIQFHYDKTLPELKHIPDVYTSSQSPVKHPSQYEGVFYTDGSAIKSPDPTKSNNAGMGIVHATYKPEYQVLNQWSIPLGNHTAQMAEIAAVEFACKKALKIPGPVLVITDSFYVAESANKELPYWKSNGFVNNKKKPLKHISKWKSIAECLSMKPDITIQHEKGISLQIPVFILKGNALADKLATQGSYVVNAGKRTADGSEFEKRTADGSEFESPKKKAKVE

SEQ ID NO: 1304 - protein, 2085 aa, synthetic construct
MPAAKRVKLDGGDKKYSIGLDIGTNSVGWAVITDEYKVPSKKFKVLGNTDRHSIKKNLIGALLFDSGETAEATRLKRTARRRYTRRKNRICYLQEIFSNEMAKVDDSFFHRLEESFLVEEDKKHERHPIFGNIVDEVAYHEKYPTIYHLRKKLVDSTDKADLRLIYLALAHMIKFRGHFLIEGDLNPDNSDVDKLFIQLVQTYNQLFEENPINASGVDAKAILSARLSKSRRLENLIAQLPGEKKNGLFGNLIALSLGLTPNFKSNFDLAEDAKLQLSKDTYDDDLDNLLAQIGDQYADLFLAAKNLSDAILLSDILRVNTEITKAPLSASMIKRYDEHHQDLTLLKALVRQQLPEKYKEIFFDQSKNGYAGYIDGGASQEEFYKFIKPILEKMDGTEELLVKLNREDLLRKQRTFDNGSIPHQIHLGELHAILRRQEDFYPFLKDNREKIEKILTFRIPYYVGPLARGNSRFAWMTRKSEETITPWNFEEVVDKGASAQSFIERMTNFDKNLPNEKVLPKHSLLYEYFTVYNELTKVKYVTEGMRKPAFLSGEQKKAIVDLLFKTNRKVTVKQLKEDYFKKIECFDSVEISGVEDRFNASLGTYHDLLKIIKDKDFLDNEENEDILEDIVLTLTLFEDREMIEERLKTYAHLFDDKVMKQLKRRRYTGWGRLSRKLINGIRDKQSGKTILDFLKSDGFANRNFMQLIHDDSLTFKEDIQKAQVSGQGDSLHEHIANLAGSPAIKKGILQTVKVVDELVKVMGRHKPENIVIEMARENQTTQKGQKNSRERMKRIEEGIKELGSQILKEHPVENTQLQNEKLYLYYLQNGRDMYVDQELDINRLSDYDVDHIVPQSFLKDDSIDNKVLTRSDKARGKSDNVPSEEVVKKMKNYWRQLLNAKLITQRKFDNLTKAERGGLSELDKAGFIKRQLVETRQITKHVAQILDSRMNTKYDENDKLIREVKVITLKSKLVSDFRKDFQFYKVREINNYHHAHDAYLNAVVGTALIKKYPKLESEFVYGDYKVYDVRKMIAKSEQEIGKATAKYFFYSNIMNFFKTEITLANGEIRKRPLIETNGETGEIVWDKGRDFATVRKVLSMPQVNIVKKTEVQTGGFSKESILPKRNSDKLIARKKDWDPKKYGGFDSPTVAYSVLVVAKVEKGKSKKLKSVKELLGITIMERSSFEKNPIDFLEAKGYKEVKKDLIIKLPKYSLFELENGRKRMLASAGELQKGNELALPSKYVNFLYLASHYEKLKGSPEDNEQKQLFVEQHKHYLDEIIEQISEFSKRVILADANLDKVLSAYNKHRDKPIREQAENIIHLFTLTNLGAPAAFKYFDTTIDRKRYTSTKEVLDATLIHQSITGLYETRIDLSQLGGDGGGGSGGSGGSGGVPWLTQQPLQLTILVPLQEYQEKILSKTALPEDQKQQLKTLFVKYDNLWQHWENQVGHRKIRPHNIATGDYPPRPQKQYPINPKAKPSIQIVIDDLLKQGVLTPQNSTMNTPVYPVPKPDGRWRMVLDYREVNKTIPLTAAQNQHSAGILATIVRQKYKTTLDLANGFWAHPITPESYWLTAFTWQGKQYCWTRLPQGFLNSPALFNADVVDLLKEIPNVQVYVDDIYLSHDDPKEHVQQLEKVFQILLQAGYVVSLKKSEIGQKTVEFLGFNITKEGRGLTDTFKTKLLNITPPKDLKQLQSILGLLNFARNFIPNFAELVQPLYNLIAPAKGKYIEWSEENTKQLNMVIEALNTASNLEERLPEQRLVIKVNTSPSAGYVRYYNETGKKPIMYLNYVFSKAELKFSMLEKLLTTMHKALIKAMDLAMGQEILVYSPIVSMTKIQKTPLPERKALPIRWITWMTYLEDPRIQFHYDKTLPELKHIPDVYTSSQSPVKHPSQYEGVFYTDGSAIKSPDPTKSNNAGMGIVHATYKPEYQVLNQWSIPLGNHTAQMAEIAAVEFACKKALKIPGPVLVITDSFYVAESANKELPYWKSNGFVNNKKKPLKHISKWKSIAECLSMKPDITIQHEKGISLQIPVFILKGNALADKLATQGSYVVNAGKRTADGSEFEKRTADGSEFESPKKKAKVE

SEQ ID NO: 1305 - protein, 2085 aa, synthetic construct
MPAAKRVKLDGGDKKYSIGLDIGTNSVGWAVITDEYKVPSKKFKVLGNTDRHSIKKNLIGALLFDSGETAEATRLKRTARRRYTRRKNRICYLQEIFSNEMAKVDDSFFHRLEESFLVEEDKKHERHPIFGNIVDEVAYHEKYPTIYHLRKKLVDSTDKADLRLIYLALAHMIKFRGHFLIEGDLNPDNSDVDKLFIQLVQTYNQLFEENPINASGVDAKAILSARLSKSRRLENLIAQLPGEKKNGLFGNLIALSLGLTPNFKSNFDLAEDAKLQLSKDTYDDDLDNLLAQIGDQYADLFLAAKNLSDAILLSDILRVNTEITKAPLSASMIKRYDEHHQDLTLLKALVRQQLPEKYKEIFFDQSKNGYAGYIDGGASQEEFYKFIKPILEKMDGTEELLVKLNREDLLRKQRTFDNGSIPHQIHLGELHAILRRQEDFYPFLKDNREKIEKILTFRIPYYVGPLARGNSRFAWMTRKSEETITPWNFEEVVDKGASAQSFIERMTNFDKNLPNEKVLPKHSLLYEYFTVYNELTKVKYVTEGMRKPAFLSGEQKKAIVDLLFKTNRKVTVKQLKEDYFKKIECFDSVEISGVEDRFNASLGTYHDLLKIIKDKDFLDNEENEDILEDIVLTLTLFEDREMIEERLKTYAHLFDDKVMKQLKRRRYTGWGRLSRKLINGIRDKQSGKTILDFLKSDGFANRNFMQLIHDDSLTFKEDIQKAQVSGQGDSLHEHIANLAGSPAIKKGILQTVKVVDELVKVMGRHKPENIVIEMARENQTTQKGQKNSRERMKRIEEGIKELGSQILKEHPVENTQLQNEKLYLYYLQNGRDMYVDQELDINRLSDYDVDHIVPQSFLKDDSIDNKVLTRSDKARGKSDNVPSEEVVKKMKNYWRQLLNAKLITQRKFDNLTKAERGGLSELDKAGFIKRQLVETRQITKHVAQILDSRMNTKYDENDKLIREVKVITLKSKLVSDFRKDFQFYKVREINNYHHAHDAYLNAVVGTALIKKYPKLESEFVYGDYKVYDVRKMIAKSEQEIGKATAKYFFYSNIMNFFKTEITLANGEIRKRPLIETNGETGEIVWDKGRDFATVRKVLSMPQVNIVKKTEVQTGGFSKESILPKRNSDKLIARKKDWDPKKYGGFDSPTVAYSVLVVAKVEKGKSKKLKSVKELLGITIMERSSFEKNPIDFLEAKGYKEVKKDLIIKLPKYSLFELENGRKRMLASAGELQKGNELALPSKYVNFLYLASHYEKLKGSPEDNEQKQLFVEQHKHYLDEIIEQISEFSKRVILADANLDKVLSAYNKHRDKPIREQAENIIHLFTLTNLGAPAAFKYFDTTIDRKRYTSTKEVLDATLIHQSITGLYETRIDLSQLGGDGGGGGGSSPAPGGVPWLTQQPLQLTILVPLQEYQEKILSKTALPEDQKQQLKTLFVKYDNLWQHWENQVGHRKIRPHNIATGDYPPRPQKQYPINPKAKPSIQIVIDDLLKQGVLTPQNSTMNTPVYPVPKPDGRWRMVLDYREVNKTIPLTAAQNQHSAGILATIVRQKYKTTLDLANGFWAHPITPESYWLTAFTWQGKQYCWTRLPQGFLNSPALFNADVVDLLKEIPNVQVYVDDIYLSHDDPKEHVQQLEKVFQILLQAGYVVSLKKSEIGQKTVEFLGFNITKEGRGLTDTFKTKLLNITPPKDLKQLQSILGLLNFARNFIPNFAELVQPLYNLIAPAKGKYIEWSEENTKQLNMVIEALNTASNLEERLPEQRLVIKVNTSPSAGYVRYYNETGKKPIMYLNYVFSKAELKFSMLEKLLTTMHKALIKAMDLAMGQEILVYSPIVSMTKIQKTPLPERKALPIRWITWMTYLEDPRIQFHYDKTLPELKHIPDVYTSSQSPVKHPSQYEGVFYTDGSAIKSPDPTKSNNAGMGIVHATYKPEYQVLNQWSIPLGNHTAQMAEIAAVEFACKKALKIPGPVLVITDSFYVAESANKELPYWKSNGFVNNKKKPLKHISKWKSIAECLSMKPDITIQHEKGISLQIPVFILKGNALADKLATQGSYVVNAGKRTADGSEFEKRTADGSEFESPKKKAKVE

SEQ ID NO: 1306 - protein, 2087 aa, synthetic construct
MPAAKRVKLDGGDKKYSIGLDIGTNSVGWAVITDEYKVPSKKFKVLGNTDRHSIKKNLIGALLFDSGETAEATRLKRTARRRYTRRKNRICYLQEIFSNEMAKVDDSFFHRLEESFLVEEDKKHERHPIFGNIVDEVAYHEKYPTIYHLRKKLVDSTDKADLRLIYLALAHMIKFRGHFLIEGDLNPDNSDVDKLFIQLVQTYNQLFEENPINASGVDAKAILSARLSKSRRLENLIAQLPGEKKNGLFGNLIALSLGLTPNFKSNFDLAEDAKLQLSKDTYDDDLDNLLAQIGDQYADLFLAAKNLSDAILLSDILRVNTEITKAPLSASMIKRYDEHHQDLTLLKALVRQQLPEKYKEIFFDQSKNGYAGYIDGGASQEEFYKFIKPILEKMDGTEELLVKLNREDLLRKQRTFDNGSIPHQIHLGELHAILRRQEDFYPFLKDNREKIEKILTFRIPYYVGPLARGNSRFAWMTRKSEETITPWNFEEVVDKGASAQSFIERMTNFDKNLPNEKVLPKHSLLYEYFTVYNELTKVKYVTEGMRKPAFLSGEQKKAIVDLLFKTNRKVTVKQLKEDYFKKIECFDSVEISGVEDRFNASLGTYHDLLKIIKDKDFLDNEENEDILEDIVLTLTLFEDREMIEERLKTYAHLFDDKVMKQLKRRRYTGWGRLSRKLINGIRDKQSGKTILDFLKSDGFANRNFMQLIHDDSLTFKEDIQKAQVSGQGDSLHEHIANLAGSPAIKKGILQTVKVVDELVKVMGRHKPENIVIEMARENQTTQKGQKNSRERMKRIEEGIKELGSQILKEHPVENTQLQNEKLYLYYLQNGRDMYVDQELDINRLSDYDVDHIVPQSFLKDDSIDNKVLTRSDKARGKSDNVPSEEVVKKMKNYWRQLLNAKLITQRKFDNLTKAERGGLSELDKAGFIKRQLVETRQITKHVAQILDSRMNTKYDENDKLIREVKVITLKSKLVSDFRKDFQFYKVREINNYHHAHDAYLNAVVGTALIKKYPKLESEFVYGDYKVYDVRKMIAKSEQEIGKATAKYFFYSNIMNFFKTEITLANGEIRKRPLIETNGETGEIVWDKGRDFATVRKVLSMPQVNIVKKTEVQTGGFSKESILPKRNSDKLIARKKDWDPKKYGGFDSPTVAYSVLVVAKVEKGKSKKLKSVKELLGITIMERSSFEKNPIDFLEAKGYKEVKKDLIIKLPKYSLFELENGRKRMLASAGELQKGNELALPSKYVNFLYLASHYEKLKGSPEDNEQKQLFVEQHKHYLDEIIEQISEFSKRVILADANLDKVLSAYNKHRDKPIREQAENIIHLFTLTNLGAPAAFKYFDTTIDRKRYTSTKEVLDATLIHQSITGLYETRIDLSQLGGDGGGSSGGSEAAAKGGVPWLTQQPLQLTILVPLQEYQEKILSKTALPEDQKQQLKTLFVKYDNLWQHWENQVGHRKIRPHNIATGDYPPRPQKQYPINPKAKPSIQIVIDDLLKQGVLTPQNSTMNTPVYPVPKPDGRWRMVLDYREVNKTIPLTAAQNQHSAGILATIVRQKYKTTLDLANGFWAHPITPESYWLTAFTWQGKQYCWTRLPQGFLNSPALFNADVVDLLKEIPNVQVYVDDIYLSHDDPKEHVQQLEKVFQILLQAGYVVSLKKSEIGQKTVEFLGFNITKEGRGLTDTFKTKLLNITPPKDLKQLQSILGLLNFARNFIPNFAELVQPLYNLIAPAKGKYIEWSEENTKQLNMVIEALNTASNLEERLPEQRLVIKVNTSPSAGYVRYYNETGKKPIMYLNYVFSKAELKFSMLEKLLTTMHKALIKAMDLAMGQEILVYSPIVSMTKIQKTPLPERKALPIRWITWMTYLEDPRIQFHYDKTLPELKHIPDVYTSSQSPVKHPSQYEGVFYTDGSAIKSPDPTKSNNAGMGIVHATYKPEYQVLNQWSIPLGNHTAQMAEIAAVEFACKKALKIPGPVLVITDSFYVAESANKELPYWKSNGFVNNKKKPLKHISKWKSIAECLSMKPDITIQHEKGISLQIPVFILKGNALADKLATQGSYVVNAGKRTADGSEFEKRTADGSEFESPKKKAKVE

SEQ ID NO: 1307 - protein, 2085 aa, synthetic construct
MPAAKRVKLDGGDKKYSIGLDIGTNSVGWAVITDEYKVPSKKFKVLGNTDRHSIKKNLIGALLFDSGETAEATRLKRTARRRYTRRKNRICYLQEIFSNEMAKVDDSFFHRLEESFLVEEDKKHERHPIFGNIVDEVAYHEKYPTIYHLRKKLVDSTDKADLRLIYLALAHMIKFRGHFLIEGDLNPDNSDVDKLFIQLVQTYNQLFEENPINASGVDAKAILSARLSKSRRLENLIAQLPGEKKNGLFGNLIALSLGLTPNFKSNFDLAEDAKLQLSKDTYDDDLDNLLAQIGDQYADLFLAAKNLSDAILLSDILRVNTEITKAPLSASMIKRYDEHHQDLTLLKALVRQQLPEKYKEIFFDQSKNGYAGYIDGGASQEEFYKFIKPILEKMDGTEELLVKLNREDLLRKQRTFDNGSIPHQIHLGELHAILRRQEDFYPFLKDNREKIEKILTFRIPYYVGPLARGNSRFAWMTRKSEETITPWNFEEVVDKGASAQSFIERMTNFDKNLPNEKVLPKHSLLYEYFTVYNELTKVKYVTEGMRKPAFLSGEQKKAIVDLLFKTNRKVTVKQLKEDYFKKIECFDSVEISGVEDRFNASLGTYHDLLKIIKDKDFLDNEENEDILEDIVLTLTLFEDREMIEERLKTYAHLFDDKVMKQLKRRRYTGWGRLSRKLINGIRDKQSGKTILDFLKSDGFANRNFMQLIHDDSLTFKEDIQKAQVSGQGDSLHEHIANLAGSPAIKKGILQTVKVVDELVKVMGRHKPENIVIEMARENQTTQKGQKNSRERMKRIEEGIKELGSQILKEHPVENTQLQNEKLYLYYLQNGRDMYVDQELDINRLSDYDVDHIVPQSFLKDDSIDNKVLTRSDKARGKSDNVPSEEVVKKMKNYWRQLLNAKLITQRKFDNLTKAERGGLSELDKAGFIKRQLVETRQITKHVAQILDSRMNTKYDENDKLIREVKVITLKSKLVSDFRKDFQFYKVREINNYHHAHDAYLNAVVGTALIKKYPKLESEFVYGDYKVYDVRKMIAKSEQEIGKATAKYFFYSNIMNFFKTEITLANGEIRKRPLIETNGETGEIVWDKGRDFATVRKVLSMPQVNIVKKTEVQTGGFSKESILPKRNSDKLIARKKDWDPKKYGGFDSPTVAYSVLVVAKVEKGKSKKLKSVKELLGITIMERSSFEKNPIDFLEAKGYKEVKKDLIIKLPKYSLFELENGRKRMLASAGELQKGNELALPSKYVNFLYLASHYEKLKGSPEDNEQKQLFVEQHKHYLDEIIEQISEFSKRVILADANLDKVLSAYNKHRDKPIREQAENIIHLFTLTNLGAPAAFKYFDTTIDRKRYTSTKEVLDATLIHQSITGLYETRIDLSQLGGDGGGSSPAPGGSGGVPWLTQQPLQLTILVPLQEYQEKILSKTALPEDQKQQLKTLFVKYDNLWQHWENQVGHRKIRPHNIATGDYPPRPQKQYPINPKAKPSIQIVIDDLLKQGVLTPQNSTMNTPVYPVPKPDGRWRMVLDYREVNKTIPLTAAQNQHSAGILATIVRQKYKTTLDLANGFWAHPITPESYWLTAFTWQGKQYCWTRLPQGFLNSPALFNADVVDLLKEIPNVQVYVDDIYLSHDDPKEHVQQLEKVFQILLQAGYVVSLKKSEIGQKTVEFLGFNITKEGRGLTDTFKTKLLNITPPKDLKQLQSILGLLNFARNFIPNFAELVQPLYNLIAPAKGKYIEWSEENTKQLNMVIEALNTASNLEERLPEQRLVIKVNTSPSAGYVRYYNETGKKPIMYLNYVFSKAELKFSMLEKLLTTMHKALIKAMDLAMGQEILVYSPIVSMTKIQKTPLPERKALPIRWITWMTYLEDPRIQFHYDKTLPELKHIPDVYTSSQSPVKHPSQYEGVFYTDGSAIKSPDPTKSNNAGMGIVHATYKPEYQVLNQWSIPLGNHTAQMAEIAAVEFACKKALKIPGPVLVITDSFYVAESANKELPYWKSNGFVNNKKKPLKHISKWKSIAECLSMKPDITIQHEKGISLQIPVFILKGNALADKLATQGSYVVNAGKRTADGSEFEKRTADGSEFESPKKKAKVE

SEQ ID NO: 1308 - protein, 2086 aa, synthetic construct
MPAAKRVKLDGGDKKYSIGLDIGTNSVGWAVITDEYKVPSKKFKVLGNTDRHSIKKNLIGALLFDSGETAEATRLKRTARRRYTRRKNRICYLQEIFSNEMAKVDDSFFHRLEESFLVEEDKKHERHPIFGNIVDEVAYHEKYPTIYHLRKKLVDSTDKADLRLIYLALAHMIKFRGHFLIEGDLNPDNSDVDKLFIQLVQTYNQLFEENPINASGVDAKAILSARLSKSRRLENLIAQLPGEKKNGLFGNLIALSLGLTPNFKSNFDLAEDAKLQLSKDTYDDDLDNLLAQIGDQYADLFLAAKNLSDAILLSDILRVNTEITKAPLSASMIKRYDEHHQDLTLLKALVRQQLPEKYKEIFFDQSKNGYAGYIDGGASQEEFYKFIKPILEKMDGTEELLVKLNREDLLRKQRTFDNGSIPHQIHLGELHAILRRQEDFYPFLKDNREKIEKILTFRIPYYVGPLARGNSRFAWMTRKSEETITPWNFEEVVDKGASAQSFIERMTNFDKNLPNEKVLPKHSLLYEYFTVYNELTKVKYVTEGMRKPAFLSGEQKKAIVDLLFKTNRKVTVKQLKEDYFKKIECFDSVEISGVEDRFNASLGTYHDLLKIIKDKDFLDNEENEDILEDIVLTLTLFEDREMIEERLKTYAHLFDDKVMKQLKRRRYTGWGRLSRKLINGIRDKQSGKTILDFLKSDGFANRNFMQLIHDDSLTFKEDIQKAQVSGQGDSLHEHIANLAGSPAIKKGILQTVKVVDELVKVMGRHKPENIVIEMARENQTTQKGQKNSRERMKRIEEGIKELGSQILKEHPVENTQLQNEKLYLYYLQNGRDMYVDQELDINRLSDYDVDHIVPQSFLKDDSIDNKVLTRSDKARGKSDNVPSEEVVKKMKNYWRQLLNAKLITQRKFDNLTKAERGGLSELDKAGFIKRQLVETRQITKHVAQILDSRMNTKYDENDKLIREVKVITLKSKLVSDFRKDFQFYKVREINNYHHAHDAYLNAVVGTALIKKYPKLESEFVYGDYKVYDVRKMIAKSEQEIGKATAKYFFYSNIMNFFKTEITLANGEIRKRPLIETNGETGEIVWDKGRDFATVRKVLSMPQVNIVKKTEVQTGGFSKESILPKRNSDKLIARKKDWDPKKYGGFDSPTVAYSVLVVAKVEKGKSKKLKSVKELLGITIMERSSFEKNPIDFLEAKGYKEVKKDLIIKLPKYSLFELENGRKRMLASAGELQKGNELALPSKYVNFLYLASHYEKLKGSPEDNEQKQLFVEQHKHYLDEIIEQISEFSKRVILADANLDKVLSAYNKHRDKPIREQAENIIHLFTLTNLGAPAAFKYFDTTIDRKRYTSTKEVLDATLIHQSITGLYETRIDLSQLGGDGGEAAAKEAAAKGGVPWLTQQPLQLTILVPLQEYQEKILSKTALPEDQKQQLKTLFVKYDNLWQHWENQVGHRKIRPHNIATGDYPPRPQKQYPINPKAKPSIQIVIDDLLKQGVLTPQNSTMNTPVYPVPKPDGRWRMVLDYREVNKTIPLTAAQNQHSAGILATIVRQKYKTTLDLANGFWAHPITPESYWLTAFTWQGKQYCWTRLPQGFLNSPALFNADVVDLLKEIPNVQVYVDDIYLSHDDPKEHVQQLEKVFQILLQAGYVVSLKKSEIGQKTVEFLGFNITKEGRGLTDTFKTKLLNITPPKDLKQLQSILGLLNFARNFIPNFAELVQPLYNLIAPAKGKYIEWSEENTKQLNMVIEALNTASNLEERLPEQRLVIKVNTSPSAGYVRYYNETGKKPIMYLNYVFSKAELKFSMLEKLLTTMHKALIKAMDLAMGQEILVYSPIVSMTKIQKTPLPERKALPIRWITWMTYLEDPRIQFHYDKTLPELKHIPDVYTSSQSPVKHPSQYEGVFYTDGSAIKSPDPTKSNNAGMGIVHATYKPEYQVLNQWSIPLGNHTAQMAEIAAVEFACKKALKIPGPVLVITDSFYVAESANKELPYWKSNGFVNNKKKPLKHISKWKSIAECLSMKPDITIQHEKGISLQIPVFILKGNALADKLATQGSYVVNAGKRTADGSEFEKRTADGSEFESPKKKAKVE

SEQ ID NO: 1309 - protein, 2087 aa, synthetic construct
MPAAKRVKLDGGDKKYSIGLDIGTNSVGWAVITDEYKVPSKKFKVLGNTDRHSIKKNLIGALLFDSGETAEATRLKRTARRRYTRRKNRICYLQEIFSNEMAKVDDSFFHRLEESFLVEEDKKHERHPIFGNIVDEVAYHEKYPTIYHLRKKLVDSTDKADLRLIYLALAHMIKFRGHFLIEGDLNPDNSDVDKLFIQLVQTYNQLFEENPINASGVDAKAILSARLSKSRRLENLIAQLPGEKKNGLFGNLIALSLGLTPNFKSNFDLAEDAKLQLSKDTYDDDLDNLLAQIGDQYADLFLAAKNLSDAILLSDILRVNTEITKAPLSASMIKRYDEHHQDLTLLKALVRQQLPEKYKEIFFDQSKNGYAGYIDGGASQEEFYKFIKPILEKMDGTEELLVKLNREDLLRKQRTFDNGSIPHQIHLGELHAILRRQEDFYPFLKDNREKIEKILTFRIPYYVGPLARGNSRFAWMTRKSEETITPWNFEEVVDKGASAQSFIERMTNFDKNLPNEKVLPKHSLLYEYFTVYNELTKVKYVTEGMRKPAFLSGEQKKAIVDLLFKTNRKVTVKQLKEDYFKKIECFDSVEISGVEDRFNASLGTYHDLLKIIKDKDFLDNEENEDILEDIVLTLTLFEDREMIEERLKTYAHLFDDKVMKQLKRRRYTGWGRLSRKLINGIRDKQSGKTILDFLKSDGFANRNFMQLIHDDSLTFKEDIQKAQVSGQGDSLHEHIANLAGSPAIKKGILQTVKVVDELVKVMGRHKPENIVIEMARENQTTQKGQKNSRERMKRIEEGIKELGSQILKEHPVENTQLQNEKLYLYYLQNGRDMYVDQELDINRLSDYDVDHIVPQSFLKDDSIDNKVLTRSDKARGKSDNVPSEEVVKKMKNYWRQLLNAKLITQRKFDNLTKAERGGLSELDKAGFIKRQLVETRQITKHVAQILDSRMNTKYDENDKLIREVKVITLKSKLVSDFRKDFQFYKVREINNYHHAHDAYLNAVVGTALIKKYPKLESEFVYGDYKVYDVRKMIAKSEQEIGKATAKYFFYSNIMNFFKTEITLANGEIRKRPLIETNGETGEIVWDKGRDFATVRKVLSMPQVNIVKKTEVQTGGFSKESILPKRNSDKLIARKKDWDPKKYGGFDSPTVAYSVLVVAKVEKGKSKKLKSVKELLGITIMERSSFEKNPIDFLEAKGYKEVKKDLIIKLPKYSLFELENGRKRMLASAGELQKGNELALPSKYVNFLYLASHYEKLKGSPEDNEQKQLFVEQHKHYLDEIIEQISEFSKRVILADANLDKVLSAYNKHRDKPIREQAENIIHLFTLTNLGAPAAFKYFDTTIDRKRYTSTKEVLDATLIHQSITGLYETRIDLSQLGGDGGGGGEAAAKPAPGGVPWLTQQPLQLTILVPLQEYQEKILSKTALPEDQKQQLKTLFVKYDNLWQHWENQVGHRKIRPHNIATGDYPPRPQKQYPINPKAKPSIQIVIDDLLKQGVLTPQNSTMNTPVYPVPKPDGRWRMVLDYREVNKTIPLTAAQNQHSAGILATIVRQKYKTTLDLANGFWAHPITPESYWLTAFTWQGKQYCWTRLPQGFLNSPALFNADVVDLLKEIPNVQVYVDDIYLSHDDPKEHVQQLEKVFQILLQAGYVVSLKKSEIGQKTVEFLGFNITKEGRGLTDTFKTKLLNITPPKDLKQLQSILGLLNFARNFIPNFAELVQPLYNLIAPAKGKYIEWSEENTKQLNMVIEALNTASNLEERLPEQRLVIKVNTSPSAGYVRYYNETGKKPIMYLNYVFSKAELKFSMLEKLLTTMHKALIKAMDLAMGQEILVYSPIVSMTKIQKTPLPERKALPIRWITWMTYLEDPRIQFHYDKTLPELKHIPDVYTSSQSPVKHPSQYEGVFYTDGSAIKSPDPTKSNNAGMGIVHATYKPEYQVLNQWSIPLGNHTAQMAEIAAVEFACKKALKIPGPVLVITDSFYVAESANKELPYWKSNGFVNNKKKPLKHISKWKSIAECLSMKPDITIQHEKGISLQIPVFILKGNALADKLATQGSYVVNAGKRTADGSEFEKRTADGSEFESPKKKAKVE

SEQ ID NO: 1310 - protein, 2085 aa, synthetic construct
MPAAKRVKLDGGDKKYSIGLDIGTNSVGWAVITDEYKVPSKKFKVLGNTDRHSIKKNLIGALLFDSGETAEATRLKRTARRRYTRRKNRICYLQEIFSNEMAKVDDSFFHRLEESFLVEEDKKHERHPIFGNIVDEVAYHEKYPTIYHLRKKLVDSTDKADLRLIYLALAHMIKFRGHFLIEGDLNPDNSDVDKLFIQLVQTYNQLFEENPINASGVDAKAILSARLSKSRRLENLIAQLPGEKKNGLFGNLIALSLGLTPNFKSNFDLAEDAKLQLSKDTYDDDLDNLLAQIGDQYADLFLAAKNLSDAILLSDILRVNTEITKAPLSASMIKRYDEHHQDLTLLKALVRQQLPEKYKEIFFDQSKNGYAGYIDGGASQEEFYKFIKPILEKMDGTEELLVKLNREDLLRKQRTFDNGSIPHQIHLGELHAILRRQEDFYPFLKDNREKIEKILTFRIPYYVGPLARGNSRFAWMTRKSEETITPWNFEEVVDKGASAQSFIERMTNFDKNLPNEKVLPKHSLLYEYFTVYNELTKVKYVTEGMRKPAFLSGEQKKAIVDLLFKTNRKVTVKQLKEDYFKKIECFDSVEISGVEDRFNASLGTYHDLLKIIKDKDFLDNEENEDILEDIVLTLTLFEDREMIEERLKTYAHLFDDKVMKQLKRRRYTGWGRLSRKLINGIRDKQSGKTILDFLKSDGFANRNFMQLIHDDSLTFKEDIQKAQVSGQGDSLHEHIANLAGSPAIKKGILQTVKVVDELVKVMGRHKPENIVIEMARENQTTQKGQKNSRERMKRIEEGIKELGSQILKEHPVENTQLQNEKLYLYYLQNGRDMYVDQELDINRLSDYDVDHIVPQSFLKDDSIDNKVLTRSDKARGKSDNVPSEEVVKKMKNYWRQLLNAKLITQRKFDNLTKAERGGLSELDKAGFIKRQLVETRQITKHVAQILDSRMNTKYDENDKLIREVKVITLKSKLVSDFRKDFQFYKVREINNYHHAHDAYLNAVVGTALIKKYPKLESEFVYGDYKVYDVRKMIAKSEQEIGKATAKYFFYSNIMNFFKTEITLANGEIRKRPLIETNGETGEIVWDKGRDFATVRKVLSMPQVNIVKKTEVQTGGFSKESILPKRNSDKLIARKKDWDPKKYGGFDSPTVAYSVLVVAKVEKGKSKKLKSVKELLGITIMERSSFEKNPIDFLEAKGYKEVKKDLIIKLPKYSLFELENGRKRMLASAGELQKGNELALPSKYVNFLYLASHYEKLKGSPEDNEQKQLFVEQHKHYLDEIIEQISEFSKRVILADANLDKVLSAYNKHRDKPIREQAENIIHLFTLTNLGAPAAFKYFDTTIDRKRYTSTKEVLDATLIHQSITGLYETRIDLSQLGGDGGGGSGGGPAPGGVPWLTQQPLQLTILVPLQEYQEKILSKTALPEDQKQQLKTLFVKYDNLWQHWENQVGHRKIRPHNIATGDYPPRPQKQYPINPKAKPSIQIVIDDLLKQGVLTPQNSTMNTPVYPVPKPDGRWRMVLDYREVNKTIPLTAAQNQHSAGILATIVRQKYKTTLDLANGFWAHPITPESYWLTAFTWQGKQYCWTRLPQGFLNSPALFNADVVDLLKEIPNVQVYVDDIYLSHDDPKEHVQQLEKVFQILLQAGYVVSLKKSEIGQKTVEFLGFNITKEGRGLTDTFKTKLLNITPPKDLKQLQSILGLLNFARNFIPNFAELVQPLYNLIAPAKGKYIEWSEENTKQLNMVIEALNTASNLEERLPEQRLVIKVNTSPSAGYVRYYNETGKKPIMYLNYVFSKAELKFSMLEKLLTTMHKALIKAMDLAMGQEILVYSPIVSMTKIQKTPLPERKALPIRWITWMTYLEDPRIQFHYDKTLPELKHIPDVYTSSQSPVKHPSQYEGVFYTDGSAIKSPDPTKSNNAGMGIVHATYKPEYQVLNQWSIPLGNHTAQMAEIAAVEFACKKALKIPGPVLVITDSFYVAESANKELPYWKSNGFVNNKKKPLKHISKWKSIAECLSMKPDITIQHEKGISLQIPVFILKGNALADKLATQGSYVVNAGKRTADGSEFEKRTADGSEFESPKKKAKVE

SEQ ID NO: 1311 - protein, 2122 aa, synthetic construct
MPAAKRVKLDGGDKKYSIGLDIGTNSVGWAVITDEYKVPSKKFKVLGNTDRHSIKKNLIGALLFDSGETAEATRLKRTARRRYTRRKNRICYLQEIFSNEMAKVDDSFFHRLEESFLVEEDKKHERHPIFGNIVDEVAYHEKYPTIYHLRKKLVDSTDKADLRLIYLALAHMIKFRGHFLIEGDLNPDNSDVDKLFIQLVQTYNQLFEENPINASGVDAKAILSARLSKSRRLENLIAQLPGEKKNGLFGNLIALSLGLTPNFKSNFDLAEDAKLQLSKDTYDDDLDNLLAQIGDQYADLFLAAKNLSDAILLSDILRVNTEITKAPLSASMIKRYDEHHQDLTLLKALVRQQLPEKYKEIFFDQSKNGYAGYIDGGASQEEFYKFIKPILEKMDGTEELLVKLNREDLLRKQRTFDNGSIPHQIHLGELHAILRRQEDFYPFLKDNREKIEKILTFRIPYYVGPLARGNSRFAWMTRKSEETITPWNFEEVVDKGASAQSFIERMTNFDKNLPNEKVLPKHSLLYEYFTVYNELTKVKYVTEGMRKPAFLSGEQKKAIVDLLFKTNRKVTVKQLKEDYFKKIECFDSVEISGVEDRFNASLGTYHDLLKIIKDKDFLDNEENEDILEDIVLTLTLFEDREMIEERLKTYAHLFDDKVMKQLKRRRYTGWGRLSRKLINGIRDKQSGKTILDFLKSDGFANRNFMQLIHDDSLTFKEDIQKAQVSGQGDSLHEHIANLAGSPAIKKGILQTVKVVDELVKVMGRHKPENIVIEMARENQTTQKGQKNSRERMKRIEEGIKELGSQILKEHPVENTQLQNEKLYLYYLQNGRDMYVDQELDINRLSDYDVDHIVPQSFLKDDSIDNKVLTRSDKARGKSDNVPSEEVVKKMKNYWRQLLNAKLITQRKFDNLTKAERGGLSELDKAGFIKRQLVETRQITKHVAQILDSRMNTKYDENDKLIREVKVITLKSKLVSDFRKDFQFYKVREINNYHHAHDAYLNAVVGTALIKKYPKLESEFVYGDYKVYDVRKMIAKSEQEIGKATAKYFFYSNIMNFFKTEITLANGEIRKRPLIETNGETGEIVWDKGRDFATVRKVLSMPQVNIVKKTEVQTGGFSKESILPKRNSDKLIARKKDWDPKKYGGFDSPTVAYSVLVVAKVEKGKSKKLKSVKELLGITIMERSSFEKNPIDFLEAKGYKEVKKDLIIKLPKYSLFELENGRKRMLASAGELQKGNELALPSKYVNFLYLASHYEKLKGSPEDNEQKQLFVEQHKHYLDEIIEQISEFSKRVILADANLDKVLSAYNKHRDKPIREQAENIIHLFTLTNLGAPAAFKYFDTTIDRKRYTSTKEVLDATLIHQSITGLYETRIDLSQLGGDGGAEAAAKEAAAKEAAAKEAAAKALEAEAAAKEAAAKEAAAKEAAAKAGGVPWLTQQPLQLTILVPLQEYQEKILSKTALPEDQKQQLKTLFVKYDNLWQHWENQVGHRKIRPHNIATGDYPPRPQKQYPINPKAKPSIQIVIDDLLKQGVLTPQNSTMNTPVYPVPKPDGRWRMVLDYREVNKTIPLTAAQNQHSAGILATIVRQKYKTTLDLANGFWAHPITPESYWLTAFTWQGKQYCWTRLPQGFLNSPALFNADVVDLLKEIPNVQVYVDDIYLSHDDPKEHVQQLEKVFQILLQAGYVVSLKKSEIGQKTVEFLGFNITKEGRGLTDTFKTKLLNITPPKDLKQLQSILGKLNFARNFIPNFAELVQPLYNLIAPAKGKYIEWSEENTKQLNMVIEALNTASNLEERLPEQRLVIKVNTSPSAGYVRYYNETGKKPIMYLNYVFSKAELKFSMLEKLLTTMHKALIKAMDLAMGQEILVYSPIVSMTKIQKTPLPERKALPIRWITWMTYLEDPRIQFHYDKTLPELKHIPDVYTSSQSPVKHPSQYEGVFYTDGSAIKSPDPTKSNNAGMGIVHATYKPEYQVLNQWSIPLGNHTAQMAEIAAVEFACKKALKIPGPVLVITDSFYVAESANKELPYWKSNGFVNNKKKPLKHISKWKSIAECLSMKPDITIQHEKGISLQIPVFILKGNALADKLATQGSYVVNAGKRTADGSEFEKRTADGSEFESPKKKAKVE

SEQ ID NO: 1312 - protein, 2092 aa, synthetic construct
MPAAKRVKLDGGDKKYSIGLDIGTNSVGWAVITDEYKVPSKKFKVLGNTDRHSIKKNLIGALLFDSGETAEATRLKRTARRRYTRRKNRICYLQEIFSNEMAKVDDSFFHRLEESFLVEEDKKHERHPIFGNIVDEVAYHEKYPTIYHLRKKLVDSTDKADLRLIYLALAHMIKFRGHFLIEGDLNPDNSDVDKLFIQLVQTYNQLFEENPINASGVDAKAILSARLSKSRRLENLIAQLPGEKKNGLFGNLIALSLGLTPNFKSNFDLAEDAKLQLSKDTYDDDLDNLLAQIGDQYADLFLAAKNLSDAILLSDILRVNTEITKAPLSASMIKRYDEHHQDLTLLKALVRQQLPEKYKEIFFDQSKNGYAGYIDGGASQEEFYKFIKPILEKMDGTEELLVKLNREDLLRKQRTFDNGSIPHQIHLGELHAILRRQEDFYPFLKDNREKIEKILTFRIPYYVGPLARGNSRFAWMTRKSEETITPWNFEEVVDKGASAQSFIERMTNFDKNLPNEKVLPKHSLLYEYFTVYNELTKVKYVTEGMRKPAFLSGEQKKAIVDLLFKTNRKVTVKQLKEDYFKKIECFDSVEISGVEDRFNASLGTYHDLLKIIKDKDFLDNEENEDILEDIVLTLTLFEDREMIEERLKTYAHLFDDKVMKQLKRRRYTGWGRLSRKLINGIRDKQSGKTILDFLKSDGFANRNFMQLIHDDSLTFKEDIQKAQVSGQGDSLHEHIANLAGSPAIKKGILQTVKVVDELVKVMGRHKPENIVIEMARENQTTQKGQKNSRERMKRIEEGIKELGSQILKEHPVENTQLQNEKLYLYYLQNGRDMYVDQELDINRLSDYDVDHIVPQSFLKDDSIDNKVLTRSDKARGKSDNVPSEEVVKKMKNYWRQLLNAKLITQRKFDNLTKAERGGLSELDKAGFIKRQLVETRQITKHVAQILDSRMNTKYDENDKLIREVKVITLKSKLVSDFRKDFQFYKVREINNYHHAHDAYLNAVVGTALIKKYPKLESEFVYGDYKVYDVRKMIAKSEQEIGKATAKYFFYSNIMNFFKTEITLANGEIRKRPLIETNGETGEIVWDKGRDFATVRKVLSMPQVNIVKKTEVQTGGFSKESILPKRNSDKLIARKKDWDPKKYGGFDSPTVAYSVLVVAKVEKGKSKKLKSVKELLGITIMERSSFEKNPIDFLEAKGYKEVKKDLIIKLPKYSLFELENGRKRMLASAGELQKGNELALPSKYVNFLYLASHYEKLKGSPEDNEQKQLFVEQHKHYLDEIIEQISEFSKRVILADANLDKVLSAYNKHRDKPIREQAENIIHLFTLTNLGAPAAFKYFDTTIDRKRYTSTKEVLDATLIHQSITGLYETRIDLSQLGGDGGSGSETPGTSESATPESGGVPWLTQQPLQLTILVPLQEYQEKILSKTALPEDQKQQLKTLFVKYDNLWQHWENQVGHRKIRPHNIATGDYPPRPQKQYPINPKAKPSIQIVIDDLLKQGVLTPQNSTMNTPVYPVPKPDGRWRMVLDYREVNKTIPLTAAQNQHSAGILATIVRQKYKTTLDLANGFWAHPITPESYWLTAFTWQGKQYCWTRLPQGFLNSPALFNADVVDLLKEIPNVQVYVDDIYLSHDDPKEHVQQLEKVFQILLQAGYVVSLKKSEIGQKTVEFLGFNITKEGRGLTDTFKTKLLNITPPKDLKQLQSILGKLNFARNFIPNFAELVQPLYNLIAPAKGKYIEWSEENTKQLNMVIEALNTASNLEERLPEQRLVIKVNTSPSAGYVRYYNETGKKPIMYLNYVFSKAELKFSMLEKLLTTMHKALIKAMDLAMGQEILVYSPIVSMTKIQKTPLPERKALPIRWITWMTYLEDPRIQFHYDKTLPELKHIPDVYTSSQSPVKHPSQYEGVFYTDGSAIKSPDPTKSNNAGMGIVHATYKPEYQVLNQWSIPLGNHTAQMAEIAAVEFACKKALKIPGPVLVITDSFYVAESANKELPYWKSNGFVNNKKKPLKHISKWKSIAECLSMKPDITIQHEKGISLQIPVFILKGNALADKLATQGSYVVNAGKRTADGSEFEKRTADGSEFESPKKKAKVE

SEQ ID NO: 1313 - protein, 2096 aa, synthetic construct
MPAAKRVKLDGGDKKYSIGLDIGTNSVGWAVITDEYKVPSKKFKVLGNTDRHSIKKNLIGALLFDSGETAEATRLKRTARRRYTRRKNRICYLQEIFSNEMAKVDDSFFHRLEESFLVEEDKKHERHPIFGNIVDEVAYHEKYPTIYHLRKKLVDSTDKADLRLIYLALAHMIKFRGHFLIEGDLNPDNSDVDKLFIQLVQTYNQLFEENPINASGVDAKAILSARLSKSRRLENLIAQLPGEKKNGLFGNLIALSLGLTPNFKSNFDLAEDAKLQLSKDTYDDDLDNLLAQIGDQYADLFLAAKNLSDAILLSDILRVNTEITKAPLSASMIKRYDEHHQDLTLLKALVRQQLPEKYKEIFFDQSKNGYAGYIDGGASQEEFYKFIKPILEKMDGTEELLVKLNREDLLRKQRTFDNGSIPHQIHLGELHAILRRQEDFYPFLKDNREKIEKILTFRIPYYVGPLARGNSRFAWMTRKSEETITPWNFEEVVDKGASAQSFIERMTNFDKNLPNEKVLPKHSLLYEYFTVYNELTKVKYVTEGMRKPAFLSGEQKKAIVDLLFKTNRKVTVKQLKEDYFKKIECFDSVEISGVEDRFNASLGTYHDLLKIIKDKDFLDNEENEDILEDIVLTLTLFEDREMIEERLKTYAHLFDDKVMKQLKRRRYTGWGRLSRKLINGIRDKQSGKTILDFLKSDGFANRNFMQLIHDDSLTFKEDIQKAQVSGQGDSLHEHIANLAGSPAIKKGILQTVKVVDELVKVMGRHKPENIVIEMARENQTTQKGQKNSRERMKRIEEGIKELGSQILKEHPVENTQLQNEKLYLYYLQNGRDMYVDQELDINRLSDYDVDHIVPQSFLKDDSIDNKVLTRSDKARGKSDNVPSEEVVKKMKNYWRQLLNAKLITQRKFDNLTKAERGGLSELDKAGFIKRQLVETRQITKHVAQILDSRMNTKYDENDKLIREVKVITLKSKLVSDFRKDFQFYKVREINNYHHAHDAYLNAVVGTALIKKYPKLESEFVYGDYKVYDVRKMIAKSEQEIGKATAKYFFYSNIMNFFKTEITLANGEIRKRPLIETNGETGEIVWDKGRDFATVRKVLSMPQVNIVKKTEVQTGGFSKESILPKRNSDKLIARKKDWDPKKYGGFDSPTVAYSVLVVAKVEKGKSKKLKSVKELLGITIMERSSFEKNPIDFLEAKGYKEVKKDLIIKLPKYSLFELENGRKRMLASAGELQKGNELALPSKYVNFLYLASHYEKLKGSPEDNEQKQLFVEQHKHYLDEIIEQISEFSKRVILADANLDKVLSAYNKHRDKPIREQAENIIHLFTLTNLGAPAAFKYFDTTIDRKRYTSTKEVLDATLIHQSITGLYETRIDLSQLGGDGGEAAAKEAAAKEAAAKEAAAKGGVPWLTQQPLQLTILVPLQEYQEKILSKTALPEDQKQQLKTLFVKYDNLWQHWENQVGHRKIRPHNIATGDYPPRPQKQYPINPKAKPSIQIVIDDLLKQGVLTPQNSTMNTPVYPVPKPDGRWRMVLDYREVNKTIPLTAAQNQHSAGILATIVRQKYKTTLDLANGFWAHPITPESYWLTAFTWQGKQYCWTRLPQGFLNSPALFNADVVDLLKEIPNVQVYVDDIYLSHDDPKEHVQQLEKVFQILLQAGYVVSLKKSEIGQKTVEFLGFNITKEGRGLTDTFKTKLLNITPPKDLKQLQSILGKLNFARNFIPNFAELVQPLYNLIAPAKGKYIEWSEENTKQLNMVIEALNTASNLEERLPEQRLVIKVNTSPSAGYVRYYNETGKKPIMYLNYVFSKAELKFSMLEKLLTTMHKALIKAMDLAMGQEILVYSPIVSMTKIQKTPLPERKALPIRWITWMTYLEDPRIQFHYDKTLPELKHIPDVYTSSQSPVKHPSQYEGVFYTDGSAIKSPDPTKSNNAGMGIVHATYKPEYQVLNQWSIPLGNHTAQMAEIAAVEFACKKALKIPGPVLVITDSFYVAESANKELPYWKSNGFVNNKKKPLKHISKWKSIAECLSMKPDITIQHEKGISLQIPVFILKGNALADKLATQGSYVVNAGKRTADGSEFEKRTADGSEFESPKKKAKVE

SEQ ID NO: 1314 - protein, 2096 aa, synthetic construct
MPAAKRVKLDGGDKKYSIGLDIGTNSVGWAVITDEYKVPSKKFKVLGNTDRHSIKKNLIGALLFDSGETAEATRLKRTARRRYTRRKNRICYLQEIFSNEMAKVDDSFFHRLEESFLVEEDKKHERHPIFGNIVDEVAYHEKYPTIYHLRKKLVDSTDKADLRLIYLALAHMIKFRGHFLIEGDLNPDNSDVDKLFIQLVQTYNQLFEENPINASGVDAKAILSARLSKSRRLENLIAQLPGEKKNGLFGNLIALSLGLTPNFKSNFDLAEDAKLQLSKDTYDDDLDNLLAQIGDQYADLFLAAKNLSDAILLSDILRVNTEITKAPLSASMIKRYDEHHQDLTLLKALVRQQLPEKYKEIFFDQSKNGYAGYIDGGASQEEFYKFIKPILEKMDGTEELLVKLNREDLLRKQRTFDNGSIPHQIHLGELHAILRRQEDFYPFLKDNREKIEKILTFRIPYYVGPLARGNSRFAWMTRKSEETITPWNFEEVVDKGASAQSFIERMTNFDKNLPNEKVLPKHSLLYEYFTVYNELTKVKYVTEGMRKPAFLSGEQKKAIVDLLFKTNRKVTVKQLKEDYFKKIECFDSVEISGVEDRFNASLGTYHDLLKIIKDKDFLDNEENEDILEDIVLTLTLFEDREMIEERLKTYAHLFDDKVMKQLKRRRYTGWGRLSRKLINGIRDKQSGKTILDFLKSDGFANRNFMQLIHDDSLTFKEDIQKAQVSGQGDSLHEHIANLAGSPAIKKGILQTVKVVDELVKVMGRHKPENIVIEMARENQTTQKGQKNSRERMKRIEEGIKELGSQILKEHPVENTQLQNEKLYLYYLQNGRDMYVDQELDINRLSDYDVDHIVPQSFLKDDSIDNKVLTRSDKARGKSDNVPSEEVVKKMKNYWRQLLNAKLITQRKFDNLTKAERGGLSELDKAGFIKRQLVETRQITKHVAQILDSRMNTKYDENDKLIREVKVITLKSKLVSDFRKDFQFYKVREINNYHHAHDAYLNAVVGTALIKKYPKLESEFVYGDYKVYDVRKMIAKSEQEIGKATAKYFFYSNIMNFFKTEITLANGEIRKRPLIETNGETGEIVWDKGRDFATVRKVLSMPQVNIVKKTEVQTGGFSKESILPKRNSDKLIARKKDWDPKKYGGFDSPTVAYSVLVVAKVEKGKSKKLKSVKELLGITIMERSSFEKNPIDFLEAKGYKEVKKDLIIKLPKYSLFELENGRKRMLASAGELQKGNELALPSKYVNFLYLASHYEKLKGSPEDNEQKQLFVEQHKHYLDEIIEQISEFSKRVILADANLDKVLSAYNKHRDKPIREQAENIIHLFTLTNLGAPAAFKYFDTTIDRKRYTSTKEVLDATLIHQSITGLYETRIDLSQLGGDGGGGGGSGGGGSGGGGSGGGGSGGVPWLTQQPLQLTILVPLQEYQEKILSKTALPEDQKQQLKTLFVKYDNLWQHWENQVGHRKIRPHNIATGDYPPRPQKQYPINPKAKPSIQIVIDDLLKQGVLTPQNSTMNTPVYPVPKPDGRWRMVLDYREVNKTIPLTAAQNQHSAGILATIVRQKYKTTLDLANGFWAHPITPESYWLTAFTWQGKQYCWTRLPQGFLNSPALFNADVVDLLKEIPNVQVYVDDIYLSHDDPKEHVQQLEKVFQILLQAGYVVSLKKSEIGQKTVEFLGFNITKEGRGLTDTFKTKLLNITPPKDLKQLQSILGKLNFARNFIPNFAELVQPLYNLIAPAKGKYIEWSEENTKQLNMVIEALNTASNLEERLPEQRLVIKVNTSPSAGYVRYYNETGKKPIMYLNYVFSKAELKFSMLEKLLTTMHKALIKAMDLAMGQEILVYSPIVSMTKIQKTPLPERKALPIRWITWMTYLEDPRIQFHYDKTLPELKHIPDVYTSSQSPVKHPSQYEGVFYTDGSAIKSPDPTKSNNAGMGIVHATYKPEYQVLNQWSIPLGNHTAQMAEIAAVEFACKKALKIPGPVLVITDSFYVAESANKELPYWKSNGFVNNKKKPLKHISKWKSIAECLSMKPDITIQHEKGISLQIPVFILKGNALADKLATQGSYVVNAGKRTADGSEFEKRTADGSEFESPKKKAKVE

SEQ ID NO: 1315 - protein, 2087 aa, synthetic construct
MPAAKRVKLDGGDKKYSIGLDIGTNSVGWAVITDEYKVPSKKFKVLGNTDRHSIKKNLIGALLFDSGETAEATRLKRTARRRYTRRKNRICYLQEIFSNEMAKVDDSFFHRLEESFLVEEDKKHERHPIFGNIVDEVAYHEKYPTIYHLRKKLVDSTDKADLRLIYLALAHMIKFRGHFLIEGDLNPDNSDVDKLFIQLVQTYNQLFEENPINASGVDAKAILSARLSKSRRLENLIAQLPGEKKNGLFGNLIALSLGLTPNFKSNFDLAEDAKLQLSKDTYDDDLDNLLAQIGDQYADLFLAAKNLSDAILLSDILRVNTEITKAPLSASMIKRYDEHHQDLTLLKALVRQQLPEKYKEIFFDQSKNGYAGYIDGGASQEEFYKFIKPILEKMDGTEELLVKLNREDLLRKQRTFDNGSIPHQIHLGELHAILRRQEDFYPFLKDNREKIEKILTFRIPYYVGPLARGNSRFAWMTRKSEETITPWNFEEVVDKGASAQSFIERMTNFDKNLPNEKVLPKHSLLYEYFTVYNELTKVKYVTEGMRKPAFLSGEQKKAIVDLLFKTNRKVTVKQLKEDYFKKIECFDSVEISGVEDRFNASLGTYHDLLKIIKDKDFLDNEENEDILEDIVLTLTLFEDREMIEERLKTYAHLFDDKVMKQLKRRRYTGWGRLSRKLINGIRDKQSGKTILDFLKSDGFANRNFMQLIHDDSLTFKEDIQKAQVSGQGDSLHEHIANLAGSPAIKKGILQTVKVVDELVKVMGRHKPENIVIEMARENQTTQKGQKNSRERMKRIEEGIKELGSQILKEHPVENTQLQNEKLYLYYLQNGRDMYVDQELDINRLSDYDVDHIVPQSFLKDDSIDNKVLTRSDKARGKSDNVPSEEVVKKMKNYWRQLLNAKLITQRKFDNLTKAERGGLSELDKAGFIKRQLVETRQITKHVAQILDSRMNTKYDENDKLIREVKVITLKSKLVSDFRKDFQFYKVREINNYHHAHDAYLNAVVGTALIKKYPKLESEFVYGDYKVYDVRKMIAKSEQEIGKATAKYFFYSNIMNFFKTEITLANGEIRKRPLIETNGETGEIVWDKGRDFATVRKVLSMPQVNIVKKTEVQTGGFSKESILPKRNSDKLIARKKDWDPKKYGGFDSPTVAYSVLVVAKVEKGKSKKLKSVKELLGITIMERSSFEKNPIDFLEAKGYKEVKKDLIIKLPKYSLFELENGRKRMLASAGELQKGNELALPSKYVNFLYLASHYEKLKGSPEDNEQKQLFVEQHKHYLDEIIEQISEFSKRVILADANLDKVLSAYNKHRDKPIREQAENIIHLFTLTNLGAPAAFKYFDTTIDRKRYTSTKEVLDATLIHQSITGLYETRIDLSQLGGDGGGSSPAPEAAAKGGVPWLTQQPLQLTILVPLQEYQEKILSKTALPEDQKQQLKTLFVKYDNLWQHWENQVGHRKIRPHNIATGDYPPRPQKQYPINPKAKPSIQIVIDDLLKQGVLTPQNSTMNTPVYPVPKPDGRWRMVLDYREVNKTIPLTAAQNQHSAGILATIVRQKYKTTLDLANGFWAHPITPESYWLTAFTWQGKQYCWTRLPQGFLNSPALFNADVVDLLKEIPNVQVYVDDIYLSHDDPKEHVQQLEKVFQILLQAGYVVSLKKSEIGQKTVEFLGFNITKEGRGLTDTFKTKLLNITPPKDLKQLQSILGKLNFARNFIPNFAELVQPLYNLIAPAKGKYIEWSEENTKQLNMVIEALNTASNLEERLPEQRLVIKVNTSPSAGYVRYYNETGKKPIMYLNYVFSKAELKFSMLEKLLTTMHKALIKAMDLAMGQEILVYSPIVSMTKIQKTPLPERKALPIRWITWMTYLEDPRIQFHYDKTLPELKHIPDVYTSSQSPVKHPSQYEGVFYTDGSAIKSPDPTKSNNAGMGIVHATYKPEYQVLNQWSIPLGNHTAQMAEIAAVEFACKKALKIPGPVLVITDSFYVAESANKELPYWKSNGFVNNKKKPLKHISKWKSIAECLSMKPDITIQHEKGISLQIPVFILKGNALADKLATQGSYVVNAGKRTADGSEFEKRTADGSEFESPKKKAKVE

SEQ ID NO: 1316 - protein, 2086 aa, synthetic construct
MPAAKRVKLDGGDKKYSIGLDIGTNSVGWAVITDEYKVPSKKFKVLGNTDRHSIKKNLIGALLFDSGETAEATRLKRTARRRYTRRKNRICYLQEIFSNEMAKVDDSFFHRLEESFLVEEDKKHERHPIFGNIVDEVAYHEKYPTIYHLRKKLVDSTDKADLRLIYLALAHMIKFRGHFLIEGDLNPDNSDVDKLFIQLVQTYNQLFEENPINASGVDAKAILSARLSKSRRLENLIAQLPGEKKNGLFGNLIALSLGLTPNFKSNFDLAEDAKLQLSKDTYDDDLDNLLAQIGDQYADLFLAAKNLSDAILLSDILRVNTEITKAPLSASMIKRYDEHHQDLTLLKALVRQQLPEKYKEIFFDQSKNGYAGYIDGGASQEEFYKFIKPILEKMDGTEELLVKLNREDLLRKQRTFDNGSIPHQIHLGELHAILRRQEDFYPFLKDNREKIEKILTFRIPYYVGPLARGNSRFAWMTRKSEETITPWNFEEVVDKGASAQSFIERMTNFDKNLPNEKVLPKHSLLYEYFTVYNELTKVKYVTEGMRKPAFLSGEQKKAIVDLLFKTNRKVTVKQLKEDYFKKIECFDSVEISGVEDRFNASLGTYHDLLKIIKDKDFLDNEENEDILEDIVLTLTLFEDREMIEERLKTYAHLFDDKVMKQLKRRRYTGWGRLSRKLINGIRDKQSGKTILDFLKSDGFANRNFMQLIHDDSLTFKEDIQKAQVSGQGDSLHEHIANLAGSPAIKKGILQTVKVVDELVKVMGRHKPENIVIEMARENQTTQKGQKNSRERMKRIEEGIKELGSQILKEHPVENTQLQNEKLYLYYLQNGRDMYVDQELDINRLSDYDVDHIVPQSFLKDDSIDNKVLTRSDKARGKSDNVPSEEVVKKMKNYWRQLLNAKLITQRKFDNLTKAERGGLSELDKAGFIKRQLVETRQITKHVAQILDSRMNTKYDENDKLIREVKVITLKSKLVSDFRKDFQFYKVREINNYHHAHDAYLNAVVGTALIKKYPKLESEFVYGDYKVYDVRKMIAKSEQEIGKATAKYFFYSNIMNFFKTEITLANGEIRKRPLIETNGETGEIVWDKGRDFATVRKVLSMPQVNIVKKTEVQTGGFSKESILPKRNSDKLIARKKDWDPKKYGGFDSPTVAYSVLVVAKVEKGKSKKLKSVKELLGITIMERSSFEKNPIDFLEAKGYKEVKKDLIIKLPKYSLFELENGRKRMLASAGELQKGNELALPSKYVNFLYLASHYEKLKGSPEDNEQKQLFVEQHKHYLDEIIEQISEFSKRVILADANLDKVLSAYNKHRDKPIREQAENIIHLFTLTNLGAPAAFKYFDTTIDRKRYTSTKEVLDATLIHQSITGLYETRIDLSQLGGDGGGGGGSGGGGSGGVPWLTQQPLQLTILVPLQEYQEKILSKTALPEDQKQQLKTLFVKYDNLWQHWENQVGHRKIRPHNIATGDYPPRPQKQYPINPKAKPSIQIVIDDLLKQGVLTPQNSTMNTPVYPVPKPDGRWRMVLDYREVNKTIPLTAAQNQHSAGILATIVRQKYKTTLDLANGFWAHPITPESYWLTAFTWQGKQYCWTRLPQGFLNSPALFNADVVDLLKEIPNVQVYVDDIYLSHDDPKEHVQQLEKVFQILLQAGYVVSLKKSEIGQKTVEFLGFNITKEGRGLTDTFKTKLLNITPPKDLKQLQSILGKLNFARNFIPNFAELVQPLYNLIAPAKGKYIEWSEENTKQLNMVIEALNTASNLEERLPEQRLVIKVNTSPSAGYVRYYNETGKKPIMYLNYVFSKAELKFSMLEKLLTTMHKALIKAMDLAMGQEILVYSPIVSMTKIQKTPLPERKALPIRWITWMTYLEDPRIQFHYDKTLPELKHIPDVYTSSQSPVKHPSQYEGVFYTDGSAIKSPDPTKSNNAGMGIVHATYKPEYQVLNQWSIPLGNHTAQMAEIAAVEFACKKALKIPGPVLVITDSFYVAESANKELPYWKSNGFVNNKKKPLKHISKWKSIAECLSMKPDITIQHEKGISLQIPVFILKGNALADKLATQGSYVVNAGKRTADGSEFEKRTADGSEFESPKKKAKVE

SEQ ID NO: 1317 - protein, 2087 aa, synthetic construct
MPAAKRVKLDGGDKKYSIGLDIGTNSVGWAVITDEYKVPSKKFKVLGNTDRHSIKKNLIGALLFDSGETAEATRLKRTARRRYTRRKNRICYLQEIFSNEMAKVDDSFFHRLEESFLVEEDKKHERHPIFGNIVDEVAYHEKYPTIYHLRKKLVDSTDKADLRLIYLALAHMIKFRGHFLIEGDLNPDNSDVDKLFIQLVQTYNQLFEENPINASGVDAKAILSARLSKSRRLENLIAQLPGEKKNGLFGNLIALSLGLTPNFKSNFDLAEDAKLQLSKDTYDDDLDNLLAQIGDQYADLFLAAKNLSDAILLSDILRVNTEITKAPLSASMIKRYDEHHQDLTLLKALVRQQLPEKYKEIFFDQSKNGYAGYIDGGASQEEFYKFIKPILEKMDGTEELLVKLNREDLLRKQRTFDNGSIPHQIHLGELHAILRRQEDFYPFLKDNREKIEKILTFRIPYYVGPLARGNSRFAWMTRKSEETITPWNFEEVVDKGASAQSFIERMTNFDKNLPNEKVLPKHSLLYEYFTVYNELTKVKYVTEGMRKPAFLSGEQKKAIVDLLFKTNRKVTVKQLKEDYFKKIECFDSVEISGVEDRFNASLGTYHDLLKIIKDKDFLDNEENEDILEDIVLTLTLFEDREMIEERLKTYAHLFDDKVMKQLKRRRYTGWGRLSRKLINGIRDKQSGKTILDFLKSDGFANRNFMQLIHDDSLTFKEDIQKAQVSGQGDSLHEHIANLAGSPAIKKGILQTVKVVDELVKVMGRHKPENIVIEMARENQTTQKGQKNSRERMKRIEEGIKELGSQILKEHPVENTQLQNEKLYLYYLQNGRDMYVDQELDINRLSDYDVDHIVPQSFLKDDSIDNKVLTRSDKARGKSDNVPSEEVVKKMKNYWRQLLNAKLITQRKFDNLTKAERGGLSELDKAGFIKRQLVETRQITKHVAQILDSRMNTKYDENDKLIREVKVITLKSKLVSDFRKDFQFYKVREINNYHHAHDAYLNAVVGTALIKKYPKLESEFVYGDYKVYDVRKMIAKSEQEIGKATAKYFFYSNIMNFFKTEITLANGEIRKRPLIETNGETGEIVWDKGRDFATVRKVLSMPQVNIVKKTEVQTGGFSKESILPKRNSDKLIARKKDWDPKKYGGFDSPTVAYSVLVVAKVEKGKSKKLKSVKELLGITIMERSSFEKNPIDFLEAKGYKEVKKDLIIKLPKYSLFELENGRKRMLASAGELQKGNELALPSKYVNFLYLASHYEKLKGSPEDNEQKQLFVEQHKHYLDEIIEQISEFSKRVILADANLDKVLSAYNKHRDKPIREQAENIIHLFTLTNLGAPAAFKYFDTTIDRKRYTSTKEVLDATLIHQSITGLYETRIDLSQLGGDGGPAPGSSEAAAKGGVPWLTQQPLQLTILVPLQEYQEKILSKTALPEDQKQQLKTLFVKYDNLWQHWENQVGHRKIRPHNIATGDYPPRPQKQYPINPKAKPSIQIVIDDLLKQGVLTPQNSTMNTPVYPVPKPDGRWRMVLDYREVNKTIPLTAAQNQHSAGILATIVRQKYKTTLDLANGFWAHPITPESYWLTAFTWQGKQYCWTRLPQGFLNSPALFNADVVDLLKEIPNVQVYVDDIYLSHDDPKEHVQQLEKVFQILLQAGYVVSLKKSEIGQKTVEFLGFNITKEGRGLTDTFKTKLLNITPPKDLKQLQSILGKLNFARNFIPNFAELVQPLYNLIAPAKGKYIEWSEENTKQLNMVIEALNTASNLEERLPEQRLVIKVNTSPSAGYVRYYNETGKKPIMYLNYVFSKAELKFSMLEKLLTTMHKALIKAMDLAMGQEILVYSPIVSMTKIQKTPLPERKALPIRWITWMTYLEDPRIQFHYDKTLPELKHIPDVYTSSQSPVKHPSQYEGVFYTDGSAIKSPDPTKSNNAGMGIVHATYKPEYQVLNQWSIPLGNHTAQMAEIAAVEFACKKALKIPGPVLVITDSFYVAESANKELPYWKSNGFVNNKKKPLKHISKWKSIAECLSMKPDITIQHEKGISLQIPVFILKGNALADKLATQGSYVVNAGKRTADGSEFEKRTADGSEFESPKKKAKVE

SEQ ID NO: 1318 - protein, 2087 aa, synthetic construct
MPAAKRVKLDGGDKKYSIGLDIGTNSVGWAVITDEYKVPSKKFKVLGNTDRHSIKKNLIGALLFDSGETAEATRLKRTARRRYTRRKNRICYLQEIFSNEMAKVDDSFFHRLEESFLVEEDKKHERHPIFGNIVDEVAYHEKYPTIYHLRKKLVDSTDKADLRLIYLALAHMIKFRGHFLIEGDLNPDNSDVDKLFIQLVQTYNQLFEENPINASGVDAKAILSARLSKSRRLENLIAQLPGEKKNGLFGNLIALSLGLTPNFKSNFDLAEDAKLQLSKDTYDDDLDNLLAQIGDQYADLFLAAKNLSDAILLSDILRVNTEITKAPLSASMIKRYDEHHQDLTLLKALVRQQLPEKYKEIFFDQSKNGYAGYIDGGASQEEFYKFIKPILEKMDGTEELLVKLNREDLLRKQRTFDNGSIPHQIHLGELHAILRRQEDFYPFLKDNREKIEKILTFRIPYYVGPLARGNSRFAWMTRKSEETITPWNFEEVVDKGASAQSFIERMTNFDKNLPNEKVLPKHSLLYEYFTVYNELTKVKYVTEGMRKPAFLSGEQKKAIVDLLFKTNRKVTVKQLKEDYFKKIECFDSVEISGVEDRFNASLGTYHDLLKIIKDKDFLDNEENEDILEDIVLTLTLFEDREMIEERLKTYAHLFDDKVMKQLKRRRYTGWGRLSRKLINGIRDKQSGKTILDFLKSDGFANRNFMQLIHDDSLTFKEDIQKAQVSGQGDSLHEHIANLAGSPAIKKGILQTVKVVDELVKVMGRHKPENIVIEMARENQTTQKGQKNSRERMKRIEEGIKELGSQILKEHPVENTQLQNEKLYLYYLQNGRDMYVDQELDINRLSDYDVDHIVPQSFLKDDSIDNKVLTRSDKARGKSDNVPSEEVVKKMKNYWRQLLNAKLITQRKFDNLTKAERGGLSELDKAGFIKRQLVETRQITKHVAQILDSRMNTKYDENDKLIREVKVITLKSKLVSDFRKDFQFYKVREINNYHHAHDAYLNAVVGTALIKKYPKLESEFVYGDYKVYDVRKMIAKSEQEIGKATAKYFFYSNIMNFFKTEITLANGEIRKRPLIETNGETGEIVWDKGRDFATVRKVLSMPQVNIVKKTEVQTGGFSKESILPKRNSDKLIARKKDWDPKKYGGFDSPTVAYSVLVVAKVEKGKSKKLKSVKELLGITIMERSSFEKNPIDFLEAKGYKEVKKDLIIKLPKYSLFELENGRKRMLASAGELQKGNELALPSKYVNFLYLASHYEKLKGSPEDNEQKQLFVEQHKHYLDEIIEQISEFSKRVILADANLDKVLSAYNKHRDKPIREQAENIIHLFTLTNLGAPAAFKYFDTTIDRKRYTSTKEVLDATLIHQSITGLYETRIDLSQLGGDGGPAPAPAPAPAPGGVPWLTQQPLQLTILVPLQEYQEKILSKTALPEDQKQQLKTLFVKYDNLWQHWENQVGHRKIRPHNIATGDYPPRPQKQYPINPKAKPSIQIVIDDLLKQGVLTPQNSTMNTPVYPVPKPDGRWRMVLDYREVNKTIPLTAAQNQHSAGILATIVRQKYKTTLDLANGFWAHPITPESYWLTAFTWQGKQYCWTRLPQGFLNSPALFNADVVDLLKEIPNVQVYVDDIYLSHDDPKEHVQQLEKVFQILLQAGYVVSLKKSEIGQKTVEFLGFNITKEGRGLTDTFKTKLLNITPPKDLKQLQSILGKLNFARNFIPNFAELVQPLYNLIAPAKGKYIEWSEENTKQLNMVIEALNTASNLEERLPEQRLVIKVNTSPSAGYVRYYNETGKKPIMYLNYVFSKAELKFSMLEKLLTTMHKALIKAMDLAMGQEILVYSPIVSMTKIQKTPLPERKALPIRWITWMTYLEDPRIQFHYDKTLPELKHIPDVYTSSQSPVKHPSQYEGVFYTDGSAIKSPDPTKSNNAGMGIVHATYKPEYQVLNQWSIPLGNHTAQMAEIAAVEFACKKALKIPGPVLVITDSFYVAESANKELPYWKSNGFVNNKKKPLKHISKWKSIAECLSMKPDITIQHEKGISLQIPVFILKGNALADKLATQGSYVVNAGKRTADGSEFEKRTADGSEFESPKKKAKVE

SEQ ID NO: 1319 - protein, 2085 aa, synthetic construct
MPAAKRVKLDGGDKKYSIGLDIGTNSVGWAVITDEYKVPSKKFKVLGNTDRHSIKKNLIGALLFDSGETAEATRLKRTARRRYTRRKNRICYLQEIFSNEMAKVDDSFFHRLEESFLVEEDKKHERHPIFGNIVDEVAYHEKYPTIYHLRKKLVDSTDKADLRLIYLALAHMIKFRGHFLIEGDLNPDNSDVDKLFIQLVQTYNQLFEENPINASGVDAKAILSARLSKSRRLENLIAQLPGEKKNGLFGNLIALSLGLTPNFKSNFDLAEDAKLQLSKDTYDDDLDNLLAQIGDQYADLFLAAKNLSDAILLSDILRVNTEITKAPLSASMIKRYDEHHQDLTLLKALVRQQLPEKYKEIFFDQSKNGYAGYIDGGASQEEFYKFIKPILEKMDGTEELLVKLNREDLLRKQRTFDNGSIPHQIHLGELHAILRRQEDFYPFLKDNREKIEKILTFRIPYYVGPLARGNSRFAWMTRKSEETITPWNFEEVVDKGASAQSFIERMTNFDKNLPNEKVLPKHSLLYEYFTVYNELTKVKYVTEGMRKPAFLSGEQKKAIVDLLFKTNRKVTVKQLKEDYFKKIECFDSVEISGVEDRFNASLGTYHDLLKIIKDKDFLDNEENEDILEDIVLTLTLFEDREMIEERLKTYAHLFDDKVMKQLKRRRYTGWGRLSRKLINGIRDKQSGKTILDFLKSDGFANRNFMQLIHDDSLTFKEDIQKAQVSGQGDSLHEHIANLAGSPAIKKGILQTVKVVDELVKVMGRHKPENIVIEMARENQTTQKGQKNSRERMKRIEEGIKELGSQILKEHPVENTQLQNEKLYLYYLQNGRDMYVDQELDINRLSDYDVDHIVPQSFLKDDSIDNKVLTRSDKARGKSDNVPSEEVVKKMKNYWRQLLNAKLITQRKFDNLTKAERGGLSELDKAGFIKRQLVETRQITKHVAQILDSRMNTKYDENDKLIREVKVITLKSKLVSDFRKDFQFYKVREINNYHHAHDAYLNAVVGTALIKKYPKLESEFVYGDYKVYDVRKMIAKSEQEIGKATAKYFFYSNIMNFFKTEITLANGEIRKRPLIETNGETGEIVWDKGRDFATVRKVLSMPQVNIVKKTEVQTGGFSKESILPKRNSDKLIARKKDWDPKKYGGFDSPTVAYSVLVVAKVEKGKSKKLKSVKELLGITIMERSSFEKNPIDFLEAKGYKEVKKDLIIKLPKYSLFELENGRKRMLASAGELQKGNELALPSKYVNFLYLASHYEKLKGSPEDNEQKQLFVEQHKHYLDEIIEQISEFSKRVILADANLDKVLSAYNKHRDKPIREQAENIIHLFTLTNLGAPAAFKYFDTTIDRKRYTSTKEVLDATLIHQSITGLYETRIDLSQLGGDGGPAPGSSGGGGGVPWLTQQPLQLTILVPLQEYQEKILSKTALPEDQKQQLKTLFVKYDNLWQHWENQVGHRKIRPHNIATGDYPPRPQKQYPINPKAKPSIQIVIDDLLKQGVLTPQNSTMNTPVYPVPKPDGRWRMVLDYREVNKTIPLTAAQNQHSAGILATIVRQKYKTTLDLANGFWAHPITPESYWLTAFTWQGKQYCWTRLPQGFLNSPALFNADVVDLLKEIPNVQVYVDDIYLSHDDPKEHVQQLEKVFQILLQAGYVVSLKKSEIGQKTVEFLGFNITKEGRGLTDTFKTKLLNITPPKDLKQLQSILGKLNFARNFIPNFAELVQPLYNLIAPAKGKYIEWSEENTKQLNMVIEALNTASNLEERLPEQRLVIKVNTSPSAGYVRYYNETGKKPIMYLNYVFSKAELKFSMLEKLLTTMHKALIKAMDLAMGQEILVYSPIVSMTKIQKTPLPERKALPIRWITWMTYLEDPRIQFHYDKTLPELKHIPDVYTSSQSPVKHPSQYEGVFYTDGSAIKSPDPTKSNNAGMGIVHATYKPEYQVLNQWSIPLGNHTAQMAEIAAVEFACKKALKIPGPVLVITDSFYVAESANKELPYWKSNGFVNNKKKPLKHISKWKSIAECLSMKPDITIQHEKGISLQIPVFILKGNALADKLATQGSYVVNAGKRTADGSEFEKRTADGSEFESPKKKAKVE

SEQ ID NO: 1320 - protein, 2176 aa, synthetic construct
MPAAKRVKLDGGDKKYSIGLDIGTNSVGWAVITDEYKVPSKKFKVLGNTDRHSIKKNLIGALLFDSGETAEATRLKRTARRRYTRRKNRICYLQEIFSNEMAKVDDSFFHRLEESFLVEEDKKHERHPIFGNIVDEVAYHEKYPTIYHLRKKLVDSTDKADLRLIYLALAHMIKFRGHFLIEGDLNPDNSDVDKLFIQLVQTYNQLFEENPINASGVDAKAILSARLSKSRRLENLIAQLPGEKKNGLFGNLIALSLGLTPNFKSNFDLAEDAKLQLSKDTYDDDLDNLLAQIGDQYADLFLAAKNLSDAILLSDILRVNTEITKAPLSASMIKRYDEHHQDLTLLKALVRQQLPEKYKEIFFDQSKNGYAGYIDGGASQEEFYKFIKPILEKMDGTEELLVKLNREDLLRKQRTFDNGSIPHQIHLGELHAILRRQEDFYPFLKDNREKIEKILTFRIPYYVGPLARGNSRFAWMTRKSEETITPWNFEEVVDKGASAQSFIERMTNFDKNLPNEKVLPKHSLLYEYFTVYNELTKVKYVTEGMRKPAFLSGEQKKAIVDLLFKTNRKVTVKQLKEDYFKKIECFDSVEISGVEDRFNASLGTYHDLLKIIKDKDFLDNEENEDILEDIVLTLTLFEDREMIEERLKTYAHLFDDKVMKQLKRRRYTGWGRLSRKLINGIRDKQSGKTILDFLKSDGFANRNFMQLIHDDSLTFKEDIQKAQVSGQGDSLHEHIANLAGSPAIKKGILQTVKVVDELVKVMGRHKPENIVIEMARENQTTQKGQKNSRERMKRIEEGIKELGSQILKEHPVENTQLQNEKLYLYYLQNGRDMYVDQELDINRLSDYDVDHIVPQSFLKDDSIDNKVLTRSDKARGKSDNVPSEEVVKKMKNYWRQLLNAKLITQRKFDNLTKAERGGLSELDKAGFIKRQLVETRQITKHVAQILDSRMNTKYDENDKLIREVKVITLKSKLVSDFRKDFQFYKVREINNYHHAHDAYLNAVVGTALIKKYPKLESEFVYGDYKVYDVRKMIAKSEQEIGKATAKYFFYSNIMNFFKTEITLANGEIRKRPLIETNGETGEIVWDKGRDFATVRKVLSMPQVNIVKKTEVQTGGFSKESILPKRNSDKLIARKKDWDPKKYGGFDSPTVAYSVLVVAKVEKGKSKKLKSVKELLGITIMERSSFEKNPIDFLEAKGYKEVKKDLIIKLPKYSLFELENGRKRMLASAGELQKGNELALPSKYVNFLYLASHYEKLKGSPEDNEQKQLFVEQHKHYLDEIIEQISEFSKRVILADANLDKVLSAYNKHRDKPIREQAENIIHLFTLTNLGAPAAFKYFDTTIDRKRYTSTKEVLDATLIHQSITGLYETRIDLSQLGGDGGEAAAKPAPGSSGGMNPLQLLQPLPAEIKGTKLLAHWNSGATITCIPESFLEDEQPIKKTLIKTIHGEKQQNVYYVTFKVKGRKVEAEVIASPYEYILLSPTDVPWLTQQPLQLTILVPLQEYQEKILSKTALPEDQKQQLKTLFVKYDNLWQHWENQVGHRKIRPHNIATGDYPPRPQKQYPINPKAKPSIQIVIDDLLKQGVLTPQNSTMNTPVYPVPKPDGRWRMVLDYREVNKTIPLTAAQNQHSAGILATIVRQKYKTTLDLANGFWAHPITPESYWLTAFTWQGKQYCWTRLPQGFLNSPALFNADVVDLLKEIPNVQVYVDDIYLSHDDPKEHVQQLEKVFQILLQAGYVVSLKKSEIGQKTVEFLGFNITKEGRGLTDTFKTKLLNITPPKDLKQLQSILGLLNFARNFIPNFAELVQPLYNLIAPAKGKYIEWSEENTKQLNMVIEALNTASNLEERLPEQRLVIKVNTSPSAGYVRYYNETGKKPIMYLNYVFSKAELKFSMLEKLLTTMHKALIKAMDLAMGQEILVYSPIVSMTKIQKTPLPERKALPIRWITWMTYLEDPRIQFHYDKTLPELKHIPDVYTSSQSPVKHPSQYEGVFYTDGSAIKSPDPTKSNNAGMGIVHATYKPEYQVLNQWSIPLGNHTAQMAEIAAVEFACKKALKIPGPVLVITDSFYVAESANKELPYWKSNGFVNNKKKPLKHISKWKSIAECLSMKPDITIQHEKGISLQIPVFILKGNALADKLATQGSYVVNAGKRTADGSEFEKRTADGSEFESPKKKAKVE

SEQ ID NO: 1321 - protein, 2178 aa, synthetic construct
MPAAKRVKLDGGDKKYSIGLDIGTNSVGWAVITDEYKVPSKKFKVLGNTDRHSIKKNLIGALLFDSGETAEATRLKRTARRRYTRRKNRICYLQEIFSNEMAKVDDSFFHRLEESFLVEEDKKHERHPIFGNIVDEVAYHEKYPTIYHLRKKLVDSTDKADLRLIYLALAHMIKFRGHFLIEGDLNPDNSDVDKLFIQLVQTYNQLFEENPINASGVDAKAILSARLSKSRRLENLIAQLPGEKKNGLFGNLIALSLGLTPNFKSNFDLAEDAKLQLSKDTYDDDLDNLLAQIGDQYADLFLAAKNLSDAILLSDILRVNTEITKAPLSASMIKRYDEHHQDLTLLKALVRQQLPEKYKEIFFDQSKNGYAGYIDGGASQEEFYKFIKPILEKMDGTEELLVKLNREDLLRKQRTFDNGSIPHQIHLGELHAILRRQEDFYPFLKDNREKIEKILTFRIPYYVGPLARGNSRFAWMTRKSEETITPWNFEEVVDKGASAQSFIERMTNFDKNLPNEKVLPKHSLLYEYFTVYNELTKVKYVTEGMRKPAFLSGEQKKAIVDLLFKTNRKVTVKQLKEDYFKKIECFDSVEISGVEDRFNASLGTYHDLLKIIKDKDFLDNEENEDILEDIVLTLTLFEDREMIEERLKTYAHLFDDKVMKQLKRRRYTGWGRLSRKLINGIRDKQSGKTILDFLKSDGFANRNFMQLIHDDSLTFKEDIQKAQVSGQGDSLHEHIANLAGSPAIKKGILQTVKVVDELVKVMGRHKPENIVIEMARENQTTQKGQKNSRERMKRIEEGIKELGSQILKEHPVENTQLQNEKLYLYYLQNGRDMYVDQELDINRLSDYDVDHIVPQSFLKDDSIDNKVLTRSDKARGKSDNVPSEEVVKKMKNYWRQLLNAKLITQRKFDNLTKAERGGLSELDKAGFIKRQLVETRQITKHVAQILDSRMNTKYDENDKLIREVKVITLKSKLVSDFRKDFQFYKVREINNYHHAHDAYLNAVVGTALIKKYPKLESEFVYGDYKVYDVRKMIAKSEQEIGKATAKYFFYSNIMNFFKTEITLANGEIRKRPLIETNGETGEIVWDKGRDFATVRKVLSMPQVNIVKKTEVQTGGFSKESILPKRNSDKLIARKKDWDPKKYGGFDSPTVAYSVLVVAKVEKGKSKKLKSVKELLGITIMERSSFEKNPIDFLEAKGYKEVKKDLIIKLPKYSLFELENGRKRMLASAGELQKGNELALPSKYVNFLYLASHYEKLKGSPEDNEQKQLFVEQHKHYLDEIIEQISEFSKRVILADANLDKVLSAYNKHRDKPIREQAENIIHLFTLTNLGAPAAFKYFDTTIDRKRYTSTKEVLDATLIHQSITGLYETRIDLSQLGGDGGPAPAPAPAPAPAPGGMNPLQLLQPLPAEIKGTKLLAHWNSGATITCIPESFLEDEQPIKKTLIKTIHGEKQQNVYYVTFKVKGRKVEAEVIASPYEYILLSPTDVPWLTQQPLQLTILVPLQEYQEKILSKTALPEDQKQQLKTLFVKYDNLWQHWENQVGHRKIRPHNIATGDYPPRPQKQYPINPKAKPSIQIVIDDLLKQGVLTPQNSTMNTPVYPVPKPDGRWRMVLDYREVNKTIPLTAAQNQHSAGILATIVRQKYKTTLDLANGFWAHPITPESYWLTAFTWQGKQYCWTRLPQGFLNSPALFNADVVDLLKEIPNVQVYVDDIYLSHDDPKEHVQQLEKVFQILLQAGYVVSLKKSEIGQKTVEFLGFNITKEGRGLTDTFKTKLLNITPPKDLKQLQSILGLLNFARNFIPNFAELVQPLYNLIAPAKGKYIEWSEENTKQLNMVIEALNTASNLEERLPEQRLVIKVNTSPSAGYVRYYNETGKKPIMYLNYVFSKAELKFSMLEKLLTTMHKALIKAMDLAMGQEILVYSPIVSMTKIQKTPLPERKALPIRWITWMTYLEDPRIQFHYDKTLPELKHIPDVYTSSQSPVKHPSQYEGVFYTDGSAIKSPDPTKSNNAGMGIVHATYKPEYQVLNQWSIPLGNHTAQMAEIAAVEFACKKALKIPGPVLVITDSFYVAESANKELPYWKSNGFVNNKKKPLKHISKWKSIAECLSMKPDITIQHEKGISLQIPVFILKGNALADKLATQGSYVVNAGKRTADGSEFEKRTADGSEFESPKKKAKVE

SEQ ID NO: 1322 - protein, 2174 aa, synthetic construct
MPAAKRVKLDGGDKKYSIGLDIGTNSVGWAVITDEYKVPSKKFKVLGNTDRHSIKKNLIGALLFDSGETAEATRLKRTARRRYTRRKNRICYLQEIFSNEMAKVDDSFFHRLEESFLVEEDKKHERHPIFGNIVDEVAYHEKYPTIYHLRKKLVDSTDKADLRLIYLALAHMIKFRGHFLIEGDLNPDNSDVDKLFIQLVQTYNQLFEENPINASGVDAKAILSARLSKSRRLENLIAQLPGEKKNGLFGNLIALSLGLTPNFKSNFDLAEDAKLQLSKDTYDDDLDNLLAQIGDQYADLFLAAKNLSDAILLSDILRVNTEITKAPLSASMIKRYDEHHQDLTLLKALVRQQLPEKYKEIFFDQSKNGYAGYIDGGASQEEFYKFIKPILEKMDGTEELLVKLNREDLLRKQRTFDNGSIPHQIHLGELHAILRRQEDFYPFLKDNREKIEKILTFRIPYYVGPLARGNSRFAWMTRKSEETITPWNFEEVVDKGASAQSFIERMTNFDKNLPNEKVLPKHSLLYEYFTVYNELTKVKYVTEGMRKPAFLSGEQKKAIVDLLFKTNRKVTVKQLKEDYFKKIECFDSVEISGVEDRFNASLGTYHDLLKIIKDKDFLDNEENEDILEDIVLTLTLFEDREMIEERLKTYAHLFDDKVMKQLKRRRYTGWGRLSRKLINGIRDKQSGKTILDFLKSDGFANRNFMQLIHDDSLTFKEDIQKAQVSGQGDSLHEHIANLAGSPAIKKGILQTVKVVDELVKVMGRHKPENIVIEMARENQTTQKGQKNSRERMKRIEEGIKELGSQILKEHPVENTQLQNEKLYLYYLQNGRDMYVDQELDINRLSDYDVDHIVPQSFLKDDSIDNKVLTRSDKARGKSDNVPSEEVVKKMKNYWRQLLNAKLITQRKFDNLTKAERGGLSELDKAGFIKRQLVETRQITKHVAQILDSRMNTKYDENDKLIREVKVITLKSKLVSDFRKDFQFYKVREINNYHHAHDAYLNAVVGTALIKKYPKLESEFVYGDYKVYDVRKMIAKSEQEIGKATAKYFFYSNIMNFFKTEITLANGEIRKRPLIETNGETGEIVWDKGRDFATVRKVLSMPQVNIVKKTEVQTGGFSKESILPKRNSDKLIARKKDWDPKKYGGFDSPTVAYSVLVVAKVEKGKSKKLKSVKELLGITIMERSSFEKNPIDFLEAKGYKEVKKDLIIKLPKYSLFELENGRKRMLASAGELQKGNELALPSKYVNFLYLASHYEKLKGSPEDNEQKQLFVEQHKHYLDEIIEQISEFSKRVILADANLDKVLSAYNKHRDKPIREQAENIIHLFTLTNLGAPAAFKYFDTTIDRKRYTSTKEVLDATLIHQSITGLYETRIDLSQLGGDGGGGSGGGPAPGGMNPLQLLQPLPAEIKGTKLLAHWNSGATITCIPESFLEDEQPIKKTLIKTIHGEKQQNVYYVTFKVKGRKVEAEVIASPYEYILLSPTDVPWLTQQPLQLTILVPLQEYQEKILSKTALPEDQKQQLKTLFVKYDNLWQHWENQVGHRKIRPHNIATGDYPPRPQKQYPINPKAKPSIQIVIDDLLKQGVLTPQNSTMNTPVYPVPKPDGRWRMVLDYREVNKTIPLTAAQNQHSAGILATIVRQKYKTTLDLANGFWAHPITPESYWLTAFTWQGKQYCWTRLPQGFLNSPALFNADVVDLLKEIPNVQVYVDDIYLSHDDPKEHVQQLEKVFQILLQAGYVVSLKKSEIGQKTVEFLGFNITKEGRGLTDTFKTKLLNITPPKDLKQLQSILGLLNFARNFIPNFAELVQPLYNLIAPAKGKYIEWSEENTKQLNMVIEALNTASNLEERLPEQRLVIKVNTSPSAGYVRYYNETGKKPIMYLNYVFSKAELKFSMLEKLLTTMHKALIKAMDLAMGQEILVYSPIVSMTKIQKTPLPERKALPIRWITWMTYLEDPRIQFHYDKTLPELKHIPDVYTSSQSPVKHPSQYEGVFYTDGSAIKSPDPTKSNNAGMGIVHATYKPEYQVLNQWSIPLGNHTAQMAEIAAVEFACKKALKIPGPVLVITDSFYVAESANKELPYWKSNGFVNNKKKPLKHISKWKSIAECLSMKPDITIQHEKGISLQIPVFILKGNALADKLATQGSYVVNAGKRTADGSEFEKRTADGSEFESPKKKAKVE

SEQ ID NO: 1323 - protein, 2176 aa, synthetic construct
MPAAKRVKLDGGDKKYSIGLDIGTNSVGWAVITDEYKVPSKKFKVLGNTDRHSIKKNLIGALLFDSGETAEATRLKRTARRRYTRRKNRICYLQEIFSNEMAKVDDSFFHRLEESFLVEEDKKHERHPIFGNIVDEVAYHEKYPTIYHLRKKLVDSTDKADLRLIYLALAHMIKFRGHFLIEGDLNPDNSDVDKLFIQLVQTYNQLFEENPINASGVDAKAILSARLSKSRRLENLIAQLPGEKKNGLFGNLIALSLGLTPNFKSNFDLAEDAKLQLSKDTYDDDLDNLLAQIGDQYADLFLAAKNLSDAILLSDILRVNTEITKAPLSASMIKRYDEHHQDLTLLKALVRQQLPEKYKEIFFDQSKNGYAGYIDGGASQEEFYKFIKPILEKMDGTEELLVKLNREDLLRKQRTFDNGSIPHQIHLGELHAILRRQEDFYPFLKDNREKIEKILTFRIPYYVGPLARGNSRFAWMTRKSEETITPWNFEEVVDKGASAQSFIERMTNFDKNLPNEKVLPKHSLLYEYFTVYNELTKVKYVTEGMRKPAFLSGEQKKAIVDLLFKTNRKVTVKQLKEDYFKKIECFDSVEISGVEDRFNASLGTYHDLLKIIKDKDFLDNEENEDILEDIVLTLTLFEDREMIEERLKTYAHLFDDKVMKQLKRRRYTGWGRLSRKLINGIRDKQSGKTILDFLKSDGFANRNFMQLIHDDSLTFKEDIQKAQVSGQGDSLHEHIANLAGSPAIKKGILQTVKVVDELVKVMGRHKPENIVIEMARENQTTQKGQKNSRERMKRIEEGIKELGSQILKEHPVENTQLQNEKLYLYYLQNGRDMYVDQELDINRLSDYDVDHIVPQSFLKDDSIDNKVLTRSDKARGKSDNVPSEEVVKKMKNYWRQLLNAKLITQRKFDNLTKAERGGLSELDKAGFIKRQLVETRQITKHVAQILDSRMNTKYDENDKLIREVKVITLKSKLVSDFRKDFQFYKVREINNYHHAHDAYLNAVVGTALIKKYPKLESEFVYGDYKVYDVRKMIAKSEQEIGKATAKYFFYSNIMNFFKTEITLANGEIRKRPLIETNGETGEIVWDKGRDFATVRKVLSMPQVNIVKKTEVQTGGFSKESILPKRNSDKLIARKKDWDPKKYGGFDSPTVAYSVLVVAKVEKGKSKKLKSVKELLGITIMERSSFEKNPIDFLEAKGYKEVKKDLIIKLPKYSLFELENGRKRMLASAGELQKGNELALPSKYVNFLYLASHYEKLKGSPEDNEQKQLFVEQHKHYLDEIIEQISEFSKRVILADANLDKVLSAYNKHRDKPIREQAENIIHLFTLTNLGAPAAFKYFDTTIDRKRYTSTKEVLDATLIHQSITGLYETRIDLSQLGGDGGGGSEAAAKGGGGGMNPLQLLQPLPAEIKGTKLLAHWNSGATITCIPESFLEDEQPIKKTLIKTIHGEKQQNVYYVTFKVKGRKVEAEVIASPYEYILLSPTDVPWLTQQPLQLTILVPLQEYQEKILSKTALPEDQKQQLKTLFVKYDNLWQHWENQVGHRKIRPHNIATGDYPPRPQKQYPINPKAKPSIQIVIDDLLKQGVLTPQNSTMNTPVYPVPKPDGRWRMVLDYREVNKTIPLTAAQNQHSAGILATIVRQKYKTTLDLANGFWAHPITPESYWLTAFTWQGKQYCWTRLPQGFLNSPALFNADVVDLLKEIPNVQVYVDDIYLSHDDPKEHVQQLEKVFQILLQAGYVVSLKKSEIGQKTVEFLGFNITKEGRGLTDTFKTKLLNITPPKDLKQLQSILGLLNFARNFIPNFAELVQPLYNLIAPAKGKYIEWSEENTKQLNMVIEALNTASNLEERLPEQRLVIKVNTSPSAGYVRYYNETGKKPIMYLNYVFSKAELKFSMLEKLLTTMHKALIKAMDLAMGQEILVYSPIVSMTKIQKTPLPERKALPIRWITWMTYLEDPRIQFHYDKTLPELKHIPDVYTSSQSPVKHPSQYEGVFYTDGSAIKSPDPTKSNNAGMGIVHATYKPEYQVLNQWSIPLGNHTAQMAEIAAVEFACKKALKIPGPVLVITDSFYVAESANKELPYWKSNGFVNNKKKPLKHISKWKSIAECLSMKPDITIQHEKGISLQIPVFILKGNALADKLATQGSYVVNAGKRTADGSEFEKRTADGSEFESPKKKAKVE

SEQ ID NO: 1324 - protein, 2176 aa, synthetic construct
MPAAKRVKLDGGDKKYSIGLDIGTNSVGWAVITDEYKVPSKKFKVLGNTDRHSIKKNLIGALLFDSGETAEATRLKRTARRRYTRRKNRICYLQEIFSNEMAKVDDSFFHRLEESFLVEEDKKHERHPIFGNIVDEVAYHEKYPTIYHLRKKLVDSTDKADLRLIYLALAHMIKFRGHFLIEGDLNPDNSDVDKLFIQLVQTYNQLFEENPINASGVDAKAILSARLSKSRRLENLIAQLPGEKKNGLFGNLIALSLGLTPNFKSNFDLAEDAKLQLSKDTYDDDLDNLLAQIGDQYADLFLAAKNLSDAILLSDILRVNTEITKAPLSASMIKRYDEHHQDLTLLKALVRQQLPEKYKEIFFDQSKNGYAGYIDGGASQEEFYKFIKPILEKMDGTEELLVKLNREDLLRKQRTFDNGSIPHQIHLGELHAILRRQEDFYPFLKDNREKIEKILTFRIPYYVGPLARGNSRFAWMTRKSEETITPWNFEEVVDKGASAQSFIERMTNFDKNLPNEKVLPKHSLLYEYFTVYNELTKVKYVTEGMRKPAFLSGEQKKAIVDLLFKTNRKVTVKQLKEDYFKKIECFDSVEISGVEDRFNASLGTYHDLLKIIKDKDFLDNEENEDILEDIVLTLTLFEDREMIEERLKTYAHLFDDKVMKQLKRRRYTGWGRLSRKLINGIRDKQSGKTILDFLKSDGFANRNFMQLIHDDSLTFKEDIQKAQVSGQGDSLHEHIANLAGSPAIKKGILQTVKVVDELVKVMGRHKPENIVIEMARENQTTQKGQKNSRERMKRIEEGIKELGSQILKEHPVENTQLQNEKLYLYYLQNGRDMYVDQELDINRLSDYDVDHIVPQSFLKDDSIDNKVLTRSDKARGKSDNVPSEEVVKKMKNYWRQLLNAKLITQRKFDNLTKAERGGLSELDKAGFIKRQLVETRQITKHVAQILDSRMNTKYDENDKLIREVKVITLKSKLVSDFRKDFQFYKVREINNYHHAHDAYLNAVVGTALIKKYPKLESEFVYGDYKVYDVRKMIAKSEQEIGKATAKYFFYSNIMNFFKTEITLANGEIRKRPLIETNGETGEIVWDKGRDFATVRKVLSMPQVNIVKKTEVQTGGFSKESILPKRNSDKLIARKKDWDPKKYGGFDSPTVAYSVLVVAKVEKGKSKKLKSVKELLGITIMERSSFEKNPIDFLEAKGYKEVKKDLIIKLPKYSLFELENGRKRMLASAGELQKGNELALPSKYVNFLYLASHYEKLKGSPEDNEQKQLFVEQHKHYLDEIIEQISEFSKRVILADANLDKVLSAYNKHRDKPIREQAENIIHLFTLTNLGAPAAFKYFDTTIDRKRYTSTKEVLDATLIHQSITGLYETRIDLSQLGGDGGPAPEAAAKGGSGGMNPLQLLQPLPAEIKGTKLLAHWNSGATITCIPESFLEDEQPIKKTLIKTIHGEKQQNVYYVTFKVKGRKVEAEVIASPYEYILLSPTDVPWLTQQPLQLTILVPLQEYQEKILSKTALPEDQKQQLKTLFVKYDNLWQHWENQVGHRKIRPHNIATGDYPPRPQKQYPINPKAKPSIQIVIDDLLKQGVLTPQNSTMNTPVYPVPKPDGRWRMVLDYREVNKTIPLTAAQNQHSAGILATIVRQKYKTTLDLANGFWAHPITPESYWLTAFTWQGKQYCWTRLPQGFLNSPALFNADVVDLLKEIPNVQVYVDDIYLSHDDPKEHVQQLEKVFQILLQAGYVVSLKKSEIGQKTVEFLGFNITKEGRGLTDTFKTKLLNITPPKDLKQLQSILGLLNFARNFIPNFAELVQPLYNLIAPAKGKYIEWSEENTKQLNMVIEALNTASNLEERLPEQRLVIKVNTSPSAGYVRYYNETGKKPIMYLNYVFSKAELKFSMLEKLLTTMHKALIKAMDLAMGQEILVYSPIVSMTKIQKTPLPERKALPIRWITWMTYLEDPRIQFHYDKTLPELKHIPDVYTSSQSPVKHPSQYEGVFYTDGSAIKSPDPTKSNNAGMGIVHATYKPEYQVLNQWSIPLGNHTAQMAEIAAVEFACKKALKIPGPVLVITDSFYVAESANKELPYWKSNGFVNNKKKPLKHISKWKSIAECLSMKPDITIQHEKGISLQIPVFILKGNALADKLATQGSYVVNAGKRTADGSEFEKRTADGSEFESPKKKAKVE

SEQ ID NO: 1325 - protein, 2176 aa, synthetic construct
MPAAKRVKLDGGDKKYSIGLDIGTNSVGWAVITDEYKVPSKKFKVLGNTDRHSIKKNLIGALLFDSGETAEATRLKRTARRRYTRRKNRICYLQEIFSNEMAKVDDSFFHRLEESFLVEEDKKHERHPIFGNIVDEVAYHEKYPTIYHLRKKLVDSTDKADLRLIYLALAHMIKFRGHFLIEGDLNPDNSDVDKLFIQLVQTYNQLFEENPINASGVDAKAILSARLSKSRRLENLIAQLPGEKKNGLFGNLIALSLGLTPNFKSNFDLAEDAKLQLSKDTYDDDLDNLLAQIGDQYADLFLAAKNLSDAILLSDILRVNTEITKAPLSASMIKRYDEHHQDLTLLKALVRQQLPEKYKEIFFDQSKNGYAGYIDGGASQEEFYKFIKPILEKMDGTEELLVKLNREDLLRKQRTFDNGSIPHQIHLGELHAILRRQEDFYPFLKDNREKIEKILTFRIPYYVGPLARGNSRFAWMTRKSEETITPWNFEEVVDKGASAQSFIERMTNFDKNLPNEKVLPKHSLLYEYFTVYNELTKVKYVTEGMRKPAFLSGEQKKAIVDLLFKTNRKVTVKQLKEDYFKKIECFDSVEISGVEDRFNASLGTYHDLLKIIKDKDFLDNEENEDILEDIVLTLTLFEDREMIEERLKTYAHLFDDKVMKQLKRRRYTGWGRLSRKLINGIRDKQSGKTILDFLKSDGFANRNFMQLIHDDSLTFKEDIQKAQVSGQGDSLHEHIANLAGSPAIKKGILQTVKVVDELVKVMGRHKPENIVIEMARENQTTQKGQKNSRERMKRIEEGIKELGSQILKEHPVENTQLQNEKLYLYYLQNGRDMYVDQELDINRLSDYDVDHIVPQSFLKDDSIDNKVLTRSDKARGKSDNVPSEEVVKKMKNYWRQLLNAKLITQRKFDNLTKAERGGLSELDKAGFIKRQLVETRQITKHVAQILDSRMNTKYDENDKLIREVKVITLKSKLVSDFRKDFQFYKVREINNYHHAHDAYLNAVVGTALIKKYPKLESEFVYGDYKVYDVRKMIAKSEQEIGKATAKYFFYSNIMNFFKTEITLANGEIRKRPLIETNGETGEIVWDKGRDFATVRKVLSMPQVNIVKKTEVQTGGFSKESILPKRNSDKLIARKKDWDPKKYGGFDSPTVAYSVLVVAKVEKGKSKKLKSVKELLGITIMERSSFEKNPIDFLEAKGYKEVKKDLIIKLPKYSLFELENGRKRMLASAGELQKGNELALPSKYVNFLYLASHYEKLKGSPEDNEQKQLFVEQHKHYLDEIIEQISEFSKRVILADANLDKVLSAYNKHRDKPIREQAENIIHLFTLTNLGAPAAFKYFDTTIDRKRYTSTKEVLDATLIHQSITGLYETRIDLSQLGGDGGEAAAKGGSPAPGGMNPLQLLQPLPAEIKGTKLLAHWNSGATITCIPESFLEDEQPIKKTLIKTIHGEKQQNVYYVTFKVKGRKVEAEVIASPYEYILLSPTDVPWLTQQPLQLTILVPLQEYQEKILSKTALPEDQKQQLKTLFVKYDNLWQHWENQVGHRKIRPHNIATGDYPPRPQKQYPINPKAKPSIQIVIDDLLKQGVLTPQNSTMNTPVYPVPKPDGRWRMVLDYREVNKTIPLTAAQNQHSAGILATIVRQKYKTTLDLANGFWAHPITPESYWLTAFTWQGKQYCWTRLPQGFLNSPALFNADVVDLLKEIPNVQVYVDDIYLSHDDPKEHVQQLEKVFQILLQAGYVVSLKKSEIGQKTVEFLGFNITKEGRGLTDTFKTKLLNITPPKDLKQLQSILGLLNFARNFIPNFAELVQPLYNLIAPAKGKYIEWSEENTKQLNMVIEALNTASNLEERLPEQRLVIKVNTSPSAGYVRYYNETGKKPIMYLNYVFSKAELKFSMLEKLLTTMHKALIKAMDLAMGQEILVYSPIVSMTKIQKTPLPERKALPIRWITWMTYLEDPRIQFHYDKTLPELKHIPDVYTSSQSPVKHPSQYEGVFYTDGSAIKSPDPTKSNNAGMGIVHATYKPEYQVLNQWSIPLGNHTAQMAEIAAVEFACKKALKIPGPVLVITDSFYVAESANKELPYWKSNGFVNNKKKPLKHISKWKSIAECLSMKPDITIQHEKGISLQIPVFILKGNALADKLATQGSYVVNAGKRTADGSEFEKRTADGSEFESPKKKAKVE

SEQ ID NO: 1326 - protein, 2176 aa, synthetic construct
MPAAKRVKLDGGDKKYSIGLDIGTNSVGWAVITDEYKVPSKKFKVLGNTDRHSIKKNLIGALLFDSGETAEATRLKRTARRRYTRRKNRICYLQEIFSNEMAKVDDSFFHRLEESFLVEEDKKHERHPIFGNIVDEVAYHEKYPTIYHLRKKLVDSTDKADLRLIYLALAHMIKFRGHFLIEGDLNPDNSDVDKLFIQLVQTYNQLFEENPINASGVDAKAILSARLSKSRRLENLIAQLPGEKKNGLFGNLIALSLGLTPNFKSNFDLAEDAKLQLSKDTYDDDLDNLLAQIGDQYADLFLAAKNLSDAILLSDILRVNTEITKAPLSASMIKRYDEHHQDLTLLKALVRQQLPEKYKEIFFDQSKNGYAGYIDGGASQEEFYKFIKPILEKMDGTEELLVKLNREDLLRKQRTFDNGSIPHQIHLGELHAILRRQEDFYPFLKDNREKIEKILTFRIPYYVGPLARGNSRFAWMTRKSEETITPWNFEEVVDKGASAQSFIERMTNFDKNLPNEKVLPKHSLLYEYFTVYNELTKVKYVTEGMRKPAFLSGEQKKAIVDLLFKTNRKVTVKQLKEDYFKKIECFDSVEISGVEDRFNASLGTYHDLLKIIKDKDFLDNEENEDILEDIVLTLTLFEDREMIEERLKTYAHLFDDKVMKQLKRRRYTGWGRLSRKLINGIRDKQSGKTILDFLKSDGFANRNFMQLIHDDSLTFKEDIQKAQVSGQGDSLHEHIANLAGSPAIKKGILQTVKVVDELVKVMGRHKPENIVIEMARENQTTQKGQKNSRERMKRIEEGIKELGSQILKEHPVENTQLQNEKLYLYYLQNGRDMYVDQELDINRLSDYDVDHIVPQSFLKDDSIDNKVLTRSDKARGKSDNVPSEEVVKKMKNYWRQLLNAKLITQRKFDNLTKAERGGLSELDKAGFIKRQLVETRQITKHVAQILDSRMNTKYDENDKLIREVKVITLKSKLVSDFRKDFQFYKVREINNYHHAHDAYLNAVVGTALIKKYPKLESEFVYGDYKVYDVRKMIAKSEQEIGKATAKYFFYSNIMNFFKTEITLANGEIRKRPLIETNGETGEIVWDKGRDFATVRKVLSMPQVNIVKKTEVQTGGFSKESILPKRNSDKLIARKKDWDPKKYGGFDSPTVAYSVLVVAKVEKGKSKKLKSVKELLGITIMERSSFEKNPIDFLEAKGYKEVKKDLIIKLPKYSLFELENGRKRMLASAGELQKGNELALPSKYVNFLYLASHYEKLKGSPEDNEQKQLFVEQHKHYLDEIIEQISEFSKRVILADANLDKVLSAYNKHRDKPIREQAENIIHLFTLTNLGAPAAFKYFDTTIDRKRYTSTKEVLDATLIHQSITGLYETRIDLSQLGGDGGGGGGGSEAAAKGGMNPLQLLQPLPAEIKGTKLLAHWNSGATITCIPESFLEDEQPIKKTLIKTIHGEKQQNVYYVTFKVKGRKVEAEVIASPYEYILLSPTDVPWLTQQPLQLTILVPLQEYQEKILSKTALPEDQKQQLKTLFVKYDNLWQHWENQVGHRKIRPHNIATGDYPPRPQKQYPINPKAKPSIQIVIDDLLKQGVLTPQNSTMNTPVYPVPKPDGRWRMVLDYREVNKTIPLTAAQNQHSAGILATIVRQKYKTTLDLANGFWAHPITPESYWLTAFTWQGKQYCWTRLPQGFLNSPALFNADVVDLLKEIPNVQVYVDDIYLSHDDPKEHVQQLEKVFQILLQAGYVVSLKKSEIGQKTVEFLGFNITKEGRGLTDTFKTKLLNITPPKDLKQLQSILGLLNFARNFIPNFAELVQPLYNLIAPAKGKYIEWSEENTKQLNMVIEALNTASNLEERLPEQRLVIKVNTSPSAGYVRYYNETGKKPIMYLNYVFSKAELKFSMLEKLLTTMHKALIKAMDLAMGQEILVYSPIVSMTKIQKTPLPERKALPIRWITWMTYLEDPRIQFHYDKTLPELKHIPDVYTSSQSPVKHPSQYEGVFYTDGSAIKSPDPTKSNNAGMGIVHATYKPEYQVLNQWSIPLGNHTAQMAEIAAVEFACKKALKIPGPVLVITDSFYVAESANKELPYWKSNGFVNNKKKPLKHISKWKSIAECLSMKPDITIQHEKGISLQIPVFILKGNALADKLATQGSYVVNAGKRTADGSEFEKRTADGSEFESPKKKAKVE

SEQ ID NO: 1327 - protein, 2176 aa, synthetic construct
MPAAKRVKLDGGDKKYSIGLDIGTNSVGWAVITDEYKVPSKKFKVLGNTDRHSIKKNLIGALLFDSGETAEATRLKRTARRRYTRRKNRICYLQEIFSNEMAKVDDSFFHRLEESFLVEEDKKHERHPIFGNIVDEVAYHEKYPTIYHLRKKLVDSTDKADLRLIYLALAHMIKFRGHFLIEGDLNPDNSDVDKLFIQLVQTYNQLFEENPINASGVDAKAILSARLSKSRRLENLIAQLPGEKKNGLFGNLIALSLGLTPNFKSNFDLAEDAKLQLSKDTYDDDLDNLLAQIGDQYADLFLAAKNLSDAILLSDILRVNTEITKAPLSASMIKRYDEHHQDLTLLKALVRQQLPEKYKEIFFDQSKNGYAGYIDGGASQEEFYKFIKPILEKMDGTEELLVKLNREDLLRKQRTFDNGSIPHQIHLGELHAILRRQEDFYPFLKDNREKIEKILTFRIPYYVGPLARGNSRFAWMTRKSEETITPWNFEEVVDKGASAQSFIERMTNFDKNLPNEKVLPKHSLLYEYFTVYNELTKVKYVTEGMRKPAFLSGEQKKAIVDLLFKTNRKVTVKQLKEDYFKKIECFDSVEISGVEDRFNASLGTYHDLLKIIKDKDFLDNEENEDILEDIVLTLTLFEDREMIEERLKTYAHLFDDKVMKQLKRRRYTGWGRLSRKLINGIRDKQSGKTILDFLKSDGFANRNFMQLIHDDSLTFKEDIQKAQVSGQGDSLHEHIANLAGSPAIKKGILQTVKVVDELVKVMGRHKPENIVIEMARENQTTQKGQKNSRERMKRIEEGIKELGSQILKEHPVENTQLQNEKLYLYYLQNGRDMYVDQELDINRLSDYDVDHIVPQSFLKDDSIDNKVLTRSDKARGKSDNVPSEEVVKKMKNYWRQLLNAKLITQRKFDNLTKAERGGLSELDKAGFIKRQLVETRQITKHVAQILDSRMNTKYDENDKLIREVKVITLKSKLVSDFRKDFQFYKVREINNYHHAHDAYLNAVVGTALIKKYPKLESEFVYGDYKVYDVRKMIAKSEQEIGKATAKYFFYSNIMNFFKTEITLANGEIRKRPLIETNGETGEIVWDKGRDFATVRKVLSMPQVNIVKKTEVQTGGFSKESILPKRNSDKLIARKKDWDPKKYGGFDSPTVAYSVLVVAKVEKGKSKKLKSVKELLGITIMERSSFEKNPIDFLEAKGYKEVKKDLIIKLPKYSLFELENGRKRMLASAGELQKGNELALPSKYVNFLYLASHYEKLKGSPEDNEQKQLFVEQHKHYLDEIIEQISEFSKRVILADANLDKVLSAYNKHRDKPIREQAENIIHLFTLTNLGAPAAFKYFDTTIDRKRYTSTKEVLDATLIHQSITGLYETRIDLSQLGGDGGEAAAKGSSPAPGGMNPLQLLQPLPAEIKGTKLLAHWNSGATITCIPESFLEDEQPIKKTLIKTIHGEKQQNVYYVTFKVKGRKVEAEVIASPYEYILLSPTDVPWLTQQPLQLTILVPLQEYQEKILSKTALPEDQKQQLKTLFVKYDNLWQHWENQVGHRKIRPHNIATGDYPPRPQKQYPINPKAKPSIQIVIDDLLKQGVLTPQNSTMNTPVYPVPKPDGRWRMVLDYREVNKTIPLTAAQNQHSAGILATIVRQKYKTTLDLANGFWAHPITPESYWLTAFTWQGKQYCWTRLPQGFLNSPALFNADVVDLLKEIPNVQVYVDDIYLSHDDPKEHVQQLEKVFQILLQAGYVVSLKKSEIGQKTVEFLGFNITKEGRGLTDTFKTKLLNITPPKDLKQLQSILGLLNFARNFIPNFAELVQPLYNLIAPAKGKYIEWSEENTKQLNMVIEALNTASNLEERLPEQRLVIKVNTSPSAGYVRYYNETGKKPIMYLNYVFSKAELKFSMLEKLLTTMHKALIKAMDLAMGQEILVYSPIVSMTKIQKTPLPERKALPIRWITWMTYLEDPRIQFHYDKTLPELKHIPDVYTSSQSPVKHPSQYEGVFYTDGSAIKSPDPTKSNNAGMGIVHATYKPEYQVLNQWSIPLGNHTAQMAEIAAVEFACKKALKIPGPVLVITDSFYVAESANKELPYWKSNGFVNNKKKPLKHISKWKSIAECLSMKPDITIQHEKGISLQIPVFILKGNALADKLATQGSYVVNAGKRTADGSEFEKRTADGSEFESPKKKAKVE

SEQ ID NO: 1328 - protein, 2176 aa, synthetic construct
MPAAKRVKLDGGDKKYSIGLDIGTNSVGWAVITDEYKVPSKKFKVLGNTDRHSIKKNLIGALLFDSGETAEATRLKRTARRRYTRRKNRICYLQEIFSNEMAKVDDSFFHRLEESFLVEEDKKHERHPIFGNIVDEVAYHEKYPTIYHLRKKLVDSTDKADLRLIYLALAHMIKFRGHFLIEGDLNPDNSDVDKLFIQLVQTYNQLFEENPINASGVDAKAILSARLSKSRRLENLIAQLPGEKKNGLFGNLIALSLGLTPNFKSNFDLAEDAKLQLSKDTYDDDLDNLLAQIGDQYADLFLAAKNLSDAILLSDILRVNTEITKAPLSASMIKRYDEHHQDLTLLKALVRQQLPEKYKEIFFDQSKNGYAGYIDGGASQEEFYKFIKPILEKMDGTEELLVKLNREDLLRKQRTFDNGSIPHQIHLGELHAILRRQEDFYPFLKDNREKIEKILTFRIPYYVGPLARGNSRFAWMTRKSEETITPWNFEEVVDKGASAQSFIERMTNFDKNLPNEKVLPKHSLLYEYFTVYNELTKVKYVTEGMRKPAFLSGEQKKAIVDLLFKTNRKVTVKQLKEDYFKKIECFDSVEISGVEDRFNASLGTYHDLLKIIKDKDFLDNEENEDILEDIVLTLTLFEDREMIEERLKTYAHLFDDKVMKQLKRRRYTGWGRLSRKLINGIRDKQSGKTILDFLKSDGFANRNFMQLIHDDSLTFKEDIQKAQVSGQGDSLHEHIANLAGSPAIKKGILQTVKVVDELVKVMGRHKPENIVIEMARENQTTQKGQKNSRERMKRIEEGIKELGSQILKEHPVENTQLQNEKLYLYYLQNGRDMYVDQELDINRLSDYDVDHIVPQSFLKDDSIDNKVLTRSDKARGKSDNVPSEEVVKKMKNYWRQLLNAKLITQRKFDNLTKAERGGLSELDKAGFIKRQLVETRQITKHVAQILDSRMNTKYDENDKLIREVKVITLKSKLVSDFRKDFQFYKVREINNYHHAHDAYLNAVVGTALIKKYPKLESEFVYGDYKVYDVRKMIAKSEQEIGKATAKYFFYSNIMNFFKTEITLANGEIRKRPLIETNGETGEIVWDKGRDFATVRKVLSMPQVNIVKKTEVQTGGFSKESILPKRNSDKLIARKKDWDPKKYGGFDSPTVAYSVLVVAKVEKGKSKKLKSVKELLGITIMERSSFEKNPIDFLEAKGYKEVKKDLIIKLPKYSLFELENGRKRMLASAGELQKGNELALPSKYVNFLYLASHYEKLKGSPEDNEQKQLFVEQHKHYLDEIIEQISEFSKRVILADANLDKVLSAYNKHRDKPIREQAENIIHLFTLTNLGAPAAFKYFDTTIDRKRYTSTKEVLDATLIHQSITGLYETRIDLSQLGGDGGGGSPAPEAAAKGGMNPLQLLQPLPAEIKGTKLLAHWNSGATITCIPESFLEDEQPIKKTLIKTIHGEKQQNVYYVTFKVKGRKVEAEVIASPYEYILLSPTDVPWLTQQPLQLTILVPLQEYQEKILSKTALPEDQKQQLKTLFVKYDNLWQHWENQVGHRKIRPHNIATGDYPPRPQKQYPINPKAKPSIQIVIDDLLKQGVLTPQNSTMNTPVYPVPKPDGRWRMVLDYREVNKTIPLTAAQNQHSAGILATIVRQKYKTTLDLANGFWAHPITPESYWLTAFTWQGKQYCWTRLPQGFLNSPALFNADVVDLLKEIPNVQVYVDDIYLSHDDPKEHVQQLEKVFQILLQAGYVVSLKKSEIGQKTVEFLGFNITKEGRGLTDTFKTKLLNITPPKDLKQLQSILGLLNFARNFIPNFAELVQPLYNLIAPAKGKYIEWSEENTKQLNMVIEALNTASNLEERLPEQRLVIKVNTSPSAGYVRYYNETGKKPIMYLNYVFSKAELKFSMLEKLLTTMHKALIKAMDLAMGQEILVYSPIVSMTKIQKTPLPERKALPIRWITWMTYLEDPRIQFHYDKTLPELKHIPDVYTSSQSPVKHPSQYEGVFYTDGSAIKSPDPTKSNNAGMGIVHATYKPEYQVLNQWSIPLGNHTAQMAEIAAVEFACKKALKIPGPVLVITDSFYVAESANKELPYWKSNGFVNNKKKPLKHISKWKSIAECLSMKPDITIQHEKGISLQIPVFILKGNALADKLATQGSYVVNAGKRTADGSEFEKRTADGSEFESPKKKAKVE

SEQ ID NO: 1329 - protein, 2176 aa, synthetic construct
MPAAKRVKLDGGDKKYSIGLDIGTNSVGWAVITDEYKVPSKKFKVLGNTDRHSIKKNLIGALLFDSGETAEATRLKRTARRRYTRRKNRICYLQEIFSNEMAKVDDSFFHRLEESFLVEEDKKHERHPIFGNIVDEVAYHEKYPTIYHLRKKLVDSTDKADLRLIYLALAHMIKFRGHFLIEGDLNPDNSDVDKLFIQLVQTYNQLFEENPINASGVDAKAILSARLSKSRRLENLIAQLPGEKKNGLFGNLIALSLGLTPNFKSNFDLAEDAKLQLSKDTYDDDLDNLLAQIGDQYADLFLAAKNLSDAILLSDILRVNTEITKAPLSASMIKRYDEHHQDLTLLKALVRQQLPEKYKEIFFDQSKNGYAGYIDGGASQEEFYKFIKPILEKMDGTEELLVKLNREDLLRKQRTFDNGSIPHQIHLGELHAILRRQEDFYPFLKDNREKIEKILTFRIPYYVGPLARGNSRFAWMTRKSEETITPWNFEEVVDKGASAQSFIERMTNFDKNLPNEKVLPKHSLLYEYFTVYNELTKVKYVTEGMRKPAFLSGEQKKAIVDLLFKTNRKVTVKQLKEDYFKKIECFDSVEISGVEDRFNASLGTYHDLLKIIKDKDFLDNEENEDILEDIVLTLTLFEDREMIEERLKTYAHLFDDKVMKQLKRRRYTGWGRLSRKLINGIRDKQSGKTILDFLKSDGFANRNFMQLIHDDSLTFKEDIQKAQVSGQGDSLHEHIANLAGSPAIKKGILQTVKVVDELVKVMGRHKPENIVIEMARENQTTQKGQKNSRERMKRIEEGIKELGSQILKEHPVENTQLQNEKLYLYYLQNGRDMYVDQELDINRLSDYDVDHIVPQSFLKDDSIDNKVLTRSDKARGKSDNVPSEEVVKKMKNYWRQLLNAKLITQRKFDNLTKAERGGLSELDKAGFIKRQLVETRQITKHVAQILDSRMNTKYDENDKLIREVKVITLKSKLVSDFRKDFQFYKVREINNYHHAHDAYLNAVVGTALIKKYPKLESEFVYGDYKVYDVRKMIAKSEQEIGKATAKYFFYSNIMNFFKTEITLANGEIRKRPLIETNGETGEIVWDKGRDFATVRKVLSMPQVNIVKKTEVQTGGFSKESILPKRNSDKLIARKKDWDPKKYGGFDSPTVAYSVLVVAKVEKGKSKKLKSVKELLGITIMERSSFEKNPIDFLEAKGYKEVKKDLIIKLPKYSLFELENGRKRMLASAGELQKGNELALPSKYVNFLYLASHYEKLKGSPEDNEQKQLFVEQHKHYLDEIIEQISEFSKRVILADANLDKVLSAYNKHRDKPIREQAENIIHLFTLTNLGAPAAFKYFDTTIDRKRYTSTKEVLDATLIHQSITGLYETRIDLSQLGGDGGEAAAKGGSGGGGGMNPLQLLQPLPAEIKGTKLLAHWNSGATITCIPESFLEDEQPIKKTLIKTIHGEKQQNVYYVTFKVKGRKVEAEVIASPYEYILLSPTDVPWLTQQPLQLTILVPLQEYQEKILSKTALPEDQKQQLKTLFVKYDNLWQHWENQVGHRKIRPHNIATGDYPPRPQKQYPINPKAKPSIQIVIDDLLKQGVLTPQNSTMNTPVYPVPKPDGRWRMVLDYREVNKTIPLTAAQNQHSAGILATIVRQKYKTTLDLANGFWAHPITPESYWLTAFTWQGKQYCWTRLPQGFLNSPALFNADVVDLLKEIPNVQVYVDDIYLSHDDPKEHVQQLEKVFQILLQAGYVVSLKKSEIGQKTVEFLGFNITKEGRGLTDTFKTKLLNITPPKDLKQLQSILGLLNFARNFIPNFAELVQPLYNLIAPAKGKYIEWSEENTKQLNMVIEALNTASNLEERLPEQRLVIKVNTSPSAGYVRYYNETGKKPIMYLNYVFSKAELKFSMLEKLLTTMHKALIKAMDLAMGQEILVYSPIVSMTKIQKTPLPERKALPIRWITWMTYLEDPRIQFHYDKTLPELKHIPDVYTSSQSPVKHPSQYEGVFYTDGSAIKSPDPTKSNNAGMGIVHATYKPEYQVLNQWSIPLGNHTAQMAEIAAVEFACKKALKIPGPVLVITDSFYVAESANKELPYWKSNGFVNNKKKPLKHISKWKSIAECLSMKPDITIQHEKGISLQIPVFILKGNALADKLATQGSYVVNAGKRTADGSEFEKRTADGSEFESPKKKAKVE

SEQ ID NO: 1330 - protein, 2180 aa, synthetic construct
MPAAKRVKLDGGDKKYSIGLDIGTNSVGWAVITDEYKVPSKKFKVLGNTDRHSIKKNLIGALLFDSGETAEATRLKRTARRRYTRRKNRICYLQEIFSNEMAKVDDSFFHRLEESFLVEEDKKHERHPIFGNIVDEVAYHEKYPTIYHLRKKLVDSTDKADLRLIYLALAHMIKFRGHFLIEGDLNPDNSDVDKLFIQLVQTYNQLFEENPINASGVDAKAILSARLSKSRRLENLIAQLPGEKKNGLFGNLIALSLGLTPNFKSNFDLAEDAKLQLSKDTYDDDLDNLLAQIGDQYADLFLAAKNLSDAILLSDILRVNTEITKAPLSASMIKRYDEHHQDLTLLKALVRQQLPEKYKEIFFDQSKNGYAGYIDGGASQEEFYKFIKPILEKMDGTEELLVKLNREDLLRKQRTFDNGSIPHQIHLGELHAILRRQEDFYPFLKDNREKIEKILTFRIPYYVGPLARGNSRFAWMTRKSEETITPWNFEEVVDKGASAQSFIERMTNFDKNLPNEKVLPKHSLLYEYFTVYNELTKVKYVTEGMRKPAFLSGEQKKAIVDLLFKTNRKVTVKQLKEDYFKKIECFDSVEISGVEDRFNASLGTYHDLLKIIKDKDFLDNEENEDILEDIVLTLTLFEDREMIEERLKTYAHLFDDKVMKQLKRRRYTGWGRLSRKLINGIRDKQSGKTILDFLKSDGFANRNFMQLIHDDSLTFKEDIQKAQVSGQGDSLHEHIANLAGSPAIKKGILQTVKVVDELVKVMGRHKPENIVIEMARENQTTQKGQKNSRERMKRIEEGIKELGSQILKEHPVENTQLQNEKLYLYYLQNGRDMYVDQELDINRLSDYDVDHIVPQSFLKDDSIDNKVLTRSDKARGKSDNVPSEEVVKKMKNYWRQLLNAKLITQRKFDNLTKAERGGLSELDKAGFIKRQLVETRQITKHVAQILDSRMNTKYDENDKLIREVKVITLKSKLVSDFRKDFQFYKVREINNYHHAHDAYLNAVVGTALIKKYPKLESEFVYGDYKVYDVRKMIAKSEQEIGKATAKYFFYSNIMNFFKTEITLANGEIRKRPLIETNGETGEIVWDKGRDFATVRKVLSMPQVNIVKKTEVQTGGFSKESILPKRNSDKLIARKKDWDPKKYGGFDSPTVAYSVLVVAKVEKGKSKKLKSVKELLGITIMERSSFEKNPIDFLEAKGYKEVKKDLIIKLPKYSLFELENGRKRMLASAGELQKGNELALPSKYVNFLYLASHYEKLKGSPEDNEQKQLFVEQHKHYLDEIIEQISEFSKRVILADANLDKVLSAYNKHRDKPIREQAENIIHLFTLTNLGAPAAFKYFDTTIDRKRYTSTKEVLDATLIHQSITGLYETRIDLSQLGGDGGGGGGSEAAAKGGGGSGGMNPLQLLQPLPAEIKGTKLLAHWNSGATITCIPESFLEDEQPIKKTLIKTIHGEKQQNVYYVTFKVKGRKVEAEVIASPYEYILLSPTDVPWLTQQPLQLTILVPLQEYQEKILSKTALPEDQKQQLKTLFVKYDNLWQHWENQVGHRKIRPHNIATGDYPPRPQKQYPINPKAKPSIQIVIDDLLKQGVLTPQNSTMNTPVYPVPKPDGRWRMVLDYREVNKTIPLTAAQNQHSAGILATIVRQKYKTTLDLANGFWAHPITPESYWLTAFTWQGKQYCWTRLPQGFLNSPALFNADVVDLLKEIPNVQVYVDDIYLSHDDPKEHVQQLEKVFQILLQAGYVVSLKKSEIGQKTVEFLGFNITKEGRGLTDTFKTKLLNITPPKDLKQLQSILGLLNFARNFIPNFAELVQPLYNLIAPAKGKYIEWSEENTKQLNMVIEALNTASNLEERLPEQRLVIKVNTSPSAGYVRYYNETGKKPIMYLNYVFSKAELKFSMLEKLLTTMHKALIKAMDLAMGQEILVYSPIVSMTKIQKTPLPERKALPIRWITWMTYLEDPRIQFHYDKTLPELKHIPDVYTSSQSPVKHPSQYEGVFYTDGSAIKSPDPTKSNNAGMGIVHATYKPEYQVLNQWSIPLGNHTAQMAEIAAVEFACKKALKIPGPVLVITDSFYVAESANKELPYWKSNGFVNNKKKPLKHISKWKSIAECLSMKPDITIQHEKGISLQIPVFILKGNALADKLATQGSYVVNAGKRTADGSEFEKRTADGSEFESPKKKAKVE

SEQ ID NO: 1331 - protein, 2174 aa, synthetic construct
MPAAKRVKLDGGDKKYSIGLDIGTNSVGWAVITDEYKVPSKKFKVLGNTDRHSIKKNLIGALLFDSGETAEATRLKRTARRRYTRRKNRICYLQEIFSNEMAKVDDSFFHRLEESFLVEEDKKHERHPIFGNIVDEVAYHEKYPTIYHLRKKLVDSTDKADLRLIYLALAHMIKFRGHFLIEGDLNPDNSDVDKLFIQLVQTYNQLFEENPINASGVDAKAILSARLSKSRRLENLIAQLPGEKKNGLFGNLIALSLGLTPNFKSNFDLAEDAKLQLSKDTYDDDLDNLLAQIGDQYADLFLAAKNLSDAILLSDILRVNTEITKAPLSASMIKRYDEHHQDLTLLKALVRQQLPEKYKEIFFDQSKNGYAGYIDGGASQEEFYKFIKPILEKMDGTEELLVKLNREDLLRKQRTFDNGSIPHQIHLGELHAILRRQEDFYPFLKDNREKIEKILTFRIPYYVGPLARGNSRFAWMTRKSEETITPWNFEEVVDKGASAQSFIERMTNFDKNLPNEKVLPKHSLLYEYFTVYNELTKVKYVTEGMRKPAFLSGEQKKAIVDLLFKTNRKVTVKQLKEDYFKKIECFDSVEISGVEDRFNASLGTYHDLLKIIKDKDFLDNEENEDILEDIVLTLTLFEDREMIEERLKTYAHLFDDKVMKQLKRRRYTGWGRLSRKLINGIRDKQSGKTILDFLKSDGFANRNFMQLIHDDSLTFKEDIQKAQVSGQGDSLHEHIANLAGSPAIKKGILQTVKVVDELVKVMGRHKPENIVIEMARENQTTQKGQKNSRERMKRIEEGIKELGSQILKEHPVENTQLQNEKLYLYYLQNGRDMYVDQELDINRLSDYDVDHIVPQSFLKDDSIDNKVLTRSDKARGKSDNVPSEEVVKKMKNYWRQLLNAKLITQRKFDNLTKAERGGLSELDKAGFIKRQLVETRQITKHVAQILDSRMNTKYDENDKLIREVKVITLKSKLVSDFRKDFQFYKVREINNYHHAHDAYLNAVVGTALIKKYPKLESEFVYGDYKVYDVRKMIAKSEQEIGKATAKYFFYSNIMNFFKTEITLANGEIRKRPLIETNGETGEIVWDKGRDFATVRKVLSMPQVNIVKKTEVQTGGFSKESILPKRNSDKLIARKKDWDPKKYGGFDSPTVAYSVLVVAKVEKGKSKKLKSVKELLGITIMERSSFEKNPIDFLEAKGYKEVKKDLIIKLPKYSLFELENGRKRMLASAGELQKGNELALPSKYVNFLYLASHYEKLKGSPEDNEQKQLFVEQHKHYLDEIIEQISEFSKRVILADANLDKVLSAYNKHRDKPIREQAENIIHLFTLTNLGAPAAFKYFDTTIDRKRYTSTKEVLDATLIHQSITGLYETRIDLSQLGGDGGGGSPAPGSSGGMNPLQLLQPLPAEIKGTKLLAHWNSGATITCIPESFLEDEQPIKKTLIKTIHGEKQQNVYYVTFKVKGRKVEAEVIASPYEYILLSPTDVPWLTQQPLQLTILVPLQEYQEKILSKTALPEDQKQQLKTLFVKYDNLWQHWENQVGHRKIRPHNIATGDYPPRPQKQYPINPKAKPSIQIVIDDLLKQGVLTPQNSTMNTPVYPVPKPDGRWRMVLDYREVNKTIPLTAAQNQHSAGILATIVRQKYKTTLDLANGFWAHPITPESYWLTAFTWQGKQYCWTRLPQGFLNSPALFNADVVDLLKEIPNVQVYVDDIYLSHDDPKEHVQQLEKVFQILLQAGYVVSLKKSEIGQKTVEFLGFNITKEGRGLTDTFKTKLLNITPPKDLKQLQSILGLLNFARNFIPNFAELVQPLYNLIAPAKGKYIEWSEENTKQLNMVIEALNTASNLEERLPEQRLVIKVNTSPSAGYVRYYNETGKKPIMYLNYVFSKAELKFSMLEKLLTTMHKALIKAMDLAMGQEILVYSPIVSMTKIQKTPLPERKALPIRWITWMTYLEDPRIQFHYDKTLPELKHIPDVYTSSQSPVKHPSQYEGVFYTDGSAIKSPDPTKSNNAGMGIVHATYKPEYQVLNQWSIPLGNHTAQMAEIAAVEFACKKALKIPGPVLVITDSFYVAESANKELPYWKSNGFVNNKKKPLKHISKWKSIAECLSMKPDITIQHEKGISLQIPVFILKGNALADKLATQGSYVVNAGKRTADGSEFEKRTADGSEFESPKKKAKVE

SEQ ID NO: 1332 - protein, 2177 aa, synthetic construct
MPAAKRVKLDGGDKKYSIGLDIGTNSVGWAVITDEYKVPSKKFKVLGNTDRHSIKKNLIGALLFDSGETAEATRLKRTARRRYTRRKNRICYLQEIFSNEMAKVDDSFFHRLEESFLVEEDKKHERHPIFGNIVDEVAYHEKYPTIYHLRKKLVDSTDKADLRLIYLALAHMIKFRGHFLIEGDLNPDNSDVDKLFIQLVQTYNQLFEENPINASGVDAKAILSARLSKSRRLENLIAQLPGEKKNGLFGNLIALSLGLTPNFKSNFDLAEDAKLQLSKDTYDDDLDNLLAQIGDQYADLFLAAKNLSDAILLSDILRVNTEITKAPLSASMIKRYDEHHQDLTLLKALVRQQLPEKYKEIFFDQSKNGYAGYIDGGASQEEFYKFIKPILEKMDGTEELLVKLNREDLLRKQRTFDNGSIPHQIHLGELHAILRRQEDFYPFLKDNREKIEKILTFRIPYYVGPLARGNSRFAWMTRKSEETITPWNFEEVVDKGASAQSFIERMTNFDKNLPNEKVLPKHSLLYEYFTVYNELTKVKYVTEGMRKPAFLSGEQKKAIVDLLFKTNRKVTVKQLKEDYFKKIECFDSVEISGVEDRFNASLGTYHDLLKIIKDKDFLDNEENEDILEDIVLTLTLFEDREMIEERLKTYAHLFDDKVMKQLKRRRYTGWGRLSRKLINGIRDKQSGKTILDFLKSDGFANRNFMQLIHDDSLTFKEDIQKAQVSGQGDSLHEHIANLAGSPAIKKGILQTVKVVDELVKVMGRHKPENIVIEMARENQTTQKGQKNSRERMKRIEEGIKELGSQILKEHPVENTQLQNEKLYLYYLQNGRDMYVDQELDINRLSDYDVDHIVPQSFLKDDSIDNKVLTRSDKARGKSDNVPSEEVVKKMKNYWRQLLNAKLITQRKFDNLTKAERGGLSELDKAGFIKRQLVETRQITKHVAQILDSRMNTKYDENDKLIREVKVITLKSKLVSDFRKDFQFYKVREINNYHHAHDAYLNAVVGTALIKKYPKLESEFVYGDYKVYDVRKMIAKSEQEIGKATAKYFFYSNIMNFFKTEITLANGEIRKRPLIETNGETGEIVWDKGRDFATVRKVLSMPQVNIVKKTEVQTGGFSKESILPKRNSDKLIARKKDWDPKKYGGFDSPTVAYSVLVVAKVEKGKSKKLKSVKELLGITIMERSSFEKNPIDFLEAKGYKEVKKDLIIKLPKYSLFELENGRKRMLASAGELQKGNELALPSKYVNFLYLASHYEKLKGSPEDNEQKQLFVEQHKHYLDEIIEQISEFSKRVILADANLDKVLSAYNKHRDKPIREQAENIIHLFTLTNLGAPAAFKYFDTTIDRKRYTSTKEVLDATLIHQSITGLYETRIDLSQLGGDGGGSSGSSGSSGSSGGMNPLQLLQPLPAEIKGTKLLAHWNSGATITCIPESFLEDEQPIKKTLIKTIHGEKQQNVYYVTFKVKGRKVEAEVIASPYEYILLSPTDVPWLTQQPLQLTILVPLQEYQEKILSKTALPEDQKQQLKTLFVKYDNLWQHWENQVGHRKIRPHNIATGDYPPRPQKQYPINPKAKPSIQIVIDDLLKQGVLTPQNSTMNTPVYPVPKPDGRWRMVLDYREVNKTIPLTAAQNQHSAGILATIVRQKYKTTLDLANGFWAHPITPESYWLTAFTWQGKQYCWTRLPQGFLNSPALFNADVVDLLKEIPNVQVYVDDIYLSHDDPKEHVQQLEKVFQILLQAGYVVSLKKSEIGQKTVEFLGFNITKEGRGLTDTFKTKLLNITPPKDLKQLQSILGLLNFARNFIPNFAELVQPLYNLIAPAKGKYIEWSEENTKQLNMVIEALNTASNLEERLPEQRLVIKVNTSPSAGYVRYYNETGKKPIMYLNYVFSKAELKFSMLEKLLTTMHKALIKAMDLAMGQEILVYSPIVSMTKIQKTPLPERKALPIRWITWMTYLEDPRIQFHYDKTLPELKHIPDVYTSSQSPVKHPSQYEGVFYTDGSAIKSPDPTKSNNAGMGIVHATYKPEYQVLNQWSIPLGNHTAQMAEIAAVEFACKKALKIPGPVLVITDSFYVAESANKELPYWKSNGFVNNKKKPLKHISKWKSIAECLSMKPDITIQHEKGISLQIPVFILKGNALADKLATQGSYVVNAGKRTADGSEFEKRTADGSEFESPKKKAKVE

SEQ ID NO: 1333 - protein, 2174 aa, synthetic construct
MPAAKRVKLDGGDKKYSIGLDIGTNSVGWAVITDEYKVPSKKFKVLGNTDRHSIKKNLIGALLFDSGETAEATRLKRTARRRYTRRKNRICYLQEIFSNEMAKVDDSFFHRLEESFLVEEDKKHERHPIFGNIVDEVAYHEKYPTIYHLRKKLVDSTDKADLRLIYLALAHMIKFRGHFLIEGDLNPDNSDVDKLFIQLVQTYNQLFEENPINASGVDAKAILSARLSKSRRLENLIAQLPGEKKNGLFGNLIALSLGLTPNFKSNFDLAEDAKLQLSKDTYDDDLDNLLAQIGDQYADLFLAAKNLSDAILLSDILRVNTEITKAPLSASMIKRYDEHHQDLTLLKALVRQQLPEKYKEIFFDQSKNGYAGYIDGGASQEEFYKFIKPILEKMDGTEELLVKLNREDLLRKQRTFDNGSIPHQIHLGELHAILRRQEDFYPFLKDNREKIEKILTFRIPYYVGPLARGNSRFAWMTRKSEETITPWNFEEVVDKGASAQSFIERMTNFDKNLPNEKVLPKHSLLYEYFTVYNELTKVKYVTEGMRKPAFLSGEQKKAIVDLLFKTNRKVTVKQLKEDYFKKIECFDSVEISGVEDRFNASLGTYHDLLKIIKDKDFLDNEENEDILEDIVLTLTLFEDREMIEERLKTYAHLFDDKVMKQLKRRRYTGWGRLSRKLINGIRDKQSGKTILDFLKSDGFANRNFMQLIHDDSLTFKEDIQKAQVSGQGDSLHEHIANLAGSPAIKKGILQTVKVVDELVKVMGRHKPENIVIEMARENQTTQKGQKNSRERMKRIEEGIKELGSQILKEHPVENTQLQNEKLYLYYLQNGRDMYVDQELDINRLSDYDVDHIVPQSFLKDDSIDNKVLTRSDKARGKSDNVPSEEVVKKMKNYWRQLLNAKLITQRKFDNLTKAERGGLSELDKAGFIKRQLVETRQITKHVAQILDSRMNTKYDENDKLIREVKVITLKSKLVSDFRKDFQFYKVREINNYHHAHDAYLNAVVGTALIKKYPKLESEFVYGDYKVYDVRKMIAKSEQEIGKATAKYFFYSNIMNFFKTEITLANGEIRKRPLIETNGETGEIVWDKGRDFATVRKVLSMPQVNIVKKTEVQTGGFSKESILPKRNSDKLIARKKDWDPKKYGGFDSPTVAYSVLVVAKVEKGKSKKLKSVKELLGITIMERSSFEKNPIDFLEAKGYKEVKKDLIIKLPKYSLFELENGRKRMLASAGELQKGNELALPSKYVNFLYLASHYEKLKGSPEDNEQKQLFVEQHKHYLDEIIEQISEFSKRVILADANLDKVLSAYNKHRDKPIREQAENIIHLFTLTNLGAPAAFKYFDTTIDRKRYTSTKEVLDATLIHQSITGLYETRIDLSQLGGDGGPAPGSSGGSGGMNPLQLLQPLPAEIKGTKLLAHWNSGATITCIPESFLEDEQPIKKTLIKTIHGEKQQNVYYVTFKVKGRKVEAEVIASPYEYILLSPTDVPWLTQQPLQLTILVPLQEYQEKILSKTALPEDQKQQLKTLFVKYDNLWQHWENQVGHRKIRPHNIATGDYPPRPQKQYPINPKAKPSIQIVIDDLLKQGVLTPQNSTMNTPVYPVPKPDGRWRMVLDYREVNKTIPLTAAQNQHSAGILATIVRQKYKTTLDLANGFWAHPITPESYWLTAFTWQGKQYCWTRLPQGFLNSPALFNADVVDLLKEIPNVQVYVDDIYLSHDDPKEHVQQLEKVFQILLQAGYVVSLKKSEIGQKTVEFLGFNITKEGRGLTDTFKTKLLNITPPKDLKQLQSILGLLNFARNFIPNFAELVQPLYNLIAPAKGKYIEWSEENTKQLNMVIEALNTASNLEERLPEQRLVIKVNTSPSAGYVRYYNETGKKPIMYLNYVFSKAELKFSMLEKLLTTMHKALIKAMDLAMGQEILVYSPIVSMTKIQKTPLPERKALPIRWITWMTYLEDPRIQFHYDKTLPELKHIPDVYTSSQSPVKHPSQYEGVFYTDGSAIKSPDPTKSNNAGMGIVHATYKPEYQVLNQWSIPLGNHTAQMAEIAAVEFACKKALKIPGPVLVITDSFYVAESANKELPYWKSNGFVNNKKKPLKHISKWKSIAECLSMKPDITIQHEKGISLQIPVFILKGNALADKLATQGSYVVNAGKRTADGSEFEKRTADGSEFESPKKKAKVE

SEQ ID NO: 1334 - protein, 2176 aa, synthetic construct
MPAAKRVKLDGGDKKYSIGLDIGTNSVGWAVITDEYKVPSKKFKVLGNTDRHSIKKNLIGALLFDSGETAEATRLKRTARRRYTRRKNRICYLQEIFSNEMAKVDDSFFHRLEESFLVEEDKKHERHPIFGNIVDEVAYHEKYPTIYHLRKKLVDSTDKADLRLIYLALAHMIKFRGHFLIEGDLNPDNSDVDKLFIQLVQTYNQLFEENPINASGVDAKAILSARLSKSRRLENLIAQLPGEKKNGLFGNLIALSLGLTPNFKSNFDLAEDAKLQLSKDTYDDDLDNLLAQIGDQYADLFLAAKNLSDAILLSDILRVNTEITKAPLSASMIKRYDEHHQDLTLLKALVRQQLPEKYKEIFFDQSKNGYAGYIDGGASQEEFYKFIKPILEKMDGTEELLVKLNREDLLRKQRTFDNGSIPHQIHLGELHAILRRQEDFYPFLKDNREKIEKILTFRIPYYVGPLARGNSRFAWMTRKSEETITPWNFEEVVDKGASAQSFIERMTNFDKNLPNEKVLPKHSLLYEYFTVYNELTKVKYVTEGMRKPAFLSGEQKKAIVDLLFKTNRKVTVKQLKEDYFKKIECFDSVEISGVEDRFNASLGTYHDLLKIIKDKDFLDNEENEDILEDIVLTLTLFEDREMIEERLKTYAHLFDDKVMKQLKRRRYTGWGRLSRKLINGIRDKQSGKTILDFLKSDGFANRNFMQLIHDDSLTFKEDIQKAQVSGQGDSLHEHIANLAGSPAIKKGILQTVKVVDELVKVMGRHKPENIVIEMARENQTTQKGQKNSRERMKRIEEGIKELGSQILKEHPVENTQLQNEKLYLYYLQNGRDMYVDQELDINRLSDYDVDHIVPQSFLKDDSIDNKVLTRSDKARGKSDNVPSEEVVKKMKNYWRQLLNAKLITQRKFDNLTKAERGGLSELDKAGFIKRQLVETRQITKHVAQILDSRMNTKYDENDKLIREVKVITLKSKLVSDFRKDFQFYKVREINNYHHAHDAYLNAVVGTALIKKYPKLESEFVYGDYKVYDVRKMIAKSEQEIGKATAKYFFYSNIMNFFKTEITLANGEIRKRPLIETNGETGEIVWDKGRDFATVRKVLSMPQVNIVKKTEVQTGGFSKESILPKRNSDKLIARKKDWDPKKYGGFDSPTVAYSVLVVAKVEKGKSKKLKSVKELLGITIMERSSFEKNPIDFLEAKGYKEVKKDLIIKLPKYSLFELENGRKRMLASAGELQKGNELALPSKYVNFLYLASHYEKLKGSPEDNEQKQLFVEQHKHYLDEIIEQISEFSKRVILADANLDKVLSAYNKHRDKPIREQAENIIHLFTLTNLGAPAAFKYFDTTIDRKRYTSTKEVLDATLIHQSITGLYETRIDLSQLGGDGGEAAAKGGGGGSGGMNPLQLLQPLPAEIKGTKLLAHWNSGATITCIPESFLEDEQPIKKTLIKTIHGEKQQNVYYVTFKVKGRKVEAEVIASPYEYILLSPTDVPWLTQQPLQLTILVPLQEYQEKILSKTALPEDQKQQLKTLFVKYDNLWQHWENQVGHRKIRPHNIATGDYPPRPQKQYPINPKAKPSIQIVIDDLLKQGVLTPQNSTMNTPVYPVPKPDGRWRMVLDYREVNKTIPLTAAQNQHSAGILATIVRQKYKTTLDLANGFWAHPITPESYWLTAFTWQGKQYCWTRLPQGFLNSPALFNADVVDLLKEIPNVQVYVDDIYLSHDDPKEHVQQLEKVFQILLQAGYVVSLKKSEIGQKTVEFLGFNITKEGRGLTDTFKTKLLNITPPKDLKQLQSILGLLNFARNFIPNFAELVQPLYNLIAPAKGKYIEWSEENTKQLNMVIEALNTASNLEERLPEQRLVIKVNTSPSAGYVRYYNETGKKPIMYLNYVFSKAELKFSMLEKLLTTMHKALIKAMDLAMGQEILVYSPIVSMTKIQKTPLPERKALPIRWITWMTYLEDPRIQFHYDKTLPELKHIPDVYTSSQSPVKHPSQYEGVFYTDGSAIKSPDPTKSNNAGMGIVHATYKPEYQVLNQWSIPLGNHTAQMAEIAAVEFACKKALKIPGPVLVITDSFYVAESANKELPYWKSNGFVNNKKKPLKHISKWKSIAECLSMKPDITIQHEKGISLQIPVFILKGNALADKLATQGSYVVNAGKRTADGSEFEKRTADGSEFESPKKKAKVE

SEQ ID NO: 1335 - protein, 2176 aa, synthetic construct
MPAAKRVKLDGGDKKYSIGLDIGTNSVGWAVITDEYKVPSKKFKVLGNTDRHSIKKNLIGALLFDSGETAEATRLKRTARRRYTRRKNRICYLQEIFSNEMAKVDDSFFHRLEESFLVEEDKKHERHPIFGNIVDEVAYHEKYPTIYHLRKKLVDSTDKADLRLIYLALAHMIKFRGHFLIEGDLNPDNSDVDKLFIQLVQTYNQLFEENPINASGVDAKAILSARLSKSRRLENLIAQLPGEKKNGLFGNLIALSLGLTPNFKSNFDLAEDAKLQLSKDTYDDDLDNLLAQIGDQYADLFLAAKNLSDAILLSDILRVNTEITKAPLSASMIKRYDEHHQDLTLLKALVRQQLPEKYKEIFFDQSKNGYAGYIDGGASQEEFYKFIKPILEKMDGTEELLVKLNREDLLRKQRTFDNGSIPHQIHLGELHAILRRQEDFYPFLKDNREKIEKILTFRIPYYVGPLARGNSRFAWMTRKSEETITPWNFEEVVDKGASAQSFIERMTNFDKNLPNEKVLPKHSLLYEYFTVYNELTKVKYVTEGMRKPAFLSGEQKKAIVDLLFKTNRKVTVKQLKEDYFKKIECFDSVEISGVEDRFNASLGTYHDLLKIIKDKDFLDNEENEDILEDIVLTLTLFEDREMIEERLKTYAHLFDDKVMKQLKRRRYTGWGRLSRKLINGIRDKQSGKTILDFLKSDGFANRNFMQLIHDDSLTFKEDIQKAQVSGQGDSLHEHIANLAGSPAIKKGILQTVKVVDELVKVMGRHKPENIVIEMARENQTTQKGQKNSRERMKRIEEGIKELGSQILKEHPVENTQLQNEKLYLYYLQNGRDMYVDQELDINRLSDYDVDHIVPQSFLKDDSIDNKVLTRSDKARGKSDNVPSEEVVKKMKNYWRQLLNAKLITQRKFDNLTKAERGGLSELDKAGFIKRQLVETRQITKHVAQILDSRMNTKYDENDKLIREVKVITLKSKLVSDFRKDFQFYKVREINNYHHAHDAYLNAVVGTALIKKYPKLESEFVYGDYKVYDVRKMIAKSEQEIGKATAKYFFYSNIMNFFKTEITLANGEIRKRPLIETNGETGEIVWDKGRDFATVRKVLSMPQVNIVKKTEVQTGGFSKESILPKRNSDKLIARKKDWDPKKYGGFDSPTVAYSVLVVAKVEKGKSKKLKSVKELLGITIMERSSFEKNPIDFLEAKGYKEVKKDLIIKLPKYSLFELENGRKRMLASAGELQKGNELALPSKYVNFLYLASHYEKLKGSPEDNEQKQLFVEQHKHYLDEIIEQISEFSKRVILADANLDKVLSAYNKHRDKPIREQAENIIHLFTLTNLGAPAAFKYFDTTIDRKRYTSTKEVLDATLIHQSITGLYETRIDLSQLGGDGGEAAAKGGGGSSGGMNPLQLLQPLPAEIKGTKLLAHWNSGATITCIPESFLEDEQPIKKTLIKTIHGEKQQNVYYVTFKVKGRKVEAEVIASPYEYILLSPTDVPWLTQQPLQLTILVPLQEYQEKILSKTALPEDQKQQLKTLFVKYDNLWQHWENQVGHRKIRPHNIATGDYPPRPQKQYPINPKAKPSIQIVIDDLLKQGVLTPQNSTMNTPVYPVPKPDGRWRMVLDYREVNKTIPLTAAQNQHSAGILATIVRQKYKTTLDLANGFWAHPITPESYWLTAFTWQGKQYCWTRLPQGFLNSPALFNADVVDLLKEIPNVQVYVDDIYLSHDDPKEHVQQLEKVFQILLQAGYVVSLKKSEIGQKTVEFLGFNITKEGRGLTDTFKTKLLNITPPKDLKQLQSILGLLNFARNFIPNFAELVQPLYNLIAPAKGKYIEWSEENTKQLNMVIEALNTASNLEERLPEQRLVIKVNTSPSAGYVRYYNETGKKPIMYLNYVFSKAELKFSMLEKLLTTMHKALIKAMDLAMGQEILVYSPIVSMTKIQKTPLPERKALPIRWITWMTYLEDPRIQFHYDKTLPELKHIPDVYTSSQSPVKHPSQYEGVFYTDGSAIKSPDPTKSNNAGMGIVHATYKPEYQVLNQWSIPLGNHTAQMAEIAAVEFACKKALKIPGPVLVITDSFYVAESANKELPYWKSNGFVNNKKKPLKHISKWKSIAECLSMKPDITIQHEKGISLQIPVFILKGNALADKLATQGSYVVNAGKRTADGSEFEKRTADGSEFESPKKKAKVE

SEQ ID NO: 1336 - protein, 2174 aa, synthetic construct
MPAAKRVKLDGGDKKYSIGLDIGTNSVGWAVITDEYKVPSKKFKVLGNTDRHSIKKNLIGALLFDSGETAEATRLKRTARRRYTRRKNRICYLQEIFSNEMAKVDDSFFHRLEESFLVEEDKKHERHPIFGNIVDEVAYHEKYPTIYHLRKKLVDSTDKADLRLIYLALAHMIKFRGHFLIEGDLNPDNSDVDKLFIQLVQTYNQLFEENPINASGVDAKAILSARLSKSRRLENLIAQLPGEKKNGLFGNLIALSLGLTPNFKSNFDLAEDAKLQLSKDTYDDDLDNLLAQIGDQYADLFLAAKNLSDAILLSDILRVNTEITKAPLSASMIKRYDEHHQDLTLLKALVRQQLPEKYKEIFFDQSKNGYAGYIDGGASQEEFYKFIKPILEKMDGTEELLVKLNREDLLRKQRTFDNGSIPHQIHLGELHAILRRQEDFYPFLKDNREKIEKILTFRIPYYVGPLARGNSRFAWMTRKSEETITPWNFEEVVDKGASAQSFIERMTNFDKNLPNEKVLPKHSLLYEYFTVYNELTKVKYVTEGMRKPAFLSGEQKKAIVDLLFKTNRKVTVKQLKEDYFKKIECFDSVEISGVEDRFNASLGTYHDLLKIIKDKDFLDNEENEDILEDIVLTLTLFEDREMIEERLKTYAHLFDDKVMKQLKRRRYTGWGRLSRKLINGIRDKQSGKTILDFLKSDGFANRNFMQLIHDDSLTFKEDIQKAQVSGQGDSLHEHIANLAGSPAIKKGILQTVKVVDELVKVMGRHKPENIVIEMARENQTTQKGQKNSRERMKRIEEGIKELGSQILKEHPVENTQLQNEKLYLYYLQNGRDMYVDQELDINRLSDYDVDHIVPQSFLKDDSIDNKVLTRSDKARGKSDNVPSEEVVKKMKNYWRQLLNAKLITQRKFDNLTKAERGGLSELDKAGFIKRQLVETRQITKHVAQILDSRMNTKYDENDKLIREVKVITLKSKLVSDFRKDFQFYKVREINNYHHAHDAYLNAVVGTALIKKYPKLESEFVYGDYKVYDVRKMIAKSEQEIGKATAKYFFYSNIMNFFKTEITLANGEIRKRPLIETNGETGEIVWDKGRDFATVRKVLSMPQVNIVKKTEVQTGGFSKESILPKRNSDKLIARKKDWDPKKYGGFDSPTVAYSVLVVAKVEKGKSKKLKSVKELLGITIMERSSFEKNPIDFLEAKGYKEVKKDLIIKLPKYSLFELENGRKRMLASAGELQKGNELALPSKYVNFLYLASHYEKLKGSPEDNEQKQLFVEQHKHYLDEIIEQISEFSKRVILADANLDKVLSAYNKHRDKPIREQAENIIHLFTLTNLGAPAAFKYFDTTIDRKRYTSTKEVLDATLIHQSITGLYETRIDLSQLGGDGGGGGGSSPAPGGMNPLQLLQPLPAEIKGTKLLAHWNSGATITCIPESFLEDEQPIKKTLIKTIHGEKQQNVYYVTFKVKGRKVEAEVIASPYEYILLSPTDVPWLTQQPLQLTILVPLQEYQEKILSKTALPEDQKQQLKTLFVKYDNLWQHWENQVGHRKIRPHNIATGDYPPRPQKQYPINPKAKPSIQIVIDDLLKQGVLTPQNSTMNTPVYPVPKPDGRWRMVLDYREVNKTIPLTAAQNQHSAGILATIVRQKYKTTLDLANGFWAHPITPESYWLTAFTWQGKQYCWTRLPQGFLNSPALFNADVVDLLKEIPNVQVYVDDIYLSHDDPKEHVQQLEKVFQILLQAGYVVSLKKSEIGQKTVEFLGFNITKEGRGLTDTFKTKLLNITPPKDLKQLQSILGLLNFARNFIPNFAELVQPLYNLIAPAKGKYIEWSEENTKQLNMVIEALNTASNLEERLPEQRLVIKVNTSPSAGYVRYYNETGKKPIMYLNYVFSKAELKFSMLEKLLTTMHKALIKAMDLAMGQEILVYSPIVSMTKIQKTPLPERKALPIRWITWMTYLEDPRIQFHYDKTLPELKHIPDVYTSSQSPVKHPSQYEGVFYTDGSAIKSPDPTKSNNAGMGIVHATYKPEYQVLNQWSIPLGNHTAQMAEIAAVEFACKKALKIPGPVLVITDSFYVAESANKELPYWKSNGFVNNKKKPLKHISKWKSIAECLSMKPDITIQHEKGISLQIPVFILKGNALADKLATQGSYVVNAGKRTADGSEFEKRTADGSEFESPKKKAKVE

SEQ ID NO: 1337 - protein, 2176 aa, synthetic construct
MPAAKRVKLDGGDKKYSIGLDIGTNSVGWAVITDEYKVPSKKFKVLGNTDRHSIKKNLIGALLFDSGETAEATRLKRTARRRYTRRKNRICYLQEIFSNEMAKVDDSFFHRLEESFLVEEDKKHERHPIFGNIVDEVAYHEKYPTIYHLRKKLVDSTDKADLRLIYLALAHMIKFRGHFLIEGDLNPDNSDVDKLFIQLVQTYNQLFEENPINASGVDAKAILSARLSKSRRLENLIAQLPGEKKNGLFGNLIALSLGLTPNFKSNFDLAEDAKLQLSKDTYDDDLDNLLAQIGDQYADLFLAAKNLSDAILLSDILRVNTEITKAPLSASMIKRYDEHHQDLTLLKALVRQQLPEKYKEIFFDQSKNGYAGYIDGGASQEEFYKFIKPILEKMDGTEELLVKLNREDLLRKQRTFDNGSIPHQIHLGELHAILRRQEDFYPFLKDNREKIEKILTFRIPYYVGPLARGNSRFAWMTRKSEETITPWNFEEVVDKGASAQSFIERMTNFDKNLPNEKVLPKHSLLYEYFTVYNELTKVKYVTEGMRKPAFLSGEQKKAIVDLLFKTNRKVTVKQLKEDYFKKIECFDSVEISGVEDRFNASLGTYHDLLKIIKDKDFLDNEENEDILEDIVLTLTLFEDREMIEERLKTYAHLFDDKVMKQLKRRRYTGWGRLSRKLINGIRDKQSGKTILDFLKSDGFANRNFMQLIHDDSLTFKEDIQKAQVSGQGDSLHEHIANLAGSPAIKKGILQTVKVVDELVKVMGRHKPENIVIEMARENQTTQKGQKNSRERMKRIEEGIKELGSQILKEHPVENTQLQNEKLYLYYLQNGRDMYVDQELDINRLSDYDVDHIVPQSFLKDDSIDNKVLTRSDKARGKSDNVPSEEVVKKMKNYWRQLLNAKLITQRKFDNLTKAERGGLSELDKAGFIKRQLVETRQITKHVAQILDSRMNTKYDENDKLIREVKVITLKSKLVSDFRKDFQFYKVREINNYHHAHDAYLNAVVGTALIKKYPKLESEFVYGDYKVYDVRKMIAKSEQEIGKATAKYFFYSNIMNFFKTEITLANGEIRKRPLIETNGETGEIVWDKGRDFATVRKVLSMPQVNIVKKTEVQTGGFSKESILPKRNSDKLIARKKDWDPKKYGGFDSPTVAYSVLVVAKVEKGKSKKLKSVKELLGITIMERSSFEKNPIDFLEAKGYKEVKKDLIIKLPKYSLFELENGRKRMLASAGELQKGNELALPSKYVNFLYLASHYEKLKGSPEDNEQKQLFVEQHKHYLDEIIEQISEFSKRVILADANLDKVLSAYNKHRDKPIREQAENIIHLFTLTNLGAPAAFKYFDTTIDRKRYTSTKEVLDATLIHQSITGLYETRIDLSQLGGDGGGGGGSSEAAAKGGMNPLQLLQPLPAEIKGTKLLAHWNSGATITCIPESFLEDEQPIKKTLIKTIHGEKQQNVYYVTFKVKGRKVEAEVIASPYEYILLSPTDVPWLTQQPLQLTILVPLQEYQEKILSKTALPEDQKQQLKTLFVKYDNLWQHWENQVGHRKIRPHNIATGDYPPRPQKQYPINPKAKPSIQIVIDDLLKQGVLTPQNSTMNTPVYPVPKPDGRWRMVLDYREVNKTIPLTAAQNQHSAGILATIVRQKYKTTLDLANGFWAHPITPESYWLTAFTWQGKQYCWTRLPQGFLNSPALFNADVVDLLKEIPNVQVYVDDIYLSHDDPKEHVQQLEKVFQILLQAGYVVSLKKSEIGQKTVEFLGFNITKEGRGLTDTFKTKLLNITPPKDLKQLQSILGLLNFARNFIPNFAELVQPLYNLIAPAKGKYIEWSEENTKQLNMVIEALNTASNLEERLPEQRLVIKVNTSPSAGYVRYYNETGKKPIMYLNYVFSKAELKFSMLEKLLTTMHKALIKAMDLAMGQEILVYSPIVSMTKIQKTPLPERKALPIRWITWMTYLEDPRIQFHYDKTLPELKHIPDVYTSSQSPVKHPSQYEGVFYTDGSAIKSPDPTKSNNAGMGIVHATYKPEYQVLNQWSIPLGNHTAQMAEIAAVEFACKKALKIPGPVLVITDSFYVAESANKELPYWKSNGFVNNKKKPLKHISKWKSIAECLSMKPDITIQHEKGISLQIPVFILKGNALADKLATQGSYVVNAGKRTADGSEFEKRTADGSEFESPKKKAKVE

SEQ ID NO: 1338 - protein, 2174 aa, synthetic construct
MPAAKRVKLDGGDKKYSIGLDIGTNSVGWAVITDEYKVPSKKFKVLGNTDRHSIKKNLIGALLFDSGETAEATRLKRTARRRYTRRKNRICYLQEIFSNEMAKVDDSFFHRLEESFLVEEDKKHERHPIFGNIVDEVAYHEKYPTIYHLRKKLVDSTDKADLRLIYLALAHMIKFRGHFLIEGDLNPDNSDVDKLFIQLVQTYNQLFEENPINASGVDAKAILSARLSKSRRLENLIAQLPGEKKNGLFGNLIALSLGLTPNFKSNFDLAEDAKLQLSKDTYDDDLDNLLAQIGDQYADLFLAAKNLSDAILLSDILRVNTEITKAPLSASMIKRYDEHHQDLTLLKALVRQQLPEKYKEIFFDQSKNGYAGYIDGGASQEEFYKFIKPILEKMDGTEELLVKLNREDLLRKQRTFDNGSIPHQIHLGELHAILRRQEDFYPFLKDNREKIEKILTFRIPYYVGPLARGNSRFAWMTRKSEETITPWNFEEVVDKGASAQSFIERMTNFDKNLPNEKVLPKHSLLYEYFTVYNELTKVKYVTEGMRKPAFLSGEQKKAIVDLLFKTNRKVTVKQLKEDYFKKIECFDSVEISGVEDRFNASLGTYHDLLKIIKDKDFLDNEENEDILEDIVLTLTLFEDREMIEERLKTYAHLFDDKVMKQLKRRRYTGWGRLSRKLINGIRDKQSGKTILDFLKSDGFANRNFMQLIHDDSLTFKEDIQKAQVSGQGDSLHEHIANLAGSPAIKKGILQTVKVVDELVKVMGRHKPENIVIEMARENQTTQKGQKNSRERMKRIEEGIKELGSQILKEHPVENTQLQNEKLYLYYLQNGRDMYVDQELDINRLSDYDVDHIVPQSFLKDDSIDNKVLTRSDKARGKSDNVPSEEVVKKMKNYWRQLLNAKLITQRKFDNLTKAERGGLSELDKAGFIKRQLVETRQITKHVAQILDSRMNTKYDENDKLIREVKVITLKSKLVSDFRKDFQFYKVREINNYHHAHDAYLNAVVGTALIKKYPKLESEFVYGDYKVYDVRKMIAKSEQEIGKATAKYFFYSNIMNFFKTEITLANGEIRKRPLIETNGETGEIVWDKGRDFATVRKVLSMPQVNIVKKTEVQTGGFSKESILPKRNSDKLIARKKDWDPKKYGGFDSPTVAYSVLVVAKVEKGKSKKLKSVKELLGITIMERSSFEKNPIDFLEAKGYKEVKKDLIIKLPKYSLFELENGRKRMLASAGELQKGNELALPSKYVNFLYLASHYEKLKGSPEDNEQKQLFVEQHKHYLDEIIEQISEFSKRVILADANLDKVLSAYNKHRDKPIREQAENIIHLFTLTNLGAPAAFKYFDTTIDRKRYTSTKEVLDATLIHQSITGLYETRIDLSQLGGDGGGGGGGSGSSGGMNPLQLLQPLPAEIKGTKLLAHWNSGATITCIPESFLEDEQPIKKTLIKTIHGEKQQNVYYVTFKVKGRKVEAEVIASPYEYILLSPTDVPWLTQQPLQLTILVPLQEYQEKILSKTALPEDQKQQLKTLFVKYDNLWQHWENQVGHRKIRPHNIATGDYPPRPQKQYPINPKAKPSIQIVIDDLLKQGVLTPQNSTMNTPVYPVPKPDGRWRMVLDYREVNKTIPLTAAQNQHSAGILATIVRQKYKTTLDLANGFWAHPITPESYWLTAFTWQGKQYCWTRLPQGFLNSPALFNADVVDLLKEIPNVQVYVDDIYLSHDDPKEHVQQLEKVFQILLQAGYVVSLKKSEIGQKTVEFLGFNITKEGRGLTDTFKTKLLNITPPKDLKQLQSILGLLNFARNFIPNFAELVQPLYNLIAPAKGKYIEWSEENTKQLNMVIEALNTASNLEERLPEQRLVIKVNTSPSAGYVRYYNETGKKPIMYLNYVFSKAELKFSMLEKLLTTMHKALIKAMDLAMGQEILVYSPIVSMTKIQKTPLPERKALPIRWITWMTYLEDPRIQFHYDKTLPELKHIPDVYTSSQSPVKHPSQYEGVFYTDGSAIKSPDPTKSNNAGMGIVHATYKPEYQVLNQWSIPLGNHTAQMAEIAAVEFACKKALKIPGPVLVITDSFYVAESANKELPYWKSNGFVNNKKKPLKHISKWKSIAECLSMKPDITIQHEKGISLQIPVFILKGNALADKLATQGSYVVNAGKRTADGSEFEKRTADGSEFESPKKKAKVE

SEQ ID NO: 1339 - protein, 2176 aa, synthetic construct
MPAAKRVKLDGGDKKYSIGLDIGTNSVGWAVITDEYKVPSKKFKVLGNTDRHSIKKNLIGALLFDSGETAEATRLKRTARRRYTRRKNRICYLQEIFSNEMAKVDDSFFHRLEESFLVEEDKKHERHPIFGNIVDEVAYHEKYPTIYHLRKKLVDSTDKADLRLIYLALAHMIKFRGHFLIEGDLNPDNSDVDKLFIQLVQTYNQLFEENPINASGVDAKAILSARLSKSRRLENLIAQLPGEKKNGLFGNLIALSLGLTPNFKSNFDLAEDAKLQLSKDTYDDDLDNLLAQIGDQYADLFLAAKNLSDAILLSDILRVNTEITKAPLSASMIKRYDEHHQDLTLLKALVRQQLPEKYKEIFFDQSKNGYAGYIDGGASQEEFYKFIKPILEKMDGTEELLVKLNREDLLRKQRTFDNGSIPHQIHLGELHAILRRQEDFYPFLKDNREKIEKILTFRIPYYVGPLARGNSRFAWMTRKSEETITPWNFEEVVDKGASAQSFIERMTNFDKNLPNEKVLPKHSLLYEYFTVYNELTKVKYVTEGMRKPAFLSGEQKKAIVDLLFKTNRKVTVKQLKEDYFKKIECFDSVEISGVEDRFNASLGTYHDLLKIIKDKDFLDNEENEDILEDIVLTLTLFEDREMIEERLKTYAHLFDDKVMKQLKRRRYTGWGRLSRKLINGIRDKQSGKTILDFLKSDGFANRNFMQLIHDDSLTFKEDIQKAQVSGQGDSLHEHIANLAGSPAIKKGILQTVKVVDELVKVMGRHKPENIVIEMARENQTTQKGQKNSRERMKRIEEGIKELGSQILKEHPVENTQLQNEKLYLYYLQNGRDMYVDQELDINRLSDYDVDHIVPQSFLKDDSIDNKVLTRSDKARGKSDNVPSEEVVKKMKNYWRQLLNAKLITQRKFDNLTKAERGGLSELDKAGFIKRQLVETRQITKHVAQILDSRMNTKYDENDKLIREVKVITLKSKLVSDFRKDFQFYKVREINNYHHAHDAYLNAVVGTALIKKYPKLESEFVYGDYKVYDVRKMIAKSEQEIGKATAKYFFYSNIMNFFKTEITLANGEIRKRPLIETNGETGEIVWDKGRDFATVRKVLSMPQVNIVKKTEVQTGGFSKESILPKRNSDKLIARKKDWDPKKYGGFDSPTVAYSVLVVAKVEKGKSKKLKSVKELLGITIMERSSFEKNPIDFLEAKGYKEVKKDLIIKLPKYSLFELENGRKRMLASAGELQKGNELALPSKYVNFLYLASHYEKLKGSPEDNEQKQLFVEQHKHYLDEIIEQISEFSKRVILADANLDKVLSAYNKHRDKPIREQAENIIHLFTLTNLGAPAAFKYFDTTIDRKRYTSTKEVLDATLIHQSITGLYETRIDLSQLGGDGGGGGEAAAKGSSGGMNPLQLLQPLPAEIKGTKLLAHWNSGATITCIPESFLEDEQPIKKTLIKTIHGEKQQNVYYVTFKVKGRKVEAEVIASPYEYILLSPTDVPWLTQQPLQLTILVPLQEYQEKILSKTALPEDQKQQLKTLFVKYDNLWQHWENQVGHRKIRPHNIATGDYPPRPQKQYPINPKAKPSIQIVIDDLLKQGVLTPQNSTMNTPVYPVPKPDGRWRMVLDYREVNKTIPLTAAQNQHSAGILATIVRQKYKTTLDLANGFWAHPITPESYWLTAFTWQGKQYCWTRLPQGFLNSPALFNADVVDLLKEIPNVQVYVDDIYLSHDDPKEHVQQLEKVFQILLQAGYVVSLKKSEIGQKTVEFLGFNITKEGRGLTDTFKTKLLNITPPKDLKQLQSILGLLNFARNFIPNFAELVQPLYNLIAPAKGKYIEWSEENTKQLNMVIEALNTASNLEERLPEQRLVIKVNTSPSAGYVRYYNETGKKPIMYLNYVFSKAELKFSMLEKLLTTMHKALIKAMDLAMGQEILVYSPIVSMTKIQKTPLPERKALPIRWITWMTYLEDPRIQFHYDKTLPELKHIPDVYTSSQSPVKHPSQYEGVFYTDGSAIKSPDPTKSNNAGMGIVHATYKPEYQVLNQWSIPLGNHTAQMAEIAAVEFACKKALKIPGPVLVITDSFYVAESANKELPYWKSNGFVNNKKKPLKHISKWKSIAECLSMKPDITIQHEKGISLQIPVFILKGNALADKLATQGSYVVNAGKRTADGSEFEKRTADGSEFESPKKKAKVE

SEQ ID NO: 1340 - protein, 2171 aa, synthetic construct
MPAAKRVKLDGGDKKYSIGLDIGTNSVGWAVITDEYKVPSKKFKVLGNTDRHSIKKNLIGALLFDSGETAEATRLKRTARRRYTRRKNRICYLQEIFSNEMAKVDDSFFHRLEESFLVEEDKKHERHPIFGNIVDEVAYHEKYPTIYHLRKKLVDSTDKADLRLIYLALAHMIKFRGHFLIEGDLNPDNSDVDKLFIQLVQTYNQLFEENPINASGVDAKAILSARLSKSRRLENLIAQLPGEKKNGLFGNLIALSLGLTPNFKSNFDLAEDAKLQLSKDTYDDDLDNLLAQIGDQYADLFLAAKNLSDAILLSDILRVNTEITKAPLSASMIKRYDEHHQDLTLLKALVRQQLPEKYKEIFFDQSKNGYAGYIDGGASQEEFYKFIKPILEKMDGTEELLVKLNREDLLRKQRTFDNGSIPHQIHLGELHAILRRQEDFYPFLKDNREKIEKILTFRIPYYVGPLARGNSRFAWMTRKSEETITPWNFEEVVDKGASAQSFIERMTNFDKNLPNEKVLPKHSLLYEYFTVYNELTKVKYVTEGMRKPAFLSGEQKKAIVDLLFKTNRKVTVKQLKEDYFKKIECFDSVEISGVEDRFNASLGTYHDLLKIIKDKDFLDNEENEDILEDIVLTLTLFEDREMIEERLKTYAHLFDDKVMKQLKRRRYTGWGRLSRKLINGIRDKQSGKTILDFLKSDGFANRNFMQLIHDDSLTFKEDIQKAQVSGQGDSLHEHIANLAGSPAIKKGILQTVKVVDELVKVMGRHKPENIVIEMARENQTTQKGQKNSRERMKRIEEGIKELGSQILKEHPVENTQLQNEKLYLYYLQNGRDMYVDQELDINRLSDYDVDHIVPQSFLKDDSIDNKVLTRSDKARGKSDNVPSEEVVKKMKNYWRQLLNAKLITQRKFDNLTKAERGGLSELDKAGFIKRQLVETRQITKHVAQILDSRMNTKYDENDKLIREVKVITLKSKLVSDFRKDFQFYKVREINNYHHAHDAYLNAVVGTALIKKYPKLESEFVYGDYKVYDVRKMIAKSEQEIGKATAKYFFYSNIMNFFKTEITLANGEIRKRPLIETNGETGEIVWDKGRDFATVRKVLSMPQVNIVKKTEVQTGGFSKESILPKRNSDKLIARKKDWDPKKYGGFDSPTVAYSVLVVAKVEKGKSKKLKSVKELLGITIMERSSFEKNPIDFLEAKGYKEVKKDLIIKLPKYSLFELENGRKRMLASAGELQKGNELALPSKYVNFLYLASHYEKLKGSPEDNEQKQLFVEQHKHYLDEIIEQISEFSKRVILADANLDKVLSAYNKHRDKPIREQAENIIHLFTLTNLGAPAAFKYFDTTIDRKRYTSTKEVLDATLIHQSITGLYETRIDLSQLGGDGGGSSGGGGGMNPLQLLQPLPAEIKGTKLLAHWNSGATITCIPESFLEDEQPIKKTLIKTIHGEKQQNVYYVTFKVKGRKVEAEVIASPYEYILLSPTDVPWLTQQPLQLTILVPLQEYQEKILSKTALPEDQKQQLKTLFVKYDNLWQHWENQVGHRKIRPHNIATGDYPPRPQKQYPINPKAKPSIQIVIDDLLKQGVLTPQNSTMNTPVYPVPKPDGRWRMVLDYREVNKTIPLTAAQNQHSAGILATIVRQKYKTTLDLANGFWAHPITPESYWLTAFTWQGKQYCWTRLPQGFLNSPALFNADVVDLLKEIPNVQVYVDDIYLSHDDPKEHVQQLEKVFQILLQAGYVVSLKKSEIGQKTVEFLGFNITKEGRGLTDTFKTKLLNITPPKDLKQLQSILGLLNFARNFIPNFAELVQPLYNLIAPAKGKYIEWSEENTKQLNMVIEALNTASNLEERLPEQRLVIKVNTSPSAGYVRYYNETGKKPIMYLNYVFSKAELKFSMLEKLLTTMHKALIKAMDLAMGQEILVYSPIVSMTKIQKTPLPERKALPIRWITWMTYLEDPRIQFHYDKTLPELKHIPDVYTSSQSPVKHPSQYEGVFYTDGSAIKSPDPTKSNNAGMGIVHATYKPEYQVLNQWSIPLGNHTAQMAEIAAVEFACKKALKIPGPVLVITDSFYVAESANKELPYWKSNGFVNNKKKPLKHISKWKSIAECLSMKPDITIQHEKGISLQIPVFILKGNALADKLATQGSYVVNAGKRTADGSEFEKRTADGSEFESPKKKAKVE

SEQ ID NO: 1341 - protein, 2171 aa, synthetic construct
MPAAKRVKLDGGDKKYSIGLDIGTNSVGWAVITDEYKVPSKKFKVLGNTDRHSIKKNLIGALLFDSGETAEATRLKRTARRRYTRRKNRICYLQEIFSNEMAKVDDSFFHRLEESFLVEEDKKHERHPIFGNIVDEVAYHEKYPTIYHLRKKLVDSTDKADLRLIYLALAHMIKFRGHFLIEGDLNPDNSDVDKLFIQLVQTYNQLFEENPINASGVDAKAILSARLSKSRRLENLIAQLPGEKKNGLFGNLIALSLGLTPNFKSNFDLAEDAKLQLSKDTYDDDLDNLLAQIGDQYADLFLAAKNLSDAILLSDILRVNTEITKAPLSASMIKRYDEHHQDLTLLKALVRQQLPEKYKEIFFDQSKNGYAGYIDGGASQEEFYKFIKPILEKMDGTEELLVKLNREDLLRKQRTFDNGSIPHQIHLGELHAILRRQEDFYPFLKDNREKIEKILTFRIPYYVGPLARGNSRFAWMTRKSEETITPWNFEEVVDKGASAQSFIERMTNFDKNLPNEKVLPKHSLLYEYFTVYNELTKVKYVTEGMRKPAFLSGEQKKAIVDLLFKTNRKVTVKQLKEDYFKKIECFDSVEISGVEDRFNASLGTYHDLLKIIKDKDFLDNEENEDILEDIVLTLTLFEDREMIEERLKTYAHLFDDKVMKQLKRRRYTGWGRLSRKLINGIRDKQSGKTILDFLKSDGFANRNFMQLIHDDSLTFKEDIQKAQVSGQGDSLHEHIANLAGSPAIKKGILQTVKVVDELVKVMGRHKPENIVIEMARENQTTQKGQKNSRERMKRIEEGIKELGSQILKEHPVENTQLQNEKLYLYYLQNGRDMYVDQELDINRLSDYDVDHIVPQSFLKDDSIDNKVLTRSDKARGKSDNVPSEEVVKKMKNYWRQLLNAKLITQRKFDNLTKAERGGLSELDKAGFIKRQLVETRQITKHVAQILDSRMNTKYDENDKLIREVKVITLKSKLVSDFRKDFQFYKVREINNYHHAHDAYLNAVVGTALIKKYPKLESEFVYGDYKVYDVRKMIAKSEQEIGKATAKYFFYSNIMNFFKTEITLANGEIRKRPLIETNGETGEIVWDKGRDFATVRKVLSMPQVNIVKKTEVQTGGFSKESILPKRNSDKLIARKKDWDPKKYGGFDSPTVAYSVLVVAKVEKGKSKKLKSVKELLGITIMERSSFEKNPIDFLEAKGYKEVKKDLIIKLPKYSLFELENGRKRMLASAGELQKGNELALPSKYVNFLYLASHYEKLKGSPEDNEQKQLFVEQHKHYLDEIIEQISEFSKRVILADANLDKVLSAYNKHRDKPIREQAENIIHLFTLTNLGAPAAFKYFDTTIDRKRYTSTKEVLDATLIHQSITGLYETRIDLSQLGGDGGGGGGGSGGMNPLQLLQPLPAEIKGTKLLAHWNSGATITCIPESFLEDEQPIKKTLIKTIHGEKQQNVYYVTFKVKGRKVEAEVIASPYEYILLSPTDVPWLTQQPLQLTILVPLQEYQEKILSKTALPEDQKQQLKTLFVKYDNLWQHWENQVGHRKIRPHNIATGDYPPRPQKQYPINPKAKPSIQIVIDDLLKQGVLTPQNSTMNTPVYPVPKPDGRWRMVLDYREVNKTIPLTAAQNQHSAGILATIVRQKYKTTLDLANGFWAHPITPESYWLTAFTWQGKQYCWTRLPQGFLNSPALFNADVVDLLKEIPNVQVYVDDIYLSHDDPKEHVQQLEKVFQILLQAGYVVSLKKSEIGQKTVEFLGFNITKEGRGLTDTFKTKLLNITPPKDLKQLQSILGLLNFARNFIPNFAELVQPLYNLIAPAKGKYIEWSEENTKQLNMVIEALNTASNLEERLPEQRLVIKVNTSPSAGYVRYYNETGKKPIMYLNYVFSKAELKFSMLEKLLTTMHKALIKAMDLAMGQEILVYSPIVSMTKIQKTPLPERKALPIRWITWMTYLEDPRIQFHYDKTLPELKHIPDVYTSSQSPVKHPSQYEGVFYTDGSAIKSPDPTKSNNAGMGIVHATYKPEYQVLNQWSIPLGNHTAQMAEIAAVEFACKKALKIPGPVLVITDSFYVAESANKELPYWKSNGFVNNKKKPLKHISKWKSIAECLSMKPDITIQHEKGISLQIPVFILKGNALADKLATQGSYVVNAGKRTADGSEFEKRTADGSEFESPKKKAKVE

SEQ ID NO: 1342 - protein, 2176 aa, synthetic construct
MPAAKRVKLDGGDKKYSIGLDIGTNSVGWAVITDEYKVPSKKFKVLGNTDRHSIKKNLIGALLFDSGETAEATRLKRTARRRYTRRKNRICYLQEIFSNEMAKVDDSFFHRLEESFLVEEDKKHERHPIFGNIVDEVAYHEKYPTIYHLRKKLVDSTDKADLRLIYLALAHMIKFRGHFLIEGDLNPDNSDVDKLFIQLVQTYNQLFEENPINASGVDAKAILSARLSKSRRLENLIAQLPGEKKNGLFGNLIALSLGLTPNFKSNFDLAEDAKLQLSKDTYDDDLDNLLAQIGDQYADLFLAAKNLSDAILLSDILRVNTEITKAPLSASMIKRYDEHHQDLTLLKALVRQQLPEKYKEIFFDQSKNGYAGYIDGGASQEEFYKFIKPILEKMDGTEELLVKLNREDLLRKQRTFDNGSIPHQIHLGELHAILRRQEDFYPFLKDNREKIEKILTFRIPYYVGPLARGNSRFAWMTRKSEETITPWNFEEVVDKGASAQSFIERMTNFDKNLPNEKVLPKHSLLYEYFTVYNELTKVKYVTEGMRKPAFLSGEQKKAIVDLLFKTNRKVTVKQLKEDYFKKIECFDSVEISGVEDRFNASLGTYHDLLKIIKDKDFLDNEENEDILEDIVLTLTLFEDREMIEERLKTYAHLFDDKVMKQLKRRRYTGWGRLSRKLINGIRDKQSGKTILDFLKSDGFANRNFMQLIHDDSLTFKEDIQKAQVSGQGDSLHEHIANLAGSPAIKKGILQTVKVVDELVKVMGRHKPENIVIEMARENQTTQKGQKNSRERMKRIEEGIKELGSQILKEHPVENTQLQNEKLYLYYLQNGRDMYVDQELDINRLSDYDVDHIVPQSFLKDDSIDNKVLTRSDKARGKSDNVPSEEVVKKMKNYWRQLLNAKLITQRKFDNLTKAERGGLSELDKAGFIKRQLVETRQITKHVAQILDSRMNTKYDENDKLIREVKVITLKSKLVSDFRKDFQFYKVREINNYHHAHDAYLNAVVGTALIKKYPKLESEFVYGDYKVYDVRKMIAKSEQEIGKATAKYFFYSNIMNFFKTEITLANGEIRKRPLIETNGETGEIVWDKGRDFATVRKVLSMPQVNIVKKTEVQTGGFSKESILPKRNSDKLIARKKDWDPKKYGGFDSPTVAYSVLVVAKVEKGKSKKLKSVKELLGITIMERSSFEKNPIDFLEAKGYKEVKKDLIIKLPKYSLFELENGRKRMLASAGELQKGNELALPSKYVNFLYLASHYEKLKGSPEDNEQKQLFVEQHKHYLDEIIEQISEFSKRVILADANLDKVLSAYNKHRDKPIREQAENIIHLFTLTNLGAPAAFKYFDTTIDRKRYTSTKEVLDATLIHQSITGLYETRIDLSQLGGDGGEAAAKGGGPAPGGMNPLQLLQPLPAEIKGTKLLAHWNSGATITCIPESFLEDEQPIKKTLIKTIHGEKQQNVYYVTFKVKGRKVEAEVIASPYEYILLSPTDVPWLTQQPLQLTILVPLQEYQEKILSKTALPEDQKQQLKTLFVKYDNLWQHWENQVGHRKIRPHNIATGDYPPRPQKQYPINPKAKPSIQIVIDDLLKQGVLTPQNSTMNTPVYPVPKPDGRWRMVLDYREVNKTIPLTAAQNQHSAGILATIVRQKYKTTLDLANGFWAHPITPESYWLTAFTWQGKQYCWTRLPQGFLNSPALFNADVVDLLKEIPNVQVYVDDIYLSHDDPKEHVQQLEKVFQILLQAGYVVSLKKSEIGQKTVEFLGFNITKEGRGLTDTFKTKLLNITPPKDLKQLQSILGLLNFARNFIPNFAELVQPLYNLIAPAKGKYIEWSEENTKQLNMVIEALNTASNLEERLPEQRLVIKVNTSPSAGYVRYYNETGKKPIMYLNYVFSKAELKFSMLEKLLTTMHKALIKAMDLAMGQEILVYSPIVSMTKIQKTPLPERKALPIRWITWMTYLEDPRIQFHYDKTLPELKHIPDVYTSSQSPVKHPSQYEGVFYTDGSAIKSPDPTKSNNAGMGIVHATYKPEYQVLNQWSIPLGNHTAQMAEIAAVEFACKKALKIPGPVLVITDSFYVAESANKELPYWKSNGFVNNKKKPLKHISKWKSIAECLSMKPDITIQHEKGISLQIPVFILKGNALADKLATQGSYVVNAGKRTADGSEFEKRTADGSEFESPKKKAKVE

SEQ ID NO: 1343 - protein, 2171 aa, synthetic construct
MPAAKRVKLDGGDKKYSIGLDIGTNSVGWAVITDEYKVPSKKFKVLGNTDRHSIKKNLIGALLFDSGETAEATRLKRTARRRYTRRKNRICYLQEIFSNEMAKVDDSFFHRLEESFLVEEDKKHERHPIFGNIVDEVAYHEKYPTIYHLRKKLVDSTDKADLRLIYLALAHMIKFRGHFLIEGDLNPDNSDVDKLFIQLVQTYNQLFEENPINASGVDAKAILSARLSKSRRLENLIAQLPGEKKNGLFGNLIALSLGLTPNFKSNFDLAEDAKLQLSKDTYDDDLDNLLAQIGDQYADLFLAAKNLSDAILLSDILRVNTEITKAPLSASMIKRYDEHHQDLTLLKALVRQQLPEKYKEIFFDQSKNGYAGYIDGGASQEEFYKFIKPILEKMDGTEELLVKLNREDLLRKQRTFDNGSIPHQIHLGELHAILRRQEDFYPFLKDNREKIEKILTFRIPYYVGPLARGNSRFAWMTRKSEETITPWNFEEVVDKGASAQSFIERMTNFDKNLPNEKVLPKHSLLYEYFTVYNELTKVKYVTEGMRKPAFLSGEQKKAIVDLLFKTNRKVTVKQLKEDYFKKIECFDSVEISGVEDRFNASLGTYHDLLKIIKDKDFLDNEENEDILEDIVLTLTLFEDREMIEERLKTYAHLFDDKVMKQLKRRRYTGWGRLSRKLINGIRDKQSGKTILDFLKSDGFANRNFMQLIHDDSLTFKEDIQKAQVSGQGDSLHEHIANLAGSPAIKKGILQTVKVVDELVKVMGRHKPENIVIEMARENQTTQKGQKNSRERMKRIEEGIKELGSQILKEHPVENTQLQNEKLYLYYLQNGRDMYVDQELDINRLSDYDVDHIVPQSFLKDDSIDNKVLTRSDKARGKSDNVPSEEVVKKMKNYWRQLLNAKLITQRKFDNLTKAERGGLSELDKAGFIKRQLVETRQITKHVAQILDSRMNTKYDENDKLIREVKVITLKSKLVSDFRKDFQFYKVREINNYHHAHDAYLNAVVGTALIKKYPKLESEFVYGDYKVYDVRKMIAKSEQEIGKATAKYFFYSNIMNFFKTEITLANGEIRKRPLIETNGETGEIVWDKGRDFATVRKVLSMPQVNIVKKTEVQTGGFSKESILPKRNSDKLIARKKDWDPKKYGGFDSPTVAYSVLVVAKVEKGKSKKLKSVKELLGITIMERSSFEKNPIDFLEAKGYKEVKKDLIIKLPKYSLFELENGRKRMLASAGELQKGNELALPSKYVNFLYLASHYEKLKGSPEDNEQKQLFVEQHKHYLDEIIEQISEFSKRVILADANLDKVLSAYNKHRDKPIREQAENIIHLFTLTNLGAPAAFKYFDTTIDRKRYTSTKEVLDATLIHQSITGLYETRIDLSQLGGDGGGGGGSSGGMNPLQLLQPLPAEIKGTKLLAHWNSGATITCIPESFLEDEQPIKKTLIKTIHGEKQQNVYYVTFKVKGRKVEAEVIASPYEYILLSPTDVPWLTQQPLQLTILVPLQEYQEKILSKTALPEDQKQQLKTLFVKYDNLWQHWENQVGHRKIRPHNIATGDYPPRPQKQYPINPKAKPSIQIVIDDLLKQGVLTPQNSTMNTPVYPVPKPDGRWRMVLDYREVNKTIPLTAAQNQHSAGILATIVRQKYKTTLDLANGFWAHPITPESYWLTAFTWQGKQYCWTRLPQGFLNSPALFNADVVDLLKEIPNVQVYVDDIYLSHDDPKEHVQQLEKVFQILLQAGYVVSLKKSEIGQKTVEFLGFNITKEGRGLTDTFKTKLLNITPPKDLKQLQSILGLLNFARNFIPNFAELVQPLYNLIAPAKGKYIEWSEENTKQLNMVIEALNTASNLEERLPEQRLVIKVNTSPSAGYVRYYNETGKKPIMYLNYVFSKAELKFSMLEKLLTTMHKALIKAMDLAMGQEILVYSPIVSMTKIQKTPLPERKALPIRWITWMTYLEDPRIQFHYDKTLPELKHIPDVYTSSQSPVKHPSQYEGVFYTDGSAIKSPDPTKSNNAGMGIVHATYKPEYQVLNQWSIPLGNHTAQMAEIAAVEFACKKALKIPGPVLVITDSFYVAESANKELPYWKSNGFVNNKKKPLKHISKWKSIAECLSMKPDITIQHEKGISLQIPVFILKGNALADKLATQGSYVVNAGKRTADGSEFEKRTADGSEFESPKKKAKVE

SEQ ID NO: 1344 - protein, 2174 aa, synthetic construct
MPAAKRVKLDGGDKKYSIGLDIGTNSVGWAVITDEYKVPSKKFKVLGNTDRHSIKKNLIGALLFDSGETAEATRLKRTARRRYTRRKNRICYLQEIFSNEMAKVDDSFFHRLEESFLVEEDKKHERHPIFGNIVDEVAYHEKYPTIYHLRKKLVDSTDKADLRLIYLALAHMIKFRGHFLIEGDLNPDNSDVDKLFIQLVQTYNQLFEENPINASGVDAKAILSARLSKSRRLENLIAQLPGEKKNGLFGNLIALSLGLTPNFKSNFDLAEDAKLQLSKDTYDDDLDNLLAQIGDQYADLFLAAKNLSDAILLSDILRVNTEITKAPLSASMIKRYDEHHQDLTLLKALVRQQLPEKYKEIFFDQSKNGYAGYIDGGASQEEFYKFIKPILEKMDGTEELLVKLNREDLLRKQRTFDNGSIPHQIHLGELHAILRRQEDFYPFLKDNREKIEKILTFRIPYYVGPLARGNSRFAWMTRKSEETITPWNFEEVVDKGASAQSFIERMTNFDKNLPNEKVLPKHSLLYEYFTVYNELTKVKYVTEGMRKPAFLSGEQKKAIVDLLFKTNRKVTVKQLKEDYFKKIECFDSVEISGVEDRFNASLGTYHDLLKIIKDKDFLDNEENEDILEDIVLTLTLFEDREMIEERLKTYAHLFDDKVMKQLKRRRYTGWGRLSRKLINGIRDKQSGKTILDFLKSDGFANRNFMQLIHDDSLTFKEDIQKAQVSGQGDSLHEHIANLAGSPAIKKGILQTVKVVDELVKVMGRHKPENIVIEMARENQTTQKGQKNSRERMKRIEEGIKELGSQILKEHPVENTQLQNEKLYLYYLQNGRDMYVDQELDINRLSDYDVDHIVPQSFLKDDSIDNKVLTRSDKARGKSDNVPSEEVVKKMKNYWRQLLNAKLITQRKFDNLTKAERGGLSELDKAGFIKRQLVETRQITKHVAQILDSRMNTKYDENDKLIREVKVITLKSKLVSDFRKDFQFYKVREINNYHHAHDAYLNAVVGTALIKKYPKLESEFVYGDYKVYDVRKMIAKSEQEIGKATAKYFFYSNIMNFFKTEITLANGEIRKRPLIETNGETGEIVWDKGRDFATVRKVLSMPQVNIVKKTEVQTGGFSKESILPKRNSDKLIARKKDWDPKKYGGFDSPTVAYSVLVVAKVEKGKSKKLKSVKELLGITIMERSSFEKNPIDFLEAKGYKEVKKDLIIKLPKYSLFELENGRKRMLASAGELQKGNELALPSKYVNFLYLASHYEKLKGSPEDNEQKQLFVEQHKHYLDEIIEQISEFSKRVILADANLDKVLSAYNKHRDKPIREQAENIIHLFTLTNLGAPAAFKYFDTTIDRKRYTSTKEVLDATLIHQSITGLYETRIDLSQLGGDGGGSSGSSGSSGGMNPLQLLQPLPAEIKGTKLLAHWNSGATITCIPESFLEDEQPIKKTLIKTIHGEKQQNVYYVTFKVKGRKVEAEVIASPYEYILLSPTDVPWLTQQPLQLTILVPLQEYQEKILSKTALPEDQKQQLKTLFVKYDNLWQHWENQVGHRKIRPHNIATGDYPPRPQKQYPINPKAKPSIQIVIDDLLKQGVLTPQNSTMNTPVYPVPKPDGRWRMVLDYREVNKTIPLTAAQNQHSAGILATIVRQKYKTTLDLANGFWAHPITPESYWLTAFTWQGKQYCWTRLPQGFLNSPALFNADVVDLLKEIPNVQVYVDDIYLSHDDPKEHVQQLEKVFQILLQAGYVVSLKKSEIGQKTVEFLGFNITKEGRGLTDTFKTKLLNITPPKDLKQLQSILGLLNFARNFIPNFAELVQPLYNLIAPAKGKYIEWSEENTKQLNMVIEALNTASNLEERLPEQRLVIKVNTSPSAGYVRYYNETGKKPIMYLNYVFSKAELKFSMLEKLLTTMHKALIKAMDLAMGQEILVYSPIVSMTKIQKTPLPERKALPIRWITWMTYLEDPRIQFHYDKTLPELKHIPDVYTSSQSPVKHPSQYEGVFYTDGSAIKSPDPTKSNNAGMGIVHATYKPEYQVLNQWSIPLGNHTAQMAEIAAVEFACKKALKIPGPVLVITDSFYVAESANKELPYWKSNGFVNNKKKPLKHISKWKSIAECLSMKPDITIQHEKGISLQIPVFILKGNALADKLATQGSYVVNAGKRTADGSEFEKRTADGSEFESPKKKAKVE

SEQ ID NO: 1345 - protein, 2171 aa, synthetic construct
MPAAKRVKLDGGDKKYSIGLDIGTNSVGWAVITDEYKVPSKKFKVLGNTDRHSIKKNLIGALLFDSGETAEATRLKRTARRRYTRRKNRICYLQEIFSNEMAKVDDSFFHRLEESFLVEEDKKHERHPIFGNIVDEVAYHEKYPTIYHLRKKLVDSTDKADLRLIYLALAHMIKFRGHFLIEGDLNPDNSDVDKLFIQLVQTYNQLFEENPINASGVDAKAILSARLSKSRRLENLIAQLPGEKKNGLFGNLIALSLGLTPNFKSNFDLAEDAKLQLSKDTYDDDLDNLLAQIGDQYADLFLAAKNLSDAILLSDILRVNTEITKAPLSASMIKRYDEHHQDLTLLKALVRQQLPEKYKEIFFDQSKNGYAGYIDGGASQEEFYKFIKPILEKMDGTEELLVKLNREDLLRKQRTFDNGSIPHQIHLGELHAILRRQEDFYPFLKDNREKIEKILTFRIPYYVGPLARGNSRFAWMTRKSEETITPWNFEEVVDKGASAQSFIERMTNFDKNLPNEKVLPKHSLLYEYFTVYNELTKVKYVTEGMRKPAFLSGEQKKAIVDLLFKTNRKVTVKQLKEDYFKKIECFDSVEISGVEDRFNASLGTYHDLLKIIKDKDFLDNEENEDILEDIVLTLTLFEDREMIEERLKTYAHLFDDKVMKQLKRRRYTGWGRLSRKLINGIRDKQSGKTILDFLKSDGFANRNFMQLIHDDSLTFKEDIQKAQVSGQGDSLHEHIANLAGSPAIKKGILQTVKVVDELVKVMGRHKPENIVIEMARENQTTQKGQKNSRERMKRIEEGIKELGSQILKEHPVENTQLQNEKLYLYYLQNGRDMYVDQELDINRLSDYDVDHIVPQSFLKDDSIDNKVLTRSDKARGKSDNVPSEEVVKKMKNYWRQLLNAKLITQRKFDNLTKAERGGLSELDKAGFIKRQLVETRQITKHVAQILDSRMNTKYDENDKLIREVKVITLKSKLVSDFRKDFQFYKVREINNYHHAHDAYLNAVVGTALIKKYPKLESEFVYGDYKVYDVRKMIAKSEQEIGKATAKYFFYSNIMNFFKTEITLANGEIRKRPLIETNGETGEIVWDKGRDFATVRKVLSMPQVNIVKKTEVQTGGFSKESILPKRNSDKLIARKKDWDPKKYGGFDSPTVAYSVLVVAKVEKGKSKKLKSVKELLGITIMERSSFEKNPIDFLEAKGYKEVKKDLIIKLPKYSLFELENGRKRMLASAGELQKGNELALPSKYVNFLYLASHYEKLKGSPEDNEQKQLFVEQHKHYLDEIIEQISEFSKRVILADANLDKVLSAYNKHRDKPIREQAENIIHLFTLTNLGAPAAFKYFDTTIDRKRYTSTKEVLDATLIHQSITGLYETRIDLSQLGGDGGPAPGGGGGMNPLQLLQPLPAEIKGTKLLAHWNSGATITCIPESFLEDEQPIKKTLIKTIHGEKQQNVYYVTFKVKGRKVEAEVIASPYEYILLSPTDVPWLTQQPLQLTILVPLQEYQEKILSKTALPEDQKQQLKTLFVKYDNLWQHWENQVGHRKIRPHNIATGDYPPRPQKQYPINPKAKPSIQIVIDDLLKQGVLTPQNSTMNTPVYPVPKPDGRWRMVLDYREVNKTIPLTAAQNQHSAGILATIVRQKYKTTLDLANGFWAHPITPESYWLTAFTWQGKQYCWTRLPQGFLNSPALFNADVVDLLKEIPNVQVYVDDIYLSHDDPKEHVQQLEKVFQILLQAGYVVSLKKSEIGQKTVEFLGFNITKEGRGLTDTFKTKLLNITPPKDLKQLQSILGLLNFARNFIPNFAELVQPLYNLIAPAKGKYIEWSEENTKQLNMVIEALNTASNLEERLPEQRLVIKVNTSPSAGYVRYYNETGKKPIMYLNYVFSKAELKFSMLEKLLTTMHKALIKAMDLAMGQEILVYSPIVSMTKIQKTPLPERKALPIRWITWMTYLEDPRIQFHYDKTLPELKHIPDVYTSSQSPVKHPSQYEGVFYTDGSAIKSPDPTKSNNAGMGIVHATYKPEYQVLNQWSIPLGNHTAQMAEIAAVEFACKKALKIPGPVLVITDSFYVAESANKELPYWKSNGFVNNKKKPLKHISKWKSIAECLSMKPDITIQHEKGISLQIPVFILKGNALADKLATQGSYVVNAGKRTADGSEFEKRTADGSEFESPKKKAKVE

SEQ ID NO: 1346 - protein, 2195 aa, synthetic construct
MPAAKRVKLDGGDKKYSIGLDIGTNSVGWAVITDEYKVPSKKFKVLGNTDRHSIKKNLIGALLFDSGETAEATRLKRTARRRYTRRKNRICYLQEIFSNEMAKVDDSFFHRLEESFLVEEDKKHERHPIFGNIVDEVAYHEKYPTIYHLRKKLVDSTDKADLRLIYLALAHMIKFRGHFLIEGDLNPDNSDVDKLFIQLVQTYNQLFEENPINASGVDAKAILSARLSKSRRLENLIAQLPGEKKNGLFGNLIALSLGLTPNFKSNFDLAEDAKLQLSKDTYDDDLDNLLAQIGDQYADLFLAAKNLSDAILLSDILRVNTEITKAPLSASMIKRYDEHHQDLTLLKALVRQQLPEKYKEIFFDQSKNGYAGYIDGGASQEEFYKFIKPILEKMDGTEELLVKLNREDLLRKQRTFDNGSIPHQIHLGELHAILRRQEDFYPFLKDNREKIEKILTFRIPYYVGPLARGNSRFAWMTRKSEETITPWNFEEVVDKGASAQSFIERMTNFDKNLPNEKVLPKHSLLYEYFTVYNELTKVKYVTEGMRKPAFLSGEQKKAIVDLLFKTNRKVTVKQLKEDYFKKIECFDSVEISGVEDRFNASLGTYHDLLKIIKDKDFLDNEENEDILEDIVLTLTLFEDREMIEERLKTYAHLFDDKVMKQLKRRRYTGWGRLSRKLINGIRDKQSGKTILDFLKSDGFANRNFMQLIHDDSLTFKEDIQKAQVSGQGDSLHEHIANLAGSPAIKKGILQTVKVVDELVKVMGRHKPENIVIEMARENQTTQKGQKNSRERMKRIEEGIKELGSQILKEHPVENTQLQNEKLYLYYLQNGRDMYVDQELDINRLSDYDVDHIVPQSFLKDDSIDNKVLTRSDKARGKSDNVPSEEVVKKMKNYWRQLLNAKLITQRKFDNLTKAERGGLSELDKAGFIKRQLVETRQITKHVAQILDSRMNTKYDENDKLIREVKVITLKSKLVSDFRKDFQFYKVREINNYHHAHDAYLNAVVGTALIKKYPKLESEFVYGDYKVYDVRKMIAKSEQEIGKATAKYFFYSNIMNFFKTEITLANGEIRKRPLIETNGETGEIVWDKGRDFATVRKVLSMPQVNIVKKTEVQTGGFSKESILPKRNSDKLIARKKDWDPKKYGGFDSPTVAYSVLVVAKVEKGKSKKLKSVKELLGITIMERSSFEKNPIDFLEAKGYKEVKKDLIIKLPKYSLFELENGRKRMLASAGELQKGNELALPSKYVNFLYLASHYEKLKGSPEDNEQKQLFVEQHKHYLDEIIEQISEFSKRVILADANLDKVLSAYNKHRDKPIREQAENIIHLFTLTNLGAPAAFKYFDTTIDRKRYTSTKEVLDATLIHQSITGLYETRIDLSQLGGDGGEAAAKEAAAKEAAAKEAAAKEAAAKEAAAKGGMNPLQLLQPLPAEIKGTKLLAHWNSGATITCIPESFLEDEQPIKKTLIKTIHGEKQQNVYYVTFKVKGRKVEAEVIASPYEYILLSPTDVPWLTQQPLQLTILVPLQEYQEKILSKTALPEDQKQQLKTLFVKYDNLWQHWENQVGHRKIRPHNIATGDYPPRPQKQYPINPKAKPSIQIVIDDLLKQGVLTPQNSTMNTPVYPVPKPDGRWRMVLDYREVNKTIPLTAAQNQHSAGILATIVRQKYKTTLDLANGFWAHPITPESYWLTAFTWQGKQYCWTRLPQGFLNSPALFNADVVDLLKEIPNVQVYVDDIYLSHDDPKEHVQQLEKVFQILLQAGYVVSLKKSEIGQKTVEFLGFNITKEGRGLTDTFKTKLLNITPPKDLKQLQSILGKLNFARNFIPNFAELVQPLYNLIAPAKGKYIEWSEENTKQLNMVIEALNTASNLEERLPEQRLVIKVNTSPSAGYVRYYNETGKKPIMYLNYVFSKAELKFSMLEKLLTTMHKALIKAMDLAMGQEILVYSPIVSMTKIQKTPLPERKALPIRWITWMTYLEDPRIQFHYDKTLPELKHIPDVYTSSQSPVKHPSQYEGVFYTDGSAIKSPDPTKSNNAGMGIVHATYKPEYQVLNQWSIPLGNHTAQMAEIAAVEFACKKALKIPGPVLVITDSFYVAESANKELPYWKSNGFVNNKKKPLKHISKWKSIAECLSMKPDITIQHEKGISLQIPVFILKGNALADKLATQGSYVVNAGKRTADGSEFEKRTADGSEFESPKKKAKVE

SEQ ID NO: 1347 - protein, 2185 aa, synthetic construct
MPAAKRVKLDGGDKKYSIGLDIGTNSVGWAVITDEYKVPSKKFKVLGNTDRHSIKKNLIGALLFDSGETAEATRLKRTARRRYTRRKNRICYLQEIFSNEMAKVDDSFFHRLEESFLVEEDKKHERHPIFGNIVDEVAYHEKYPTIYHLRKKLVDSTDKADLRLIYLALAHMIKFRGHFLIEGDLNPDNSDVDKLFIQLVQTYNQLFEENPINASGVDAKAILSARLSKSRRLENLIAQLPGEKKNGLFGNLIALSLGLTPNFKSNFDLAEDAKLQLSKDTYDDDLDNLLAQIGDQYADLFLAAKNLSDAILLSDILRVNTEITKAPLSASMIKRYDEHHQDLTLLKALVRQQLPEKYKEIFFDQSKNGYAGYIDGGASQEEFYKFIKPILEKMDGTEELLVKLNREDLLRKQRTFDNGSIPHQIHLGELHAILRRQEDFYPFLKDNREKIEKILTFRIPYYVGPLARGNSRFAWMTRKSEETITPWNFEEVVDKGASAQSFIERMTNFDKNLPNEKVLPKHSLLYEYFTVYNELTKVKYVTEGMRKPAFLSGEQKKAIVDLLFKTNRKVTVKQLKEDYFKKIECFDSVEISGVEDRFNASLGTYHDLLKIIKDKDFLDNEENEDILEDIVLTLTLFEDREMIEERLKTYAHLFDDKVMKQLKRRRYTGWGRLSRKLINGIRDKQSGKTILDFLKSDGFANRNFMQLIHDDSLTFKEDIQKAQVSGQGDSLHEHIANLAGSPAIKKGILQTVKVVDELVKVMGRHKPENIVIEMARENQTTQKGQKNSRERMKRIEEGIKELGSQILKEHPVENTQLQNEKLYLYYLQNGRDMYVDQELDINRLSDYDVDHIVPQSFLKDDSIDNKVLTRSDKARGKSDNVPSEEVVKKMKNYWRQLLNAKLITQRKFDNLTKAERGGLSELDKAGFIKRQLVETRQITKHVAQILDSRMNTKYDENDKLIREVKVITLKSKLVSDFRKDFQFYKVREINNYHHAHDAYLNAVVGTALIKKYPKLESEFVYGDYKVYDVRKMIAKSEQEIGKATAKYFFYSNIMNFFKTEITLANGEIRKRPLIETNGETGEIVWDKGRDFATVRKVLSMPQVNIVKKTEVQTGGFSKESILPKRNSDKLIARKKDWDPKKYGGFDSPTVAYSVLVVAKVEKGKSKKLKSVKELLGITIMERSSFEKNPIDFLEAKGYKEVKKDLIIKLPKYSLFELENGRKRMLASAGELQKGNELALPSKYVNFLYLASHYEKLKGSPEDNEQKQLFVEQHKHYLDEIIEQISEFSKRVILADANLDKVLSAYNKHRDKPIREQAENIIHLFTLTNLGAPAAFKYFDTTIDRKRYTSTKEVLDATLIHQSITGLYETRIDLSQLGGDGGEAAAKEAAAKEAAAKEAAAKGGMNPLQLLQPLPAEIKGTKLLAHWNSGATITCIPESFLEDEQPIKKTLIKTIHGEKQQNVYYVTFKVKGRKVEAEVIASPYEYILLSPTDVPWLTQQPLQLTILVPLQEYQEKILSKTALPEDQKQQLKTLFVKYDNLWQHWENQVGHRKIRPHNIATGDYPPRPQKQYPINPKAKPSIQIVIDDLLKQGVLTPQNSTMNTPVYPVPKPDGRWRMVLDYREVNKTIPLTAAQNQHSAGILATIVRQKYKTTLDLANGFWAHPITPESYWLTAFTWQGKQYCWTRLPQGFLNSPALFNADVVDLLKEIPNVQVYVDDIYLSHDDPKEHVQQLEKVFQILLQAGYVVSLKKSEIGQKTVEFLGFNITKEGRGLTDTFKTKLLNITPPKDLKQLQSILGKLNFARNFIPNFAELVQPLYNLIAPAKGKYIEWSEENTKQLNMVIEALNTASNLEERLPEQRLVIKVNTSPSAGYVRYYNETGKKPIMYLNYVFSKAELKFSMLEKLLTTMHKALIKAMDLAMGQEILVYSPIVSMTKIQKTPLPERKALPIRWITWMTYLEDPRIQFHYDKTLPELKHIPDVYTSSQSPVKHPSQYEGVFYTDGSAIKSPDPTKSNNAGMGIVHATYKPEYQVLNQWSIPLGNHTAQMAEIAAVEFACKKALKIPGPVLVITDSFYVAESANKELPYWKSNGFVNNKKKPLKHISKWKSIAECLSMKPDITIQHEKGISLQIPVFILKGNALADKLATQGSYVVNAGKRTADGSEFEKRTADGSEFESPKKKAKVE

SEQ ID NO: 1348 - protein, 2176 aa, synthetic construct
MPAAKRVKLDGGDKKYSIGLDIGTNSVGWAVITDEYKVPSKKFKVLGNTDRHSIKKNLIGALLFDSGETAEATRLKRTARRRYTRRKNRICYLQEIFSNEMAKVDDSFFHRLEESFLVEEDKKHERHPIFGNIVDEVAYHEKYPTIYHLRKKLVDSTDKADLRLIYLALAHMIKFRGHFLIEGDLNPDNSDVDKLFIQLVQTYNQLFEENPINASGVDAKAILSARLSKSRRLENLIAQLPGEKKNGLFGNLIALSLGLTPNFKSNFDLAEDAKLQLSKDTYDDDLDNLLAQIGDQYADLFLAAKNLSDAILLSDILRVNTEITKAPLSASMIKRYDEHHQDLTLLKALVRQQLPEKYKEIFFDQSKNGYAGYIDGGASQEEFYKFIKPILEKMDGTEELLVKLNREDLLRKQRTFDNGSIPHQIHLGELHAILRRQEDFYPFLKDNREKIEKILTFRIPYYVGPLARGNSRFAWMTRKSEETITPWNFEEVVDKGASAQSFIERMTNFDKNLPNEKVLPKHSLLYEYFTVYNELTKVKYVTEGMRKPAFLSGEQKKAIVDLLFKTNRKVTVKQLKEDYFKKIECFDSVEISGVEDRFNASLGTYHDLLKIIKDKDFLDNEENEDILEDIVLTLTLFEDREMIEERLKTYAHLFDDKVMKQLKRRRYTGWGRLSRKLINGIRDKQSGKTILDFLKSDGFANRNFMQLIHDDSLTFKEDIQKAQVSGQGDSLHEHIANLAGSPAIKKGILQTVKVVDELVKVMGRHKPENIVIEMARENQTTQKGQKNSRERMKRIEEGIKELGSQILKEHPVENTQLQNEKLYLYYLQNGRDMYVDQELDINRLSDYDVDHIVPQSFLKDDSIDNKVLTRSDKARGKSDNVPSEEVVKKMKNYWRQLLNAKLITQRKFDNLTKAERGGLSELDKAGFIKRQLVETRQITKHVAQILDSRMNTKYDENDKLIREVKVITLKSKLVSDFRKDFQFYKVREINNYHHAHDAYLNAVVGTALIKKYPKLESEFVYGDYKVYDVRKMIAKSEQEIGKATAKYFFYSNIMNFFKTEITLANGEIRKRPLIETNGETGEIVWDKGRDFATVRKVLSMPQVNIVKKTEVQTGGFSKESILPKRNSDKLIARKKDWDPKKYGGFDSPTVAYSVLVVAKVEKGKSKKLKSVKELLGITIMERSSFEKNPIDFLEAKGYKEVKKDLIIKLPKYSLFELENGRKRMLASAGELQKGNELALPSKYVNFLYLASHYEKLKGSPEDNEQKQLFVEQHKHYLDEIIEQISEFSKRVILADANLDKVLSAYNKHRDKPIREQAENIIHLFTLTNLGAPAAFKYFDTTIDRKRYTSTKEVLDATLIHQSITGLYETRIDLSQLGGDGGGGSPAPEAAAKGGMNPLQLLQPLPAEIKGTKLLAHWNSGATITCIPESFLEDEQPIKKTLIKTIHGEKQQNVYYVTFKVKGRKVEAEVIASPYEYILLSPTDVPWLTQQPLQLTILVPLQEYQEKILSKTALPEDQKQQLKTLFVKYDNLWQHWENQVGHRKIRPHNIATGDYPPRPQKQYPINPKAKPSIQIVIDDLLKQGVLTPQNSTMNTPVYPVPKPDGRWRMVLDYREVNKTIPLTAAQNQHSAGILATIVRQKYKTTLDLANGFWAHPITPESYWLTAFTWQGKQYCWTRLPQGFLNSPALFNADVVDLLKEIPNVQVYVDDIYLSHDDPKEHVQQLEKVFQILLQAGYVVSLKKSEIGQKTVEFLGFNITKEGRGLTDTFKTKLLNITPPKDLKQLQSILGKLNFARNFIPNFAELVQPLYNLIAPAKGKYIEWSEENTKQLNMVIEALNTASNLEERLPEQRLVIKVNTSPSAGYVRYYNETGKKPIMYLNYVFSKAELKFSMLEKLLTTMHKALIKAMDLAMGQEILVYSPIVSMTKIQKTPLPERKALPIRWITWMTYLEDPRIQFHYDKTLPELKHIPDVYTSSQSPVKHPSQYEGVFYTDGSAIKSPDPTKSNNAGMGIVHATYKPEYQVLNQWSIPLGNHTAQMAEIAAVEFACKKALKIPGPVLVITDSFYVAESANKELPYWKSNGFVNNKKKPLKHISKWKSIAECLSMKPDITIQHEKGISLQIPVFILKGNALADKLATQGSYVVNAGKRTADGSEFEKRTADGSEFESPKKKAKVE

SEQ ID NO: 1349 - protein, 2177 aa, synthetic construct
MPAAKRVKLDGGDKKYSIGLDIGTNSVGWAVITDEYKVPSKKFKVLGNTDRHSIKKNLIGALLFDSGETAEATRLKRTARRRYTRRKNRICYLQEIFSNEMAKVDDSFFHRLEESFLVEEDKKHERHPIFGNIVDEVAYHEKYPTIYHLRKKLVDSTDKADLRLIYLALAHMIKFRGHFLIEGDLNPDNSDVDKLFIQLVQTYNQLFEENPINASGVDAKAILSARLSKSRRLENLIAQLPGEKKNGLFGNLIALSLGLTPNFKSNFDLAEDAKLQLSKDTYDDDLDNLLAQIGDQYADLFLAAKNLSDAILLSDILRVNTEITKAPLSASMIKRYDEHHQDLTLLKALVRQQLPEKYKEIFFDQSKNGYAGYIDGGASQEEFYKFIKPILEKMDGTEELLVKLNREDLLRKQRTFDNGSIPHQIHLGELHAILRRQEDFYPFLKDNREKIEKILTFRIPYYVGPLARGNSRFAWMTRKSEETITPWNFEEVVDKGASAQSFIERMTNFDKNLPNEKVLPKHSLLYEYFTVYNELTKVKYVTEGMRKPAFLSGEQKKAIVDLLFKTNRKVTVKQLKEDYFKKIECFDSVEISGVEDRFNASLGTYHDLLKIIKDKDFLDNEENEDILEDIVLTLTLFEDREMIEERLKTYAHLFDDKVMKQLKRRRYTGWGRLSRKLINGIRDKQSGKTILDFLKSDGFANRNFMQLIHDDSLTFKEDIQKAQVSGQGDSLHEHIANLAGSPAIKKGILQTVKVVDELVKVMGRHKPENIVIEMARENQTTQKGQKNSRERMKRIEEGIKELGSQILKEHPVENTQLQNEKLYLYYLQNGRDMYVDQELDINRLSDYDVDHIVPQSFLKDDSIDNKVLTRSDKARGKSDNVPSEEVVKKMKNYWRQLLNAKLITQRKFDNLTKAERGGLSELDKAGFIKRQLVETRQITKHVAQILDSRMNTKYDENDKLIREVKVITLKSKLVSDFRKDFQFYKVREINNYHHAHDAYLNAVVGTALIKKYPKLESEFVYGDYKVYDVRKMIAKSEQEIGKATAKYFFYSNIMNFFKTEITLANGEIRKRPLIETNGETGEIVWDKGRDFATVRKVLSMPQVNIVKKTEVQTGGFSKESILPKRNSDKLIARKKDWDPKKYGGFDSPTVAYSVLVVAKVEKGKSKKLKSVKELLGITIMERSSFEKNPIDFLEAKGYKEVKKDLIIKLPKYSLFELENGRKRMLASAGELQKGNELALPSKYVNFLYLASHYEKLKGSPEDNEQKQLFVEQHKHYLDEIIEQISEFSKRVILADANLDKVLSAYNKHRDKPIREQAENIIHLFTLTNLGAPAAFKYFDTTIDRKRYTSTKEVLDATLIHQSITGLYETRIDLSQLGGDGGGSAGSAAGSGEFGGMNPLQLLQPLPAEIKGTKLLAHWNSGATITCIPESFLEDEQPIKKTLIKTIHGEKQQNVYYVTFKVKGRKVEAEVIASPYEYILLSPTDVPWLTQQPLQLTILVPLQEYQEKILSKTALPEDQKQQLKTLFVKYDNLWQHWENQVGHRKIRPHNIATGDYPPRPQKQYPINPKAKPSIQIVIDDLLKQGVLTPQNSTMNTPVYPVPKPDGRWRMVLDYREVNKTIPLTAAQNQHSAGILATIVRQKYKTTLDLANGFWAHPITPESYWLTAFTWQGKQYCWTRLPQGFLNSPALFNADVVDLLKEIPNVQVYVDDIYLSHDDPKEHVQQLEKVFQILLQAGYVVSLKKSEIGQKTVEFLGFNITKEGRGLTDTFKTKLLNITPPKDLKQLQSILGKLNFARNFIPNFAELVQPLYNLIAPAKGKYIEWSEENTKQLNMVIEALNTASNLEERLPEQRLVIKVNTSPSAGYVRYYNETGKKPIMYLNYVFSKAELKFSMLEKLLTTMHKALIKAMDLAMGQEILVYSPIVSMTKIQKTPLPERKALPIRWITWMTYLEDPRIQFHYDKTLPELKHIPDVYTSSQSPVKHPSQYEGVFYTDGSAIKSPDPTKSNNAGMGIVHATYKPEYQVLNQWSIPLGNHTAQMAEIAAVEFACKKALKIPGPVLVITDSFYVAESANKELPYWKSNGFVNNKKKPLKHISKWKSIAECLSMKPDITIQHEKGISLQIPVFILKGNALADKLATQGSYVVNAGKRTADGSEFEKRTADGSEFESPKKKAKVE

SEQ ID NO: 1350 - protein, 2173 aa, synthetic construct
MPAAKRVKLDGGDKKYSIGLDIGTNSVGWAVITDEYKVPSKKFKVLGNTDRHSIKKNLIGALLFDSGETAEATRLKRTARRRYTRRKNRICYLQEIFSNEMAKVDDSFFHRLEESFLVEEDKKHERHPIFGNIVDEVAYHEKYPTIYHLRKKLVDSTDKADLRLIYLALAHMIKFRGHFLIEGDLNPDNSDVDKLFIQLVQTYNQLFEENPINASGVDAKAILSARLSKSRRLENLIAQLPGEKKNGLFGNLIALSLGLTPNFKSNFDLAEDAKLQLSKDTYDDDLDNLLAQIGDQYADLFLAAKNLSDAILLSDILRVNTEITKAPLSASMIKRYDEHHQDLTLLKALVRQQLPEKYKEIFFDQSKNGYAGYIDGGASQEEFYKFIKPILEKMDGTEELLVKLNREDLLRKQRTFDNGSIPHQIHLGELHAILRRQEDFYPFLKDNREKIEKILTFRIPYYVGPLARGNSRFAWMTRKSEETITPWNFEEVVDKGASAQSFIERMTNFDKNLPNEKVLPKHSLLYEYFTVYNELTKVKYVTEGMRKPAFLSGEQKKAIVDLLFKTNRKVTVKQLKEDYFKKIECFDSVEISGVEDRFNASLGTYHDLLKIIKDKDFLDNEENEDILEDIVLTLTLFEDREMIEERLKTYAHLFDDKVMKQLKRRRYTGWGRLSRKLINGIRDKQSGKTILDFLKSDGFANRNFMQLIHDDSLTFKEDIQKAQVSGQGDSLHEHIANLAGSPAIKKGILQTVKVVDELVKVMGRHKPENIVIEMARENQTTQKGQKNSRERMKRIEEGIKELGSQILKEHPVENTQLQNEKLYLYYLQNGRDMYVDQELDINRLSDYDVDHIVPQSFLKDDSIDNKVLTRSDKARGKSDNVPSEEVVKKMKNYWRQLLNAKLITQRKFDNLTKAERGGLSELDKAGFIKRQLVETRQITKHVAQILDSRMNTKYDENDKLIREVKVITLKSKLVSDFRKDFQFYKVREINNYHHAHDAYLNAVVGTALIKKYPKLESEFVYGDYKVYDVRKMIAKSEQEIGKATAKYFFYSNIMNFFKTEITLANGEIRKRPLIETNGETGEIVWDKGRDFATVRKVLSMPQVNIVKKTEVQTGGFSKESILPKRNSDKLIARKKDWDPKKYGGFDSPTVAYSVLVVAKVEKGKSKKLKSVKELLGITIMERSSFEKNPIDFLEAKGYKEVKKDLIIKLPKYSLFELENGRKRMLASAGELQKGNELALPSKYVNFLYLASHYEKLKGSPEDNEQKQLFVEQHKHYLDEIIEQISEFSKRVILADANLDKVLSAYNKHRDKPIREQAENIIHLFTLTNLGAPAAFKYFDTTIDRKRYTSTKEVLDATLIHQSITGLYETRIDLSQLGGDGGGGGEAAAKGGMNPLQLLQPLPAEIKGTKLLAHWNSGATITCIPESFLEDEQPIKKTLIKTIHGEKQQNVYYVTFKVKGRKVEAEVIASPYEYILLSPTDVPWLTQQPLQLTILVPLQEYQEKILSKTALPEDQKQQLKTLFVKYDNLWQHWENQVGHRKIRPHNIATGDYPPRPQKQYPINPKAKPSIQIVIDDLLKQGVLTPQNSTMNTPVYPVPKPDGRWRMVLDYREVNKTIPLTAAQNQHSAGILATIVRQKYKTTLDLANGFWAHPITPESYWLTAFTWQGKQYCWTRLPQGFLNSPALFNADVVDLLKEIPNVQVYVDDIYLSHDDPKEHVQQLEKVFQILLQAGYVVSLKKSEIGQKTVEFLGFNITKEGRGLTDTFKTKLLNITPPKDLKQLQSILGKLNFARNFIPNFAELVQPLYNLIAPAKGKYIEWSEENTKQLNMVIEALNTASNLEERLPEQRLVIKVNTSPSAGYVRYYNETGKKPIMYLNYVFSKAELKFSMLEKLLTTMHKALIKAMDLAMGQEILVYSPIVSMTKIQKTPLPERKALPIRWITWMTYLEDPRIQFHYDKTLPELKHIPDVYTSSQSPVKHPSQYEGVFYTDGSAIKSPDPTKSNNAGMGIVHATYKPEYQVLNQWSIPLGNHTAQMAEIAAVEFACKKALKIPGPVLVITDSFYVAESANKELPYWKSNGFVNNKKKPLKHISKWKSIAECLSMKPDITIQHEKGISLQIPVFILKGNALADKLATQGSYVVNAGKRTADGSEFEKRTADGSEFESPKKKAKVE

SEQ ID NO: 1351 - protein, 2176 aa, synthetic construct
MPAAKRVKLDGGDKKYSIGLDIGTNSVGWAVITDEYKVPSKKFKVLGNTDRHSIKKNLIGALLFDSGETAEATRLKRTARRRYTRRKNRICYLQEIFSNEMAKVDDSFFHRLEESFLVEEDKKHERHPIFGNIVDEVAYHEKYPTIYHLRKKLVDSTDKADLRLIYLALAHMIKFRGHFLIEGDLNPDNSDVDKLFIQLVQTYNQLFEENPINASGVDAKAILSARLSKSRRLENLIAQLPGEKKNGLFGNLIALSLGLTPNFKSNFDLAEDAKLQLSKDTYDDDLDNLLAQIGDQYADLFLAAKNLSDAILLSDILRVNTEITKAPLSASMIKRYDEHHQDLTLLKALVRQQLPEKYKEIFFDQSKNGYAGYIDGGASQEEFYKFIKPILEKMDGTEELLVKLNREDLLRKQRTFDNGSIPHQIHLGELHAILRRQEDFYPFLKDNREKIEKILTFRIPYYVGPLARGNSRFAWMTRKSEETITPWNFEEVVDKGASAQSFIERMTNFDKNLPNEKVLPKHSLLYEYFTVYNELTKVKYVTEGMRKPAFLSGEQKKAIVDLLFKTNRKVTVKQLKEDYFKKIECFDSVEISGVEDRFNASLGTYHDLLKIIKDKDFLDNEENEDILEDIVLTLTLFEDREMIEERLKTYAHLFDDKVMKQLKRRRYTGWGRLSRKLINGIRDKQSGKTILDFLKSDGFANRNFMQLIHDDSLTFKEDIQKAQVSGQGDSLHEHIANLAGSPAIKKGILQTVKVVDELVKVMGRHKPENIVIEMARENQTTQKGQKNSRERMKRIEEGIKELGSQILKEHPVENTQLQNEKLYLYYLQNGRDMYVDQELDINRLSDYDVDHIVPQSFLKDDSIDNKVLTRSDKARGKSDNVPSEEVVKKMKNYWRQLLNAKLITQRKFDNLTKAERGGLSELDKAGFIKRQLVETRQITKHVAQILDSRMNTKYDENDKLIREVKVITLKSKLVSDFRKDFQFYKVREINNYHHAHDAYLNAVVGTALIKKYPKLESEFVYGDYKVYDVRKMIAKSEQEIGKATAKYFFYSNIMNFFKTEITLANGEIRKRPLIETNGETGEIVWDKGRDFATVRKVLSMPQVNIVKKTEVQTGGFSKESILPKRNSDKLIARKKDWDPKKYGGFDSPTVAYSVLVVAKVEKGKSKKLKSVKELLGITIMERSSFEKNPIDFLEAKGYKEVKKDLIIKLPKYSLFELENGRKRMLASAGELQKGNELALPSKYVNFLYLASHYEKLKGSPEDNEQKQLFVEQHKHYLDEIIEQISEFSKRVILADANLDKVLSAYNKHRDKPIREQAENIIHLFTLTNLGAPAAFKYFDTTIDRKRYTSTKEVLDATLIHQSITGLYETRIDLSQLGGDGGGSSGGSEAAAKGGMNPLQLLQPLPAEIKGTKLLAHWNSGATITCIPESFLEDEQPIKKTLIKTIHGEKQQNVYYVTFKVKGRKVEAEVIASPYEYILLSPTDVPWLTQQPLQLTILVPLQEYQEKILSKTALPEDQKQQLKTLFVKYDNLWQHWENQVGHRKIRPHNIATGDYPPRPQKQYPINPKAKPSIQIVIDDLLKQGVLTPQNSTMNTPVYPVPKPDGRWRMVLDYREVNKTIPLTAAQNQHSAGILATIVRQKYKTTLDLANGFWAHPITPESYWLTAFTWQGKQYCWTRLPQGFLNSPALFNADVVDLLKEIPNVQVYVDDIYLSHDDPKEHVQQLEKVFQILLQAGYVVSLKKSEIGQKTVEFLGFNITKEGRGLTDTFKTKLLNITPPKDLKQLQSILGKLNFARNFIPNFAELVQPLYNLIAPAKGKYIEWSEENTKQLNMVIEALNTASNLEERLPEQRLVIKVNTSPSAGYVRYYNETGKKPIMYLNYVFSKAELKFSMLEKLLTTMHKALIKAMDLAMGQEILVYSPIVSMTKIQKTPLPERKALPIRWITWMTYLEDPRIQFHYDKTLPELKHIPDVYTSSQSPVKHPSQYEGVFYTDGSAIKSPDPTKSNNAGMGIVHATYKPEYQVLNQWSIPLGNHTAQMAEIAAVEFACKKALKIPGPVLVITDSFYVAESANKELPYWKSNGFVNNKKKPLKHISKWKSIAECLSMKPDITIQHEKGISLQIPVFILKGNALADKLATQGSYVVNAGKRTADGSEFEKRTADGSEFESPKKKAKVE

SEQ ID NO: 1352 - protein, 2174 aa, synthetic construct
MPAAKRVKLDGGDKKYSIGLDIGTNSVGWAVITDEYKVPSKKFKVLGNTDRHSIKKNLIGALLFDSGETAEATRLKRTARRRYTRRKNRICYLQEIFSNEMAKVDDSFFHRLEESFLVEEDKKHERHPIFGNIVDEVAYHEKYPTIYHLRKKLVDSTDKADLRLIYLALAHMIKFRGHFLIEGDLNPDNSDVDKLFIQLVQTYNQLFEENPINASGVDAKAILSARLSKSRRLENLIAQLPGEKKNGLFGNLIALSLGLTPNFKSNFDLAEDAKLQLSKDTYDDDLDNLLAQIGDQYADLFLAAKNLSDAILLSDILRVNTEITKAPLSASMIKRYDEHHQDLTLLKALVRQQLPEKYKEIFFDQSKNGYAGYIDGGASQEEFYKFIKPILEKMDGTEELLVKLNREDLLRKQRTFDNGSIPHQIHLGELHAILRRQEDFYPFLKDNREKIEKILTFRIPYYVGPLARGNSRFAWMTRKSEETITPWNFEEVVDKGASAQSFIERMTNFDKNLPNEKVLPKHSLLYEYFTVYNELTKVKYVTEGMRKPAFLSGEQKKAIVDLLFKTNRKVTVKQLKEDYFKKIECFDSVEISGVEDRFNASLGTYHDLLKIIKDKDFLDNEENEDILEDIVLTLTLFEDREMIEERLKTYAHLFDDKVMKQLKRRRYTGWGRLSRKLINGIRDKQSGKTILDFLKSDGFANRNFMQLIHDDSLTFKEDIQKAQVSGQGDSLHEHIANLAGSPAIKKGILQTVKVVDELVKVMGRHKPENIVIEMARENQTTQKGQKNSRERMKRIEEGIKELGSQILKEHPVENTQLQNEKLYLYYLQNGRDMYVDQELDINRLSDYDVDHIVPQSFLKDDSIDNKVLTRSDKARGKSDNVPSEEVVKKMKNYWRQLLNAKLITQRKFDNLTKAERGGLSELDKAGFIKRQLVETRQITKHVAQILDSRMNTKYDENDKLIREVKVITLKSKLVSDFRKDFQFYKVREINNYHHAHDAYLNAVVGTALIKKYPKLESEFVYGDYKVYDVRKMIAKSEQEIGKATAKYFFYSNIMNFFKTEITLANGEIRKRPLIETNGETGEIVWDKGRDFATVRKVLSMPQVNIVKKTEVQTGGFSKESILPKRNSDKLIARKKDWDPKKYGGFDSPTVAYSVLVVAKVEKGKSKKLKSVKELLGITIMERSSFEKNPIDFLEAKGYKEVKKDLIIKLPKYSLFELENGRKRMLASAGELQKGNELALPSKYVNFLYLASHYEKLKGSPEDNEQKQLFVEQHKHYLDEIIEQISEFSKRVILADANLDKVLSAYNKHRDKPIREQAENIIHLFTLTNLGAPAAFKYFDTTIDRKRYTSTKEVLDATLIHQSITGLYETRIDLSQLGGDGGGSSPAPGGSGGMNPLQLLQPLPAEIKGTKLLAHWNSGATITCIPESFLEDEQPIKKTLIKTIHGEKQQNVYYVTFKVKGRKVEAEVIASPYEYILLSPTDVPWLTQQPLQLTILVPLQEYQEKILSKTALPEDQKQQLKTLFVKYDNLWQHWENQVGHRKIRPHNIATGDYPPRPQKQYPINPKAKPSIQIVIDDLLKQGVLTPQNSTMNTPVYPVPKPDGRWRMVLDYREVNKTIPLTAAQNQHSAGILATIVRQKYKTTLDLANGFWAHPITPESYWLTAFTWQGKQYCWTRLPQGFLNSPALFNADVVDLLKEIPNVQVYVDDIYLSHDDPKEHVQQLEKVFQILLQAGYVVSLKKSEIGQKTVEFLGFNITKEGRGLTDTFKTKLLNITPPKDLKQLQSILGKLNFARNFIPNFAELVQPLYNLIAPAKGKYIEWSEENTKQLNMVIEALNTASNLEERLPEQRLVIKVNTSPSAGYVRYYNETGKKPIMYLNYVFSKAELKFSMLEKLLTTMHKALIKAMDLAMGQEILVYSPIVSMTKIQKTPLPERKALPIRWITWMTYLEDPRIQFHYDKTLPELKHIPDVYTSSQSPVKHPSQYEGVFYTDGSAIKSPDPTKSNNAGMGIVHATYKPEYQVLNQWSIPLGNHTAQMAEIAAVEFACKKALKIPGPVLVITDSFYVAESANKELPYWKSNGFVNNKKKPLKHISKWKSIAECLSMKPDITIQHEKGISLQIPVFILKGNALADKLATQGSYVVNAGKRTADGSEFEKRTADGSEFESPKKKAKVE

SEQ ID NO: 1353 - protein, 2176 aa, synthetic construct
MPAAKRVKLDGGDKKYSIGLDIGTNSVGWAVITDEYKVPSKKFKVLGNTDRHSIKKNLIGALLFDSGETAEATRLKRTARRRYTRRKNRICYLQEIFSNEMAKVDDSFFHRLEESFLVEEDKKHERHPIFGNIVDEVAYHEKYPTIYHLRKKLVDSTDKADLRLIYLALAHMIKFRGHFLIEGDLNPDNSDVDKLFIQLVQTYNQLFEENPINASGVDAKAILSARLSKSRRLENLIAQLPGEKKNGLFGNLIALSLGLTPNFKSNFDLAEDAKLQLSKDTYDDDLDNLLAQIGDQYADLFLAAKNLSDAILLSDILRVNTEITKAPLSASMIKRYDEHHQDLTLLKALVRQQLPEKYKEIFFDQSKNGYAGYIDGGASQEEFYKFIKPILEKMDGTEELLVKLNREDLLRKQRTFDNGSIPHQIHLGELHAILRRQEDFYPFLKDNREKIEKILTFRIPYYVGPLARGNSRFAWMTRKSEETITPWNFEEVVDKGASAQSFIERMTNFDKNLPNEKVLPKHSLLYEYFTVYNELTKVKYVTEGMRKPAFLSGEQKKAIVDLLFKTNRKVTVKQLKEDYFKKIECFDSVEISGVEDRFNASLGTYHDLLKIIKDKDFLDNEENEDILEDIVLTLTLFEDREMIEERLKTYAHLFDDKVMKQLKRRRYTGWGRLSRKLINGIRDKQSGKTILDFLKSDGFANRNFMQLIHDDSLTFKEDIQKAQVSGQGDSLHEHIANLAGSPAIKKGILQTVKVVDELVKVMGRHKPENIVIEMARENQTTQKGQKNSRERMKRIEEGIKELGSQILKEHPVENTQLQNEKLYLYYLQNGRDMYVDQELDINRLSDYDVDHIVPQSFLKDDSIDNKVLTRSDKARGKSDNVPSEEVVKKMKNYWRQLLNAKLITQRKFDNLTKAERGGLSELDKAGFIKRQLVETRQITKHVAQILDSRMNTKYDENDKLIREVKVITLKSKLVSDFRKDFQFYKVREINNYHHAHDAYLNAVVGTALIKKYPKLESEFVYGDYKVYDVRKMIAKSEQEIGKATAKYFFYSNIMNFFKTEITLANGEIRKRPLIETNGETGEIVWDKGRDFATVRKVLSMPQVNIVKKTEVQTGGFSKESILPKRNSDKLIARKKDWDPKKYGGFDSPTVAYSVLVVAKVEKGKSKKLKSVKELLGITIMERSSFEKNPIDFLEAKGYKEVKKDLIIKLPKYSLFELENGRKRMLASAGELQKGNELALPSKYVNFLYLASHYEKLKGSPEDNEQKQLFVEQHKHYLDEIIEQISEFSKRVILADANLDKVLSAYNKHRDKPIREQAENIIHLFTLTNLGAPAAFKYFDTTIDRKRYTSTKEVLDATLIHQSITGLYETRIDLSQLGGDGGGSSPAPEAAAKGGMNPLQLLQPLPAEIKGTKLLAHWNSGATITCIPESFLEDEQPIKKTLIKTIHGEKQQNVYYVTFKVKGRKVEAEVIASPYEYILLSPTDVPWLTQQPLQLTILVPLQEYQEKILSKTALPEDQKQQLKTLFVKYDNLWQHWENQVGHRKIRPHNIATGDYPPRPQKQYPINPKAKPSIQIVIDDLLKQGVLTPQNSTMNTPVYPVPKPDGRWRMVLDYREVNKTIPLTAAQNQHSAGILATIVRQKYKTTLDLANGFWAHPITPESYWLTAFTWQGKQYCWTRLPQGFLNSPALFNADVVDLLKEIPNVQVYVDDIYLSHDDPKEHVQQLEKVFQILLQAGYVVSLKKSEIGQKTVEFLGFNITKEGRGLTDTFKTKLLNITPPKDLKQLQSILGKLNFARNFIPNFAELVQPLYNLIAPAKGKYIEWSEENTKQLNMVIEALNTASNLEERLPEQRLVIKVNTSPSAGYVRYYNETGKKPIMYLNYVFSKAELKFSMLEKLLTTMHKALIKAMDLAMGQEILVYSPIVSMTKIQKTPLPERKALPIRWITWMTYLEDPRIQFHYDKTLPELKHIPDVYTSSQSPVKHPSQYEGVFYTDGSAIKSPDPTKSNNAGMGIVHATYKPEYQVLNQWSIPLGNHTAQMAEIAAVEFACKKALKIPGPVLVITDSFYVAESANKELPYWKSNGFVNNKKKPLKHISKWKSIAECLSMKPDITIQHEKGISLQIPVFILKGNALADKLATQGSYVVNAGKRTADGSEFEKRTADGSEFESPKKKAKVE

SEQ ID NO: 1354 - protein, 2174 aa, synthetic construct
MPAAKRVKLDGGDKKYSIGLDIGTNSVGWAVITDEYKVPSKKFKVLGNTDRHSIKKNLIGALLFDSGETAEATRLKRTARRRYTRRKNRICYLQEIFSNEMAKVDDSFFHRLEESFLVEEDKKHERHPIFGNIVDEVAYHEKYPTIYHLRKKLVDSTDKADLRLIYLALAHMIKFRGHFLIEGDLNPDNSDVDKLFIQLVQTYNQLFEENPINASGVDAKAILSARLSKSRRLENLIAQLPGEKKNGLFGNLIALSLGLTPNFKSNFDLAEDAKLQLSKDTYDDDLDNLLAQIGDQYADLFLAAKNLSDAILLSDILRVNTEITKAPLSASMIKRYDEHHQDLTLLKALVRQQLPEKYKEIFFDQSKNGYAGYIDGGASQEEFYKFIKPILEKMDGTEELLVKLNREDLLRKQRTFDNGSIPHQIHLGELHAILRRQEDFYPFLKDNREKIEKILTFRIPYYVGPLARGNSRFAWMTRKSEETITPWNFEEVVDKGASAQSFIERMTNFDKNLPNEKVLPKHSLLYEYFTVYNELTKVKYVTEGMRKPAFLSGEQKKAIVDLLFKTNRKVTVKQLKEDYFKKIECFDSVEISGVEDRFNASLGTYHDLLKIIKDKDFLDNEENEDILEDIVLTLTLFEDREMIEERLKTYAHLFDDKVMKQLKRRRYTGWGRLSRKLINGIRDKQSGKTILDFLKSDGFANRNFMQLIHDDSLTFKEDIQKAQVSGQGDSLHEHIANLAGSPAIKKGILQTVKVVDELVKVMGRHKPENIVIEMARENQTTQKGQKNSRERMKRIEEGIKELGSQILKEHPVENTQLQNEKLYLYYLQNGRDMYVDQELDINRLSDYDVDHIVPQSFLKDDSIDNKVLTRSDKARGKSDNVPSEEVVKKMKNYWRQLLNAKLITQRKFDNLTKAERGGLSELDKAGFIKRQLVETRQITKHVAQILDSRMNTKYDENDKLIREVKVITLKSKLVSDFRKDFQFYKVREINNYHHAHDAYLNAVVGTALIKKYPKLESEFVYGDYKVYDVRKMIAKSEQEIGKATAKYFFYSNIMNFFKTEITLANGEIRKRPLIETNGETGEIVWDKGRDFATVRKVLSMPQVNIVKKTEVQTGGFSKESILPKRNSDKLIARKKDWDPKKYGGFDSPTVAYSVLVVAKVEKGKSKKLKSVKELLGITIMERSSFEKNPIDFLEAKGYKEVKKDLIIKLPKYSLFELENGRKRMLASAGELQKGNELALPSKYVNFLYLASHYEKLKGSPEDNEQKQLFVEQHKHYLDEIIEQISEFSKRVILADANLDKVLSAYNKHRDKPIREQAENIIHLFTLTNLGAPAAFKYFDTTIDRKRYTSTKEVLDATLIHQSITGLYETRIDLSQLGGDGGGGSGGGPAPGGMNPLQLLQPLPAEIKGTKLLAHWNSGATITCIPESFLEDEQPIKKTLIKTIHGEKQQNVYYVTFKVKGRKVEAEVIASPYEYILLSPTDVPWLTQQPLQLTILVPLQEYQEKILSKTALPEDQKQQLKTLFVKYDNLWQHWENQVGHRKIRPHNIATGDYPPRPQKQYPINPKAKPSIQIVIDDLLKQGVLTPQNSTMNTPVYPVPKPDGRWRMVLDYREVNKTIPLTAAQNQHSAGILATIVRQKYKTTLDLANGFWAHPITPESYWLTAFTWQGKQYCWTRLPQGFLNSPALFNADVVDLLKEIPNVQVYVDDIYLSHDDPKEHVQQLEKVFQILLQAGYVVSLKKSEIGQKTVEFLGFNITKEGRGLTDTFKTKLLNITPPKDLKQLQSILGKLNFARNFIPNFAELVQPLYNLIAPAKGKYIEWSEENTKQLNMVIEALNTASNLEERLPEQRLVIKVNTSPSAGYVRYYNETGKKPIMYLNYVFSKAELKFSMLEKLLTTMHKALIKAMDLAMGQEILVYSPIVSMTKIQKTPLPERKALPIRWITWMTYLEDPRIQFHYDKTLPELKHIPDVYTSSQSPVKHPSQYEGVFYTDGSAIKSPDPTKSNNAGMGIVHATYKPEYQVLNQWSIPLGNHTAQMAEIAAVEFACKKALKIPGPVLVITDSFYVAESANKELPYWKSNGFVNNKKKPLKHISKWKSIAECLSMKPDITIQHEKGISLQIPVFILKGNALADKLATQGSYVVNAGKRTADGSEFEKRTADGSEFESPKKKAKVE

SEQ ID NO: 1355 - protein, 2176 aa, synthetic construct
MPAAKRVKLDGGDKKYSIGLDIGTNSVGWAVITDEYKVPSKKFKVLGNTDRHSIKKNLIGALLFDSGETAEATRLKRTARRRYTRRKNRICYLQEIFSNEMAKVDDSFFHRLEESFLVEEDKKHERHPIFGNIVDEVAYHEKYPTIYHLRKKLVDSTDKADLRLIYLALAHMIKFRGHFLIEGDLNPDNSDVDKLFIQLVQTYNQLFEENPINASGVDAKAILSARLSKSRRLENLIAQLPGEKKNGLFGNLIALSLGLTPNFKSNFDLAEDAKLQLSKDTYDDDLDNLLAQIGDQYADLFLAAKNLSDAILLSDILRVNTEITKAPLSASMIKRYDEHHQDLTLLKALVRQQLPEKYKEIFFDQSKNGYAGYIDGGASQEEFYKFIKPILEKMDGTEELLVKLNREDLLRKQRTFDNGSIPHQIHLGELHAILRRQEDFYPFLKDNREKIEKILTFRIPYYVGPLARGNSRFAWMTRKSEETITPWNFEEVVDKGASAQSFIERMTNFDKNLPNEKVLPKHSLLYEYFTVYNELTKVKYVTEGMRKPAFLSGEQKKAIVDLLFKTNRKVTVKQLKEDYFKKIECFDSVEISGVEDRFNASLGTYHDLLKIIKDKDFLDNEENEDILEDIVLTLTLFEDREMIEERLKTYAHLFDDKVMKQLKRRRYTGWGRLSRKLINGIRDKQSGKTILDFLKSDGFANRNFMQLIHDDSLTFKEDIQKAQVSGQGDSLHEHIANLAGSPAIKKGILQTVKVVDELVKVMGRHKPENIVIEMARENQTTQKGQKNSRERMKRIEEGIKELGSQILKEHPVENTQLQNEKLYLYYLQNGRDMYVDQELDINRLSDYDVDHIVPQSFLKDDSIDNKVLTRSDKARGKSDNVPSEEVVKKMKNYWRQLLNAKLITQRKFDNLTKAERGGLSELDKAGFIKRQLVETRQITKHVAQILDSRMNTKYDENDKLIREVKVITLKSKLVSDFRKDFQFYKVREINNYHHAHDAYLNAVVGTALIKKYPKLESEFVYGDYKVYDVRKMIAKSEQEIGKATAKYFFYSNIMNFFKTEITLANGEIRKRPLIETNGETGEIVWDKGRDFATVRKVLSMPQVNIVKKTEVQTGGFSKESILPKRNSDKLIARKKDWDPKKYGGFDSPTVAYSVLVVAKVEKGKSKKLKSVKELLGITIMERSSFEKNPIDFLEAKGYKEVKKDLIIKLPKYSLFELENGRKRMLASAGELQKGNELALPSKYVNFLYLASHYEKLKGSPEDNEQKQLFVEQHKHYLDEIIEQISEFSKRVILADANLDKVLSAYNKHRDKPIREQAENIIHLFTLTNLGAPAAFKYFDTTIDRKRYTSTKEVLDATLIHQSITGLYETRIDLSQLGGDGGEAAAKGSSGGSGGMNPLQLLQPLPAEIKGTKLLAHWNSGATITCIPESFLEDEQPIKKTLIKTIHGEKQQNVYYVTFKVKGRKVEAEVIASPYEYILLSPTDVPWLTQQPLQLTILVPLQEYQEKILSKTALPEDQKQQLKTLFVKYDNLWQHWENQVGHRKIRPHNIATGDYPPRPQKQYPINPKAKPSIQIVIDDLLKQGVLTPQNSTMNTPVYPVPKPDGRWRMVLDYREVNKTIPLTAAQNQHSAGILATIVRQKYKTTLDLANGFWAHPITPESYWLTAFTWQGKQYCWTRLPQGFLNSPALFNADVVDLLKEIPNVQVYVDDIYLSHDDPKEHVQQLEKVFQILLQAGYVVSLKKSEIGQKTVEFLGFNITKEGRGLTDTFKTKLLNITPPKDLKQLQSILGKLNFARNFIPNFAELVQPLYNLIAPAKGKYIEWSEENTKQLNMVIEALNTASNLEERLPEQRLVIKVNTSPSAGYVRYYNETGKKPIMYLNYVFSKAELKFSMLEKLLTTMHKALIKAMDLAMGQEILVYSPIVSMTKIQKTPLPERKALPIRWITWMTYLEDPRIQFHYDKTLPELKHIPDVYTSSQSPVKHPSQYEGVFYTDGSAIKSPDPTKSNNAGMGIVHATYKPEYQVLNQWSIPLGNHTAQMAEIAAVEFACKKALKIPGPVLVITDSFYVAESANKELPYWKSNGFVNNKKKPLKHISKWKSIAECLSMKPDITIQHEKGISLQIPVFILKGNALADKLATQGSYVVNAGKRTADGSEFEKRTADGSEFESPKKKAKVE

SEQ ID NO: 1356 - protein, 2172 aa, synthetic construct
MPAAKRVKLDGGDKKYSIGLDIGTNSVGWAVITDEYKVPSKKFKVLGNTDRHSIKKNLIGALLFDSGETAEATRLKRTARRRYTRRKNRICYLQEIFSNEMAKVDDSFFHRLEESFLVEEDKKHERHPIFGNIVDEVAYHEKYPTIYHLRKKLVDSTDKADLRLIYLALAHMIKFRGHFLIEGDLNPDNSDVDKLFIQLVQTYNQLFEENPINASGVDAKAILSARLSKSRRLENLIAQLPGEKKNGLFGNLIALSLGLTPNFKSNFDLAEDAKLQLSKDTYDDDLDNLLAQIGDQYADLFLAAKNLSDAILLSDILRVNTEITKAPLSASMIKRYDEHHQDLTLLKALVRQQLPEKYKEIFFDQSKNGYAGYIDGGASQEEFYKFIKPILEKMDGTEELLVKLNREDLLRKQRTFDNGSIPHQIHLGELHAILRRQEDFYPFLKDNREKIEKILTFRIPYYVGPLARGNSRFAWMTRKSEETITPWNFEEVVDKGASAQSFIERMTNFDKNLPNEKVLPKHSLLYEYFTVYNELTKVKYVTEGMRKPAFLSGEQKKAIVDLLFKTNRKVTVKQLKEDYFKKIECFDSVEISGVEDRFNASLGTYHDLLKIIKDKDFLDNEENEDILEDIVLTLTLFEDREMIEERLKTYAHLFDDKVMKQLKRRRYTGWGRLSRKLINGIRDKQSGKTILDFLKSDGFANRNFMQLIHDDSLTFKEDIQKAQVSGQGDSLHEHIANLAGSPAIKKGILQTVKVVDELVKVMGRHKPENIVIEMARENQTTQKGQKNSRERMKRIEEGIKELGSQILKEHPVENTQLQNEKLYLYYLQNGRDMYVDQELDINRLSDYDVDHIVPQSFLKDDSIDNKVLTRSDKARGKSDNVPSEEVVKKMKNYWRQLLNAKLITQRKFDNLTKAERGGLSELDKAGFIKRQLVETRQITKHVAQILDSRMNTKYDENDKLIREVKVITLKSKLVSDFRKDFQFYKVREINNYHHAHDAYLNAVVGTALIKKYPKLESEFVYGDYKVYDVRKMIAKSEQEIGKATAKYFFYSNIMNFFKTEITLANGEIRKRPLIETNGETGEIVWDKGRDFATVRKVLSMPQVNIVKKTEVQTGGFSKESILPKRNSDKLIARKKDWDPKKYGGFDSPTVAYSVLVVAKVEKGKSKKLKSVKELLGITIMERSSFEKNPIDFLEAKGYKEVKKDLIIKLPKYSLFELENGRKRMLASAGELQKGNELALPSKYVNFLYLASHYEKLKGSPEDNEQKQLFVEQHKHYLDEIIEQISEFSKRVILADANLDKVLSAYNKHRDKPIREQAENIIHLFTLTNLGAPAAFKYFDTTIDRKRYTSTKEVLDATLIHQSITGLYETRIDLSQLGGDGGGGGGGGGGGMNPLQLLQPLPAEIKGTKLLAHWNSGATITCIPESFLEDEQPIKKTLIKTIHGEKQQNVYYVTFKVKGRKVEAEVIASPYEYILLSPTDVPWLTQQPLQLTILVPLQEYQEKILSKTALPEDQKQQLKTLFVKYDNLWQHWENQVGHRKIRPHNIATGDYPPRPQKQYPINPKAKPSIQIVIDDLLKQGVLTPQNSTMNTPVYPVPKPDGRWRMVLDYREVNKTIPLTAAQNQHSAGILATIVRQKYKTTLDLANGFWAHPITPESYWLTAFTWQGKQYCWTRLPQGFLNSPALFNADVVDLLKEIPNVQVYVDDIYLSHDDPKEHVQQLEKVFQILLQAGYVVSLKKSEIGQKTVEFLGFNITKEGRGLTDTFKTKLLNITPPKDLKQLQSILGKLNFARNFIPNFAELVQPLYNLIAPAKGKYIEWSEENTKQLNMVIEALNTASNLEERLPEQRLVIKVNTSPSAGYVRYYNETGKKPIMYLNYVFSKAELKFSMLEKLLTTMHKALIKAMDLAMGQEILVYSPIVSMTKIQKTPLPERKALPIRWITWMTYLEDPRIQFHYDKTLPELKHIPDVYTSSQSPVKHPSQYEGVFYTDGSAIKSPDPTKSNNAGMGIVHATYKPEYQVLNQWSIPLGNHTAQMAEIAAVEFACKKALKIPGPVLVITDSFYVAESANKELPYWKSNGFVNNKKKPLKHISKWKSIAECLSMKPDITIQHEKGISLQIPVFILKGNALADKLATQGSYVVNAGKRTADGSEFEKRTADGSEFESPKKKAKVE

SEQ ID NO: 1357 - protein, 2176 aa, synthetic construct
MPAAKRVKLDGGDKKYSIGLDIGTNSVGWAVITDEYKVPSKKFKVLGNTDRHSIKKNLIGALLFDSGETAEATRLKRTARRRYTRRKNRICYLQEIFSNEMAKVDDSFFHRLEESFLVEEDKKHERHPIFGNIVDEVAYHEKYPTIYHLRKKLVDSTDKADLRLIYLALAHMIKFRGHFLIEGDLNPDNSDVDKLFIQLVQTYNQLFEENPINASGVDAKAILSARLSKSRRLENLIAQLPGEKKNGLFGNLIALSLGLTPNFKSNFDLAEDAKLQLSKDTYDDDLDNLLAQIGDQYADLFLAAKNLSDAILLSDILRVNTEITKAPLSASMIKRYDEHHQDLTLLKALVRQQLPEKYKEIFFDQSKNGYAGYIDGGASQEEFYKFIKPILEKMDGTEELLVKLNREDLLRKQRTFDNGSIPHQIHLGELHAILRRQEDFYPFLKDNREKIEKILTFRIPYYVGPLARGNSRFAWMTRKSEETITPWNFEEVVDKGASAQSFIERMTNFDKNLPNEKVLPKHSLLYEYFTVYNELTKVKYVTEGMRKPAFLSGEQKKAIVDLLFKTNRKVTVKQLKEDYFKKIECFDSVEISGVEDRFNASLGTYHDLLKIIKDKDFLDNEENEDILEDIVLTLTLFEDREMIEERLKTYAHLFDDKVMKQLKRRRYTGWGRLSRKLINGIRDKQSGKTILDFLKSDGFANRNFMQLIHDDSLTFKEDIQKAQVSGQGDSLHEHIANLAGSPAIKKGILQTVKVVDELVKVMGRHKPENIVIEMARENQTTQKGQKNSRERMKRIEEGIKELGSQILKEHPVENTQLQNEKLYLYYLQNGRDMYVDQELDINRLSDYDVDHIVPQSFLKDDSIDNKVLTRSDKARGKSDNVPSEEVVKKMKNYWRQLLNAKLITQRKFDNLTKAERGGLSELDKAGFIKRQLVETRQITKHVAQILDSRMNTKYDENDKLIREVKVITLKSKLVSDFRKDFQFYKVREINNYHHAHDAYLNAVVGTALIKKYPKLESEFVYGDYKVYDVRKMIAKSEQEIGKATAKYFFYSNIMNFFKTEITLANGEIRKRPLIETNGETGEIVWDKGRDFATVRKVLSMPQVNIVKKTEVQTGGFSKESILPKRNSDKLIARKKDWDPKKYGGFDSPTVAYSVLVVAKVEKGKSKKLKSVKELLGITIMERSSFEKNPIDFLEAKGYKEVKKDLIIKLPKYSLFELENGRKRMLASAGELQKGNELALPSKYVNFLYLASHYEKLKGSPEDNEQKQLFVEQHKHYLDEIIEQISEFSKRVILADANLDKVLSAYNKHRDKPIREQAENIIHLFTLTNLGAPAAFKYFDTTIDRKRYTSTKEVLDATLIHQSITGLYETRIDLSQLGGDGGGSSEAAAKGGSGGMNPLQLLQPLPAEIKGTKLLAHWNSGATITCIPESFLEDEQPIKKTLIKTIHGEKQQNVYYVTFKVKGRKVEAEVIASPYEYILLSPTDVPWLTQQPLQLTILVPLQEYQEKILSKTALPEDQKQQLKTLFVKYDNLWQHWENQVGHRKIRPHNIATGDYPPRPQKQYPINPKAKPSIQIVIDDLLKQGVLTPQNSTMNTPVYPVPKPDGRWRMVLDYREVNKTIPLTAAQNQHSAGILATIVRQKYKTTLDLANGFWAHPITPESYWLTAFTWQGKQYCWTRLPQGFLNSPALFNADVVDLLKEIPNVQVYVDDIYLSHDDPKEHVQQLEKVFQILLQAGYVVSLKKSEIGQKTVEFLGFNITKEGRGLTDTFKTKLLNITPPKDLKQLQSILGKLNFARNFIPNFAELVQPLYNLIAPAKGKYIEWSEENTKQLNMVIEALNTASNLEERLPEQRLVIKVNTSPSAGYVRYYNETGKKPIMYLNYVFSKAELKFSMLEKLLTTMHKALIKAMDLAMGQEILVYSPIVSMTKIQKTPLPERKALPIRWITWMTYLEDPRIQFHYDKTLPELKHIPDVYTSSQSPVKHPSQYEGVFYTDGSAIKSPDPTKSNNAGMGIVHATYKPEYQVLNQWSIPLGNHTAQMAEIAAVEFACKKALKIPGPVLVITDSFYVAESANKELPYWKSNGFVNNKKKPLKHISKWKSIAECLSMKPDITIQHEKGISLQIPVFILKGNALADKLATQGSYVVNAGKRTADGSEFEKRTADGSEFESPKKKAKVE

SEQ ID NO: 1358 - protein, 2171 aa, synthetic construct
MPAAKRVKLDGGDKKYSIGLDIGTNSVGWAVITDEYKVPSKKFKVLGNTDRHSIKKNLIGALLFDSGETAEATRLKRTARRRYTRRKNRICYLQEIFSNEMAKVDDSFFHRLEESFLVEEDKKHERHPIFGNIVDEVAYHEKYPTIYHLRKKLVDSTDKADLRLIYLALAHMIKFRGHFLIEGDLNPDNSDVDKLFIQLVQTYNQLFEENPINASGVDAKAILSARLSKSRRLENLIAQLPGEKKNGLFGNLIALSLGLTPNFKSNFDLAEDAKLQLSKDTYDDDLDNLLAQIGDQYADLFLAAKNLSDAILLSDILRVNTEITKAPLSASMIKRYDEHHQDLTLLKALVRQQLPEKYKEIFFDQSKNGYAGYIDGGASQEEFYKFIKPILEKMDGTEELLVKLNREDLLRKQRTFDNGSIPHQIHLGELHAILRRQEDFYPFLKDNREKIEKILTFRIPYYVGPLARGNSRFAWMTRKSEETITPWNFEEVVDKGASAQSFIERMTNFDKNLPNEKVLPKHSLLYEYFTVYNELTKVKYVTEGMRKPAFLSGEQKKAIVDLLFKTNRKVTVKQLKEDYFKKIECFDSVEISGVEDRFNASLGTYHDLLKIIKDKDFLDNEENEDILEDIVLTLTLFEDREMIEERLKTYAHLFDDKVMKQLKRRRYTGWGRLSRKLINGIRDKQSGKTILDFLKSDGFANRNFMQLIHDDSLTFKEDIQKAQVSGQGDSLHEHIANLAGSPAIKKGILQTVKVVDELVKVMGRHKPENIVIEMARENQTTQKGQKNSRERMKRIEEGIKELGSQILKEHPVENTQLQNEKLYLYYLQNGRDMYVDQELDINRLSDYDVDHIVPQSFLKDDSIDNKVLTRSDKARGKSDNVPSEEVVKKMKNYWRQLLNAKLITQRKFDNLTKAERGGLSELDKAGFIKRQLVETRQITKHVAQILDSRMNTKYDENDKLIREVKVITLKSKLVSDFRKDFQFYKVREINNYHHAHDAYLNAVVGTALIKKYPKLESEFVYGDYKVYDVRKMIAKSEQEIGKATAKYFFYSNIMNFFKTEITLANGEIRKRPLIETNGETGEIVWDKGRDFATVRKVLSMPQVNIVKKTEVQTGGFSKESILPKRNSDKLIARKKDWDPKKYGGFDSPTVAYSVLVVAKVEKGKSKKLKSVKELLGITIMERSSFEKNPIDFLEAKGYKEVKKDLIIKLPKYSLFELENGRKRMLASAGELQKGNELALPSKYVNFLYLASHYEKLKGSPEDNEQKQLFVEQHKHYLDEIIEQISEFSKRVILADANLDKVLSAYNKHRDKPIREQAENIIHLFTLTNLGAPAAFKYFDTTIDRKRYTSTKEVLDATLIHQSITGLYETRIDLSQLGGDGGPAPGSSGGMNPLQLLQPLPAEIKGTKLLAHWNSGATITCIPESFLEDEQPIKKTLIKTIHGEKQQNVYYVTFKVKGRKVEAEVIASPYEYILLSPTDVPWLTQQPLQLTILVPLQEYQEKILSKTALPEDQKQQLKTLFVKYDNLWQHWENQVGHRKIRPHNIATGDYPPRPQKQYPINPKAKPSIQIVIDDLLKQGVLTPQNSTMNTPVYPVPKPDGRWRMVLDYREVNKTIPLTAAQNQHSAGILATIVRQKYKTTLDLANGFWAHPITPESYWLTAFTWQGKQYCWTRLPQGFLNSPALFNADVVDLLKEIPNVQVYVDDIYLSHDDPKEHVQQLEKVFQILLQAGYVVSLKKSEIGQKTVEFLGFNITKEGRGLTDTFKTKLLNITPPKDLKQLQSILGKLNFARNFIPNFAELVQPLYNLIAPAKGKYIEWSEENTKQLNMVIEALNTASNLEERLPEQRLVIKVNTSPSAGYVRYYNETGKKPIMYLNYVFSKAELKFSMLEKLLTTMHKALIKAMDLAMGQEILVYSPIVSMTKIQKTPLPERKALPIRWITWMTYLEDPRIQFHYDKTLPELKHIPDVYTSSQSPVKHPSQYEGVFYTDGSAIKSPDPTKSNNAGMGIVHATYKPEYQVLNQWSIPLGNHTAQMAEIAAVEFACKKALKIPGPVLVITDSFYVAESANKELPYWKSNGFVNNKKKPLKHISKWKSIAECLSMKPDITIQHEKGISLQIPVFILKGNALADKLATQGSYVVNAGKRTADGSEFEKRTADGSEFESPKKKAKVE

SEQ ID NO: 1359 - protein, 2176 aa, synthetic construct
MPAAKRVKLDGGDKKYSIGLDIGTNSVGWAVITDEYKVPSKKFKVLGNTDRHSIKKNLIGALLFDSGETAEATRLKRTARRRYTRRKNRICYLQEIFSNEMAKVDDSFFHRLEESFLVEEDKKHERHPIFGNIVDEVAYHEKYPTIYHLRKKLVDSTDKADLRLIYLALAHMIKFRGHFLIEGDLNPDNSDVDKLFIQLVQTYNQLFEENPINASGVDAKAILSARLSKSRRLENLIAQLPGEKKNGLFGNLIALSLGLTPNFKSNFDLAEDAKLQLSKDTYDDDLDNLLAQIGDQYADLFLAAKNLSDAILLSDILRVNTEITKAPLSASMIKRYDEHHQDLTLLKALVRQQLPEKYKEIFFDQSKNGYAGYIDGGASQEEFYKFIKPILEKMDGTEELLVKLNREDLLRKQRTFDNGSIPHQIHLGELHAILRRQEDFYPFLKDNREKIEKILTFRIPYYVGPLARGNSRFAWMTRKSEETITPWNFEEVVDKGASAQSFIERMTNFDKNLPNEKVLPKHSLLYEYFTVYNELTKVKYVTEGMRKPAFLSGEQKKAIVDLLFKTNRKVTVKQLKEDYFKKIECFDSVEISGVEDRFNASLGTYHDLLKIIKDKDFLDNEENEDILEDIVLTLTLFEDREMIEERLKTYAHLFDDKVMKQLKRRRYTGWGRLSRKLINGIRDKQSGKTILDFLKSDGFANRNFMQLIHDDSLTFKEDIQKAQVSGQGDSLHEHIANLAGSPAIKKGILQTVKVVDELVKVMGRHKPENIVIEMARENQTTQKGQKNSRERMKRIEEGIKELGSQILKEHPVENTQLQNEKLYLYYLQNGRDMYVDQELDINRLSDYDVDHIVPQSFLKDDSIDNKVLTRSDKARGKSDNVPSEEVVKKMKNYWRQLLNAKLITQRKFDNLTKAERGGLSELDKAGFIKRQLVETRQITKHVAQILDSRMNTKYDENDKLIREVKVITLKSKLVSDFRKDFQFYKVREINNYHHAHDAYLNAVVGTALIKKYPKLESEFVYGDYKVYDVRKMIAKSEQEIGKATAKYFFYSNIMNFFKTEITLANGEIRKRPLIETNGETGEIVWDKGRDFATVRKVLSMPQVNIVKKTEVQTGGFSKESILPKRNSDKLIARKKDWDPKKYGGFDSPTVAYSVLVVAKVEKGKSKKLKSVKELLGITIMERSSFEKNPIDFLEAKGYKEVKKDLIIKLPKYSLFELENGRKRMLASAGELQKGNELALPSKYVNFLYLASHYEKLKGSPEDNEQKQLFVEQHKHYLDEIIEQISEFSKRVILADANLDKVLSAYNKHRDKPIREQAENIIHLFTLTNLGAPAAFKYFDTTIDRKRYTSTKEVLDATLIHQSITGLYETRIDLSQLGGDGGPAPEAAAKGGSGGMNPLQLLQPLPAEIKGTKLLAHWNSGATITCIPESFLEDEQPIKKTLIKTIHGEKQQNVYYVTFKVKGRKVEAEVIASPYEYILLSPTDVPWLTQQPLQLTILVPLQEYQEKILSKTALPEDQKQQLKTLFVKYDNLWQHWENQVGHRKIRPHNIATGDYPPRPQKQYPINPKAKPSIQIVIDDLLKQGVLTPQNSTMNTPVYPVPKPDGRWRMVLDYREVNKTIPLTAAQNQHSAGILATIVRQKYKTTLDLANGFWAHPITPESYWLTAFTWQGKQYCWTRLPQGFLNSPALFNADVVDLLKEIPNVQVYVDDIYLSHDDPKEHVQQLEKVFQILLQAGYVVSLKKSEIGQKTVEFLGFNITKEGRGLTDTFKTKLLNITPPKDLKQLQSILGKLNFARNFIPNFAELVQPLYNLIAPAKGKYIEWSEENTKQLNMVIEALNTASNLEERLPEQRLVIKVNTSPSAGYVRYYNETGKKPIMYLNYVFSKAELKFSMLEKLLTTMHKALIKAMDLAMGQEILVYSPIVSMTKIQKTPLPERKALPIRWITWMTYLEDPRIQFHYDKTLPELKHIPDVYTSSQSPVKHPSQYEGVFYTDGSAIKSPDPTKSNNAGMGIVHATYKPEYQVLNQWSIPLGNHTAQMAEIAAVEFACKKALKIPGPVLVITDSFYVAESANKELPYWKSNGFVNNKKKPLKHISKWKSIAECLSMKPDITIQHEKGISLQIPVFILKGNALADKLATQGSYVVNAGKRTADGSEFEKRTADGSEFESPKKKAKVE

SEQ ID NO: 1360 - protein, 2176 aa, synthetic construct
MPAAKRVKLDGGDKKYSIGLDIGTNSVGWAVITDEYKVPSKKFKVLGNTDRHSIKKNLIGALLFDSGETAEATRLKRTARRRYTRRKNRICYLQEIFSNEMAKVDDSFFHRLEESFLVEEDKKHERHPIFGNIVDEVAYHEKYPTIYHLRKKLVDSTDKADLRLIYLALAHMIKFRGHFLIEGDLNPDNSDVDKLFIQLVQTYNQLFEENPINASGVDAKAILSARLSKSRRLENLIAQLPGEKKNGLFGNLIALSLGLTPNFKSNFDLAEDAKLQLSKDTYDDDLDNLLAQIGDQYADLFLAAKNLSDAILLSDILRVNTEITKAPLSASMIKRYDEHHQDLTLLKALVRQQLPEKYKEIFFDQSKNGYAGYIDGGASQEEFYKFIKPILEKMDGTEELLVKLNREDLLRKQRTFDNGSIPHQIHLGELHAILRRQEDFYPFLKDNREKIEKILTFRIPYYVGPLARGNSRFAWMTRKSEETITPWNFEEVVDKGASAQSFIERMTNFDKNLPNEKVLPKHSLLYEYFTVYNELTKVKYVTEGMRKPAFLSGEQKKAIVDLLFKTNRKVTVKQLKEDYFKKIECFDSVEISGVEDRFNASLGTYHDLLKIIKDKDFLDNEENEDILEDIVLTLTLFEDREMIEERLKTYAHLFDDKVMKQLKRRRYTGWGRLSRKLINGIRDKQSGKTILDFLKSDGFANRNFMQLIHDDSLTFKEDIQKAQVSGQGDSLHEHIANLAGSPAIKKGILQTVKVVDELVKVMGRHKPENIVIEMARENQTTQKGQKNSRERMKRIEEGIKELGSQILKEHPVENTQLQNEKLYLYYLQNGRDMYVDQELDINRLSDYDVDHIVPQSFLKDDSIDNKVLTRSDKARGKSDNVPSEEVVKKMKNYWRQLLNAKLITQRKFDNLTKAERGGLSELDKAGFIKRQLVETRQITKHVAQILDSRMNTKYDENDKLIREVKVITLKSKLVSDFRKDFQFYKVREINNYHHAHDAYLNAVVGTALIKKYPKLESEFVYGDYKVYDVRKMIAKSEQEIGKATAKYFFYSNIMNFFKTEITLANGEIRKRPLIETNGETGEIVWDKGRDFATVRKVLSMPQVNIVKKTEVQTGGFSKESILPKRNSDKLIARKKDWDPKKYGGFDSPTVAYSVLVVAKVEKGKSKKLKSVKELLGITIMERSSFEKNPIDFLEAKGYKEVKKDLIIKLPKYSLFELENGRKRMLASAGELQKGNELALPSKYVNFLYLASHYEKLKGSPEDNEQKQLFVEQHKHYLDEIIEQISEFSKRVILADANLDKVLSAYNKHRDKPIREQAENIIHLFTLTNLGAPAAFKYFDTTIDRKRYTSTKEVLDATLIHQSITGLYETRIDLSQLGGDGGEAAAKGGGPAPGGMNPLQLLQPLPAEIKGTKLLAHWNSGATITCIPESFLEDEQPIKKTLIKTIHGEKQQNVYYVTFKVKGRKVEAEVIASPYEYILLSPTDVPWLTQQPLQLTILVPLQEYQEKILSKTALPEDQKQQLKTLFVKYDNLWQHWENQVGHRKIRPHNIATGDYPPRPQKQYPINPKAKPSIQIVIDDLLKQGVLTPQNSTMNTPVYPVPKPDGRWRMVLDYREVNKTIPLTAAQNQHSAGILATIVRQKYKTTLDLANGFWAHPITPESYWLTAFTWQGKQYCWTRLPQGFLNSPALFNADVVDLLKEIPNVQVYVDDIYLSHDDPKEHVQQLEKVFQILLQAGYVVSLKKSEIGQKTVEFLGFNITKEGRGLTDTFKTKLLNITPPKDLKQLQSILGKLNFARNFIPNFAELVQPLYNLIAPAKGKYIEWSEENTKQLNMVIEALNTASNLEERLPEQRLVIKVNTSPSAGYVRYYNETGKKPIMYLNYVFSKAELKFSMLEKLLTTMHKALIKAMDLAMGQEILVYSPIVSMTKIQKTPLPERKALPIRWITWMTYLEDPRIQFHYDKTLPELKHIPDVYTSSQSPVKHPSQYEGVFYTDGSAIKSPDPTKSNNAGMGIVHATYKPEYQVLNQWSIPLGNHTAQMAEIAAVEFACKKALKIPGPVLVITDSFYVAESANKELPYWKSNGFVNNKKKPLKHISKWKSIAECLSMKPDITIQHEKGISLQIPVFILKGNALADKLATQGSYVVNAGKRTADGSEFEKRTADGSEFESPKKKAKVE

SEQ ID NO: 1361 - protein, 2176 aa, synthetic construct
MPAAKRVKLDGGDKKYSIGLDIGTNSVGWAVITDEYKVPSKKFKVLGNTDRHSIKKNLIGALLFDSGETAEATRLKRTARRRYTRRKNRICYLQEIFSNEMAKVDDSFFHRLEESFLVEEDKKHERHPIFGNIVDEVAYHEKYPTIYHLRKKLVDSTDKADLRLIYLALAHMIKFRGHFLIEGDLNPDNSDVDKLFIQLVQTYNQLFEENPINASGVDAKAILSARLSKSRRLENLIAQLPGEKKNGLFGNLIALSLGLTPNFKSNFDLAEDAKLQLSKDTYDDDLDNLLAQIGDQYADLFLAAKNLSDAILLSDILRVNTEITKAPLSASMIKRYDEHHQDLTLLKALVRQQLPEKYKEIFFDQSKNGYAGYIDGGASQEEFYKFIKPILEKMDGTEELLVKLNREDLLRKQRTFDNGSIPHQIHLGELHAILRRQEDFYPFLKDNREKIEKILTFRIPYYVGPLARGNSRFAWMTRKSEETITPWNFEEVVDKGASAQSFIERMTNFDKNLPNEKVLPKHSLLYEYFTVYNELTKVKYVTEGMRKPAFLSGEQKKAIVDLLFKTNRKVTVKQLKEDYFKKIECFDSVEISGVEDRFNASLGTYHDLLKIIKDKDFLDNEENEDILEDIVLTLTLFEDREMIEERLKTYAHLFDDKVMKQLKRRRYTGWGRLSRKLINGIRDKQSGKTILDFLKSDGFANRNFMQLIHDDSLTFKEDIQKAQVSGQGDSLHEHIANLAGSPAIKKGILQTVKVVDELVKVMGRHKPENIVIEMARENQTTQKGQKNSRERMKRIEEGIKELGSQILKEHPVENTQLQNEKLYLYYLQNGRDMYVDQELDINRLSDYDVDHIVPQSFLKDDSIDNKVLTRSDKARGKSDNVPSEEVVKKMKNYWRQLLNAKLITQRKFDNLTKAERGGLSELDKAGFIKRQLVETRQITKHVAQILDSRMNTKYDENDKLIREVKVITLKSKLVSDFRKDFQFYKVREINNYHHAHDAYLNAVVGTALIKKYPKLESEFVYGDYKVYDVRKMIAKSEQEIGKATAKYFFYSNIMNFFKTEITLANGEIRKRPLIETNGETGEIVWDKGRDFATVRKVLSMPQVNIVKKTEVQTGGFSKESILPKRNSDKLIARKKDWDPKKYGGFDSPTVAYSVLVVAKVEKGKSKKLKSVKELLGITIMERSSFEKNPIDFLEAKGYKEVKKDLIIKLPKYSLFELENGRKRMLASAGELQKGNELALPSKYVNFLYLASHYEKLKGSPEDNEQKQLFVEQHKHYLDEIIEQISEFSKRVILADANLDKVLSAYNKHRDKPIREQAENIIHLFTLTNLGAPAAFKYFDTTIDRKRYTSTKEVLDATLIHQSITGLYETRIDLSQLGGDGGGSSEAAAKGGGGGMNPLQLLQPLPAEIKGTKLLAHWNSGATITCIPESFLEDEQPIKKTLIKTIHGEKQQNVYYVTFKVKGRKVEAEVIASPYEYILLSPTDVPWLTQQPLQLTILVPLQEYQEKILSKTALPEDQKQQLKTLFVKYDNLWQHWENQVGHRKIRPHNIATGDYPPRPQKQYPINPKAKPSIQIVIDDLLKQGVLTPQNSTMNTPVYPVPKPDGRWRMVLDYREVNKTIPLTAAQNQHSAGILATIVRQKYKTTLDLANGFWAHPITPESYWLTAFTWQGKQYCWTRLPQGFLNSPALFNADVVDLLKEIPNVQVYVDDIYLSHDDPKEHVQQLEKVFQILLQAGYVVSLKKSEIGQKTVEFLGFNITKEGRGLTDTFKTKLLNITPPKDLKQLQSILGKLNFARNFIPNFAELVQPLYNLIAPAKGKYIEWSEENTKQLNMVIEALNTASNLEERLPEQRLVIKVNTSPSAGYVRYYNETGKKPIMYLNYVFSKAELKFSMLEKLLTTMHKALIKAMDLAMGQEILVYSPIVSMTKIQKTPLPERKALPIRWITWMTYLEDPRIQFHYDKTLPELKHIPDVYTSSQSPVKHPSQYEGVFYTDGSAIKSPDPTKSNNAGMGIVHATYKPEYQVLNQWSIPLGNHTAQMAEIAAVEFACKKALKIPGPVLVITDSFYVAESANKELPYWKSNGFVNNKKKPLKHISKWKSIAECLSMKPDITIQHEKGISLQIPVFILKGNALADKLATQGSYVVNAGKRTADGSEFEKRTADGSEFESPKKKAKVE

SEQ ID NO: 1362 - protein, 2176 aa, synthetic construct
MPAAKRVKLDGGDKKYSIGLDIGTNSVGWAVITDEYKVPSKKFKVLGNTDRHSIKKNLIGALLFDSGETAEATRLKRTARRRYTRRKNRICYLQEIFSNEMAKVDDSFFHRLEESFLVEEDKKHERHPIFGNIVDEVAYHEKYPTIYHLRKKLVDSTDKADLRLIYLALAHMIKFRGHFLIEGDLNPDNSDVDKLFIQLVQTYNQLFEENPINASGVDAKAILSARLSKSRRLENLIAQLPGEKKNGLFGNLIALSLGLTPNFKSNFDLAEDAKLQLSKDTYDDDLDNLLAQIGDQYADLFLAAKNLSDAILLSDILRVNTEITKAPLSASMIKRYDEHHQDLTLLKALVRQQLPEKYKEIFFDQSKNGYAGYIDGGASQEEFYKFIKPILEKMDGTEELLVKLNREDLLRKQRTFDNGSIPHQIHLGELHAILRRQEDFYPFLKDNREKIEKILTFRIPYYVGPLARGNSRFAWMTRKSEETITPWNFEEVVDKGASAQSFIERMTNFDKNLPNEKVLPKHSLLYEYFTVYNELTKVKYVTEGMRKPAFLSGEQKKAIVDLLFKTNRKVTVKQLKEDYFKKIECFDSVEISGVEDRFNASLGTYHDLLKIIKDKDFLDNEENEDILEDIVLTLTLFEDREMIEERLKTYAHLFDDKVMKQLKRRRYTGWGRLSRKLINGIRDKQSGKTILDFLKSDGFANRNFMQLIHDDSLTFKEDIQKAQVSGQGDSLHEHIANLAGSPAIKKGILQTVKVVDELVKVMGRHKPENIVIEMARENQTTQKGQKNSRERMKRIEEGIKELGSQILKEHPVENTQLQNEKLYLYYLQNGRDMYVDQELDINRLSDYDVDHIVPQSFLKDDSIDNKVLTRSDKARGKSDNVPSEEVVKKMKNYWRQLLNAKLITQRKFDNLTKAERGGLSELDKAGFIKRQLVETRQITKHVAQILDSRMNTKYDENDKLIREVKVITLKSKLVSDFRKDFQFYKVREINNYHHAHDAYLNAVVGTALIKKYPKLESEFVYGDYKVYDVRKMIAKSEQEIGKATAKYFFYSNIMNFFKTEITLANGEIRKRPLIETNGETGEIVWDKGRDFATVRKVLSMPQVNIVKKTEVQTGGFSKESILPKRNSDKLIARKKDWDPKKYGGFDSPTVAYSVLVVAKVEKGKSKKLKSVKELLGITIMERSSFEKNPIDFLEAKGYKEVKKDLIIKLPKYSLFELENGRKRMLASAGELQKGNELALPSKYVNFLYLASHYEKLKGSPEDNEQKQLFVEQHKHYLDEIIEQISEFSKRVILADANLDKVLSAYNKHRDKPIREQAENIIHLFTLTNLGAPAAFKYFDTTIDRKRYTSTKEVLDATLIHQSITGLYETRIDLSQLGGDGGEAAAKGGGGSSGGMNPLQLLQPLPAEIKGTKLLAHWNSGATITCIPESFLEDEQPIKKTLIKTIHGEKQQNVYYVTFKVKGRKVEAEVIASPYEYILLSPTDVPWLTQQPLQLTILVPLQEYQEKILSKTALPEDQKQQLKTLFVKYDNLWQHWENQVGHRKIRPHNIATGDYPPRPQKQYPINPKAKPSIQIVIDDLLKQGVLTPQNSTMNTPVYPVPKPDGRWRMVLDYREVNKTIPLTAAQNQHSAGILATIVRQKYKTTLDLANGFWAHPITPESYWLTAFTWQGKQYCWTRLPQGFLNSPALFNADVVDLLKEIPNVQVYVDDIYLSHDDPKEHVQQLEKVFQILLQAGYVVSLKKSEIGQKTVEFLGFNITKEGRGLTDTFKTKLLNITPPKDLKQLQSILGKLNFARNFIPNFAELVQPLYNLIAPAKGKYIEWSEENTKQLNMVIEALNTASNLEERLPEQRLVIKVNTSPSAGYVRYYNETGKKPIMYLNYVFSKAELKFSMLEKLLTTMHKALIKAMDLAMGQEILVYSPIVSMTKIQKTPLPERKALPIRWITWMTYLEDPRIQFHYDKTLPELKHIPDVYTSSQSPVKHPSQYEGVFYTDGSAIKSPDPTKSNNAGMGIVHATYKPEYQVLNQWSIPLGNHTAQMAEIAAVEFACKKALKIPGPVLVITDSFYVAESANKELPYWKSNGFVNNKKKPLKHISKWKSIAECLSMKPDITIQHEKGISLQIPVFILKGNALADKLATQGSYVVNAGKRTADGSEFEKRTADGSEFESPKKKAKVE

SEQ ID NO: 1363 - protein, 2172 aa, synthetic construct
MPAAKRVKLDGGDKKYSIGLDIGTNSVGWAVITDEYKVPSKKFKVLGNTDRHSIKKNLIGALLFDSGETAEATRLKRTARRRYTRRKNRICYLQEIFSNEMAKVDDSFFHRLEESFLVEEDKKHERHPIFGNIVDEVAYHEKYPTIYHLRKKLVDSTDKADLRLIYLALAHMIKFRGHFLIEGDLNPDNSDVDKLFIQLVQTYNQLFEENPINASGVDAKAILSARLSKSRRLENLIAQLPGEKKNGLFGNLIALSLGLTPNFKSNFDLAEDAKLQLSKDTYDDDLDNLLAQIGDQYADLFLAAKNLSDAILLSDILRVNTEITKAPLSASMIKRYDEHHQDLTLLKALVRQQLPEKYKEIFFDQSKNGYAGYIDGGASQEEFYKFIKPILEKMDGTEELLVKLNREDLLRKQRTFDNGSIPHQIHLGELHAILRRQEDFYPFLKDNREKIEKILTFRIPYYVGPLARGNSRFAWMTRKSEETITPWNFEEVVDKGASAQSFIERMTNFDKNLPNEKVLPKHSLLYEYFTVYNELTKVKYVTEGMRKPAFLSGEQKKAIVDLLFKTNRKVTVKQLKEDYFKKIECFDSVEISGVEDRFNASLGTYHDLLKIIKDKDFLDNEENEDILEDIVLTLTLFEDREMIEERLKTYAHLFDDKVMKQLKRRRYTGWGRLSRKLINGIRDKQSGKTILDFLKSDGFANRNFMQLIHDDSLTFKEDIQKAQVSGQGDSLHEHIANLAGSPAIKKGILQTVKVVDELVKVMGRHKPENIVIEMARENQTTQKGQKNSRERMKRIEEGIKELGSQILKEHPVENTQLQNEKLYLYYLQNGRDMYVDQELDINRLSDYDVDHIVPQSFLKDDSIDNKVLTRSDKARGKSDNVPSEEVVKKMKNYWRQLLNAKLITQRKFDNLTKAERGGLSELDKAGFIKRQLVETRQITKHVAQILDSRMNTKYDENDKLIREVKVITLKSKLVSDFRKDFQFYKVREINNYHHAHDAYLNAVVGTALIKKYPKLESEFVYGDYKVYDVRKMIAKSEQEIGKATAKYFFYSNIMNFFKTEITLANGEIRKRPLIETNGETGEIVWDKGRDFATVRKVLSMPQVNIVKKTEVQTGGFSKESILPKRNSDKLIARKKDWDPKKYGGFDSPTVAYSVLVVAKVEKGKSKKLKSVKELLGITIMERSSFEKNPIDFLEAKGYKEVKKDLIIKLPKYSLFELENGRKRMLASAGELQKGNELALPSKYVNFLYLASHYEKLKGSPEDNEQKQLFVEQHKHYLDEIIEQISEFSKRVILADANLDKVLSAYNKHRDKPIREQAENIIHLFTLTNLGAPAAFKYFDTTIDRKRYTSTKEVLDATLIHQSITGLYETRIDLSQLGGDGGPAPAPAPGGMNPLQLLQPLPAEIKGTKLLAHWNSGATITCIPESFLEDEQPIKKTLIKTIHGEKQQNVYYVTFKVKGRKVEAEVIASPYEYILLSPTDVPWLTQQPLQLTILVPLQEYQEKILSKTALPEDQKQQLKTLFVKYDNLWQHWENQVGHRKIRPHNIATGDYPPRPQKQYPINPKAKPSIQIVIDDLLKQGVLTPQNSTMNTPVYPVPKPDGRWRMVLDYREVNKTIPLTAAQNQHSAGILATIVRQKYKTTLDLANGFWAHPITPESYWLTAFTWQGKQYCWTRLPQGFLNSPALFNADVVDLLKEIPNVQVYVDDIYLSHDDPKEHVQQLEKVFQILLQAGYVVSLKKSEIGQKTVEFLGFNITKEGRGLTDTFKTKLLNITPPKDLKQLQSILGKLNFARNFIPNFAELVQPLYNLIAPAKGKYIEWSEENTKQLNMVIEALNTASNLEERLPEQRLVIKVNTSPSAGYVRYYNETGKKPIMYLNYVFSKAELKFSMLEKLLTTMHKALIKAMDLAMGQEILVYSPIVSMTKIQKTPLPERKALPIRWITWMTYLEDPRIQFHYDKTLPELKHIPDVYTSSQSPVKHPSQYEGVFYTDGSAIKSPDPTKSNNAGMGIVHATYKPEYQVLNQWSIPLGNHTAQMAEIAAVEFACKKALKIPGPVLVITDSFYVAESANKELPYWKSNGFVNNKKKPLKHISKWKSIAECLSMKPDITIQHEKGISLQIPVFILKGNALADKLATQGSYVVNAGKRTADGSEFEKRTADGSEFESPKKKAKVE

SEQ ID NO: 1364 - protein, 2174 aa, synthetic construct
MPAAKRVKLDGGDKKYSIGLDIGTNSVGWAVITDEYKVPSKKFKVLGNTDRHSIKKNLIGALLFDSGETAEATRLKRTARRRYTRRKNRICYLQEIFSNEMAKVDDSFFHRLEESFLVEEDKKHERHPIFGNIVDEVAYHEKYPTIYHLRKKLVDSTDKADLRLIYLALAHMIKFRGHFLIEGDLNPDNSDVDKLFIQLVQTYNQLFEENPINASGVDAKAILSARLSKSRRLENLIAQLPGEKKNGLFGNLIALSLGLTPNFKSNFDLAEDAKLQLSKDTYDDDLDNLLAQIGDQYADLFLAAKNLSDAILLSDILRVNTEITKAPLSASMIKRYDEHHQDLTLLKALVRQQLPEKYKEIFFDQSKNGYAGYIDGGASQEEFYKFIKPILEKMDGTEELLVKLNREDLLRKQRTFDNGSIPHQIHLGELHAILRRQEDFYPFLKDNREKIEKILTFRIPYYVGPLARGNSRFAWMTRKSEETITPWNFEEVVDKGASAQSFIERMTNFDKNLPNEKVLPKHSLLYEYFTVYNELTKVKYVTEGMRKPAFLSGEQKKAIVDLLFKTNRKVTVKQLKEDYFKKIECFDSVEISGVEDRFNASLGTYHDLLKIIKDKDFLDNEENEDILEDIVLTLTLFEDREMIEERLKTYAHLFDDKVMKQLKRRRYTGWGRLSRKLINGIRDKQSGKTILDFLKSDGFANRNFMQLIHDDSLTFKEDIQKAQVSGQGDSLHEHIANLAGSPAIKKGILQTVKVVDELVKVMGRHKPENIVIEMARENQTTQKGQKNSRERMKRIEEGIKELGSQILKEHPVENTQLQNEKLYLYYLQNGRDMYVDQELDINRLSDYDVDHIVPQSFLKDDSIDNKVLTRSDKARGKSDNVPSEEVVKKMKNYWRQLLNAKLITQRKFDNLTKAERGGLSELDKAGFIKRQLVETRQITKHVAQILDSRMNTKYDENDKLIREVKVITLKSKLVSDFRKDFQFYKVREINNYHHAHDAYLNAVVGTALIKKYPKLESEFVYGDYKVYDVRKMIAKSEQEIGKATAKYFFYSNIMNFFKTEITLANGEIRKRPLIETNGETGEIVWDKGRDFATVRKVLSMPQVNIVKKTEVQTGGFSKESILPKRNSDKLIARKKDWDPKKYGGFDSPTVAYSVLVVAKVEKGKSKKLKSVKELLGITIMERSSFEKNPIDFLEAKGYKEVKKDLIIKLPKYSLFELENGRKRMLASAGELQKGNELALPSKYVNFLYLASHYEKLKGSPEDNEQKQLFVEQHKHYLDEIIEQISEFSKRVILADANLDKVLSAYNKHRDKPIREQAENIIHLFTLTNLGAPAAFKYFDTTIDRKRYTSTKEVLDATLIHQSITGLYETRIDLSQLGGDGGPAPAPAPAPGGMNPLQLLQPLPAEIKGTKLLAHWNSGATITCIPESFLEDEQPIKKTLIKTIHGEKQQNVYYVTFKVKGRKVEAEVIASPYEYILLSPTDVPWLTQQPLQLTILVPLQEYQEKILSKTALPEDQKQQLKTLFVKYDNLWQHWENQVGHRKIRPHNIATGDYPPRPQKQYPINPKAKPSIQIVIDDLLKQGVLTPQNSTMNTPVYPVPKPDGRWRMVLDYREVNKTIPLTAAQNQHSAGILATIVRQKYKTTLDLANGFWAHPITPESYWLTAFTWQGKQYCWTRLPQGFLNSPALFNADVVDLLKEIPNVQVYVDDIYLSHDDPKEHVQQLEKVFQILLQAGYVVSLKKSEIGQKTVEFLGFNITKEGRGLTDTFKTKLLNITPPKDLKQLQSILGKLNFARNFIPNFAELVQPLYNLIAPAKGKYIEWSEENTKQLNMVIEALNTASNLEERLPEQRLVIKVNTSPSAGYVRYYNETGKKPIMYLNYVFSKAELKFSMLEKLLTTMHKALIKAMDLAMGQEILVYSPIVSMTKIQKTPLPERKALPIRWITWMTYLEDPRIQFHYDKTLPELKHIPDVYTSSQSPVKHPSQYEGVFYTDGSAIKSPDPTKSNNAGMGIVHATYKPEYQVLNQWSIPLGNHTAQMAEIAAVEFACKKALKIPGPVLVITDSFYVAESANKELPYWKSNGFVNNKKKPLKHISKWKSIAECLSMKPDITIQHEKGISLQIPVFILKGNALADKLATQGSYVVNAGKRTADGSEFEKRTADGSEFESPKKKAKVE

SEQ ID NO: 1365 - protein, 2094 aa, synthetic construct
MPAAKRVKLDGGDKKYSIGLDIGTNSVGWAVITDEYKVPSKKFKVLGNTDRHSIKKNLIGALLFDSGETAEATRLKRTARRRYTRRKNRICYLQEIFSNEMAKVDDSFFHRLEESFLVEEDKKHERHPIFGNIVDEVAYHEKYPTIYHLRKKLVDSTDKADLRLIYLALAHMIKFRGHFLIEGDLNPDNSDVDKLFIQLVQTYNQLFEENPINASGVDAKAILSARLSKSRRLENLIAQLPGEKKNGLFGNLIALSLGLTPNFKSNFDLAEDAKLQLSKDTYDDDLDNLLAQIGDQYADLFLAAKNLSDAILLSDILRVNTEITKAPLSASMIKRYDEHHQDLTLLKALVRQQLPEKYKEIFFDQSKNGYAGYIDGGASQEEFYKFIKPILEKMDGTEELLVKLNREDLLRKQRTFDNGSIPHQIHLGELHAILRRQEDFYPFLKDNREKIEKILTFRIPYYVGPLARGNSRFAWMTRKSEETITPWNFEEVVDKGASAQSFIERMTNFDKNLPNEKVLPKHSLLYEYFTVYNELTKVKYVTEGMRKPAFLSGEQKKAIVDLLFKTNRKVTVKQLKEDYFKKIECFDSVEISGVEDRFNASLGTYHDLLKIIKDKDFLDNEENEDILEDIVLTLTLFEDREMIEERLKTYAHLFDDKVMKQLKRRRYTGWGRLSRKLINGIRDKQSGKTILDFLKSDGFANRNFMQLIHDDSLTFKEDIQKAQVSGQGDSLHEHIANLAGSPAIKKGILQTVKVVDELVKVMGRHKPENIVIEMARENQTTQKGQKNSRERMKRIEEGIKELGSQILKEHPVENTQLQNEKLYLYYLQNGRDMYVDQELDINRLSDYDVDHIVPQSFLKDDSIDNKVLTRSDKARGKSDNVPSEEVVKKMKNYWRQLLNAKLITQRKFDNLTKAERGGLSELDKAGFIKRQLVETRQITKHVAQILDSRMNTKYDENDKLIREVKVITLKSKLVSDFRKDFQFYKVREINNYHHAHDAYLNAVVGTALIKKYPKLESEFVYGDYKVYDVRKMIAKSEQEIGKATAKYFFYSNIMNFFKTEITLANGEIRKRPLIETNGETGEIVWDKGRDFATVRKVLSMPQVNIVKKTEVQTGGFSKESILPKRNSDKLIARKKDWDPKKYGGFDSPTVAYSVLVVAKVEKGKSKKLKSVKELLGITIMERSSFEKNPIDFLEAKGYKEVKKDLIIKLPKYSLFELENGRKRMLASAGELQKGNELALPSKYVNFLYLASHYEKLKGSPEDNEQKQLFVEQHKHYLDEIIEQISEFSKRVILADANLDKVLSAYNKHRDKPIREQAENIIHLFTLTNLGAPAAFKYFDTTIDRKRYTSTKEVLDATLIHQSITGLYETRIDLSQLGGDGGEAAAKGGSPAPGGVLNLEEEYRLHEKPVPSSIDPSWLQLFPTVWAERAGMGLANQVPPVVVELRSGASPVAVRQYPMSKEAREGIRPHIQKFLDLGVLVPCRSPWNTPLLPVKKPGTNDYRPVQDLREINKRVQDIHPTVPNPYNLLSSLPPSYTWYSVLDLKDAFFCLRLHPNSQPLFAFEWKDPEKGNTGQLTWTRLPQGFKNSPTLFDEALHRDLAPFRALNPQVVLLQYVDDLLVAAPTYEDCKKGTQKLLQELSKLGYRVSAKKAQLCQREVTYLGYLLKEGKRWLTPARKATVMKIPVPTTPRQVREFLGTAGFCRLWIPGFASLAAPLYPLTKESIPFIWTEEHQQAFDHIKKALLSAPALALPDLTKPFTLYIDERAGVARGVLTQTLGPWRRPVAYLSKKLDPVASGWPTCLKAVAAVALLLKDADKLTLGQNVTVIASHSLESIVRQPPDRWMTNARMTHYQSLLLNERVSFAPPAVLNPATLLPVESEATPVHRCSEILAEETGTRRDLEDQPLPGVPTWYTDGSSFITEGKRRAGAPIVDGKRTVWASSLPEGTSAQKAELVALTQALRLAEGKNINIYTDSRYAFATAHIHGAIYKQRGLLTSAGKDIKNKEEILALLEAIHLPRRVAIIHCPGHQRGSNPVATGNRRADEAAKQAALSTRVLAGTTKPAGKRTADGSEFEKRTADGSEFESPKKKAKVE

SEQ ID NO: 1366 - protein, 2101 aa, synthetic construct
MPAAKRVKLDGGDKKYSIGLDIGTNSVGWAVITDEYKVPSKKFKVLGNTDRHSIKKNLIGALLFDSGETAEATRLKRTARRRYTRRKNRICYLQEIFSNEMAKVDDSFFHRLEESFLVEEDKKHERHPIFGNIVDEVAYHEKYPTIYHLRKKLVDSTDKADLRLIYLALAHMIKFRGHFLIEGDLNPDNSDVDKLFIQLVQTYNQLFEENPINASGVDAKAILSARLSKSRRLENLIAQLPGEKKNGLFGNLIALSLGLTPNFKSNFDLAEDAKLQLSKDTYDDDLDNLLAQIGDQYADLFLAAKNLSDAILLSDILRVNTEITKAPLSASMIKRYDEHHQDLTLLKALVRQQLPEKYKEIFFDQSKNGYAGYIDGGASQEEFYKFIKPILEKMDGTEELLVKLNREDLLRKQRTFDNGSIPHQIHLGELHAILRRQEDFYPFLKDNREKIEKILTFRIPYYVGPLARGNSRFAWMTRKSEETITPWNFEEVVDKGASAQSFIERMTNFDKNLPNEKVLPKHSLLYEYFTVYNELTKVKYVTEGMRKPAFLSGEQKKAIVDLLFKTNRKVTVKQLKEDYFKKIECFDSVEISGVEDRFNASLGTYHDLLKIIKDKDFLDNEENEDILEDIVLTLTLFEDREMIEERLKTYAHLFDDKVMKQLKRRRYTGWGRLSRKLINGIRDKQSGKTILDFLKSDGFANRNFMQLIHDDSLTFKEDIQKAQVSGQGDSLHEHIANLAGSPAIKKGILQTVKVVDELVKVMGRHKPENIVIEMARENQTTQKGQKNSRERMKRIEEGIKELGSQILKEHPVENTQLQNEKLYLYYLQNGRDMYVDQELDINRLSDYDVDHIVPQSFLKDDSIDNKVLTRSDKARGKSDNVPSEEVVKKMKNYWRQLLNAKLITQRKFDNLTKAERGGLSELDKAGFIKRQLVETRQITKHVAQILDSRMNTKYDENDKLIREVKVITLKSKLVSDFRKDFQFYKVREINNYHHAHDAYLNAVVGTALIKKYPKLESEFVYGDYKVYDVRKMIAKSEQEIGKATAKYFFYSNIMNFFKTEITLANGEIRKRPLIETNGETGEIVWDKGRDFATVRKVLSMPQVNIVKKTEVQTGGFSKESILPKRNSDKLIARKKDWDPKKYGGFDSPTVAYSVLVVAKVEKGKSKKLKSVKELLGITIMERSSFEKNPIDFLEAKGYKEVKKDLIIKLPKYSLFELENGRKRMLASAGELQKGNELALPSKYVNFLYLASHYEKLKGSPEDNEQKQLFVEQHKHYLDEIIEQISEFSKRVILADANLDKVLSAYNKHRDKPIREQAENIIHLFTLTNLGAPAAFKYFDTTIDRKRYTSTKEVLDATLIHQSITGLYETRIDLSQLGGDGGGSSGSSGSSGSSGSSGSSGGVLNLEEEYRLHEKPVPSSIDPSWLQLFPTVWAERAGMGLANQVPPVVVELRSGASPVAVRQYPMSKEAREGIRPHIQKFLDLGVLVPCRSPWNTPLLPVKKPGTNDYRPVQDLREINKRVQDIHPTVPNPYNLLSSLPPSYTWYSVLDLKDAFFCLRLHPNSQPLFAFEWKDPEKGNTGQLTWTRLPQGFKNSPTLFDEALHRDLAPFRALNPQVVLLQYVDDLLVAAPTYEDCKKGTQKLLQELSKLGYRVSAKKAQLCQREVTYLGYLLKEGKRWLTPARKATVMKIPVPTTPRQVREFLGTAGFCRLWIPGFASLAAPLYPLTKESIPFIWTEEHQQAFDHIKKALLSAPALALPDLTKPFTLYIDERAGVARGVLTQTLGPWRRPVAYLSKKLDPVASGWPTCLKAVAAVALLLKDADKLTLGQNVTVIASHSLESIVRQPPDRWMTNARMTHYQSLLLNERVSFAPPAVLNPATLLPVESEATPVHRCSEILAEETGTRRDLEDQPLPGVPTWYTDGSSFITEGKRRAGAPIVDGKRTVWASSLPEGTSAQKAELVALTQALRLAEGKNINIYTDSRYAFATAHIHGAIYKQRGLLTSAGKDIKNKEEILALLEAIHLPRRVAIIHCPGHQRGSNPVATGNRRADEAAKQAALSTRVLAGTTKPAGKRTADGSEFEKRTADGSEFESPKKKAKVE

SEQ ID NO: 1367 - protein, 2103 aa, synthetic construct
MPAAKRVKLDGGDKKYSIGLDIGTNSVGWAVITDEYKVPSKKFKVLGNTDRHSIKKNLIGALLFDSGETAEATRLKRTARRRYTRRKNRICYLQEIFSNEMAKVDDSFFHRLEESFLVEEDKKHERHPIFGNIVDEVAYHEKYPTIYHLRKKLVDSTDKADLRLIYLALAHMIKFRGHFLIEGDLNPDNSDVDKLFIQLVQTYNQLFEENPINASGVDAKAILSARLSKSRRLENLIAQLPGEKKNGLFGNLIALSLGLTPNFKSNFDLAEDAKLQLSKDTYDDDLDNLLAQIGDQYADLFLAAKNLSDAILLSDILRVNTEITKAPLSASMIKRYDEHHQDLTLLKALVRQQLPEKYKEIFFDQSKNGYAGYIDGGASQEEFYKFIKPILEKMDGTEELLVKLNREDLLRKQRTFDNGSIPHQIHLGELHAILRRQEDFYPFLKDNREKIEKILTFRIPYYVGPLARGNSRFAWMTRKSEETITPWNFEEVVDKGASAQSFIERMTNFDKNLPNEKVLPKHSLLYEYFTVYNELTKVKYVTEGMRKPAFLSGEQKKAIVDLLFKTNRKVTVKQLKEDYFKKIECFDSVEISGVEDRFNASLGTYHDLLKIIKDKDFLDNEENEDILEDIVLTLTLFEDREMIEERLKTYAHLFDDKVMKQLKRRRYTGWGRLSRKLINGIRDKQSGKTILDFLKSDGFANRNFMQLIHDDSLTFKEDIQKAQVSGQGDSLHEHIANLAGSPAIKKGILQTVKVVDELVKVMGRHKPENIVIEMARENQTTQKGQKNSRERMKRIEEGIKELGSQILKEHPVENTQLQNEKLYLYYLQNGRDMYVDQELDINRLSDYDVDHIVPQSFLKDDSIDNKVLTRSDKARGKSDNVPSEEVVKKMKNYWRQLLNAKLITQRKFDNLTKAERGGLSELDKAGFIKRQLVETRQITKHVAQILDSRMNTKYDENDKLIREVKVITLKSKLVSDFRKDFQFYKVREINNYHHAHDAYLNAVVGTALIKKYPKLESEFVYGDYKVYDVRKMIAKSEQEIGKATAKYFFYSNIMNFFKTEITLANGEIRKRPLIETNGETGEIVWDKGRDFATVRKVLSMPQVNIVKKTEVQTGGFSKESILPKRNSDKLIARKKDWDPKKYGGFDSPTVAYSVLVVAKVEKGKSKKLKSVKELLGITIMERSSFEKNPIDFLEAKGYKEVKKDLIIKLPKYSLFELENGRKRMLASAGELQKGNELALPSKYVNFLYLASHYEKLKGSPEDNEQKQLFVEQHKHYLDEIIEQISEFSKRVILADANLDKVLSAYNKHRDKPIREQAENIIHLFTLTNLGAPAAFKYFDTTIDRKRYTSTKEVLDATLIHQSITGLYETRIDLSQLGGDGGEAAAKEAAAKEAAAKEAAAKGGVLNLEEEYRLHEKPVPSSIDPSWLQLFPTVWAERAGMGLANQVPPVVVELRSGASPVAVRQYPMSKEAREGIRPHIQKFLDLGVLVPCRSPWNTPLLPVKKPGTNDYRPVQDLREINKRVQDIHPTVPNPYNLLSSLPPSYTWYSVLDLKDAFFCLRLHPNSQPLFAFEWKDPEKGNTGQLTWTRLPQGFKNSPTLFDEALHRDLAPFRALNPQVVLLQYVDDLLVAAPTYEDCKKGTQKLLQELSKLGYRVSAKKAQLCQREVTYLGYLLKEGKRWLTPARKATVMKIPVPTTPRQVREFLGTAGFCRLWIPGFASLAAPLYPLTKESIPFIWTEEHQQAFDHIKKALLSAPALALPDLTKPFTLYIDERAGVARGVLTQTLGPWRRPVAYLSKKLDPVASGWPTCLKAVAAVALLLKDADKLTLGQNVTVIASHSLESIVRQPPDRWMTNARMTHYQSLLLNERVSFAPPAVLNPATLLPVESEATPVHRCSEILAEETGTRRDLEDQPLPGVPTWYTDGSSFITEGKRRAGAPIVDGKRTVWASSLPEGTSAQKAELVALTQALRLAEGKNINIYTDSRYAFATAHIHGAIYKQRGLLTSAGKDIKNKEEILALLEAIHLPRRVAIIHCPGHQRGSNPVATGNRRADEAAKQAALSTRVLAGTTKPAGKRTADGSEFEKRTADGSEFESPKKKAKVE

SEQ ID NO: 1368 - protein, 2098 aa, synthetic construct
MPAAKRVKLDGGDKKYSIGLDIGTNSVGWAVITDEYKVPSKKFKVLGNTDRHSIKKNLIGALLFDSGETAEATRLKRTARRRYTRRKNRICYLQEIFSNEMAKVDDSFFHRLEESFLVEEDKKHERHPIFGNIVDEVAYHEKYPTIYHLRKKLVDSTDKADLRLIYLALAHMIKFRGHFLIEGDLNPDNSDVDKLFIQLVQTYNQLFEENPINASGVDAKAILSARLSKSRRLENLIAQLPGEKKNGLFGNLIALSLGLTPNFKSNFDLAEDAKLQLSKDTYDDDLDNLLAQIGDQYADLFLAAKNLSDAILLSDILRVNTEITKAPLSASMIKRYDEHHQDLTLLKALVRQQLPEKYKEIFFDQSKNGYAGYIDGGASQEEFYKFIKPILEKMDGTEELLVKLNREDLLRKQRTFDNGSIPHQIHLGELHAILRRQEDFYPFLKDNREKIEKILTFRIPYYVGPLARGNSRFAWMTRKSEETITPWNFEEVVDKGASAQSFIERMTNFDKNLPNEKVLPKHSLLYEYFTVYNELTKVKYVTEGMRKPAFLSGEQKKAIVDLLFKTNRKVTVKQLKEDYFKKIECFDSVEISGVEDRFNASLGTYHDLLKIIKDKDFLDNEENEDILEDIVLTLTLFEDREMIEERLKTYAHLFDDKVMKQLKRRRYTGWGRLSRKLINGIRDKQSGKTILDFLKSDGFANRNFMQLIHDDSLTFKEDIQKAQVSGQGDSLHEHIANLAGSPAIKKGILQTVKVVDELVKVMGRHKPENIVIEMARENQTTQKGQKNSRERMKRIEEGIKELGSQILKEHPVENTQLQNEKLYLYYLQNGRDMYVDQELDINRLSDYDVDHIVPQSFLKDDSIDNKVLTRSDKARGKSDNVPSEEVVKKMKNYWRQLLNAKLITQRKFDNLTKAERGGLSELDKAGFIKRQLVETRQITKHVAQILDSRMNTKYDENDKLIREVKVITLKSKLVSDFRKDFQFYKVREINNYHHAHDAYLNAVVGTALIKKYPKLESEFVYGDYKVYDVRKMIAKSEQEIGKATAKYFFYSNIMNFFKTEITLANGEIRKRPLIETNGETGEIVWDKGRDFATVRKVLSMPQVNIVKKTEVQTGGFSKESILPKRNSDKLIARKKDWDPKKYGGFDSPTVAYSVLVVAKVEKGKSKKLKSVKELLGITIMERSSFEKNPIDFLEAKGYKEVKKDLIIKLPKYSLFELENGRKRMLASAGELQKGNELALPSKYVNFLYLASHYEKLKGSPEDNEQKQLFVEQHKHYLDEIIEQISEFSKRVILADANLDKVLSAYNKHRDKPIREQAENIIHLFTLTNLGAPAAFKYFDTTIDRKRYTSTKEVLDATLIHQSITGLYETRIDLSQLGGDGGGSSGSSGSSGSSGSSGGVLNLEEEYRLHEKPVPSSIDPSWLQLFPTVWAERAGMGLANQVPPVVVELRSGASPVAVRQYPMSKEAREGIRPHIQKFLDLGVLVPCRSPWNTPLLPVKKPGTNDYRPVQDLREINKRVQDIHPTVPNPYNLLSSLPPSYTWYSVLDLKDAFFCLRLHPNSQPLFAFEWKDPEKGNTGQLTWTRLPQGFKNSPTLFDEALHRDLAPFRALNPQVVLLQYVDDLLVAAPTYEDCKKGTQKLLQELSKLGYRVSAKKAQLCQREVTYLGYLLKEGKRWLTPARKATVMKIPVPTTPRQVREFLGTAGFCRLWIPGFASLAAPLYPLTKESIPFIWTEEHQQAFDHIKKALLSAPALALPDLTKPFTLYIDERAGVARGVLTQTLGPWRRPVAYLSKKLDPVASGWPTCLKAVAAVALLLKDADKLTLGQNVTVIASHSLESIVRQPPDRWMTNARMTHYQSLLLNERVSFAPPAVLNPATLLPVESEATPVHRCSEILAEETGTRRDLEDQPLPGVPTWYTDGSSFITEGKRRAGAPIVDGKRTVWASSLPEGTSAQKAELVALTQALRLAEGKNINIYTDSRYAFATAHIHGAIYKQRGLLTSAGKDIKNKEEILALLEAIHLPRRVAIIHCPGHQRGSNPVATGNRRADEAAKQAALSTRVLAGTTKPAGKRTADGSEFEKRTADGSEFESPKKKAKVE

SEQ ID NO: 1369 - protein, 2094 aa, synthetic construct
MPAAKRVKLDGGDKKYSIGLDIGTNSVGWAVITDEYKVPSKKFKVLGNTDRHSIKKNLIGALLFDSGETAEATRLKRTARRRYTRRKNRICYLQEIFSNEMAKVDDSFFHRLEESFLVEEDKKHERHPIFGNIVDEVAYHEKYPTIYHLRKKLVDSTDKADLRLIYLALAHMIKFRGHFLIEGDLNPDNSDVDKLFIQLVQTYNQLFEENPINASGVDAKAILSARLSKSRRLENLIAQLPGEKKNGLFGNLIALSLGLTPNFKSNFDLAEDAKLQLSKDTYDDDLDNLLAQIGDQYADLFLAAKNLSDAILLSDILRVNTEITKAPLSASMIKRYDEHHQDLTLLKALVRQQLPEKYKEIFFDQSKNGYAGYIDGGASQEEFYKFIKPILEKMDGTEELLVKLNREDLLRKQRTFDNGSIPHQIHLGELHAILRRQEDFYPFLKDNREKIEKILTFRIPYYVGPLARGNSRFAWMTRKSEETITPWNFEEVVDKGASAQSFIERMTNFDKNLPNEKVLPKHSLLYEYFTVYNELTKVKYVTEGMRKPAFLSGEQKKAIVDLLFKTNRKVTVKQLKEDYFKKIECFDSVEISGVEDRFNASLGTYHDLLKIIKDKDFLDNEENEDILEDIVLTLTLFEDREMIEERLKTYAHLFDDKVMKQLKRRRYTGWGRLSRKLINGIRDKQSGKTILDFLKSDGFANRNFMQLIHDDSLTFKEDIQKAQVSGQGDSLHEHIANLAGSPAIKKGILQTVKVVDELVKVMGRHKPENIVIEMARENQTTQKGQKNSRERMKRIEEGIKELGSQILKEHPVENTQLQNEKLYLYYLQNGRDMYVDQELDINRLSDYDVDHIVPQSFLKDDSIDNKVLTRSDKARGKSDNVPSEEVVKKMKNYWRQLLNAKLITQRKFDNLTKAERGGLSELDKAGFIKRQLVETRQITKHVAQILDSRMNTKYDENDKLIREVKVITLKSKLVSDFRKDFQFYKVREINNYHHAHDAYLNAVVGTALIKKYPKLESEFVYGDYKVYDVRKMIAKSEQEIGKATAKYFFYSNIMNFFKTEITLANGEIRKRPLIETNGETGEIVWDKGRDFATVRKVLSMPQVNIVKKTEVQTGGFSKESILPKRNSDKLIARKKDWDPKKYGGFDSPTVAYSVLVVAKVEKGKSKKLKSVKELLGITIMERSSFEKNPIDFLEAKGYKEVKKDLIIKLPKYSLFELENGRKRMLASAGELQKGNELALPSKYVNFLYLASHYEKLKGSPEDNEQKQLFVEQHKHYLDEIIEQISEFSKRVILADANLDKVLSAYNKHRDKPIREQAENIIHLFTLTNLGAPAAFKYFDTTIDRKRYTSTKEVLDATLIHQSITGLYETRIDLSQLGGDGGEAAAKGSSGGSGGVLNLEEEYRLHEKPVPSSIDPSWLQLFPTVWAERAGMGLANQVPPVVVELRSGASPVAVRQYPMSKEAREGIRPHIQKFLDLGVLVPCRSPWNTPLLPVKKPGTNDYRPVQDLREINKRVQDIHPTVPNPYNLLSSLPPSYTWYSVLDLKDAFFCLRLHPNSQPLFAFEWKDPEKGNTGQLTWTRLPQGFKNSPTLFDEALHRDLAPFRALNPQVVLLQYVDDLLVAAPTYEDCKKGTQKLLQELSKLGYRVSAKKAQLCQREVTYLGYLLKEGKRWLTPARKATVMKIPVPTTPRQVREFLGTAGFCRLWIPGFASLAAPLYPLTKESIPFIWTEEHQQAFDHIKKALLSAPALALPDLTKPFTLYIDERAGVARGVLTQTLGPWRRPVAYLSKKLDPVASGWPTCLKAVAAVALLLKDADKLTLGQNVTVIASHSLESIVRQPPDRWMTNARMTHYQSLLLNERVSFAPPAVLNPATLLPVESEATPVHRCSEILAEETGTRRDLEDQPLPGVPTWYTDGSSFITEGKRRAGAPIVDGKRTVWASSLPEGTSAQKAELVALTQALRLAEGKNINIYTDSRYAFATAHIHGAIYKQRGLLTSAGKDIKNKEEILALLEAIHLPRRVAIIHCPGHQRGSNPVATGNRRADEAAKQAALSTRVLAGTTKPAGKRTADGSEFEKRTADGSEFESPKKKAKVE

SEQ ID NO: 1370 - protein, 2129 aa, synthetic construct
MPAAKRVKLDGGDKKYSIGLDIGTNSVGWAVITDEYKVPSKKFKVLGNTDRHSIKKNLIGALLFDSGETAEATRLKRTARRRYTRRKNRICYLQEIFSNEMAKVDDSFFHRLEESFLVEEDKKHERHPIFGNIVDEVAYHEKYPTIYHLRKKLVDSTDKADLRLIYLALAHMIKFRGHFLIEGDLNPDNSDVDKLFIQLVQTYNQLFEENPINASGVDAKAILSARLSKSRRLENLIAQLPGEKKNGLFGNLIALSLGLTPNFKSNFDLAEDAKLQLSKDTYDDDLDNLLAQIGDQYADLFLAAKNLSDAILLSDILRVNTEITKAPLSASMIKRYDEHHQDLTLLKALVRQQLPEKYKEIFFDQSKNGYAGYIDGGASQEEFYKFIKPILEKMDGTEELLVKLNREDLLRKQRTFDNGSIPHQIHLGELHAILRRQEDFYPFLKDNREKIEKILTFRIPYYVGPLARGNSRFAWMTRKSEETITPWNFEEVVDKGASAQSFIERMTNFDKNLPNEKVLPKHSLLYEYFTVYNELTKVKYVTEGMRKPAFLSGEQKKAIVDLLFKTNRKVTVKQLKEDYFKKIECFDSVEISGVEDRFNASLGTYHDLLKIIKDKDFLDNEENEDILEDIVLTLTLFEDREMIEERLKTYAHLFDDKVMKQLKRRRYTGWGRLSRKLINGIRDKQSGKTILDFLKSDGFANRNFMQLIHDDSLTFKEDIQKAQVSGQGDSLHEHIANLAGSPAIKKGILQTVKVVDELVKVMGRHKPENIVIEMARENQTTQKGQKNSRERMKRIEEGIKELGSQILKEHPVENTQLQNEKLYLYYLQNGRDMYVDQELDINRLSDYDVDHIVPQSFLKDDSIDNKVLTRSDKARGKSDNVPSEEVVKKMKNYWRQLLNAKLITQRKFDNLTKAERGGLSELDKAGFIKRQLVETRQITKHVAQILDSRMNTKYDENDKLIREVKVITLKSKLVSDFRKDFQFYKVREINNYHHAHDAYLNAVVGTALIKKYPKLESEFVYGDYKVYDVRKMIAKSEQEIGKATAKYFFYSNIMNFFKTEITLANGEIRKRPLIETNGETGEIVWDKGRDFATVRKVLSMPQVNIVKKTEVQTGGFSKESILPKRNSDKLIARKKDWDPKKYGGFDSPTVAYSVLVVAKVEKGKSKKLKSVKELLGITIMERSSFEKNPIDFLEAKGYKEVKKDLIIKLPKYSLFELENGRKRMLASAGELQKGNELALPSKYVNFLYLASHYEKLKGSPEDNEQKQLFVEQHKHYLDEIIEQISEFSKRVILADANLDKVLSAYNKHRDKPIREQAENIIHLFTLTNLGAPAAFKYFDTTIDRKRYTSTKEVLDATLIHQSITGLYETRIDLSQLGGDGGAEAAAKEAAAKEAAAKEAAAKALEAEAAAKEAAAKEAAAKEAAAKAGGVLNLEEEYRLHEKPVPSSIDPSWLQLFPTVWAERAGMGLANQVPPVVVELRSGASPVAVRQYPMSKEAREGIRPHIQKFLDLGVLVPCRSPWNTPLLPVKKPGTNDYRPVQDLREINKRVQDIHPTVPNPYNLLSSLPPSYTWYSVLDLKDAFFCLRLHPNSQPLFAFEWKDPEKGNTGQLTWTRLPQGFKNSPTLFNEALHRDLAPFRALNPQVVLLQYVDDLLVAAPTYEDCKKGTQKLLQELSKLGYRVSAKKAQLCQREVTYLGYLLKEGKRWLTPARKATVMKIPVPTTPRQVREFLGTAGFCRLWIPGFASLAAPLYPLTKPSIPFIWTEEHQQAFDHIKKALLSAPALALPDLTKPFTLYIDERAGVARGVLTQTLGPWRRPVAYLSKKLDPVASGWPTCLKAVAAVALLLKDADKLTLGQNVTVIASHSLESIVRQPPDRWMTNARMTHYQSLLLNERVSFAPPAVLNPATLLPVESEATPVHRCSEILAEETGTRRDLEDQPLPGVPTWYTDGSSFITEGKRRAGAPIVDGKRTVWASSLPEGTSAQKAELVALTQALRLAEGKNINIYTDSRYAFATAHIHGAIYKQRGWLTSAGKDIKNKEEILALLEAIHLPRRVAIIHCPGHQRGSNPVATGNRRADEAAKQAALSTRVLAGTTKPAGKRTADGSEFEKRTADGSEFESPKKKAKVE

SEQ ID NO: 1371 - protein, 2098 aa, synthetic construct
MPAAKRVKLDGGDKKYSIGLDIGTNSVGWAVITDEYKVPSKKFKVLGNTDRHSIKKNLIGALLFDSGETAEATRLKRTARRRYTRRKNRICYLQEIFSNEMAKVDDSFFHRLEESFLVEEDKKHERHPIFGNIVDEVAYHEKYPTIYHLRKKLVDSTDKADLRLIYLALAHMIKFRGHFLIEGDLNPDNSDVDKLFIQLVQTYNQLFEENPINASGVDAKAILSARLSKSRRLENLIAQLPGEKKNGLFGNLIALSLGLTPNFKSNFDLAEDAKLQLSKDTYDDDLDNLLAQIGDQYADLFLAAKNLSDAILLSDILRVNTEITKAPLSASMIKRYDEHHQDLTLLKALVRQQLPEKYKEIFFDQSKNGYAGYIDGGASQEEFYKFIKPILEKMDGTEELLVKLNREDLLRKQRTFDNGSIPHQIHLGELHAILRRQEDFYPFLKDNREKIEKILTFRIPYYVGPLARGNSRFAWMTRKSEETITPWNFEEVVDKGASAQSFIERMTNFDKNLPNEKVLPKHSLLYEYFTVYNELTKVKYVTEGMRKPAFLSGEQKKAIVDLLFKTNRKVTVKQLKEDYFKKIECFDSVEISGVEDRFNASLGTYHDLLKIIKDKDFLDNEENEDILEDIVLTLTLFEDREMIEERLKTYAHLFDDKVMKQLKRRRYTGWGRLSRKLINGIRDKQSGKTILDFLKSDGFANRNFMQLIHDDSLTFKEDIQKAQVSGQGDSLHEHIANLAGSPAIKKGILQTVKVVDELVKVMGRHKPENIVIEMARENQTTQKGQKNSRERMKRIEEGIKELGSQILKEHPVENTQLQNEKLYLYYLQNGRDMYVDQELDINRLSDYDVDHIVPQSFLKDDSIDNKVLTRSDKARGKSDNVPSEEVVKKMKNYWRQLLNAKLITQRKFDNLTKAERGGLSELDKAGFIKRQLVETRQITKHVAQILDSRMNTKYDENDKLIREVKVITLKSKLVSDFRKDFQFYKVREINNYHHAHDAYLNAVVGTALIKKYPKLESEFVYGDYKVYDVRKMIAKSEQEIGKATAKYFFYSNIMNFFKTEITLANGEIRKRPLIETNGETGEIVWDKGRDFATVRKVLSMPQVNIVKKTEVQTGGFSKESILPKRNSDKLIARKKDWDPKKYGGFDSPTVAYSVLVVAKVEKGKSKKLKSVKELLGITIMERSSFEKNPIDFLEAKGYKEVKKDLIIKLPKYSLFELENGRKRMLASAGELQKGNELALPSKYVNFLYLASHYEKLKGSPEDNEQKQLFVEQHKHYLDEIIEQISEFSKRVILADANLDKVLSAYNKHRDKPIREQAENIIHLFTLTNLGAPAAFKYFDTTIDRKRYTSTKEVLDATLIHQSITGLYETRIDLSQLGGDGGPAPGGSEAAAKGGTAPLEEEYRLFLEAPIQNVTLLEQWKREIPKVWAEINPPGLASTQAPIHVQLLSTALPVRVRQYPITLEAKRSLRETIRKFRAAGILRPVHSPWNTPLLPVRKSGTSEYRMVQDLREVNKRVETIHPTVPNPYTLLSLLPPDRIWYSVLDLKDAFFCIPLAPESQLIFAFEWADAEEGESGQLTWTRLPQGFKNSPTLFNEALNRDLQGFRLDHPSVSLLQYVDDLLIAADTQAACLSATRDLLMTLAELGYRVSGKKAQLCQEEVTYLGFKIHKGSRSLSNSRTQAILQIPVPKTKRQVREFLGKIGYCRLFIPGFAELAQPLYAATRPGNDPLVWGEKEEEAFQSLKLALTQPPALALPSLDKPFQLFVEETSGAAKGVLTQALGPWKRPVAYLSKRLDPVAAGWPRCLRAIAAAALLTREASKLTFGQDIEITSSHNLESLLRSPPDKWLTNARITQYQVLLLDPPRVRFKQTAALNPATLLPETDDTLPIHHCLDTLDSLTSTRPDLTDQPLAQAEATLFTDGSSYIRDGKRYAGAAVVTLDSVIWAEPLPIGTSAQKAELIALTKALEWSKDKSVNIYTDSRYAFATLHVHGMIYRERGWLTAGGKAIKNAPEILALLTAVWLPKRVAVMHCKGHQKDDAPTSTGNRRADEVAREVAIRPLSTQATISAGKRTADGSEFEKRTADGSEFESPKKKAKVE

SEQ ID NO: 1372 - protein, 2133 aa, synthetic construct
MPAAKRVKLDGGDKKYSIGLDIGTNSVGWAVITDEYKVPSKKFKVLGNTDRHSIKKNLIGALLFDSGETAEATRLKRTARRRYTRRKNRICYLQEIFSNEMAKVDDSFFHRLEESFLVEEDKKHERHPIFGNIVDEVAYHEKYPTIYHLRKKLVDSTDKADLRLIYLALAHMIKFRGHFLIEGDLNPDNSDVDKLFIQLVQTYNQLFEENPINASGVDAKAILSARLSKSRRLENLIAQLPGEKKNGLFGNLIALSLGLTPNFKSNFDLAEDAKLQLSKDTYDDDLDNLLAQIGDQYADLFLAAKNLSDAILLSDILRVNTEITKAPLSASMIKRYDEHHQDLTLLKALVRQQLPEKYKEIFFDQSKNGYAGYIDGGASQEEFYKFIKPILEKMDGTEELLVKLNREDLLRKQRTFDNGSIPHQIHLGELHAILRRQEDFYPFLKDNREKIEKILTFRIPYYVGPLARGNSRFAWMTRKSEETITPWNFEEVVDKGASAQSFIERMTNFDKNLPNEKVLPKHSLLYEYFTVYNELTKVKYVTEGMRKPAFLSGEQKKAIVDLLFKTNRKVTVKQLKEDYFKKIECFDSVEISGVEDRFNASLGTYHDLLKIIKDKDFLDNEENEDILEDIVLTLTLFEDREMIEERLKTYAHLFDDKVMKQLKRRRYTGWGRLSRKLINGIRDKQSGKTILDFLKSDGFANRNFMQLIHDDSLTFKEDIQKAQVSGQGDSLHEHIANLAGSPAIKKGILQTVKVVDELVKVMGRHKPENIVIEMARENQTTQKGQKNSRERMKRIEEGIKELGSQILKEHPVENTQLQNEKLYLYYLQNGRDMYVDQELDINRLSDYDVDHIVPQSFLKDDSIDNKVLTRSDKARGKSDNVPSEEVVKKMKNYWRQLLNAKLITQRKFDNLTKAERGGLSELDKAGFIKRQLVETRQITKHVAQILDSRMNTKYDENDKLIREVKVITLKSKLVSDFRKDFQFYKVREINNYHHAHDAYLNAVVGTALIKKYPKLESEFVYGDYKVYDVRKMIAKSEQEIGKATAKYFFYSNIMNFFKTEITLANGEIRKRPLIETNGETGEIVWDKGRDFATVRKVLSMPQVNIVKKTEVQTGGFSKESILPKRNSDKLIARKKDWDPKKYGGFDSPTVAYSVLVVAKVEKGKSKKLKSVKELLGITIMERSSFEKNPIDFLEAKGYKEVKKDLIIKLPKYSLFELENGRKRMLASAGELQKGNELALPSKYVNFLYLASHYEKLKGSPEDNEQKQLFVEQHKHYLDEIIEQISEFSKRVILADANLDKVLSAYNKHRDKPIREQAENIIHLFTLTNLGAPAAFKYFDTTIDRKRYTSTKEVLDATLIHQSITGLYETRIDLSQLGGDGGAEAAAKEAAAKEAAAKEAAAKALEAEAAAKEAAAKEAAAKEAAAKAGGTAPLEEEYRLFLEAPIQNVTLLEQWKREIPKVWAEINPPGLASTQAPIHVQLLSTALPVRVRQYPITLEAKRSLRETIRKFRAAGILRPVHSPWNTPLLPVRKSGTSEYRMVQDLREVNKRVETIHPTVPNPYTLLSLLPPDRIWYSVLDLKDAFFCIPLAPESQLIFAFEWADAEEGESGQLTWTRLPQGFKNSPTLFNEALNRDLQGFRLDHPSVSLLQYVDDLLIAADTQAACLSATRDLLMTLAELGYRVSGKKAQLCQEEVTYLGFKIHKGSRSLSNSRTQAILQIPVPKTKRQVREFLGKIGYCRLFIPGFAELAQPLYAATRPGNDPLVWGEKEEEAFQSLKLALTQPPALALPSLDKPFQLFVEETSGAAKGVLTQALGPWKRPVAYLSKRLDPVAAGWPRCLRAIAAAALLTREASKLTFGQDIEITSSHNLESLLRSPPDKWLTNARITQYQVLLLDPPRVRFKQTAALNPATLLPETDDTLPIHHCLDTLDSLTSTRPDLTDQPLAQAEATLFTDGSSYIRDGKRYAGAAVVTLDSVIWAEPLPIGTSAQKAELIALTKALEWSKDKSVNIYTDSRYAFATLHVHGMIYRERGWLTAGGKAIKNAPEILALLTAVWLPKRVAVMHCKGHQKDDAPTSTGNRRADEVAREVAIRPLSTQATISAGKRTADGSEFEKRTADGSEFESPKKKAKVE

SEQ ID NO: 1373 - protein, 2117 aa, synthetic construct
MPAAKRVKLDGGDKKYSIGLDIGTNSVGWAVITDEYKVPSKKFKVLGNTDRHSIKKNLIGALLFDSGETAEATRLKRTARRRYTRRKNRICYLQEIFSNEMAKVDDSFFHRLEESFLVEEDKKHERHPIFGNIVDEVAYHEKYPTIYHLRKKLVDSTDKADLRLIYLALAHMIKFRGHFLIEGDLNPDNSDVDKLFIQLVQTYNQLFEENPINASGVDAKAILSARLSKSRRLENLIAQLPGEKKNGLFGNLIALSLGLTPNFKSNFDLAEDAKLQLSKDTYDDDLDNLLAQIGDQYADLFLAAKNLSDAILLSDILRVNTEITKAPLSASMIKRYDEHHQDLTLLKALVRQQLPEKYKEIFFDQSKNGYAGYIDGGASQEEFYKFIKPILEKMDGTEELLVKLNREDLLRKQRTFDNGSIPHQIHLGELHAILRRQEDFYPFLKDNREKIEKILTFRIPYYVGPLARGNSRFAWMTRKSEETITPWNFEEVVDKGASAQSFIERMTNFDKNLPNEKVLPKHSLLYEYFTVYNELTKVKYVTEGMRKPAFLSGEQKKAIVDLLFKTNRKVTVKQLKEDYFKKIECFDSVEISGVEDRFNASLGTYHDLLKIIKDKDFLDNEENEDILEDIVLTLTLFEDREMIEERLKTYAHLFDDKVMKQLKRRRYTGWGRLSRKLINGIRDKQSGKTILDFLKSDGFANRNFMQLIHDDSLTFKEDIQKAQVSGQGDSLHEHIANLAGSPAIKKGILQTVKVVDELVKVMGRHKPENIVIEMARENQTTQKGQKNSRERMKRIEEGIKELGSQILKEHPVENTQLQNEKLYLYYLQNGRDMYVDQELDINRLSDYDVDHIVPQSFLKDDSIDNKVLTRSDKARGKSDNVPSEEVVKKMKNYWRQLLNAKLITQRKFDNLTKAERGGLSELDKAGFIKRQLVETRQITKHVAQILDSRMNTKYDENDKLIREVKVITLKSKLVSDFRKDFQFYKVREINNYHHAHDAYLNAVVGTALIKKYPKLESEFVYGDYKVYDVRKMIAKSEQEIGKATAKYFFYSNIMNFFKTEITLANGEIRKRPLIETNGETGEIVWDKGRDFATVRKVLSMPQVNIVKKTEVQTGGFSKESILPKRNSDKLIARKKDWDPKKYGGFDSPTVAYSVLVVAKVEKGKSKKLKSVKELLGITIMERSSFEKNPIDFLEAKGYKEVKKDLIIKLPKYSLFELENGRKRMLASAGELQKGNELALPSKYVNFLYLASHYEKLKGSPEDNEQKQLFVEQHKHYLDEIIEQISEFSKRVILADANLDKVLSAYNKHRDKPIREQAENIIHLFTLTNLGAPAAFKYFDTTIDRKRYTSTKEVLDATLIHQSITGLYETRIDLSQLGGDGGGGGGSGGGGSGGGGSGGGGSGGGGSGGGGSGGTAPLEEEYRLFLEAPIQNVTLLEQWKREIPKVWAEINPPGLASTQAPIHVQLLSTALPVRVRQYPITLEAKRSLRETIRKFRAAGILRPVHSPWNTPLLPVRKSGTSEYRMVQDLREVNKRVETIHPTVPNPYTLLSLLPPDRIWYSVLDLKDAFFCIPLAPESQLIFAFEWADAEEGESGQLTWTRLPQGFKNSPTLFNEALNRDLQGFRLDHPSVSLLQYVDDLLIAADTQAACLSATRDLLMTLAELGYRVSGKKAQLCQEEVTYLGFKIHKGSRSLSNSRTQAILQIPVPKTKRQVREFLGKIGYCRLFIPGFAELAQPLYAATRPGNDPLVWGEKEEEAFQSLKLALTQPPALALPSLDKPFQLFVEETSGAAKGVLTQALGPWKRPVAYLSKRLDPVAAGWPRCLRAIAAAALLTREASKLTFGQDIEITSSHNLESLLRSPPDKWLTNARITQYQVLLLDPPRVRFKQTAALNPATLLPETDDTLPIHHCLDTLDSLTSTRPDLTDQPLAQAEATLFTDGSSYIRDGKRYAGAAVVTLDSVIWAEPLPIGTSAQKAELIALTKALEWSKDKSVNIYTDSRYAFATLHVHGMIYRERGWLTAGGKAIKNAPEILALLTAVWLPKRVAVMHCKGHQKDDAPTSTGNRRADEVAREVAIRPLSTQATISAGKRTADGSEFEKRTADGSEFESPKKKAKVE

SEQ ID NO: 1374 - protein, 2107 aa, synthetic construct
MPAAKRVKLDGGDKKYSIGLDIGTNSVGWAVITDEYKVPSKKFKVLGNTDRHSIKKNLIGALLFDSGETAEATRLKRTARRRYTRRKNRICYLQEIFSNEMAKVDDSFFHRLEESFLVEEDKKHERHPIFGNIVDEVAYHEKYPTIYHLRKKLVDSTDKADLRLIYLALAHMIKFRGHFLIEGDLNPDNSDVDKLFIQLVQTYNQLFEENPINASGVDAKAILSARLSKSRRLENLIAQLPGEKKNGLFGNLIALSLGLTPNFKSNFDLAEDAKLQLSKDTYDDDLDNLLAQIGDQYADLFLAAKNLSDAILLSDILRVNTEITKAPLSASMIKRYDEHHQDLTLLKALVRQQLPEKYKEIFFDQSKNGYAGYIDGGASQEEFYKFIKPILEKMDGTEELLVKLNREDLLRKQRTFDNGSIPHQIHLGELHAILRRQEDFYPFLKDNREKIEKILTFRIPYYVGPLARGNSRFAWMTRKSEETITPWNFEEVVDKGASAQSFIERMTNFDKNLPNEKVLPKHSLLYEYFTVYNELTKVKYVTEGMRKPAFLSGEQKKAIVDLLFKTNRKVTVKQLKEDYFKKIECFDSVEISGVEDRFNASLGTYHDLLKIIKDKDFLDNEENEDILEDIVLTLTLFEDREMIEERLKTYAHLFDDKVMKQLKRRRYTGWGRLSRKLINGIRDKQSGKTILDFLKSDGFANRNFMQLIHDDSLTFKEDIQKAQVSGQGDSLHEHIANLAGSPAIKKGILQTVKVVDELVKVMGRHKPENIVIEMARENQTTQKGQKNSRERMKRIEEGIKELGSQILKEHPVENTQLQNEKLYLYYLQNGRDMYVDQELDINRLSDYDVDHIVPQSFLKDDSIDNKVLTRSDKARGKSDNVPSEEVVKKMKNYWRQLLNAKLITQRKFDNLTKAERGGLSELDKAGFIKRQLVETRQITKHVAQILDSRMNTKYDENDKLIREVKVITLKSKLVSDFRKDFQFYKVREINNYHHAHDAYLNAVVGTALIKKYPKLESEFVYGDYKVYDVRKMIAKSEQEIGKATAKYFFYSNIMNFFKTEITLANGEIRKRPLIETNGETGEIVWDKGRDFATVRKVLSMPQVNIVKKTEVQTGGFSKESILPKRNSDKLIARKKDWDPKKYGGFDSPTVAYSVLVVAKVEKGKSKKLKSVKELLGITIMERSSFEKNPIDFLEAKGYKEVKKDLIIKLPKYSLFELENGRKRMLASAGELQKGNELALPSKYVNFLYLASHYEKLKGSPEDNEQKQLFVEQHKHYLDEIIEQISEFSKRVILADANLDKVLSAYNKHRDKPIREQAENIIHLFTLTNLGAPAAFKYFDTTIDRKRYTSTKEVLDATLIHQSITGLYETRIDLSQLGGDGGGGGGSGGGGSGGGGSGGGGSGGTAPLEEEYRLFLEAPIQNVTLLEQWKREIPKVWAEINPPGLASTQAPIHVQLLSTALPVRVRQYPITLEAKRSLRETIRKFRAAGILRPVHSPWNTPLLPVRKSGTSEYRMVQDLREVNKRVETIHPTVPNPYTLLSLLPPDRIWYSVLDLKDAFFCIPLAPESQLIFAFEWADAEEGESGQLTWTRLPQGFKNSPTLFNEALNRDLQGFRLDHPSVSLLQYVDDLLIAADTQAACLSATRDLLMTLAELGYRVSGKKAQLCQEEVTYLGFKIHKGSRSLSNSRTQAILQIPVPKTKRQVREFLGKIGYCRLFIPGFAELAQPLYAATRPGNDPLVWGEKEEEAFQSLKLALTQPPALALPSLDKPFQLFVEETSGAAKGVLTQALGPWKRPVAYLSKRLDPVAAGWPRCLRAIAAAALLTREASKLTFGQDIEITSSHNLESLLRSPPDKWLTNARITQYQVLLLDPPRVRFKQTAALNPATLLPETDDTLPIHHCLDTLDSLTSTRPDLTDQPLAQAEATLFTDGSSYIRDGKRYAGAAVVTLDSVIWAEPLPIGTSAQKAELIALTKALEWSKDKSVNIYTDSRYAFATLHVHGMIYRERGWLTAGGKAIKNAPEILALLTAVWLPKRVAVMHCKGHQKDDAPTSTGNRRADEVAREVAIRPLSTQATISAGKRTADGSEFEKRTADGSEFESPKKKAKVE

SEQ ID NO: 1375 - protein, 2093 aa, synthetic construct
MPAAKRVKLDGGDKKYSIGLDIGTNSVGWAVITDEYKVPSKKFKVLGNTDRHSIKKNLIGALLFDSGETAEATRLKRTARRRYTRRKNRICYLQEIFSNEMAKVDDSFFHRLEESFLVEEDKKHERHPIFGNIVDEVAYHEKYPTIYHLRKKLVDSTDKADLRLIYLALAHMIKFRGHFLIEGDLNPDNSDVDKLFIQLVQTYNQLFEENPINASGVDAKAILSARLSKSRRLENLIAQLPGEKKNGLFGNLIALSLGLTPNFKSNFDLAEDAKLQLSKDTYDDDLDNLLAQIGDQYADLFLAAKNLSDAILLSDILRVNTEITKAPLSASMIKRYDEHHQDLTLLKALVRQQLPEKYKEIFFDQSKNGYAGYIDGGASQEEFYKFIKPILEKMDGTEELLVKLNREDLLRKQRTFDNGSIPHQIHLGELHAILRRQEDFYPFLKDNREKIEKILTFRIPYYVGPLARGNSRFAWMTRKSEETITPWNFEEVVDKGASAQSFIERMTNFDKNLPNEKVLPKHSLLYEYFTVYNELTKVKYVTEGMRKPAFLSGEQKKAIVDLLFKTNRKVTVKQLKEDYFKKIECFDSVEISGVEDRFNASLGTYHDLLKIIKDKDFLDNEENEDILEDIVLTLTLFEDREMIEERLKTYAHLFDDKVMKQLKRRRYTGWGRLSRKLINGIRDKQSGKTILDFLKSDGFANRNFMQLIHDDSLTFKEDIQKAQVSGQGDSLHEHIANLAGSPAIKKGILQTVKVVDELVKVMGRHKPENIVIEMARENQTTQKGQKNSRERMKRIEEGIKELGSQILKEHPVENTQLQNEKLYLYYLQNGRDMYVDQELDINRLSDYDVDHIVPQSFLKDDSIDNKVLTRSDKARGKSDNVPSEEVVKKMKNYWRQLLNAKLITQRKFDNLTKAERGGLSELDKAGFIKRQLVETRQITKHVAQILDSRMNTKYDENDKLIREVKVITLKSKLVSDFRKDFQFYKVREINNYHHAHDAYLNAVVGTALIKKYPKLESEFVYGDYKVYDVRKMIAKSEQEIGKATAKYFFYSNIMNFFKTEITLANGEIRKRPLIETNGETGEIVWDKGRDFATVRKVLSMPQVNIVKKTEVQTGGFSKESILPKRNSDKLIARKKDWDPKKYGGFDSPTVAYSVLVVAKVEKGKSKKLKSVKELLGITIMERSSFEKNPIDFLEAKGYKEVKKDLIIKLPKYSLFELENGRKRMLASAGELQKGNELALPSKYVNFLYLASHYEKLKGSPEDNEQKQLFVEQHKHYLDEIIEQISEFSKRVILADANLDKVLSAYNKHRDKPIREQAENIIHLFTLTNLGAPAAFKYFDTTIDRKRYTSTKEVLDATLIHQSITGLYETRIDLSQLGGDGGGSSPAPGGTAPLEEEYRLFLEAPIQNVTLLEQWKREIPKVWAEINPPGLASTQAPIHVQLLSTALPVRVRQYPITLEAKRSLRETIRKFRAAGILRPVHSPWNTPLLPVRKSGTSEYRMVQDLREVNKRVETIHPTVPNPYTLLSLLPPDRIWYSVLDLKDAFFCIPLAPESQLIFAFEWADAEEGESGQLTWTRLPQGFKNSPTLFNEALNRDLQGFRLDHPSVSLLQYVDDLLIAADTQAACLSATRDLLMTLAELGYRVSGKKAQLCQEEVTYLGFKIHKGSRSLSNSRTQAILQIPVPKTKRQVREFLGKIGYCRLFIPGFAELAQPLYAATRPGNDPLVWGEKEEEAFQSLKLALTQPPALALPSLDKPFQLFVEETSGAAKGVLTQALGPWKRPVAYLSKRLDPVAAGWPRCLRAIAAAALLTREASKLTFGQDIEITSSHNLESLLRSPPDKWLTNARITQYQVLLLDPPRVRFKQTAALNPATLLPETDDTLPIHHCLDTLDSLTSTRPDLTDQPLAQAEATLFTDGSSYIRDGKRYAGAAVVTLDSVIWAEPLPIGTSAQKAELIALTKALEWSKDKSVNIYTDSRYAFATLHVHGMIYRERGWLTAGGKAIKNAPEILALLTAVWLPKRVAVMHCKGHQKDDAPTSTGNRRADEVAREVAIRPLSTQATISAGKRTADGSEFEKRTADGSEFESPKKKAKVE

SEQ ID NO: 1376 - protein, 2103 aa, synthetic construct
MPAAKRVKLDGGDKKYSIGLDIGTNSVGWAVITDEYKVPSKKFKVLGNTDRHSIKKNLIGALLFDSGETAEATRLKRTARRRYTRRKNRICYLQEIFSNEMAKVDDSFFHRLEESFLVEEDKKHERHPIFGNIVDEVAYHEKYPTIYHLRKKLVDSTDKADLRLIYLALAHMIKFRGHFLIEGDLNPDNSDVDKLFIQLVQTYNQLFEENPINASGVDAKAILSARLSKSRRLENLIAQLPGEKKNGLFGNLIALSLGLTPNFKSNFDLAEDAKLQLSKDTYDDDLDNLLAQIGDQYADLFLAAKNLSDAILLSDILRVNTEITKAPLSASMIKRYDEHHQDLTLLKALVRQQLPEKYKEIFFDQSKNGYAGYIDGGASQEEFYKFIKPILEKMDGTEELLVKLNREDLLRKQRTFDNGSIPHQIHLGELHAILRRQEDFYPFLKDNREKIEKILTFRIPYYVGPLARGNSRFAWMTRKSEETITPWNFEEVVDKGASAQSFIERMTNFDKNLPNEKVLPKHSLLYEYFTVYNELTKVKYVTEGMRKPAFLSGEQKKAIVDLLFKTNRKVTVKQLKEDYFKKIECFDSVEISGVEDRFNASLGTYHDLLKIIKDKDFLDNEENEDILEDIVLTLTLFEDREMIEERLKTYAHLFDDKVMKQLKRRRYTGWGRLSRKLINGIRDKQSGKTILDFLKSDGFANRNFMQLIHDDSLTFKEDIQKAQVSGQGDSLHEHIANLAGSPAIKKGILQTVKVVDELVKVMGRHKPENIVIEMARENQTTQKGQKNSRERMKRIEEGIKELGSQILKEHPVENTQLQNEKLYLYYLQNGRDMYVDQELDINRLSDYDVDHIVPQSFLKDDSIDNKVLTRSDKARGKSDNVPSEEVVKKMKNYWRQLLNAKLITQRKFDNLTKAERGGLSELDKAGFIKRQLVETRQITKHVAQILDSRMNTKYDENDKLIREVKVITLKSKLVSDFRKDFQFYKVREINNYHHAHDAYLNAVVGTALIKKYPKLESEFVYGDYKVYDVRKMIAKSEQEIGKATAKYFFYSNIMNFFKTEITLANGEIRKRPLIETNGETGEIVWDKGRDFATVRKVLSMPQVNIVKKTEVQTGGFSKESILPKRNSDKLIARKKDWDPKKYGGFDSPTVAYSVLVVAKVEKGKSKKLKSVKELLGITIMERSSFEKNPIDFLEAKGYKEVKKDLIIKLPKYSLFELENGRKRMLASAGELQKGNELALPSKYVNFLYLASHYEKLKGSPEDNEQKQLFVEQHKHYLDEIIEQISEFSKRVILADANLDKVLSAYNKHRDKPIREQAENIIHLFTLTNLGAPAAFKYFDTTIDRKRYTSTKEVLDATLIHQSITGLYETRIDLSQLGGDGGSGSETPGTSESATPESGGTAPLEEEYRLFLEAPIQNVTLLEQWKREIPKVWAEINPPGLASTQAPIHVQLLSTALPVRVRQYPITLEAKRSLRETIRKFRAAGILRPVHSPWNTPLLPVRKSGTSEYRMVQDLREVNKRVETIHPTVPNPYTLLSLLPPDRIWYSVLDLKDAFFCIPLAPESQLIFAFEWADAEEGESGQLTWTRLPQGFKNSPTLFNEALNRDLQGFRLDHPSVSLLQYVDDLLIAADTQAACLSATRDLLMTLAELGYRVSGKKAQLCQEEVTYLGFKIHKGSRSLSNSRTQAILQIPVPKTKRQVREFLGKIGYCRLFIPGFAELAQPLYAATRPGNDPLVWGEKEEEAFQSLKLALTQPPALALPSLDKPFQLFVEETSGAAKGVLTQALGPWKRPVAYLSKRLDPVAAGWPRCLRAIAAAALLTREASKLTFGQDIEITSSHNLESLLRSPPDKWLTNARITQYQVLLLDPPRVRFKQTAALNPATLLPETDDTLPIHHCLDTLDSLTSTRPDLTDQPLAQAEATLFTDGSSYIRDGKRYAGAAVVTLDSVIWAEPLPIGTSAQKAELIALTKALEWSKDKSVNIYTDSRYAFATLHVHGMIYRERGWLTAGGKAIKNAPEILALLTAVWLPKRVAVMHCKGHQKDDAPTSTGNRRADEVAREVAIRPLSTQATISAGKRTADGSEFEKRTADGSEFESPKKKAKVE

SEQ ID NO: 1377 - protein, 2098 aa, synthetic construct
MPAAKRVKLDGGDKKYSIGLDIGTNSVGWAVITDEYKVPSKKFKVLGNTDRHSIKKNLIGALLFDSGETAEATRLKRTARRRYTRRKNRICYLQEIFSNEMAKVDDSFFHRLEESFLVEEDKKHERHPIFGNIVDEVAYHEKYPTIYHLRKKLVDSTDKADLRLIYLALAHMIKFRGHFLIEGDLNPDNSDVDKLFIQLVQTYNQLFEENPINASGVDAKAILSARLSKSRRLENLIAQLPGEKKNGLFGNLIALSLGLTPNFKSNFDLAEDAKLQLSKDTYDDDLDNLLAQIGDQYADLFLAAKNLSDAILLSDILRVNTEITKAPLSASMIKRYDEHHQDLTLLKALVRQQLPEKYKEIFFDQSKNGYAGYIDGGASQEEFYKFIKPILEKMDGTEELLVKLNREDLLRKQRTFDNGSIPHQIHLGELHAILRRQEDFYPFLKDNREKIEKILTFRIPYYVGPLARGNSRFAWMTRKSEETITPWNFEEVVDKGASAQSFIERMTNFDKNLPNEKVLPKHSLLYEYFTVYNELTKVKYVTEGMRKPAFLSGEQKKAIVDLLFKTNRKVTVKQLKEDYFKKIECFDSVEISGVEDRFNASLGTYHDLLKIIKDKDFLDNEENEDILEDIVLTLTLFEDREMIEERLKTYAHLFDDKVMKQLKRRRYTGWGRLSRKLINGIRDKQSGKTILDFLKSDGFANRNFMQLIHDDSLTFKEDIQKAQVSGQGDSLHEHIANLAGSPAIKKGILQTVKVVDELVKVMGRHKPENIVIEMARENQTTQKGQKNSRERMKRIEEGIKELGSQILKEHPVENTQLQNEKLYLYYLQNGRDMYVDQELDINRLSDYDVDHIVPQSFLKDDSIDNKVLTRSDKARGKSDNVPSEEVVKKMKNYWRQLLNAKLITQRKFDNLTKAERGGLSELDKAGFIKRQLVETRQITKHVAQILDSRMNTKYDENDKLIREVKVITLKSKLVSDFRKDFQFYKVREINNYHHAHDAYLNAVVGTALIKKYPKLESEFVYGDYKVYDVRKMIAKSEQEIGKATAKYFFYSNIMNFFKTEITLANGEIRKRPLIETNGETGEIVWDKGRDFATVRKVLSMPQVNIVKKTEVQTGGFSKESILPKRNSDKLIARKKDWDPKKYGGFDSPTVAYSVLVVAKVEKGKSKKLKSVKELLGITIMERSSFEKNPIDFLEAKGYKEVKKDLIIKLPKYSLFELENGRKRMLASAGELQKGNELALPSKYVNFLYLASHYEKLKGSPEDNEQKQLFVEQHKHYLDEIIEQISEFSKRVILADANLDKVLSAYNKHRDKPIREQAENIIHLFTLTNLGAPAAFKYFDTTIDRKRYTSTKEVLDATLIHQSITGLYETRIDLSQLGGDGGPAPEAAAKGGSGGTAPLEEEYRLFLEAPIQNVTLLEQWKREIPKVWAEINPPGLASTQAPIHVQLLSTALPVRVRQYPITLEAKRSLRETIRKFRAAGILRPVHSPWNTPLLPVRKSGTSEYRMVQDLREVNKRVETIHPTVPNPYTLLSLLPPDRIWYSVLDLKDAFFCIPLAPESQLIFAFEWADAEEGESGQLTWTRLPQGFKNSPTLFNEALNRDLQGFRLDHPSVSLLQYVDDLLIAADTQAACLSATRDLLMTLAELGYRVSGKKAQLCQEEVTYLGFKIHKGSRSLSNSRTQAILQIPVPKTKRQVREFLGKIGYCRLFIPGFAELAQPLYAATRPGNDPLVWGEKEEEAFQSLKLALTQPPALALPSLDKPFQLFVEETSGAAKGVLTQALGPWKRPVAYLSKRLDPVAAGWPRCLRAIAAAALLTREASKLTFGQDIEITSSHNLESLLRSPPDKWLTNARITQYQVLLLDPPRVRFKQTAALNPATLLPETDDTLPIHHCLDTLDSLTSTRPDLTDQPLAQAEATLFTDGSSYIRDGKRYAGAAVVTLDSVIWAEPLPIGTSAQKAELIALTKALEWSKDKSVNIYTDSRYAFATLHVHGMIYRERGWLTAGGKAIKNAPEILALLTAVWLPKRVAVMHCKGHQKDDAPTSTGNRRADEVAREVAIRPLSTQATISAGKRTADGSEFEKRTADGSEFESPKKKAKVE

SEQ ID NO: 1378 - protein, 2092 aa, synthetic construct
MPAAKRVKLDGGDKKYSIGLDIGTNSVGWAVITDEYKVPSKKFKVLGNTDRHSIKKNLIGALLFDSGETAEATRLKRTARRRYTRRKNRICYLQEIFSNEMAKVDDSFFHRLEESFLVEEDKKHERHPIFGNIVDEVAYHEKYPTIYHLRKKLVDSTDKADLRLIYLALAHMIKFRGHFLIEGDLNPDNSDVDKLFIQLVQTYNQLFEENPINASGVDAKAILSARLSKSRRLENLIAQLPGEKKNGLFGNLIALSLGLTPNFKSNFDLAEDAKLQLSKDTYDDDLDNLLAQIGDQYADLFLAAKNLSDAILLSDILRVNTEITKAPLSASMIKRYDEHHQDLTLLKALVRQQLPEKYKEIFFDQSKNGYAGYIDGGASQEEFYKFIKPILEKMDGTEELLVKLNREDLLRKQRTFDNGSIPHQIHLGELHAILRRQEDFYPFLKDNREKIEKILTFRIPYYVGPLARGNSRFAWMTRKSEETITPWNFEEVVDKGASAQSFIERMTNFDKNLPNEKVLPKHSLLYEYFTVYNELTKVKYVTEGMRKPAFLSGEQKKAIVDLLFKTNRKVTVKQLKEDYFKKIECFDSVEISGVEDRFNASLGTYHDLLKIIKDKDFLDNEENEDILEDIVLTLTLFEDREMIEERLKTYAHLFDDKVMKQLKRRRYTGWGRLSRKLINGIRDKQSGKTILDFLKSDGFANRNFMQLIHDDSLTFKEDIQKAQVSGQGDSLHEHIANLAGSPAIKKGILQTVKVVDELVKVMGRHKPENIVIEMARENQTTQKGQKNSRERMKRIEEGIKELGSQILKEHPVENTQLQNEKLYLYYLQNGRDMYVDQELDINRLSDYDVDHIVPQSFLKDDSIDNKVLTRSDKARGKSDNVPSEEVVKKMKNYWRQLLNAKLITQRKFDNLTKAERGGLSELDKAGFIKRQLVETRQITKHVAQILDSRMNTKYDENDKLIREVKVITLKSKLVSDFRKDFQFYKVREINNYHHAHDAYLNAVVGTALIKKYPKLESEFVYGDYKVYDVRKMIAKSEQEIGKATAKYFFYSNIMNFFKTEITLANGEIRKRPLIETNGETGEIVWDKGRDFATVRKVLSMPQVNIVKKTEVQTGGFSKESILPKRNSDKLIARKKDWDPKKYGGFDSPTVAYSVLVVAKVEKGKSKKLKSVKELLGITIMERSSFEKNPIDFLEAKGYKEVKKDLIIKLPKYSLFELENGRKRMLASAGELQKGNELALPSKYVNFLYLASHYEKLKGSPEDNEQKQLFVEQHKHYLDEIIEQISEFSKRVILADANLDKVLSAYNKHRDKPIREQAENIIHLFTLTNLGAPAAFKYFDTTIDRKRYTSTKEVLDATLIHQSITGLYETRIDLSQLGGDGGPAPAPGGTAPLEEEYRLFLEAPIQNVTLLEQWKREIPKVWAEINPPGLASTQAPIHVQLLSTALPVRVRQYPITLEAKRSLRETIRKFRAAGILRPVHSPWNTPLLPVRKSGTSEYRMVQDLREVNKRVETIHPTVPNPYTLLSLLPPDRIWYSVLDLKDAFFCIPLAPESQLIFAFEWADAEEGESGQLTWTRLPQGFKNSPTLFNEALNRDLQGFRLDHPSVSLLQYVDDLLIAADTQAACLSATRDLLMTLAELGYRVSGKKAQLCQEEVTYLGFKIHKGSRSLSNSRTQAILQIPVPKTKRQVREFLGKIGYCRLFIPGFAELAQPLYAATRPGNDPLVWGEKEEEAFQSLKLALTQPPALALPSLDKPFQLFVEETSGAAKGVLTQALGPWKRPVAYLSKRLDPVAAGWPRCLRAIAAAALLTREASKLTFGQDIEITSSHNLESLLRSPPDKWLTNARITQYQVLLLDPPRVRFKQTAALNPATLLPETDDTLPIHHCLDTLDSLTSTRPDLTDQPLAQAEATLFTDGSSYIRDGKRYAGAAVVTLDSVIWAEPLPIGTSAQKAELIALTKALEWSKDKSVNIYTDSRYAFATLHVHGMIYRERGWLTAGGKAIKNAPEILALLTAVWLPKRVAVMHCKGHQKDDAPTSTGNRRADEVAREVAIRPLSTQATISAGKRTADGSEFEKRTADGSEFESPKKKAKVE

SEQ ID NO: 1379 - protein, 2098 aa, synthetic construct
MPAAKRVKLDGGDKKYSIGLDIGTNSVGWAVITDEYKVPSKKFKVLGNTDRHSIKKNLIGALLFDSGETAEATRLKRTARRRYTRRKNRICYLQEIFSNEMAKVDDSFFHRLEESFLVEEDKKHERHPIFGNIVDEVAYHEKYPTIYHLRKKLVDSTDKADLRLIYLALAHMIKFRGHFLIEGDLNPDNSDVDKLFIQLVQTYNQLFEENPINASGVDAKAILSARLSKSRRLENLIAQLPGEKKNGLFGNLIALSLGLTPNFKSNFDLAEDAKLQLSKDTYDDDLDNLLAQIGDQYADLFLAAKNLSDAILLSDILRVNTEITKAPLSASMIKRYDEHHQDLTLLKALVRQQLPEKYKEIFFDQSKNGYAGYIDGGASQEEFYKFIKPILEKMDGTEELLVKLNREDLLRKQRTFDNGSIPHQIHLGELHAILRRQEDFYPFLKDNREKIEKILTFRIPYYVGPLARGNSRFAWMTRKSEETITPWNFEEVVDKGASAQSFIERMTNFDKNLPNEKVLPKHSLLYEYFTVYNELTKVKYVTEGMRKPAFLSGEQKKAIVDLLFKTNRKVTVKQLKEDYFKKIECFDSVEISGVEDRFNASLGTYHDLLKIIKDKDFLDNEENEDILEDIVLTLTLFEDREMIEERLKTYAHLFDDKVMKQLKRRRYTGWGRLSRKLINGIRDKQSGKTILDFLKSDGFANRNFMQLIHDDSLTFKEDIQKAQVSGQGDSLHEHIANLAGSPAIKKGILQTVKVVDELVKVMGRHKPENIVIEMARENQTTQKGQKNSRERMKRIEEGIKELGSQILKEHPVENTQLQNEKLYLYYLQNGRDMYVDQELDINRLSDYDVDHIVPQSFLKDDSIDNKVLTRSDKARGKSDNVPSEEVVKKMKNYWRQLLNAKLITQRKFDNLTKAERGGLSELDKAGFIKRQLVETRQITKHVAQILDSRMNTKYDENDKLIREVKVITLKSKLVSDFRKDFQFYKVREINNYHHAHDAYLNAVVGTALIKKYPKLESEFVYGDYKVYDVRKMIAKSEQEIGKATAKYFFYSNIMNFFKTEITLANGEIRKRPLIETNGETGEIVWDKGRDFATVRKVLSMPQVNIVKKTEVQTGGFSKESILPKRNSDKLIARKKDWDPKKYGGFDSPTVAYSVLVVAKVEKGKSKKLKSVKELLGITIMERSSFEKNPIDFLEAKGYKEVKKDLIIKLPKYSLFELENGRKRMLASAGELQKGNELALPSKYVNFLYLASHYEKLKGSPEDNEQKQLFVEQHKHYLDEIIEQISEFSKRVILADANLDKVLSAYNKHRDKPIREQAENIIHLFTLTNLGAPAAFKYFDTTIDRKRYTSTKEVLDATLIHQSITGLYETRIDLSQLGGDGGGGGEAAAKGGSGGTAPLEEEYRLFLEAPIQNVTLLEQWKREIPKVWAEINPPGLASTQAPIHVQLLSTALPVRVRQYPITLEAKRSLRETIRKFRAAGILRPVHSPWNTPLLPVRKSGTSEYRMVQDLREVNKRVETIHPTVPNPYTLLSLLPPDRIWYSVLDLKDAFFCIPLAPESQLIFAFEWADAEEGESGQLTWTRLPQGFKNSPTLFNEALNRDLQGFRLDHPSVSLLQYVDDLLIAADTQAACLSATRDLLMTLAELGYRVSGKKAQLCQEEVTYLGFKIHKGSRSLSNSRTQAILQIPVPKTKRQVREFLGKIGYCRLFIPGFAELAQPLYAATRPGNDPLVWGEKEEEAFQSLKLALTQPPALALPSLDKPFQLFVEETSGAAKGVLTQALGPWKRPVAYLSKRLDPVAAGWPRCLRAIAAAALLTREASKLTFGQDIEITSSHNLESLLRSPPDKWLTNARITQYQVLLLDPPRVRFKQTAALNPATLLPETDDTLPIHHCLDTLDSLTSTRPDLTDQPLAQAEATLFTDGSSYIRDGKRYAGAAVVTLDSVIWAEPLPIGTSAQKAELIALTKALEWSKDKSVNIYTDSRYAFATLHVHGMIYRERGWLTAGGKAIKNAPEILALLTAVWLPKRVAVMHCKGHQKDDAPTSTGNRRADEVAREVAIRPLSTQATISAGKRTADGSEFEKRTADGSEFESPKKKAKVE

SEQ ID NO: 1380 - protein, 2092 aa, synthetic construct
MPAAKRVKLDGGDKKYSIGLDIGTNSVGWAVITDEYKVPSKKFKVLGNTDRHSIKKNLIGALLFDSGETAEATRLKRTARRRYTRRKNRICYLQEIFSNEMAKVDDSFFHRLEESFLVEEDKKHERHPIFGNIVDEVAYHEKYPTIYHLRKKLVDSTDKADLRLIYLALAHMIKFRGHFLIEGDLNPDNSDVDKLFIQLVQTYNQLFEENPINASGVDAKAILSARLSKSRRLENLIAQLPGEKKNGLFGNLIALSLGLTPNFKSNFDLAEDAKLQLSKDTYDDDLDNLLAQIGDQYADLFLAAKNLSDAILLSDILRVNTEITKAPLSASMIKRYDEHHQDLTLLKALVRQQLPEKYKEIFFDQSKNGYAGYIDGGASQEEFYKFIKPILEKMDGTEELLVKLNREDLLRKQRTFDNGSIPHQIHLGELHAILRRQEDFYPFLKDNREKIEKILTFRIPYYVGPLARGNSRFAWMTRKSEETITPWNFEEVVDKGASAQSFIERMTNFDKNLPNEKVLPKHSLLYEYFTVYNELTKVKYVTEGMRKPAFLSGEQKKAIVDLLFKTNRKVTVKQLKEDYFKKIECFDSVEISGVEDRFNASLGTYHDLLKIIKDKDFLDNEENEDILEDIVLTLTLFEDREMIEERLKTYAHLFDDKVMKQLKRRRYTGWGRLSRKLINGIRDKQSGKTILDFLKSDGFANRNFMQLIHDDSLTFKEDIQKAQVSGQGDSLHEHIANLAGSPAIKKGILQTVKVVDELVKVMGRHKPENIVIEMARENQTTQKGQKNSRERMKRIEEGIKELGSQILKEHPVENTQLQNEKLYLYYLQNGRDMYVDQELDINRLSDYDVDHIVPQSFLKDDSIDNKVLTRSDKARGKSDNVPSEEVVKKMKNYWRQLLNAKLITQRKFDNLTKAERGGLSELDKAGFIKRQLVETRQITKHVAQILDSRMNTKYDENDKLIREVKVITLKSKLVSDFRKDFQFYKVREINNYHHAHDAYLNAVVGTALIKKYPKLESEFVYGDYKVYDVRKMIAKSEQEIGKATAKYFFYSNIMNFFKTEITLANGEIRKRPLIETNGETGEIVWDKGRDFATVRKVLSMPQVNIVKKTEVQTGGFSKESILPKRNSDKLIARKKDWDPKKYGGFDSPTVAYSVLVVAKVEKGKSKKLKSVKELLGITIMERSSFEKNPIDFLEAKGYKEVKKDLIIKLPKYSLFELENGRKRMLASAGELQKGNELALPSKYVNFLYLASHYEKLKGSPEDNEQKQLFVEQHKHYLDEIIEQISEFSKRVILADANLDKVLSAYNKHRDKPIREQAENIIHLFTLTNLGAPAAFKYFDTTIDRKRYTSTKEVLDATLIHQSITGLYETRIDLSQLGGDGGEAAAKGGTAPLEEEYRLFLEAPIQNVTLLEQWKREIPKVWAEINPPGLASTQAPIHVQLLSTALPVRVRQYPITLEAKRSLRETIRKFRAAGILRPVHSPWNTPLLPVRKSGTSEYRMVQDLREVNKRVETIHPTVPNPYTLLSLLPPDRIWYSVLDLKDAFFCIPLAPESQLIFAFEWADAEEGESGQLTWTRLPQGFKNSPTLFNEALNRDLQGFRLDHPSVSLLQYVDDLLIAADTQAACLSATRDLLMTLAELGYRVSGKKAQLCQEEVTYLGFKIHKGSRSLSNSRTQAILQIPVPKTKRQVREFLGKIGYCRLFIPGFAELAQPLYAATRPGNDPLVWGEKEEEAFQSLKLALTQPPALALPSLDKPFQLFVEETSGAAKGVLTQALGPWKRPVAYLSKRLDPVAAGWPRCLRAIAAAALLTREASKLTFGQDIEITSSHNLESLLRSPPDKWLTNARITQYQVLLLDPPRVRFKQTAALNPATLLPETDDTLPIHHCLDTLDSLTSTRPDLTDQPLAQAEATLFTDGSSYIRDGKRYAGAAVVTLDSVIWAEPLPIGTSAQKAELIALTKALEWSKDKSVNIYTDSRYAFATLHVHGMIYRERGWLTAGGKAIKNAPEILALLTAVWLPKRVAVMHCKGHQKDDAPTSTGNRRADEVAREVAIRPLSTQATISAGKRTADGSEFEKRTADGSEFESPKKKAKVE

SEQ ID NO: 1381 - protein, 2098 aa, synthetic construct
MPAAKRVKLDGGDKKYSIGLDIGTNSVGWAVITDEYKVPSKKFKVLGNTDRHSIKKNLIGALLFDSGETAEATRLKRTARRRYTRRKNRICYLQEIFSNEMAKVDDSFFHRLEESFLVEEDKKHERHPIFGNIVDEVAYHEKYPTIYHLRKKLVDSTDKADLRLIYLALAHMIKFRGHFLIEGDLNPDNSDVDKLFIQLVQTYNQLFEENPINASGVDAKAILSARLSKSRRLENLIAQLPGEKKNGLFGNLIALSLGLTPNFKSNFDLAEDAKLQLSKDTYDDDLDNLLAQIGDQYADLFLAAKNLSDAILLSDILRVNTEITKAPLSASMIKRYDEHHQDLTLLKALVRQQLPEKYKEIFFDQSKNGYAGYIDGGASQEEFYKFIKPILEKMDGTEELLVKLNREDLLRKQRTFDNGSIPHQIHLGELHAILRRQEDFYPFLKDNREKIEKILTFRIPYYVGPLARGNSRFAWMTRKSEETITPWNFEEVVDKGASAQSFIERMTNFDKNLPNEKVLPKHSLLYEYFTVYNELTKVKYVTEGMRKPAFLSGEQKKAIVDLLFKTNRKVTVKQLKEDYFKKIECFDSVEISGVEDRFNASLGTYHDLLKIIKDKDFLDNEENEDILEDIVLTLTLFEDREMIEERLKTYAHLFDDKVMKQLKRRRYTGWGRLSRKLINGIRDKQSGKTILDFLKSDGFANRNFMQLIHDDSLTFKEDIQKAQVSGQGDSLHEHIANLAGSPAIKKGILQTVKVVDELVKVMGRHKPENIVIEMARENQTTQKGQKNSRERMKRIEEGIKELGSQILKEHPVENTQLQNEKLYLYYLQNGRDMYVDQELDINRLSDYDVDHIVPQSFLKDDSIDNKVLTRSDKARGKSDNVPSEEVVKKMKNYWRQLLNAKLITQRKFDNLTKAERGGLSELDKAGFIKRQLVETRQITKHVAQILDSRMNTKYDENDKLIREVKVITLKSKLVSDFRKDFQFYKVREINNYHHAHDAYLNAVVGTALIKKYPKLESEFVYGDYKVYDVRKMIAKSEQEIGKATAKYFFYSNIMNFFKTEITLANGEIRKRPLIETNGETGEIVWDKGRDFATVRKVLSMPQVNIVKKTEVQTGGFSKESILPKRNSDKLIARKKDWDPKKYGGFDSPTVAYSVLVVAKVEKGKSKKLKSVKELLGITIMERSSFEKNPIDFLEAKGYKEVKKDLIIKLPKYSLFELENGRKRMLASAGELQKGNELALPSKYVNFLYLASHYEKLKGSPEDNEQKQLFVEQHKHYLDEIIEQISEFSKRVILADANLDKVLSAYNKHRDKPIREQAENIIHLFTLTNLGAPAAFKYFDTTIDRKRYTSTKEVLDATLIHQSITGLYETRIDLSQLGGDGGGSSEAAAKPAPGGTAPLEEEYRLFLEAPIQNVTLLEQWKREIPKVWAEINPPGLASTQAPIHVQLLSTALPVRVRQYPITLEAKRSLRETIRKFRAAGILRPVHSPWNTPLLPVRKSGTSEYRMVQDLREVNKRVETIHPTVPNPYTLLSLLPPDRIWYSVLDLKDAFFCIPLAPESQLIFAFEWADAEEGESGQLTWTRLPQGFKNSPTLFNEALNRDLQGFRLDHPSVSLLQYVDDLLIAADTQAACLSATRDLLMTLAELGYRVSGKKAQLCQEEVTYLGFKIHKGSRSLSNSRTQAILQIPVPKTKRQVREFLGKIGYCRLFIPGFAELAQPLYAATRPGNDPLVWGEKEEEAFQSLKLALTQPPALALPSLDKPFQLFVEETSGAAKGVLTQALGPWKRPVAYLSKRLDPVAAGWPRCLRAIAAAALLTREASKLTFGQDIEITSSHNLESLLRSPPDKWLTNARITQYQVLLLDPPRVRFKQTAALNPATLLPETDDTLPIHHCLDTLDSLTSTRPDLTDQPLAQAEATLFTDGSSYIRDGKRYAGAAVVTLDSVIWAEPLPIGTSAQKAELIALTKALEWSKDKSVNIYTDSRYAFATLHVHGMIYRERGWLTAGGKAIKNAPEILALLTAVWLPKRVAVMHCKGHQKDDAPTSTGNRRADEVAREVAIRPLSTQATISAGKRTADGSEFEKRTADGSEFESPKKKAKVE

SEQ ID NO: 1382 - protein, 2105 aa, synthetic construct
MPAAKRVKLDGGDKKYSIGLDIGTNSVGWAVITDEYKVPSKKFKVLGNTDRHSIKKNLIGALLFDSGETAEATRLKRTARRRYTRRKNRICYLQEIFSNEMAKVDDSFFHRLEESFLVEEDKKHERHPIFGNIVDEVAYHEKYPTIYHLRKKLVDSTDKADLRLIYLALAHMIKFRGHFLIEGDLNPDNSDVDKLFIQLVQTYNQLFEENPINASGVDAKAILSARLSKSRRLENLIAQLPGEKKNGLFGNLIALSLGLTPNFKSNFDLAEDAKLQLSKDTYDDDLDNLLAQIGDQYADLFLAAKNLSDAILLSDILRVNTEITKAPLSASMIKRYDEHHQDLTLLKALVRQQLPEKYKEIFFDQSKNGYAGYIDGGASQEEFYKFIKPILEKMDGTEELLVKLNREDLLRKQRTFDNGSIPHQIHLGELHAILRRQEDFYPFLKDNREKIEKILTFRIPYYVGPLARGNSRFAWMTRKSEETITPWNFEEVVDKGASAQSFIERMTNFDKNLPNEKVLPKHSLLYEYFTVYNELTKVKYVTEGMRKPAFLSGEQKKAIVDLLFKTNRKVTVKQLKEDYFKKIECFDSVEISGVEDRFNASLGTYHDLLKIIKDKDFLDNEENEDILEDIVLTLTLFEDREMIEERLKTYAHLFDDKVMKQLKRRRYTGWGRLSRKLINGIRDKQSGKTILDFLKSDGFANRNFMQLIHDDSLTFKEDIQKAQVSGQGDSLHEHIANLAGSPAIKKGILQTVKVVDELVKVMGRHKPENIVIEMARENQTTQKGQKNSRERMKRIEEGIKELGSQILKEHPVENTQLQNEKLYLYYLQNGRDMYVDQELDINRLSDYDVDHIVPQSFLKDDSIDNKVLTRSDKARGKSDNVPSEEVVKKMKNYWRQLLNAKLITQRKFDNLTKAERGGLSELDKAGFIKRQLVETRQITKHVAQILDSRMNTKYDENDKLIREVKVITLKSKLVSDFRKDFQFYKVREINNYHHAHDAYLNAVVGTALIKKYPKLESEFVYGDYKVYDVRKMIAKSEQEIGKATAKYFFYSNIMNFFKTEITLANGEIRKRPLIETNGETGEIVWDKGRDFATVRKVLSMPQVNIVKKTEVQTGGFSKESILPKRNSDKLIARKKDWDPKKYGGFDSPTVAYSVLVVAKVEKGKSKKLKSVKELLGITIMERSSFEKNPIDFLEAKGYKEVKKDLIIKLPKYSLFELENGRKRMLASAGELQKGNELALPSKYVNFLYLASHYEKLKGSPEDNEQKQLFVEQHKHYLDEIIEQISEFSKRVILADANLDKVLSAYNKHRDKPIREQAENIIHLFTLTNLGAPAAFKYFDTTIDRKRYTSTKEVLDATLIHQSITGLYETRIDLSQLGGDGGGSSGSSGSSGSSGSSGSSGGTAPLEEEYRLFLEAPIQNVTLLEQWKREIPKVWAEINPPGLASTQAPIHVQLLSTALPVRVRQYPITLEAKRSLRETIRKFRAAGILRPVHSPWNTPLLPVRKSGTSEYRMVQDLREVNKRVETIHPTVPNPYTLLSLLPPDRIWYSVLDLKDAFFCIPLAPESQLIFAFEWADAEEGESGQLTWTRLPQGFKNSPTLFNEALNRDLQGFRLDHPSVSLLQYVDDLLIAADTQAACLSATRDLLMTLAELGYRVSGKKAQLCQEEVTYLGFKIHKGSRSLSNSRTQAILQIPVPKTKRQVREFLGKIGYCRLFIPGFAELAQPLYAATRPGNDPLVWGEKEEEAFQSLKLALTQPPALALPSLDKPFQLFVEETSGAAKGVLTQALGPWKRPVAYLSKRLDPVAAGWPRCLRAIAAAALLTREASKLTFGQDIEITSSHNLESLLRSPPDKWLTNARITQYQVLLLDPPRVRFKQTAALNPATLLPETDDTLPIHHCLDTLDSLTSTRPDLTDQPLAQAEATLFTDGSSYIRDGKRYAGAAVVTLDSVIWAEPLPIGTSAQKAELIALTKALEWSKDKSVNIYTDSRYAFATLHVHGMIYRERGWLTAGGKAIKNAPEILALLTAVWLPKRVAVMHCKGHQKDDAPTSTGNRRADEVAREVAIRPLSTQATISAGKRTADGSEFEKRTADGSEFESPKKKAKVE

SEQ ID NO: 1383 - protein, 2096 aa, synthetic construct
MPAAKRVKLDGGDKKYSIGLDIGTNSVGWAVITDEYKVPSKKFKVLGNTDRHSIKKNLIGALLFDSGETAEATRLKRTARRRYTRRKNRICYLQEIFSNEMAKVDDSFFHRLEESFLVEEDKKHERHPIFGNIVDEVAYHEKYPTIYHLRKKLVDSTDKADLRLIYLALAHMIKFRGHFLIEGDLNPDNSDVDKLFIQLVQTYNQLFEENPINASGVDAKAILSARLSKSRRLENLIAQLPGEKKNGLFGNLIALSLGLTPNFKSNFDLAEDAKLQLSKDTYDDDLDNLLAQIGDQYADLFLAAKNLSDAILLSDILRVNTEITKAPLSASMIKRYDEHHQDLTLLKALVRQQLPEKYKEIFFDQSKNGYAGYIDGGASQEEFYKFIKPILEKMDGTEELLVKLNREDLLRKQRTFDNGSIPHQIHLGELHAILRRQEDFYPFLKDNREKIEKILTFRIPYYVGPLARGNSRFAWMTRKSEETITPWNFEEVVDKGASAQSFIERMTNFDKNLPNEKVLPKHSLLYEYFTVYNELTKVKYVTEGMRKPAFLSGEQKKAIVDLLFKTNRKVTVKQLKEDYFKKIECFDSVEISGVEDRFNASLGTYHDLLKIIKDKDFLDNEENEDILEDIVLTLTLFEDREMIEERLKTYAHLFDDKVMKQLKRRRYTGWGRLSRKLINGIRDKQSGKTILDFLKSDGFANRNFMQLIHDDSLTFKEDIQKAQVSGQGDSLHEHIANLAGSPAIKKGILQTVKVVDELVKVMGRHKPENIVIEMARENQTTQKGQKNSRERMKRIEEGIKELGSQILKEHPVENTQLQNEKLYLYYLQNGRDMYVDQELDINRLSDYDVDHIVPQSFLKDDSIDNKVLTRSDKARGKSDNVPSEEVVKKMKNYWRQLLNAKLITQRKFDNLTKAERGGLSELDKAGFIKRQLVETRQITKHVAQILDSRMNTKYDENDKLIREVKVITLKSKLVSDFRKDFQFYKVREINNYHHAHDAYLNAVVGTALIKKYPKLESEFVYGDYKVYDVRKMIAKSEQEIGKATAKYFFYSNIMNFFKTEITLANGEIRKRPLIETNGETGEIVWDKGRDFATVRKVLSMPQVNIVKKTEVQTGGFSKESILPKRNSDKLIARKKDWDPKKYGGFDSPTVAYSVLVVAKVEKGKSKKLKSVKELLGITIMERSSFEKNPIDFLEAKGYKEVKKDLIIKLPKYSLFELENGRKRMLASAGELQKGNELALPSKYVNFLYLASHYEKLKGSPEDNEQKQLFVEQHKHYLDEIIEQISEFSKRVILADANLDKVLSAYNKHRDKPIREQAENIIHLFTLTNLGAPAAFKYFDTTIDRKRYTSTKEVLDATLIHQSITGLYETRIDLSQLGGDGGGGSPAPGGGGGTAPLEEEYRLFLEAPIQNVTLLEQWKREIPKVWAEINPPGLASTQAPIHVQLLSTALPVRVRQYPITLEAKRSLRETIRKFRAAGILRPVHSPWNTPLLPVRKSGTSEYRMVQDLREVNKRVETIHPTVPNPYTLLSLLPPDRIWYSVLDLKDAFFCIPLAPESQLIFAFEWADAEEGESGQLTWTRLPQGFKNSPTLFNEALNRDLQGFRLDHPSVSLLQYVDDLLIAADTQAACLSATRDLLMTLAELGYRVSGKKAQLCQEEVTYLGFKIHKGSRSLSNSRTQAILQIPVPKTKRQVREFLGKIGYCRLFIPGFAELAQPLYAATRPGNDPLVWGEKEEEAFQSLKLALTQPPALALPSLDKPFQLFVEETSGAAKGVLTQALGPWKRPVAYLSKRLDPVAAGWPRCLRAIAAAALLTREASKLTFGQDIEITSSHNLESLLRSPPDKWLTNARITQYQVLLLDPPRVRFKQTAALNPATLLPETDDTLPIHHCLDTLDSLTSTRPDLTDQPLAQAEATLFTDGSSYIRDGKRYAGAAVVTLDSVIWAEPLPIGTSAQKAELIALTKALEWSKDKSVNIYTDSRYAFATLHVHGMIYRERGWLTAGGKAIKNAPEILALLTAVWLPKRVAVMHCKGHQKDDAPTSTGNRRADEVAREVAIRPLSTQATISAGKRTADGSEFEKRTADGSEFESPKKKAKVE

SEQ ID NO: 1384 - protein, 2098 aa, synthetic construct
MPAAKRVKLDGGDKKYSIGLDIGTNSVGWAVITDEYKVPSKKFKVLGNTDRHSIKKNLIGALLFDSGETAEATRLKRTARRRYTRRKNRICYLQEIFSNEMAKVDDSFFHRLEESFLVEEDKKHERHPIFGNIVDEVAYHEKYPTIYHLRKKLVDSTDKADLRLIYLALAHMIKFRGHFLIEGDLNPDNSDVDKLFIQLVQTYNQLFEENPINASGVDAKAILSARLSKSRRLENLIAQLPGEKKNGLFGNLIALSLGLTPNFKSNFDLAEDAKLQLSKDTYDDDLDNLLAQIGDQYADLFLAAKNLSDAILLSDILRVNTEITKAPLSASMIKRYDEHHQDLTLLKALVRQQLPEKYKEIFFDQSKNGYAGYIDGGASQEEFYKFIKPILEKMDGTEELLVKLNREDLLRKQRTFDNGSIPHQIHLGELHAILRRQEDFYPFLKDNREKIEKILTFRIPYYVGPLARGNSRFAWMTRKSEETITPWNFEEVVDKGASAQSFIERMTNFDKNLPNEKVLPKHSLLYEYFTVYNELTKVKYVTEGMRKPAFLSGEQKKAIVDLLFKTNRKVTVKQLKEDYFKKIECFDSVEISGVEDRFNASLGTYHDLLKIIKDKDFLDNEENEDILEDIVLTLTLFEDREMIEERLKTYAHLFDDKVMKQLKRRRYTGWGRLSRKLINGIRDKQSGKTILDFLKSDGFANRNFMQLIHDDSLTFKEDIQKAQVSGQGDSLHEHIANLAGSPAIKKGILQTVKVVDELVKVMGRHKPENIVIEMARENQTTQKGQKNSRERMKRIEEGIKELGSQILKEHPVENTQLQNEKLYLYYLQNGRDMYVDQELDINRLSDYDVDHIVPQSFLKDDSIDNKVLTRSDKARGKSDNVPSEEVVKKMKNYWRQLLNAKLITQRKFDNLTKAERGGLSELDKAGFIKRQLVETRQITKHVAQILDSRMNTKYDENDKLIREVKVITLKSKLVSDFRKDFQFYKVREINNYHHAHDAYLNAVVGTALIKKYPKLESEFVYGDYKVYDVRKMIAKSEQEIGKATAKYFFYSNIMNFFKTEITLANGEIRKRPLIETNGETGEIVWDKGRDFATVRKVLSMPQVNIVKKTEVQTGGFSKESILPKRNSDKLIARKKDWDPKKYGGFDSPTVAYSVLVVAKVEKGKSKKLKSVKELLGITIMERSSFEKNPIDFLEAKGYKEVKKDLIIKLPKYSLFELENGRKRMLASAGELQKGNELALPSKYVNFLYLASHYEKLKGSPEDNEQKQLFVEQHKHYLDEIIEQISEFSKRVILADANLDKVLSAYNKHRDKPIREQAENIIHLFTLTNLGAPAAFKYFDTTIDRKRYTSTKEVLDATLIHQSITGLYETRIDLSQLGGDGGGGGEAAAKPAPGGTAPLEEEYRLFLEAPIQNVTLLEQWKREIPKVWAEINPPGLASTQAPIHVQLLSTALPVRVRQYPITLEAKRSLRETIRKFRAAGILRPVHSPWNTPLLPVRKSGTSEYRMVQDLREVNKRVETIHPTVPNPYTLLSLLPPDRIWYSVLDLKDAFFCIPLAPESQLIFAFEWADAEEGESGQLTWTRLPQGFKNSPTLFNEALNRDLQGFRLDHPSVSLLQYVDDLLIAADTQAACLSATRDLLMTLAELGYRVSGKKAQLCQEEVTYLGFKIHKGSRSLSNSRTQAILQIPVPKTKRQVREFLGKIGYCRLFIPGFAELAQPLYAATRPGNDPLVWGEKEEEAFQSLKLALTQPPALALPSLDKPFQLFVEETSGAAKGVLTQALGPWKRPVAYLSKRLDPVAAGWPRCLRAIAAAALLTREASKLTFGQDIEITSSHNLESLLRSPPDKWLTNARITQYQVLLLDPPRVRFKQTAALNPATLLPETDDTLPIHHCLDTLDSLTSTRPDLTDQPLAQAEATLFTDGSSYIRDGKRYAGAAVVTLDSVIWAEPLPIGTSAQKAELIALTKALEWSKDKSVNIYTDSRYAFATLHVHGMIYRERGWLTAGGKAIKNAPEILALLTAVWLPKRVAVMHCKGHQKDDAPTSTGNRRADEVAREVAIRPLSTQATISAGKRTADGSEFEKRTADGSEFESPKKKAKVE

SEQ ID NO: 1385 - protein, 2096 aa, synthetic construct
MPAAKRVKLDGGDKKYSIGLDIGTNSVGWAVITDEYKVPSKKFKVLGNTDRHSIKKNLIGALLFDSGETAEATRLKRTARRRYTRRKNRICYLQEIFSNEMAKVDDSFFHRLEESFLVEEDKKHERHPIFGNIVDEVAYHEKYPTIYHLRKKLVDSTDKADLRLIYLALAHMIKFRGHFLIEGDLNPDNSDVDKLFIQLVQTYNQLFEENPINASGVDAKAILSARLSKSRRLENLIAQLPGEKKNGLFGNLIALSLGLTPNFKSNFDLAEDAKLQLSKDTYDDDLDNLLAQIGDQYADLFLAAKNLSDAILLSDILRVNTEITKAPLSASMIKRYDEHHQDLTLLKALVRQQLPEKYKEIFFDQSKNGYAGYIDGGASQEEFYKFIKPILEKMDGTEELLVKLNREDLLRKQRTFDNGSIPHQIHLGELHAILRRQEDFYPFLKDNREKIEKILTFRIPYYVGPLARGNSRFAWMTRKSEETITPWNFEEVVDKGASAQSFIERMTNFDKNLPNEKVLPKHSLLYEYFTVYNELTKVKYVTEGMRKPAFLSGEQKKAIVDLLFKTNRKVTVKQLKEDYFKKIECFDSVEISGVEDRFNASLGTYHDLLKIIKDKDFLDNEENEDILEDIVLTLTLFEDREMIEERLKTYAHLFDDKVMKQLKRRRYTGWGRLSRKLINGIRDKQSGKTILDFLKSDGFANRNFMQLIHDDSLTFKEDIQKAQVSGQGDSLHEHIANLAGSPAIKKGILQTVKVVDELVKVMGRHKPENIVIEMARENQTTQKGQKNSRERMKRIEEGIKELGSQILKEHPVENTQLQNEKLYLYYLQNGRDMYVDQELDINRLSDYDVDHIVPQSFLKDDSIDNKVLTRSDKARGKSDNVPSEEVVKKMKNYWRQLLNAKLITQRKFDNLTKAERGGLSELDKAGFIKRQLVETRQITKHVAQILDSRMNTKYDENDKLIREVKVITLKSKLVSDFRKDFQFYKVREINNYHHAHDAYLNAVVGTALIKKYPKLESEFVYGDYKVYDVRKMIAKSEQEIGKATAKYFFYSNIMNFFKTEITLANGEIRKRPLIETNGETGEIVWDKGRDFATVRKVLSMPQVNIVKKTEVQTGGFSKESILPKRNSDKLIARKKDWDPKKYGGFDSPTVAYSVLVVAKVEKGKSKKLKSVKELLGITIMERSSFEKNPIDFLEAKGYKEVKKDLIIKLPKYSLFELENGRKRMLASAGELQKGNELALPSKYVNFLYLASHYEKLKGSPEDNEQKQLFVEQHKHYLDEIIEQISEFSKRVILADANLDKVLSAYNKHRDKPIREQAENIIHLFTLTNLGAPAAFKYFDTTIDRKRYTSTKEVLDATLIHQSITGLYETRIDLSQLGGDGGPAPGGSGSSGGTAPLEEEYRLFLEAPIQNVTLLEQWKREIPKVWAEINPPGLASTQAPIHVQLLSTALPVRVRQYPITLEAKRSLRETIRKFRAAGILRPVHSPWNTPLLPVRKSGTSEYRMVQDLREVNKRVETIHPTVPNPYTLLSLLPPDRIWYSVLDLKDAFFCIPLAPESQLIFAFEWADAEEGESGQLTWTRLPQGFKNSPTLFNEALNRDLQGFRLDHPSVSLLQYVDDLLIAADTQAACLSATRDLLMTLAELGYRVSGKKAQLCQEEVTYLGFKIHKGSRSLSNSRTQAILQIPVPKTKRQVREFLGKIGYCRLFIPGFAELAQPLYAATRPGNDPLVWGEKEEEAFQSLKLALTQPPALALPSLDKPFQLFVEETSGAAKGVLTQALGPWKRPVAYLSKRLDPVAAGWPRCLRAIAAAALLTREASKLTFGQDIEITSSHNLESLLRSPPDKWLTNARITQYQVLLLDPPRVRFKQTAALNPATLLPETDDTLPIHHCLDTLDSLTSTRPDLTDQPLAQAEATLFTDGSSYIRDGKRYAGAAVVTLDSVIWAEPLPIGTSAQKAELIALTKALEWSKDKSVNIYTDSRYAFATLHVHGMIYRERGWLTAGGKAIKNAPEILALLTAVWLPKRVAVMHCKGHQKDDAPTSTGNRRADEVAREVAIRPLSTQATISAGKRTADGSEFEKRTADGSEFESPKKKAKVE

SEQ ID NO: 1386 - protein, 2099 aa, synthetic construct
MPAAKRVKLDGGDKKYSIGLDIGTNSVGWAVITDEYKVPSKKFKVLGNTDRHSIKKNLIGALLFDSGETAEATRLKRTARRRYTRRKNRICYLQEIFSNEMAKVDDSFFHRLEESFLVEEDKKHERHPIFGNIVDEVAYHEKYPTIYHLRKKLVDSTDKADLRLIYLALAHMIKFRGHFLIEGDLNPDNSDVDKLFIQLVQTYNQLFEENPINASGVDAKAILSARLSKSRRLENLIAQLPGEKKNGLFGNLIALSLGLTPNFKSNFDLAEDAKLQLSKDTYDDDLDNLLAQIGDQYADLFLAAKNLSDAILLSDILRVNTEITKAPLSASMIKRYDEHHQDLTLLKALVRQQLPEKYKEIFFDQSKNGYAGYIDGGASQEEFYKFIKPILEKMDGTEELLVKLNREDLLRKQRTFDNGSIPHQIHLGELHAILRRQEDFYPFLKDNREKIEKILTFRIPYYVGPLARGNSRFAWMTRKSEETITPWNFEEVVDKGASAQSFIERMTNFDKNLPNEKVLPKHSLLYEYFTVYNELTKVKYVTEGMRKPAFLSGEQKKAIVDLLFKTNRKVTVKQLKEDYFKKIECFDSVEISGVEDRFNASLGTYHDLLKIIKDKDFLDNEENEDILEDIVLTLTLFEDREMIEERLKTYAHLFDDKVMKQLKRRRYTGWGRLSRKLINGIRDKQSGKTILDFLKSDGFANRNFMQLIHDDSLTFKEDIQKAQVSGQGDSLHEHIANLAGSPAIKKGILQTVKVVDELVKVMGRHKPENIVIEMARENQTTQKGQKNSRERMKRIEEGIKELGSQILKEHPVENTQLQNEKLYLYYLQNGRDMYVDQELDINRLSDYDVDHIVPQSFLKDDSIDNKVLTRSDKARGKSDNVPSEEVVKKMKNYWRQLLNAKLITQRKFDNLTKAERGGLSELDKAGFIKRQLVETRQITKHVAQILDSRMNTKYDENDKLIREVKVITLKSKLVSDFRKDFQFYKVREINNYHHAHDAYLNAVVGTALIKKYPKLESEFVYGDYKVYDVRKMIAKSEQEIGKATAKYFFYSNIMNFFKTEITLANGEIRKRPLIETNGETGEIVWDKGRDFATVRKVLSMPQVNIVKKTEVQTGGFSKESILPKRNSDKLIARKKDWDPKKYGGFDSPTVAYSVLVVAKVEKGKSKKLKSVKELLGITIMERSSFEKNPIDFLEAKGYKEVKKDLIIKLPKYSLFELENGRKRMLASAGELQKGNELALPSKYVNFLYLASHYEKLKGSPEDNEQKQLFVEQHKHYLDEIIEQISEFSKRVILADANLDKVLSAYNKHRDKPIREQAENIIHLFTLTNLGAPAAFKYFDTTIDRKRYTSTKEVLDATLIHQSITGLYETRIDLSQLGGDGGGSSGSSGSSGSSGGTAPLEEEYRLFLEAPIQNVTLLEQWKREIPKVWAEINPPGLASTQAPIHVQLLSTALPVRVRQYPITLEAKRSLRETIRKFRAAGILRPVHSPWNTPLLPVRKSGTSEYRMVQDLREVNKRVETIHPTVPNPYTLLSLLPPDRIWYSVLDLKDAFFCIPLAPESQLIFAFEWADAEEGESGQLTWTRLPQGFKNSPTLFNEALNRDLQGFRLDHPSVSLLQYVDDLLIAADTQAACLSATRDLLMTLAELGYRVSGKKAQLCQEEVTYLGFKIHKGSRSLSNSRTQAILQIPVPKTKRQVREFLGKIGYCRLFIPGFAELAQPLYAATRPGNDPLVWGEKEEEAFQSLKLALTQPPALALPSLDKPFQLFVEETSGAAKGVLTQALGPWKRPVAYLSKRLDPVAAGWPRCLRAIAAAALLTREASKLTFGQDIEITSSHNLESLLRSPPDKWLTNARITQYQVLLLDPPRVRFKQTAALNPATLLPETDDTLPIHHCLDTLDSLTSTRPDLTDQPLAQAEATLFTDGSSYIRDGKRYAGAAVVTLDSVIWAEPLPIGTSAQKAELIALTKALEWSKDKSVNIYTDSRYAFATLHVHGMIYRERGWLTAGGKAIKNAPEILALLTAVWLPKRVAVMHCKGHQKDDAPTSTGNRRADEVAREVAIRPLSTQATISAGKRTADGSEFEKRTADGSEFESPKKKAKVE

SEQ ID NO: 1387 - protein, 2098 aa, synthetic construct
MPAAKRVKLDGGDKKYSIGLDIGTNSVGWAVITDEYKVPSKKFKVLGNTDRHSIKKNLIGALLFDSGETAEATRLKRTARRRYTRRKNRICYLQEIFSNEMAKVDDSFFHRLEESFLVEEDKKHERHPIFGNIVDEVAYHEKYPTIYHLRKKLVDSTDKADLRLIYLALAHMIKFRGHFLIEGDLNPDNSDVDKLFIQLVQTYNQLFEENPINASGVDAKAILSARLSKSRRLENLIAQLPGEKKNGLFGNLIALSLGLTPNFKSNFDLAEDAKLQLSKDTYDDDLDNLLAQIGDQYADLFLAAKNLSDAILLSDILRVNTEITKAPLSASMIKRYDEHHQDLTLLKALVRQQLPEKYKEIFFDQSKNGYAGYIDGGASQEEFYKFIKPILEKMDGTEELLVKLNREDLLRKQRTFDNGSIPHQIHLGELHAILRRQEDFYPFLKDNREKIEKILTFRIPYYVGPLARGNSRFAWMTRKSEETITPWNFEEVVDKGASAQSFIERMTNFDKNLPNEKVLPKHSLLYEYFTVYNELTKVKYVTEGMRKPAFLSGEQKKAIVDLLFKTNRKVTVKQLKEDYFKKIECFDSVEISGVEDRFNASLGTYHDLLKIIKDKDFLDNEENEDILEDIVLTLTLFEDREMIEERLKTYAHLFDDKVMKQLKRRRYTGWGRLSRKLINGIRDKQSGKTILDFLKSDGFANRNFMQLIHDDSLTFKEDIQKAQVSGQGDSLHEHIANLAGSPAIKKGILQTVKVVDELVKVMGRHKPENIVIEMARENQTTQKGQKNSRERMKRIEEGIKELGSQILKEHPVENTQLQNEKLYLYYLQNGRDMYVDQELDINRLSDYDVDHIVPQSFLKDDSIDNKVLTRSDKARGKSDNVPSEEVVKKMKNYWRQLLNAKLITQRKFDNLTKAERGGLSELDKAGFIKRQLVETRQITKHVAQILDSRMNTKYDENDKLIREVKVITLKSKLVSDFRKDFQFYKVREINNYHHAHDAYLNAVVGTALIKKYPKLESEFVYGDYKVYDVRKMIAKSEQEIGKATAKYFFYSNIMNFFKTEITLANGEIRKRPLIETNGETGEIVWDKGRDFATVRKVLSMPQVNIVKKTEVQTGGFSKESILPKRNSDKLIARKKDWDPKKYGGFDSPTVAYSVLVVAKVEKGKSKKLKSVKELLGITIMERSSFEKNPIDFLEAKGYKEVKKDLIIKLPKYSLFELENGRKRMLASAGELQKGNELALPSKYVNFLYLASHYEKLKGSPEDNEQKQLFVEQHKHYLDEIIEQISEFSKRVILADANLDKVLSAYNKHRDKPIREQAENIIHLFTLTNLGAPAAFKYFDTTIDRKRYTSTKEVLDATLIHQSITGLYETRIDLSQLGGDGGPAPEAAAKGGGGGTAPLEEEYRLFLEAPIQNVTLLEQWKREIPKVWAEINPPGLASTQAPIHVQLLSTALPVRVRQYPITLEAKRSLRETIRKFRAAGILRPVHSPWNTPLLPVRKSGTSEYRMVQDLREVNKRVETIHPTVPNPYTLLSLLPPDRIWYSVLDLKDAFFCIPLAPESQLIFAFEWADAEEGESGQLTWTRLPQGFKNSPTLFNEALNRDLQGFRLDHPSVSLLQYVDDLLIAADTQAACLSATRDLLMTLAELGYRVSGKKAQLCQEEVTYLGFKIHKGSRSLSNSRTQAILQIPVPKTKRQVREFLGKIGYCRLFIPGFAELAQPLYAATRPGNDPLVWGEKEEEAFQSLKLALTQPPALALPSLDKPFQLFVEETSGAAKGVLTQALGPWKRPVAYLSKRLDPVAAGWPRCLRAIAAAALLTREASKLTFGQDIEITSSHNLESLLRSPPDKWLTNARITQYQVLLLDPPRVRFKQTAALNPATLLPETDDTLPIHHCLDTLDSLTSTRPDLTDQPLAQAEATLFTDGSSYIRDGKRYAGAAVVTLDSVIWAEPLPIGTSAQKAELIALTKALEWSKDKSVNIYTDSRYAFATLHVHGMIYRERGWLTAGGKAIKNAPEILALLTAVWLPKRVAVMHCKGHQKDDAPTSTGNRRADEVAREVAIRPLSTQATISAGKRTADGSEFEKRTADGSEFESPKKKAKVE

SEQ ID NO: 1388 - protein, 2098 aa, synthetic construct
MPAAKRVKLDGGDKKYSIGLDIGTNSVGWAVITDEYKVPSKKFKVLGNTDRHSIKKNLIGALLFDSGETAEATRLKRTARRRYTRRKNRICYLQEIFSNEMAKVDDSFFHRLEESFLVEEDKKHERHPIFGNIVDEVAYHEKYPTIYHLRKKLVDSTDKADLRLIYLALAHMIKFRGHFLIEGDLNPDNSDVDKLFIQLVQTYNQLFEENPINASGVDAKAILSARLSKSRRLENLIAQLPGEKKNGLFGNLIALSLGLTPNFKSNFDLAEDAKLQLSKDTYDDDLDNLLAQIGDQYADLFLAAKNLSDAILLSDILRVNTEITKAPLSASMIKRYDEHHQDLTLLKALVRQQLPEKYKEIFFDQSKNGYAGYIDGGASQEEFYKFIKPILEKMDGTEELLVKLNREDLLRKQRTFDNGSIPHQIHLGELHAILRRQEDFYPFLKDNREKIEKILTFRIPYYVGPLARGNSRFAWMTRKSEETITPWNFEEVVDKGASAQSFIERMTNFDKNLPNEKVLPKHSLLYEYFTVYNELTKVKYVTEGMRKPAFLSGEQKKAIVDLLFKTNRKVTVKQLKEDYFKKIECFDSVEISGVEDRFNASLGTYHDLLKIIKDKDFLDNEENEDILEDIVLTLTLFEDREMIEERLKTYAHLFDDKVMKQLKRRRYTGWGRLSRKLINGIRDKQSGKTILDFLKSDGFANRNFMQLIHDDSLTFKEDIQKAQVSGQGDSLHEHIANLAGSPAIKKGILQTVKVVDELVKVMGRHKPENIVIEMARENQTTQKGQKNSRERMKRIEEGIKELGSQILKEHPVENTQLQNEKLYLYYLQNGRDMYVDQELDINRLSDYDVDHIVPQSFLKDDSIDNKVLTRSDKARGKSDNVPSEEVVKKMKNYWRQLLNAKLITQRKFDNLTKAERGGLSELDKAGFIKRQLVETRQITKHVAQILDSRMNTKYDENDKLIREVKVITLKSKLVSDFRKDFQFYKVREINNYHHAHDAYLNAVVGTALIKKYPKLESEFVYGDYKVYDVRKMIAKSEQEIGKATAKYFFYSNIMNFFKTEITLANGEIRKRPLIETNGETGEIVWDKGRDFATVRKVLSMPQVNIVKKTEVQTGGFSKESILPKRNSDKLIARKKDWDPKKYGGFDSPTVAYSVLVVAKVEKGKSKKLKSVKELLGITIMERSSFEKNPIDFLEAKGYKEVKKDLIIKLPKYSLFELENGRKRMLASAGELQKGNELALPSKYVNFLYLASHYEKLKGSPEDNEQKQLFVEQHKHYLDEIIEQISEFSKRVILADANLDKVLSAYNKHRDKPIREQAENIIHLFTLTNLGAPAAFKYFDTTIDRKRYTSTKEVLDATLIHQSITGLYETRIDLSQLGGDGGPAPEAAAKGSSGGTAPLEEEYRLFLEAPIQNVTLLEQWKREIPKVWAEINPPGLASTQAPIHVQLLSTALPVRVRQYPITLEAKRSLRETIRKFRAAGILRPVHSPWNTPLLPVRKSGTSEYRMVQDLREVNKRVETIHPTVPNPYTLLSLLPPDRIWYSVLDLKDAFFCIPLAPESQLIFAFEWADAEEGESGQLTWTRLPQGFKNSPTLFNEALNRDLQGFRLDHPSVSLLQYVDDLLIAADTQAACLSATRDLLMTLAELGYRVSGKKAQLCQEEVTYLGFKIHKGSRSLSNSRTQAILQIPVPKTKRQVREFLGKIGYCRLFIPGFAELAQPLYAATRPGNDPLVWGEKEEEAFQSLKLALTQPPALALPSLDKPFQLFVEETSGAAKGVLTQALGPWKRPVAYLSKRLDPVAAGWPRCLRAIAAAALLTREASKLTFGQDIEITSSHNLESLLRSPPDKWLTNARITQYQVLLLDPPRVRFKQTAALNPATLLPETDDTLPIHHCLDTLDSLTSTRPDLTDQPLAQAEATLFTDGSSYIRDGKRYAGAAVVTLDSVIWAEPLPIGTSAQKAELIALTKALEWSKDKSVNIYTDSRYAFATLHVHGMIYRERGWLTAGGKAIKNAPEILALLTAVWLPKRVAVMHCKGHQKDDAPTSTGNRRADEVAREVAIRPLSTQATISAGKRTADGSEFEKRTADGSEFESPKKKAKVE

SEQ ID NO: 1389 - protein, 2090 aa, synthetic construct
MPAAKRVKLDGGDKKYSIGLDIGTNSVGWAVITDEYKVPSKKFKVLGNTDRHSIKKNLIGALLFDSGETAEATRLKRTARRRYTRRKNRICYLQEIFSNEMAKVDDSFFHRLEESFLVEEDKKHERHPIFGNIVDEVAYHEKYPTIYHLRKKLVDSTDKADLRLIYLALAHMIKFRGHFLIEGDLNPDNSDVDKLFIQLVQTYNQLFEENPINASGVDAKAILSARLSKSRRLENLIAQLPGEKKNGLFGNLIALSLGLTPNFKSNFDLAEDAKLQLSKDTYDDDLDNLLAQIGDQYADLFLAAKNLSDAILLSDILRVNTEITKAPLSASMIKRYDEHHQDLTLLKALVRQQLPEKYKEIFFDQSKNGYAGYIDGGASQEEFYKFIKPILEKMDGTEELLVKLNREDLLRKQRTFDNGSIPHQIHLGELHAILRRQEDFYPFLKDNREKIEKILTFRIPYYVGPLARGNSRFAWMTRKSEETITPWNFEEVVDKGASAQSFIERMTNFDKNLPNEKVLPKHSLLYEYFTVYNELTKVKYVTEGMRKPAFLSGEQKKAIVDLLFKTNRKVTVKQLKEDYFKKIECFDSVEISGVEDRFNASLGTYHDLLKIIKDKDFLDNEENEDILEDIVLTLTLFEDREMIEERLKTYAHLFDDKVMKQLKRRRYTGWGRLSRKLINGIRDKQSGKTILDFLKSDGFANRNFMQLIHDDSLTFKEDIQKAQVSGQGDSLHEHIANLAGSPAIKKGILQTVKVVDELVKVMGRHKPENIVIEMARENQTTQKGQKNSRERMKRIEEGIKELGSQILKEHPVENTQLQNEKLYLYYLQNGRDMYVDQELDINRLSDYDVDHIVPQSFLKDDSIDNKVLTRSDKARGKSDNVPSEEVVKKMKNYWRQLLNAKLITQRKFDNLTKAERGGLSELDKAGFIKRQLVETRQITKHVAQILDSRMNTKYDENDKLIREVKVITLKSKLVSDFRKDFQFYKVREINNYHHAHDAYLNAVVGTALIKKYPKLESEFVYGDYKVYDVRKMIAKSEQEIGKATAKYFFYSNIMNFFKTEITLANGEIRKRPLIETNGETGEIVWDKGRDFATVRKVLSMPQVNIVKKTEVQTGGFSKESILPKRNSDKLIARKKDWDPKKYGGFDSPTVAYSVLVVAKVEKGKSKKLKSVKELLGITIMERSSFEKNPIDFLEAKGYKEVKKDLIIKLPKYSLFELENGRKRMLASAGELQKGNELALPSKYVNFLYLASHYEKLKGSPEDNEQKQLFVEQHKHYLDEIIEQISEFSKRVILADANLDKVLSAYNKHRDKPIREQAENIIHLFTLTNLGAPAAFKYFDTTIDRKRYTSTKEVLDATLIHQSITGLYETRIDLSQLGGDGGGGGGGTAPLEEEYRLFLEAPIQNVTLLEQWKREIPKVWAEINPPGLASTQAPIHVQLLSTALPVRVRQYPITLEAKRSLRETIRKFRAAGILRPVHSPWNTPLLPVRKSGTSEYRMVQDLREVNKRVETIHPTVPNPYTLLSLLPPDRIWYSVLDLKDAFFCIPLAPESQLIFAFEWADAEEGESGQLTWTRLPQGFKNSPTLFNEALNRDLQGFRLDHPSVSLLQYVDDLLIAADTQAACLSATRDLLMTLAELGYRVSGKKAQLCQEEVTYLGFKIHKGSRSLSNSRTQAILQIPVPKTKRQVREFLGKIGYCRLFIPGFAELAQPLYAATRPGNDPLVWGEKEEEAFQSLKLALTQPPALALPSLDKPFQLFVEETSGAAKGVLTQALGPWKRPVAYLSKRLDPVAAGWPRCLRAIAAAALLTREASKLTFGQDIEITSSHNLESLLRSPPDKWLTNARITQYQVLLLDPPRVRFKQTAALNPATLLPETDDTLPIHHCLDTLDSLTSTRPDLTDQPLAQAEATLFTDGSSYIRDGKRYAGAAVVTLDSVIWAEPLPIGTSAQKAELIALTKALEWSKDKSVNIYTDSRYAFATLHVHGMIYRERGWLTAGGKAIKNAPEILALLTAVWLPKRVAVMHCKGHQKDDAPTSTGNRRADEVAREVAIRPLSTQATISAGKRTADGSEFEKRTADGSEFESPKKKAKVE

SEQ ID NO: 1390 - protein, 2098 aa, synthetic construct
MPAAKRVKLDGGDKKYSIGLDIGTNSVGWAVITDEYKVPSKKFKVLGNTDRHSIKKNLIGALLFDSGETAEATRLKRTARRRYTRRKNRICYLQEIFSNEMAKVDDSFFHRLEESFLVEEDKKHERHPIFGNIVDEVAYHEKYPTIYHLRKKLVDSTDKADLRLIYLALAHMIKFRGHFLIEGDLNPDNSDVDKLFIQLVQTYNQLFEENPINASGVDAKAILSARLSKSRRLENLIAQLPGEKKNGLFGNLIALSLGLTPNFKSNFDLAEDAKLQLSKDTYDDDLDNLLAQIGDQYADLFLAAKNLSDAILLSDILRVNTEITKAPLSASMIKRYDEHHQDLTLLKALVRQQLPEKYKEIFFDQSKNGYAGYIDGGASQEEFYKFIKPILEKMDGTEELLVKLNREDLLRKQRTFDNGSIPHQIHLGELHAILRRQEDFYPFLKDNREKIEKILTFRIPYYVGPLARGNSRFAWMTRKSEETITPWNFEEVVDKGASAQSFIERMTNFDKNLPNEKVLPKHSLLYEYFTVYNELTKVKYVTEGMRKPAFLSGEQKKAIVDLLFKTNRKVTVKQLKEDYFKKIECFDSVEISGVEDRFNASLGTYHDLLKIIKDKDFLDNEENEDILEDIVLTLTLFEDREMIEERLKTYAHLFDDKVMKQLKRRRYTGWGRLSRKLINGIRDKQSGKTILDFLKSDGFANRNFMQLIHDDSLTFKEDIQKAQVSGQGDSLHEHIANLAGSPAIKKGILQTVKVVDELVKVMGRHKPENIVIEMARENQTTQKGQKNSRERMKRIEEGIKELGSQILKEHPVENTQLQNEKLYLYYLQNGRDMYVDQELDINRLSDYDVDHIVPQSFLKDDSIDNKVLTRSDKARGKSDNVPSEEVVKKMKNYWRQLLNAKLITQRKFDNLTKAERGGLSELDKAGFIKRQLVETRQITKHVAQILDSRMNTKYDENDKLIREVKVITLKSKLVSDFRKDFQFYKVREINNYHHAHDAYLNAVVGTALIKKYPKLESEFVYGDYKVYDVRKMIAKSEQEIGKATAKYFFYSNIMNFFKTEITLANGEIRKRPLIETNGETGEIVWDKGRDFATVRKVLSMPQVNIVKKTEVQTGGFSKESILPKRNSDKLIARKKDWDPKKYGGFDSPTVAYSVLVVAKVEKGKSKKLKSVKELLGITIMERSSFEKNPIDFLEAKGYKEVKKDLIIKLPKYSLFELENGRKRMLASAGELQKGNELALPSKYVNFLYLASHYEKLKGSPEDNEQKQLFVEQHKHYLDEIIEQISEFSKRVILADANLDKVLSAYNKHRDKPIREQAENIIHLFTLTNLGAPAAFKYFDTTIDRKRYTSTKEVLDATLIHQSITGLYETRIDLSQLGGDGGEAAAKGGGGGSGGTAPLEEEYRLFLEAPIQNVTLLEQWKREIPKVWAEINPPGLASTQAPIHVQLLSTALPVRVRQYPITLEAKRSLRETIRKFRAAGILRPVHSPWNTPLLPVRKSGTSEYRMVQDLREVNKRVETIHPTVPNPYTLLSLLPPDRIWYSVLDLKDAFFCIPLAPESQLIFAFEWADAEEGESGQLTWTRLPQGFKNSPTLFNEALNRDLQGFRLDHPSVSLLQYVDDLLIAADTQAACLSATRDLLMTLAELGYRVSGKKAQLCQEEVTYLGFKIHKGSRSLSNSRTQAILQIPVPKTKRQVREFLGKIGYCRLFIPGFAELAQPLYAATRPGNDPLVWGEKEEEAFQSLKLALTQPPALALPSLDKPFQLFVEETSGAAKGVLTQALGPWKRPVAYLSKRLDPVAAGWPRCLRAIAAAALLTREASKLTFGQDIEITSSHNLESLLRSPPDKWLTNARITQYQVLLLDPPRVRFKQTAALNPATLLPETDDTLPIHHCLDTLDSLTSTRPDLTDQPLAQAEATLFTDGSSYIRDGKRYAGAAVVTLDSVIWAEPLPIGTSAQKAELIALTKALEWSKDKSVNIYTDSRYAFATLHVHGMIYRERGWLTAGGKAIKNAPEILALLTAVWLPKRVAVMHCKGHQKDDAPTSTGNRRADEVAREVAIRPLSTQATISAGKRTADGSEFEKRTADGSEFESPKKKAKVE

SEQ ID NO: 1391 - protein, 2093 aa, synthetic construct
MPAAKRVKLDGGDKKYSIGLDIGTNSVGWAVITDEYKVPSKKFKVLGNTDRHSIKKNLIGALLFDSGETAEATRLKRTARRRYTRRKNRICYLQEIFSNEMAKVDDSFFHRLEESFLVEEDKKHERHPIFGNIVDEVAYHEKYPTIYHLRKKLVDSTDKADLRLIYLALAHMIKFRGHFLIEGDLNPDNSDVDKLFIQLVQTYNQLFEENPINASGVDAKAILSARLSKSRRLENLIAQLPGEKKNGLFGNLIALSLGLTPNFKSNFDLAEDAKLQLSKDTYDDDLDNLLAQIGDQYADLFLAAKNLSDAILLSDILRVNTEITKAPLSASMIKRYDEHHQDLTLLKALVRQQLPEKYKEIFFDQSKNGYAGYIDGGASQEEFYKFIKPILEKMDGTEELLVKLNREDLLRKQRTFDNGSIPHQIHLGELHAILRRQEDFYPFLKDNREKIEKILTFRIPYYVGPLARGNSRFAWMTRKSEETITPWNFEEVVDKGASAQSFIERMTNFDKNLPNEKVLPKHSLLYEYFTVYNELTKVKYVTEGMRKPAFLSGEQKKAIVDLLFKTNRKVTVKQLKEDYFKKIECFDSVEISGVEDRFNASLGTYHDLLKIIKDKDFLDNEENEDILEDIVLTLTLFEDREMIEERLKTYAHLFDDKVMKQLKRRRYTGWGRLSRKLINGIRDKQSGKTILDFLKSDGFANRNFMQLIHDDSLTFKEDIQKAQVSGQGDSLHEHIANLAGSPAIKKGILQTVKVVDELVKVMGRHKPENIVIEMARENQTTQKGQKNSRERMKRIEEGIKELGSQILKEHPVENTQLQNEKLYLYYLQNGRDMYVDQELDINRLSDYDVDHIVPQSFLKDDSIDNKVLTRSDKARGKSDNVPSEEVVKKMKNYWRQLLNAKLITQRKFDNLTKAERGGLSELDKAGFIKRQLVETRQITKHVAQILDSRMNTKYDENDKLIREVKVITLKSKLVSDFRKDFQFYKVREINNYHHAHDAYLNAVVGTALIKKYPKLESEFVYGDYKVYDVRKMIAKSEQEIGKATAKYFFYSNIMNFFKTEITLANGEIRKRPLIETNGETGEIVWDKGRDFATVRKVLSMPQVNIVKKTEVQTGGFSKESILPKRNSDKLIARKKDWDPKKYGGFDSPTVAYSVLVVAKVEKGKSKKLKSVKELLGITIMERSSFEKNPIDFLEAKGYKEVKKDLIIKLPKYSLFELENGRKRMLASAGELQKGNELALPSKYVNFLYLASHYEKLKGSPEDNEQKQLFVEQHKHYLDEIIEQISEFSKRVILADANLDKVLSAYNKHRDKPIREQAENIIHLFTLTNLGAPAAFKYFDTTIDRKRYTSTKEVLDATLIHQSITGLYETRIDLSQLGGDGGGGSGGGGGTAPLEEEYRLFLEAPIQNVTLLEQWKREIPKVWAEINPPGLASTQAPIHVQLLSTALPVRVRQYPITLEAKRSLRETIRKFRAAGILRPVHSPWNTPLLPVRKSGTSEYRMVQDLREVNKRVETIHPTVPNPYTLLSLLPPDRIWYSVLDLKDAFFCIPLAPESQLIFAFEWADAEEGESGQLTWTRLPQGFKNSPTLFNEALNRDLQGFRLDHPSVSLLQYVDDLLIAADTQAACLSATRDLLMTLAELGYRVSGKKAQLCQEEVTYLGFKIHKGSRSLSNSRTQAILQIPVPKTKRQVREFLGKIGYCRLFIPGFAELAQPLYAATRPGNDPLVWGEKEEEAFQSLKLALTQPPALALPSLDKPFQLFVEETSGAAKGVLTQALGPWKRPVAYLSKRLDPVAAGWPRCLRAIAAAALLTREASKLTFGQDIEITSSHNLESLLRSPPDKWLTNARITQYQVLLLDPPRVRFKQTAALNPATLLPETDDTLPIHHCLDTLDSLTSTRPDLTDQPLAQAEATLFTDGSSYIRDGKRYAGAAVVTLDSVIWAEPLPIGTSAQKAELIALTKALEWSKDKSVNIYTDSRYAFATLHVHGMIYRERGWLTAGGKAIKNAPEILALLTAVWLPKRVAVMHCKGHQKDDAPTSTGNRRADEVAREVAIRPLSTQATISAGKRTADGSEFEKRTADGSEFESPKKKAKVE

SEQ ID NO: 1392 - protein, 2093 aa, synthetic construct
MPAAKRVKLDGGDKKYSIGLDIGTNSVGWAVITDEYKVPSKKFKVLGNTDRHSIKKNLIGALLFDSGETAEATRLKRTARRRYTRRKNRICYLQEIFSNEMAKVDDSFFHRLEESFLVEEDKKHERHPIFGNIVDEVAYHEKYPTIYHLRKKLVDSTDKADLRLIYLALAHMIKFRGHFLIEGDLNPDNSDVDKLFIQLVQTYNQLFEENPINASGVDAKAILSARLSKSRRLENLIAQLPGEKKNGLFGNLIALSLGLTPNFKSNFDLAEDAKLQLSKDTYDDDLDNLLAQIGDQYADLFLAAKNLSDAILLSDILRVNTEITKAPLSASMIKRYDEHHQDLTLLKALVRQQLPEKYKEIFFDQSKNGYAGYIDGGASQEEFYKFIKPILEKMDGTEELLVKLNREDLLRKQRTFDNGSIPHQIHLGELHAILRRQEDFYPFLKDNREKIEKILTFRIPYYVGPLARGNSRFAWMTRKSEETITPWNFEEVVDKGASAQSFIERMTNFDKNLPNEKVLPKHSLLYEYFTVYNELTKVKYVTEGMRKPAFLSGEQKKAIVDLLFKTNRKVTVKQLKEDYFKKIECFDSVEISGVEDRFNASLGTYHDLLKIIKDKDFLDNEENEDILEDIVLTLTLFEDREMIEERLKTYAHLFDDKVMKQLKRRRYTGWGRLSRKLINGIRDKQSGKTILDFLKSDGFANRNFMQLIHDDSLTFKEDIQKAQVSGQGDSLHEHIANLAGSPAIKKGILQTVKVVDELVKVMGRHKPENIVIEMARENQTTQKGQKNSRERMKRIEEGIKELGSQILKEHPVENTQLQNEKLYLYYLQNGRDMYVDQELDINRLSDYDVDHIVPQSFLKDDSIDNKVLTRSDKARGKSDNVPSEEVVKKMKNYWRQLLNAKLITQRKFDNLTKAERGGLSELDKAGFIKRQLVETRQITKHVAQILDSRMNTKYDENDKLIREVKVITLKSKLVSDFRKDFQFYKVREINNYHHAHDAYLNAVVGTALIKKYPKLESEFVYGDYKVYDVRKMIAKSEQEIGKATAKYFFYSNIMNFFKTEITLANGEIRKRPLIETNGETGEIVWDKGRDFATVRKVLSMPQVNIVKKTEVQTGGFSKESILPKRNSDKLIARKKDWDPKKYGGFDSPTVAYSVLVVAKVEKGKSKKLKSVKELLGITIMERSSFEKNPIDFLEAKGYKEVKKDLIIKLPKYSLFELENGRKRMLASAGELQKGNELALPSKYVNFLYLASHYEKLKGSPEDNEQKQLFVEQHKHYLDEIIEQISEFSKRVILADANLDKVLSAYNKHRDKPIREQAENIIHLFTLTNLGAPAAFKYFDTTIDRKRYTSTKEVLDATLIHQSITGLYETRIDLSQLGGDGGGGSPAPGGTAPLEEEYRLFLEAPIQNVTLLEQWKREIPKVWAEINPPGLASTQAPIHVQLLSTALPVRVRQYPITLEAKRSLRETIRKFRAAGILRPVHSPWNTPLLPVRKSGTSEYRMVQDLREVNKRVETIHPTVPNPYTLLSLLPPDRIWYSVLDLKDAFFCIPLAPESQLIFAFEWADAEEGESGQLTWTRLPQGFKNSPTLFNEALNRDLQGFRLDHPSVSLLQYVDDLLIAADTQAACLSATRDLLMTLAELGYRVSGKKAQLCQEEVTYLGFKIHKGSRSLSNSRTQAILQIPVPKTKRQVREFLGKIGYCRLFIPGFAELAQPLYAATRPGNDPLVWGEKEEEAFQSLKLALTQPPALALPSLDKPFQLFVEETSGAAKGVLTQALGPWKRPVAYLSKRLDPVAAGWPRCLRAIAAAALLTREASKLTFGQDIEITSSHNLESLLRSPPDKWLTNARITQYQVLLLDPPRVRFKQTAALNPATLLPETDDTLPIHHCLDTLDSLTSTRPDLTDQPLAQAEATLFTDGSSYIRDGKRYAGAAVVTLDSVIWAEPLPIGTSAQKAELIALTKALEWSKDKSVNIYTDSRYAFATLHVHGMIYRERGWLTAGGKAIKNAPEILALLTAVWLPKRVAVMHCKGHQKDDAPTSTGNRRADEVAREVAIRPLSTQATISAGKRTADGSEFEKRTADGSEFESPKKKAKVE

SEQ ID NO: 1393 - protein, 2102 aa, synthetic construct
MPAAKRVKLDGGDKKYSIGLDIGTNSVGWAVITDEYKVPSKKFKVLGNTDRHSIKKNLIGALLFDSGETAEATRLKRTARRRYTRRKNRICYLQEIFSNEMAKVDDSFFHRLEESFLVEEDKKHERHPIFGNIVDEVAYHEKYPTIYHLRKKLVDSTDKADLRLIYLALAHMIKFRGHFLIEGDLNPDNSDVDKLFIQLVQTYNQLFEENPINASGVDAKAILSARLSKSRRLENLIAQLPGEKKNGLFGNLIALSLGLTPNFKSNFDLAEDAKLQLSKDTYDDDLDNLLAQIGDQYADLFLAAKNLSDAILLSDILRVNTEITKAPLSASMIKRYDEHHQDLTLLKALVRQQLPEKYKEIFFDQSKNGYAGYIDGGASQEEFYKFIKPILEKMDGTEELLVKLNREDLLRKQRTFDNGSIPHQIHLGELHAILRRQEDFYPFLKDNREKIEKILTFRIPYYVGPLARGNSRFAWMTRKSEETITPWNFEEVVDKGASAQSFIERMTNFDKNLPNEKVLPKHSLLYEYFTVYNELTKVKYVTEGMRKPAFLSGEQKKAIVDLLFKTNRKVTVKQLKEDYFKKIECFDSVEISGVEDRFNASLGTYHDLLKIIKDKDFLDNEENEDILEDIVLTLTLFEDREMIEERLKTYAHLFDDKVMKQLKRRRYTGWGRLSRKLINGIRDKQSGKTILDFLKSDGFANRNFMQLIHDDSLTFKEDIQKAQVSGQGDSLHEHIANLAGSPAIKKGILQTVKVVDELVKVMGRHKPENIVIEMARENQTTQKGQKNSRERMKRIEEGIKELGSQILKEHPVENTQLQNEKLYLYYLQNGRDMYVDQELDINRLSDYDVDHIVPQSFLKDDSIDNKVLTRSDKARGKSDNVPSEEVVKKMKNYWRQLLNAKLITQRKFDNLTKAERGGLSELDKAGFIKRQLVETRQITKHVAQILDSRMNTKYDENDKLIREVKVITLKSKLVSDFRKDFQFYKVREINNYHHAHDAYLNAVVGTALIKKYPKLESEFVYGDYKVYDVRKMIAKSEQEIGKATAKYFFYSNIMNFFKTEITLANGEIRKRPLIETNGETGEIVWDKGRDFATVRKVLSMPQVNIVKKTEVQTGGFSKESILPKRNSDKLIARKKDWDPKKYGGFDSPTVAYSVLVVAKVEKGKSKKLKSVKELLGITIMERSSFEKNPIDFLEAKGYKEVKKDLIIKLPKYSLFELENGRKRMLASAGELQKGNELALPSKYVNFLYLASHYEKLKGSPEDNEQKQLFVEQHKHYLDEIIEQISEFSKRVILADANLDKVLSAYNKHRDKPIREQAENIIHLFTLTNLGAPAAFKYFDTTIDRKRYTSTKEVLDATLIHQSITGLYETRIDLSQLGGDGGGGGGSEAAAKGGGGSGGTAPLEEEYRLFLEAPIQNVTLLEQWKREIPKVWAEINPPGLASTQAPIHVQLLSTALPVRVRQYPITLEAKRSLRETIRKFRAAGILRPVHSPWNTPLLPVRKSGTSEYRMVQDLREVNKRVETIHPTVPNPYTLLSLLPPDRIWYSVLDLKDAFFCIPLAPESQLIFAFEWADAEEGESGQLTWTRLPQGFKNSPTLFNEALNRDLQGFRLDHPSVSLLQYVDDLLIAADTQAACLSATRDLLMTLAELGYRVSGKKAQLCQEEVTYLGFKIHKGSRSLSNSRTQAILQIPVPKTKRQVREFLGKIGYCRLFIPGFAELAQPLYAATRPGNDPLVWGEKEEEAFQSLKLALTQPPALALPSLDKPFQLFVEETSGAAKGVLTQALGPWKRPVAYLSKRLDPVAAGWPRCLRAIAAAALLTREASKLTFGQDIEITSSHNLESLLRSPPDKWLTNARITQYQVLLLDPPRVRFKQTAALNPATLLPETDDTLPIHHCLDTLDSLTSTRPDLTDQPLAQAEATLFTDGSSYIRDGKRYAGAAVVTLDSVIWAEPLPIGTSAQKAELIALTKALEWSKDKSVNIYTDSRYAFATLHVHGMIYRERGWLTAGGKAIKNAPEILALLTAVWLPKRVAVMHCKGHQKDDAPTSTGNRRADEVAREVAIRPLSTQATISAGKRTADGSEFEKRTADGSEFESPKKKAKVE

SEQ ID NO: 1394 - protein, 2098 aa, synthetic construct
MPAAKRVKLDGGDKKYSIGLDIGTNSVGWAVITDEYKVPSKKFKVLGNTDRHSIKKNLIGALLFDSGETAEATRLKRTARRRYTRRKNRICYLQEIFSNEMAKVDDSFFHRLEESFLVEEDKKHERHPIFGNIVDEVAYHEKYPTIYHLRKKLVDSTDKADLRLIYLALAHMIKFRGHFLIEGDLNPDNSDVDKLFIQLVQTYNQLFEENPINASGVDAKAILSARLSKSRRLENLIAQLPGEKKNGLFGNLIALSLGLTPNFKSNFDLAEDAKLQLSKDTYDDDLDNLLAQIGDQYADLFLAAKNLSDAILLSDILRVNTEITKAPLSASMIKRYDEHHQDLTLLKALVRQQLPEKYKEIFFDQSKNGYAGYIDGGASQEEFYKFIKPILEKMDGTEELLVKLNREDLLRKQRTFDNGSIPHQIHLGELHAILRRQEDFYPFLKDNREKIEKILTFRIPYYVGPLARGNSRFAWMTRKSEETITPWNFEEVVDKGASAQSFIERMTNFDKNLPNEKVLPKHSLLYEYFTVYNELTKVKYVTEGMRKPAFLSGEQKKAIVDLLFKTNRKVTVKQLKEDYFKKIECFDSVEISGVEDRFNASLGTYHDLLKIIKDKDFLDNEENEDILEDIVLTLTLFEDREMIEERLKTYAHLFDDKVMKQLKRRRYTGWGRLSRKLINGIRDKQSGKTILDFLKSDGFANRNFMQLIHDDSLTFKEDIQKAQVSGQGDSLHEHIANLAGSPAIKKGILQTVKVVDELVKVMGRHKPENIVIEMARENQTTQKGQKNSRERMKRIEEGIKELGSQILKEHPVENTQLQNEKLYLYYLQNGRDMYVDQELDINRLSDYDVDHIVPQSFLKDDSIDNKVLTRSDKARGKSDNVPSEEVVKKMKNYWRQLLNAKLITQRKFDNLTKAERGGLSELDKAGFIKRQLVETRQITKHVAQILDSRMNTKYDENDKLIREVKVITLKSKLVSDFRKDFQFYKVREINNYHHAHDAYLNAVVGTALIKKYPKLESEFVYGDYKVYDVRKMIAKSEQEIGKATAKYFFYSNIMNFFKTEITLANGEIRKRPLIETNGETGEIVWDKGRDFATVRKVLSMPQVNIVKKTEVQTGGFSKESILPKRNSDKLIARKKDWDPKKYGGFDSPTVAYSVLVVAKVEKGKSKKLKSVKELLGITIMERSSFEKNPIDFLEAKGYKEVKKDLIIKLPKYSLFELENGRKRMLASAGELQKGNELALPSKYVNFLYLASHYEKLKGSPEDNEQKQLFVEQHKHYLDEIIEQISEFSKRVILADANLDKVLSAYNKHRDKPIREQAENIIHLFTLTNLGAPAAFKYFDTTIDRKRYTSTKEVLDATLIHQSITGLYETRIDLSQLGGDGGGSSEAAAKGGGGGTAPLEEEYRLFLEAPIQNVTLLEQWKREIPKVWAEINPPGLASTQAPIHVQLLSTALPVRVRQYPITLEAKRSLRETIRKFRAAGILRPVHSPWNTPLLPVRKSGTSEYRMVQDLREVNKRVETIHPTVPNPYTLLSLLPPDRIWYSVLDLKDAFFCIPLAPESQLIFAFEWADAEEGESGQLTWTRLPQGFKNSPTLFNEALNRDLQGFRLDHPSVSLLQYVDDLLIAADTQAACLSATRDLLMTLAELGYRVSGKKAQLCQEEVTYLGFKIHKGSRSLSNSRTQAILQIPVPKTKRQVREFLGKIGYCRLFIPGFAELAQPLYAATRPGNDPLVWGEKEEEAFQSLKLALTQPPALALPSLDKPFQLFVEETSGAAKGVLTQALGPWKRPVAYLSKRLDPVAAGWPRCLRAIAAAALLTREASKLTFGQDIEITSSHNLESLLRSPPDKWLTNARITQYQVLLLDPPRVRFKQTAALNPATLLPETDDTLPIHHCLDTLDSLTSTRPDLTDQPLAQAEATLFTDGSSYIRDGKRYAGAAVVTLDSVIWAEPLPIGTSAQKAELIALTKALEWSKDKSVNIYTDSRYAFATLHVHGMIYRERGWLTAGGKAIKNAPEILALLTAVWLPKRVAVMHCKGHQKDDAPTSTGNRRADEVAREVAIRPLSTQATISAGKRTADGSEFEKRTADGSEFESPKKKAKVE

SEQ ID NO: 1395 - protein, 2098 aa, synthetic construct
MPAAKRVKLDGGDKKYSIGLDIGTNSVGWAVITDEYKVPSKKFKVLGNTDRHSIKKNLIGALLFDSGETAEATRLKRTARRRYTRRKNRICYLQEIFSNEMAKVDDSFFHRLEESFLVEEDKKHERHPIFGNIVDEVAYHEKYPTIYHLRKKLVDSTDKADLRLIYLALAHMIKFRGHFLIEGDLNPDNSDVDKLFIQLVQTYNQLFEENPINASGVDAKAILSARLSKSRRLENLIAQLPGEKKNGLFGNLIALSLGLTPNFKSNFDLAEDAKLQLSKDTYDDDLDNLLAQIGDQYADLFLAAKNLSDAILLSDILRVNTEITKAPLSASMIKRYDEHHQDLTLLKALVRQQLPEKYKEIFFDQSKNGYAGYIDGGASQEEFYKFIKPILEKMDGTEELLVKLNREDLLRKQRTFDNGSIPHQIHLGELHAILRRQEDFYPFLKDNREKIEKILTFRIPYYVGPLARGNSRFAWMTRKSEETITPWNFEEVVDKGASAQSFIERMTNFDKNLPNEKVLPKHSLLYEYFTVYNELTKVKYVTEGMRKPAFLSGEQKKAIVDLLFKTNRKVTVKQLKEDYFKKIECFDSVEISGVEDRFNASLGTYHDLLKIIKDKDFLDNEENEDILEDIVLTLTLFEDREMIEERLKTYAHLFDDKVMKQLKRRRYTGWGRLSRKLINGIRDKQSGKTILDFLKSDGFANRNFMQLIHDDSLTFKEDIQKAQVSGQGDSLHEHIANLAGSPAIKKGILQTVKVVDELVKVMGRHKPENIVIEMARENQTTQKGQKNSRERMKRIEEGIKELGSQILKEHPVENTQLQNEKLYLYYLQNGRDMYVDQELDINRLSDYDVDHIVPQSFLKDDSIDNKVLTRSDKARGKSDNVPSEEVVKKMKNYWRQLLNAKLITQRKFDNLTKAERGGLSELDKAGFIKRQLVETRQITKHVAQILDSRMNTKYDENDKLIREVKVITLKSKLVSDFRKDFQFYKVREINNYHHAHDAYLNAVVGTALIKKYPKLESEFVYGDYKVYDVRKMIAKSEQEIGKATAKYFFYSNIMNFFKTEITLANGEIRKRPLIETNGETGEIVWDKGRDFATVRKVLSMPQVNIVKKTEVQTGGFSKESILPKRNSDKLIARKKDWDPKKYGGFDSPTVAYSVLVVAKVEKGKSKKLKSVKELLGITIMERSSFEKNPIDFLEAKGYKEVKKDLIIKLPKYSLFELENGRKRMLASAGELQKGNELALPSKYVNFLYLASHYEKLKGSPEDNEQKQLFVEQHKHYLDEIIEQISEFSKRVILADANLDKVLSAYNKHRDKPIREQAENIIHLFTLTNLGAPAAFKYFDTTIDRKRYTSTKEVLDATLIHQSITGLYETRIDLSQLGGDGGGGGEAAAKGSSGGTAPLEEEYRLFLEAPIQNVTLLEQWKREIPKVWAEINPPGLASTQAPIHVQLLSTALPVRVRQYPITLEAKRSLRETIRKFRAAGILRPVHSPWNTPLLPVRKSGTSEYRMVQDLREVNKRVETIHPTVPNPYTLLSLLPPDRIWYSVLDLKDAFFCIPLAPESQLIFAFEWADAEEGESGQLTWTRLPQGFKNSPTLFNEALNRDLQGFRLDHPSVSLLQYVDDLLIAADTQAACLSATRDLLMTLAELGYRVSGKKAQLCQEEVTYLGFKIHKGSRSLSNSRTQAILQIPVPKTKRQVREFLGKIGYCRLFIPGFAELAQPLYAATRPGNDPLVWGEKEEEAFQSLKLALTQPPALALPSLDKPFQLFVEETSGAAKGVLTQALGPWKRPVAYLSKRLDPVAAGWPRCLRAIAAAALLTREASKLTFGQDIEITSSHNLESLLRSPPDKWLTNARITQYQVLLLDPPRVRFKQTAALNPATLLPETDDTLPIHHCLDTLDSLTSTRPDLTDQPLAQAEATLFTDGSSYIRDGKRYAGAAVVTLDSVIWAEPLPIGTSAQKAELIALTKALEWSKDKSVNIYTDSRYAFATLHVHGMIYRERGWLTAGGKAIKNAPEILALLTAVWLPKRVAVMHCKGHQKDDAPTSTGNRRADEVAREVAIRPLSTQATISAGKRTADGSEFEKRTADGSEFESPKKKAKVE

SEQ ID NO: 1396 - protein, 2093 aa, synthetic construct
MPAAKRVKLDGGDKKYSIGLDIGTNSVGWAVITDEYKVPSKKFKVLGNTDRHSIKKNLIGALLFDSGETAEATRLKRTARRRYTRRKNRICYLQEIFSNEMAKVDDSFFHRLEESFLVEEDKKHERHPIFGNIVDEVAYHEKYPTIYHLRKKLVDSTDKADLRLIYLALAHMIKFRGHFLIEGDLNPDNSDVDKLFIQLVQTYNQLFEENPINASGVDAKAILSARLSKSRRLENLIAQLPGEKKNGLFGNLIALSLGLTPNFKSNFDLAEDAKLQLSKDTYDDDLDNLLAQIGDQYADLFLAAKNLSDAILLSDILRVNTEITKAPLSASMIKRYDEHHQDLTLLKALVRQQLPEKYKEIFFDQSKNGYAGYIDGGASQEEFYKFIKPILEKMDGTEELLVKLNREDLLRKQRTFDNGSIPHQIHLGELHAILRRQEDFYPFLKDNREKIEKILTFRIPYYVGPLARGNSRFAWMTRKSEETITPWNFEEVVDKGASAQSFIERMTNFDKNLPNEKVLPKHSLLYEYFTVYNELTKVKYVTEGMRKPAFLSGEQKKAIVDLLFKTNRKVTVKQLKEDYFKKIECFDSVEISGVEDRFNASLGTYHDLLKIIKDKDFLDNEENEDILEDIVLTLTLFEDREMIEERLKTYAHLFDDKVMKQLKRRRYTGWGRLSRKLINGIRDKQSGKTILDFLKSDGFANRNFMQLIHDDSLTFKEDIQKAQVSGQGDSLHEHIANLAGSPAIKKGILQTVKVVDELVKVMGRHKPENIVIEMARENQTTQKGQKNSRERMKRIEEGIKELGSQILKEHPVENTQLQNEKLYLYYLQNGRDMYVDQELDINRLSDYDVDHIVPQSFLKDDSIDNKVLTRSDKARGKSDNVPSEEVVKKMKNYWRQLLNAKLITQRKFDNLTKAERGGLSELDKAGFIKRQLVETRQITKHVAQILDSRMNTKYDENDKLIREVKVITLKSKLVSDFRKDFQFYKVREINNYHHAHDAYLNAVVGTALIKKYPKLESEFVYGDYKVYDVRKMIAKSEQEIGKATAKYFFYSNIMNFFKTEITLANGEIRKRPLIETNGETGEIVWDKGRDFATVRKVLSMPQVNIVKKTEVQTGGFSKESILPKRNSDKLIARKKDWDPKKYGGFDSPTVAYSVLVVAKVEKGKSKKLKSVKELLGITIMERSSFEKNPIDFLEAKGYKEVKKDLIIKLPKYSLFELENGRKRMLASAGELQKGNELALPSKYVNFLYLASHYEKLKGSPEDNEQKQLFVEQHKHYLDEIIEQISEFSKRVILADANLDKVLSAYNKHRDKPIREQAENIIHLFTLTNLGAPAAFKYFDTTIDRKRYTSTKEVLDATLIHQSITGLYETRIDLSQLGGDGGGGGGGGGGTAPLEEEYRLFLEAPIQNVTLLEQWKREIPKVWAEINPPGLASTQAPIHVQLLSTALPVRVRQYPITLEAKRSLRETIRKFRAAGILRPVHSPWNTPLLPVRKSGTSEYRMVQDLREVNKRVETIHPTVPNPYTLLSLLPPDRIWYSVLDLKDAFFCIPLAPESQLIFAFEWADAEEGESGQLTWTRLPQGFKNSPTLFNEALNRDLQGFRLDHPSVSLLQYVDDLLIAADTQAACLSATRDLLMTLAELGYRVSGKKAQLCQEEVTYLGFKIHKGSRSLSNSRTQAILQIPVPKTKRQVREFLGKIGYCRLFIPGFAELAQPLYAATRPGNDPLVWGEKEEEAFQSLKLALTQPPALALPSLDKPFQLFVEETSGAAKGVLTQALGPWKRPVAYLSKRLDPVAAGWPRCLRAIAAAALLTREASKLTFGQDIEITSSHNLESLLRSPPDKWLTNARITQYQVLLLDPPRVRFKQTAALNPATLLPETDDTLPIHHCLDTLDSLTSTRPDLTDQPLAQAEATLFTDGSSYIRDGKRYAGAAVVTLDSVIWAEPLPIGTSAQKAELIALTKALEWSKDKSVNIYTDSRYAFATLHVHGMIYRERGWLTAGGKAIKNAPEILALLTAVWLPKRVAVMHCKGHQKDDAPTSTGNRRADEVAREVAIRPLSTQATISAGKRTADGSEFEKRTADGSEFESPKKKAKVE

SEQ ID NO: 1397 - protein, 2093 aa, synthetic construct
MPAAKRVKLDGGDKKYSIGLDIGTNSVGWAVITDEYKVPSKKFKVLGNTDRHSIKKNLIGALLFDSGETAEATRLKRTARRRYTRRKNRICYLQEIFSNEMAKVDDSFFHRLEESFLVEEDKKHERHPIFGNIVDEVAYHEKYPTIYHLRKKLVDSTDKADLRLIYLALAHMIKFRGHFLIEGDLNPDNSDVDKLFIQLVQTYNQLFEENPINASGVDAKAILSARLSKSRRLENLIAQLPGEKKNGLFGNLIALSLGLTPNFKSNFDLAEDAKLQLSKDTYDDDLDNLLAQIGDQYADLFLAAKNLSDAILLSDILRVNTEITKAPLSASMIKRYDEHHQDLTLLKALVRQQLPEKYKEIFFDQSKNGYAGYIDGGASQEEFYKFIKPILEKMDGTEELLVKLNREDLLRKQRTFDNGSIPHQIHLGELHAILRRQEDFYPFLKDNREKIEKILTFRIPYYVGPLARGNSRFAWMTRKSEETITPWNFEEVVDKGASAQSFIERMTNFDKNLPNEKVLPKHSLLYEYFTVYNELTKVKYVTEGMRKPAFLSGEQKKAIVDLLFKTNRKVTVKQLKEDYFKKIECFDSVEISGVEDRFNASLGTYHDLLKIIKDKDFLDNEENEDILEDIVLTLTLFEDREMIEERLKTYAHLFDDKVMKQLKRRRYTGWGRLSRKLINGIRDKQSGKTILDFLKSDGFANRNFMQLIHDDSLTFKEDIQKAQVSGQGDSLHEHIANLAGSPAIKKGILQTVKVVDELVKVMGRHKPENIVIEMARENQTTQKGQKNSRERMKRIEEGIKELGSQILKEHPVENTQLQNEKLYLYYLQNGRDMYVDQELDINRLSDYDVDHIVPQSFLKDDSIDNKVLTRSDKARGKSDNVPSEEVVKKMKNYWRQLLNAKLITQRKFDNLTKAERGGLSELDKAGFIKRQLVETRQITKHVAQILDSRMNTKYDENDKLIREVKVITLKSKLVSDFRKDFQFYKVREINNYHHAHDAYLNAVVGTALIKKYPKLESEFVYGDYKVYDVRKMIAKSEQEIGKATAKYFFYSNIMNFFKTEITLANGEIRKRPLIETNGETGEIVWDKGRDFATVRKVLSMPQVNIVKKTEVQTGGFSKESILPKRNSDKLIARKKDWDPKKYGGFDSPTVAYSVLVVAKVEKGKSKKLKSVKELLGITIMERSSFEKNPIDFLEAKGYKEVKKDLIIKLPKYSLFELENGRKRMLASAGELQKGNELALPSKYVNFLYLASHYEKLKGSPEDNEQKQLFVEQHKHYLDEIIEQISEFSKRVILADANLDKVLSAYNKHRDKPIREQAENIIHLFTLTNLGAPAAFKYFDTTIDRKRYTSTKEVLDATLIHQSITGLYETRIDLSQLGGDGGGGGPAPGGTAPLEEEYRLFLEAPIQNVTLLEQWKREIPKVWAEINPPGLASTQAPIHVQLLSTALPVRVRQYPITLEAKRSLRETIRKFRAAGILRPVHSPWNTPLLPVRKSGTSEYRMVQDLREVNKRVETIHPTVPNPYTLLSLLPPDRIWYSVLDLKDAFFCIPLAPESQLIFAFEWADAEEGESGQLTWTRLPQGFKNSPTLFNEALNRDLQGFRLDHPSVSLLQYVDDLLIAADTQAACLSATRDLLMTLAELGYRVSGKKAQLCQEEVTYLGFKIHKGSRSLSNSRTQAILQIPVPKTKRQVREFLGKIGYCRLFIPGFAELAQPLYAATRPGNDPLVWGEKEEEAFQSLKLALTQPPALALPSLDKPFQLFVEETSGAAKGVLTQALGPWKRPVAYLSKRLDPVAAGWPRCLRAIAAAALLTREASKLTFGQDIEITSSHNLESLLRSPPDKWLTNARITQYQVLLLDPPRVRFKQTAALNPATLLPETDDTLPIHHCLDTLDSLTSTRPDLTDQPLAQAEATLFTDGSSYIRDGKRYAGAAVVTLDSVIWAEPLPIGTSAQKAELIALTKALEWSKDKSVNIYTDSRYAFATLHVHGMIYRERGWLTAGGKAIKNAPEILALLTAVWLPKRVAVMHCKGHQKDDAPTSTGNRRADEVAREVAIRPLSTQATISAGKRTADGSEFEKRTADGSEFESPKKKAKVE

SEQ ID NO: 1398 - protein, 2099 aa, synthetic construct
MPAAKRVKLDGGDKKYSIGLDIGTNSVGWAVITDEYKVPSKKFKVLGNTDRHSIKKNLIGALLFDSGETAEATRLKRTARRRYTRRKNRICYLQEIFSNEMAKVDDSFFHRLEESFLVEEDKKHERHPIFGNIVDEVAYHEKYPTIYHLRKKLVDSTDKADLRLIYLALAHMIKFRGHFLIEGDLNPDNSDVDKLFIQLVQTYNQLFEENPINASGVDAKAILSARLSKSRRLENLIAQLPGEKKNGLFGNLIALSLGLTPNFKSNFDLAEDAKLQLSKDTYDDDLDNLLAQIGDQYADLFLAAKNLSDAILLSDILRVNTEITKAPLSASMIKRYDEHHQDLTLLKALVRQQLPEKYKEIFFDQSKNGYAGYIDGGASQEEFYKFIKPILEKMDGTEELLVKLNREDLLRKQRTFDNGSIPHQIHLGELHAILRRQEDFYPFLKDNREKIEKILTFRIPYYVGPLARGNSRFAWMTRKSEETITPWNFEEVVDKGASAQSFIERMTNFDKNLPNEKVLPKHSLLYEYFTVYNELTKVKYVTEGMRKPAFLSGEQKKAIVDLLFKTNRKVTVKQLKEDYFKKIECFDSVEISGVEDRFNASLGTYHDLLKIIKDKDFLDNEENEDILEDIVLTLTLFEDREMIEERLKTYAHLFDDKVMKQLKRRRYTGWGRLSRKLINGIRDKQSGKTILDFLKSDGFANRNFMQLIHDDSLTFKEDIQKAQVSGQGDSLHEHIANLAGSPAIKKGILQTVKVVDELVKVMGRHKPENIVIEMARENQTTQKGQKNSRERMKRIEEGIKELGSQILKEHPVENTQLQNEKLYLYYLQNGRDMYVDQELDINRLSDYDVDHIVPQSFLKDDSIDNKVLTRSDKARGKSDNVPSEEVVKKMKNYWRQLLNAKLITQRKFDNLTKAERGGLSELDKAGFIKRQLVETRQITKHVAQILDSRMNTKYDENDKLIREVKVITLKSKLVSDFRKDFQFYKVREINNYHHAHDAYLNAVVGTALIKKYPKLESEFVYGDYKVYDVRKMIAKSEQEIGKATAKYFFYSNIMNFFKTEITLANGEIRKRPLIETNGETGEIVWDKGRDFATVRKVLSMPQVNIVKKTEVQTGGFSKESILPKRNSDKLIARKKDWDPKKYGGFDSPTVAYSVLVVAKVEKGKSKKLKSVKELLGITIMERSSFEKNPIDFLEAKGYKEVKKDLIIKLPKYSLFELENGRKRMLASAGELQKGNELALPSKYVNFLYLASHYEKLKGSPEDNEQKQLFVEQHKHYLDEIIEQISEFSKRVILADANLDKVLSAYNKHRDKPIREQAENIIHLFTLTNLGAPAAFKYFDTTIDRKRYTSTKEVLDATLIHQSITGLYETRIDLSQLGGDGGGGSGGSGGSGGSGGTAPLEEEYRLFLEAPIQNVTLLEQWKREIPKVWAEINPPGLASTQAPIHVQLLSTALPVRVRQYPITLEAKRSLRETIRKFRAAGILRPVHSPWNTPLLPVRKSGTSEYRMVQDLREVNKRVETIHPTVPNPYTLLSLLPPDRIWYSVLDLKDAFFCIPLAPESQLIFAFEWADAEEGESGQLTWTRLPQGFKNSPTLFNEALNRDLQGFRLDHPSVSLLQYVDDLLIAADTQAACLSATRDLLMTLAELGYRVSGKKAQLCQEEVTYLGFKIHKGSRSLSNSRTQAILQIPVPKTKRQVREFLGKIGYCRLFIPGFAELAQPLYAATRPGNDPLVWGEKEEEAFQSLKLALTQPPALALPSLDKPFQLFVEETSGAAKGVLTQALGPWKRPVAYLSKRLDPVAAGWPRCLRAIAAAALLTREASKLTFGQDIEITSSHNLESLLRSPPDKWLTNARITQYQVLLLDPPRVRFKQTAALNPATLLPETDDTLPIHHCLDTLDSLTSTRPDLTDQPLAQAEATLFTDGSSYIRDGKRYAGAAVVTLDSVIWAEPLPIGTSAQKAELIALTKALEWSKDKSVNIYTDSRYAFATLHVHGMIYRERGWLTAGGKAIKNAPEILALLTAVWLPKRVAVMHCKGHQKDDAPTSTGNRRADEVAREVAIRPLSTQATISAGKRTADGSEFEKRTADGSEFESPKKKAKVE

SEQ ID NO: 1399 - protein, 2102 aa, synthetic construct
MPAAKRVKLDGGDKKYSIGLDIGTNSVGWAVITDEYKVPSKKFKVLGNTDRHSIKKNLIGALLFDSGETAEATRLKRTARRRYTRRKNRICYLQEIFSNEMAKVDDSFFHRLEESFLVEEDKKHERHPIFGNIVDEVAYHEKYPTIYHLRKKLVDSTDKADLRLIYLALAHMIKFRGHFLIEGDLNPDNSDVDKLFIQLVQTYNQLFEENPINASGVDAKAILSARLSKSRRLENLIAQLPGEKKNGLFGNLIALSLGLTPNFKSNFDLAEDAKLQLSKDTYDDDLDNLLAQIGDQYADLFLAAKNLSDAILLSDILRVNTEITKAPLSASMIKRYDEHHQDLTLLKALVRQQLPEKYKEIFFDQSKNGYAGYIDGGASQEEFYKFIKPILEKMDGTEELLVKLNREDLLRKQRTFDNGSIPHQIHLGELHAILRRQEDFYPFLKDNREKIEKILTFRIPYYVGPLARGNSRFAWMTRKSEETITPWNFEEVVDKGASAQSFIERMTNFDKNLPNEKVLPKHSLLYEYFTVYNELTKVKYVTEGMRKPAFLSGEQKKAIVDLLFKTNRKVTVKQLKEDYFKKIECFDSVEISGVEDRFNASLGTYHDLLKIIKDKDFLDNEENEDILEDIVLTLTLFEDREMIEERLKTYAHLFDDKVMKQLKRRRYTGWGRLSRKLINGIRDKQSGKTILDFLKSDGFANRNFMQLIHDDSLTFKEDIQKAQVSGQGDSLHEHIANLAGSPAIKKGILQTVKVVDELVKVMGRHKPENIVIEMARENQTTQKGQKNSRERMKRIEEGIKELGSQILKEHPVENTQLQNEKLYLYYLQNGRDMYVDQELDINRLSDYDVDHIVPQSFLKDDSIDNKVLTRSDKARGKSDNVPSEEVVKKMKNYWRQLLNAKLITQRKFDNLTKAERGGLSELDKAGFIKRQLVETRQITKHVAQILDSRMNTKYDENDKLIREVKVITLKSKLVSDFRKDFQFYKVREINNYHHAHDAYLNAVVGTALIKKYPKLESEFVYGDYKVYDVRKMIAKSEQEIGKATAKYFFYSNIMNFFKTEITLANGEIRKRPLIETNGETGEIVWDKGRDFATVRKVLSMPQVNIVKKTEVQTGGFSKESILPKRNSDKLIARKKDWDPKKYGGFDSPTVAYSVLVVAKVEKGKSKKLKSVKELLGITIMERSSFEKNPIDFLEAKGYKEVKKDLIIKLPKYSLFELENGRKRMLASAGELQKGNELALPSKYVNFLYLASHYEKLKGSPEDNEQKQLFVEQHKHYLDEIIEQISEFSKRVILADANLDKVLSAYNKHRDKPIREQAENIIHLFTLTNLGAPAAFKYFDTTIDRKRYTSTKEVLDATLIHQSITGLYETRIDLSQLGGDGGEAAAKGGGGSEAAAKGGTAPLEEEYRLFLEAPIQNVTLLEQWKREIPKVWAEINPPGLASTQAPIHVQLLSTALPVRVRQYPITLEAKRSLRETIRKFRAAGILRPVHSPWNTPLLPVRKSGTSEYRMVQDLREVNKRVETIHPTVPNPYTLLSLLPPDRIWYSVLDLKDAFFCIPLAPESQLIFAFEWADAEEGESGQLTWTRLPQGFKNSPTLFNEALNRDLQGFRLDHPSVSLLQYVDDLLIAADTQAACLSATRDLLMTLAELGYRVSGKKAQLCQEEVTYLGFKIHKGSRSLSNSRTQAILQIPVPKTKRQVREFLGKIGYCRLFIPGFAELAQPLYAATRPGNDPLVWGEKEEEAFQSLKLALTQPPALALPSLDKPFQLFVEETSGAAKGVLTQALGPWKRPVAYLSKRLDPVAAGWPRCLRAIAAAALLTREASKLTFGQDIEITSSHNLESLLRSPPDKWLTNARITQYQVLLLDPPRVRFKQTAALNPATLLPETDDTLPIHHCLDTLDSLTSTRPDLTDQPLAQAEATLFTDGSSYIRDGKRYAGAAVVTLDSVIWAEPLPIGTSAQKAELIALTKALEWSKDKSVNIYTDSRYAFATLHVHGMIYRERGWLTAGGKAIKNAPEILALLTAVWLPKRVAVMHCKGHQKDDAPTSTGNRRADEVAREVAIRPLSTQATISAGKRTADGSEFEKRTADGSEFESPKKKAKVE

SEQ ID NO: 1400 - protein, 2112 aa, synthetic construct
MPAAKRVKLDGGDKKYSIGLDIGTNSVGWAVITDEYKVPSKKFKVLGNTDRHSIKKNLIGALLFDSGETAEATRLKRTARRRYTRRKNRICYLQEIFSNEMAKVDDSFFHRLEESFLVEEDKKHERHPIFGNIVDEVAYHEKYPTIYHLRKKLVDSTDKADLRLIYLALAHMIKFRGHFLIEGDLNPDNSDVDKLFIQLVQTYNQLFEENPINASGVDAKAILSARLSKSRRLENLIAQLPGEKKNGLFGNLIALSLGLTPNFKSNFDLAEDAKLQLSKDTYDDDLDNLLAQIGDQYADLFLAAKNLSDAILLSDILRVNTEITKAPLSASMIKRYDEHHQDLTLLKALVRQQLPEKYKEIFFDQSKNGYAGYIDGGASQEEFYKFIKPILEKMDGTEELLVKLNREDLLRKQRTFDNGSIPHQIHLGELHAILRRQEDFYPFLKDNREKIEKILTFRIPYYVGPLARGNSRFAWMTRKSEETITPWNFEEVVDKGASAQSFIERMTNFDKNLPNEKVLPKHSLLYEYFTVYNELTKVKYVTEGMRKPAFLSGEQKKAIVDLLFKTNRKVTVKQLKEDYFKKIECFDSVEISGVEDRFNASLGTYHDLLKIIKDKDFLDNEENEDILEDIVLTLTLFEDREMIEERLKTYAHLFDDKVMKQLKRRRYTGWGRLSRKLINGIRDKQSGKTILDFLKSDGFANRNFMQLIHDDSLTFKEDIQKAQVSGQGDSLHEHIANLAGSPAIKKGILQTVKVVDELVKVMGRHKPENIVIEMARENQTTQKGQKNSRERMKRIEEGIKELGSQILKEHPVENTQLQNEKLYLYYLQNGRDMYVDQELDINRLSDYDVDHIVPQSFLKDDSIDNKVLTRSDKARGKSDNVPSEEVVKKMKNYWRQLLNAKLITQRKFDNLTKAERGGLSELDKAGFIKRQLVETRQITKHVAQILDSRMNTKYDENDKLIREVKVITLKSKLVSDFRKDFQFYKVREINNYHHAHDAYLNAVVGTALIKKYPKLESEFVYGDYKVYDVRKMIAKSEQEIGKATAKYFFYSNIMNFFKTEITLANGEIRKRPLIETNGETGEIVWDKGRDFATVRKVLSMPQVNIVKKTEVQTGGFSKESILPKRNSDKLIARKKDWDPKKYGGFDSPTVAYSVLVVAKVEKGKSKKLKSVKELLGITIMERSSFEKNPIDFLEAKGYKEVKKDLIIKLPKYSLFELENGRKRMLASAGELQKGNELALPSKYVNFLYLASHYEKLKGSPEDNEQKQLFVEQHKHYLDEIIEQISEFSKRVILADANLDKVLSAYNKHRDKPIREQAENIIHLFTLTNLGAPAAFKYFDTTIDRKRYTSTKEVLDATLIHQSITGLYETRIDLSQLGGDGGEAAAKEAAAKEAAAKEAAAKEAAAKGGTAPLEEEYRLFLEAPIQNVTLLEQWKREIPKVWAEINPPGLASTQAPIHVQLLSTALPVRVRQYPITLEAKRSLRETIRKFRAAGILRPVHSPWNTPLLPVRKSGTSEYRMVQDLREVNKRVETIHPTVPNPYTLLSLLPPDRIWYSVLDLKDAFFCIPLAPESQLIFAFEWADAEEGESGQLTWTRLPQGFKNSPTLFNEALNRDLQGFRLDHPSVSLLQYVDDLLIAADTQAACLSATRDLLMTLAELGYRVSGKKAQLCQEEVTYLGFKIHKGSRSLSNSRTQAILQIPVPKTKRQVREFLGKIGYCRLFIPGFAELAQPLYAATRPGNDPLVWGEKEEEAFQSLKLALTQPPALALPSLDKPFQLFVEETSGAAKGVLTQALGPWKRPVAYLSKRLDPVAAGWPRCLRAIAAAALLTREASKLTFGQDIEITSSHNLESLLRSPPDKWLTNARITQYQVLLLDPPRVRFKQTAALNPATLLPETDDTLPIHHCLDTLDSLTSTRPDLTDQPLAQAEATLFTDGSSYIRDGKRYAGAAVVTLDSVIWAEPLPIGTSAQKAELIALTKALEWSKDKSVNIYTDSRYAFATLHVHGMIYRERGWLTAGGKAIKNAPEILALLTAVWLPKRVAVMHCKGHQKDDAPTSTGNRRADEVAREVAIRPLSTQATISAGKRTADGSEFEKRTADGSEFESPKKKAKVE

SEQ ID NO: 1401 - protein, 2096 aa, synthetic construct
MPAAKRVKLDGGDKKYSIGLDIGTNSVGWAVITDEYKVPSKKFKVLGNTDRHSIKKNLIGALLFDSGETAEATRLKRTARRRYTRRKNRICYLQEIFSNEMAKVDDSFFHRLEESFLVEEDKKHERHPIFGNIVDEVAYHEKYPTIYHLRKKLVDSTDKADLRLIYLALAHMIKFRGHFLIEGDLNPDNSDVDKLFIQLVQTYNQLFEENPINASGVDAKAILSARLSKSRRLENLIAQLPGEKKNGLFGNLIALSLGLTPNFKSNFDLAEDAKLQLSKDTYDDDLDNLLAQIGDQYADLFLAAKNLSDAILLSDILRVNTEITKAPLSASMIKRYDEHHQDLTLLKALVRQQLPEKYKEIFFDQSKNGYAGYIDGGASQEEFYKFIKPILEKMDGTEELLVKLNREDLLRKQRTFDNGSIPHQIHLGELHAILRRQEDFYPFLKDNREKIEKILTFRIPYYVGPLARGNSRFAWMTRKSEETITPWNFEEVVDKGASAQSFIERMTNFDKNLPNEKVLPKHSLLYEYFTVYNELTKVKYVTEGMRKPAFLSGEQKKAIVDLLFKTNRKVTVKQLKEDYFKKIECFDSVEISGVEDRFNASLGTYHDLLKIIKDKDFLDNEENEDILEDIVLTLTLFEDREMIEERLKTYAHLFDDKVMKQLKRRRYTGWGRLSRKLINGIRDKQSGKTILDFLKSDGFANRNFMQLIHDDSLTFKEDIQKAQVSGQGDSLHEHIANLAGSPAIKKGILQTVKVVDELVKVMGRHKPENIVIEMARENQTTQKGQKNSRERMKRIEEGIKELGSQILKEHPVENTQLQNEKLYLYYLQNGRDMYVDQELDINRLSDYDVDHIVPQSFLKDDSIDNKVLTRSDKARGKSDNVPSEEVVKKMKNYWRQLLNAKLITQRKFDNLTKAERGGLSELDKAGFIKRQLVETRQITKHVAQILDSRMNTKYDENDKLIREVKVITLKSKLVSDFRKDFQFYKVREINNYHHAHDAYLNAVVGTALIKKYPKLESEFVYGDYKVYDVRKMIAKSEQEIGKATAKYFFYSNIMNFFKTEITLANGEIRKRPLIETNGETGEIVWDKGRDFATVRKVLSMPQVNIVKKTEVQTGGFSKESILPKRNSDKLIARKKDWDPKKYGGFDSPTVAYSVLVVAKVEKGKSKKLKSVKELLGITIMERSSFEKNPIDFLEAKGYKEVKKDLIIKLPKYSLFELENGRKRMLASAGELQKGNELALPSKYVNFLYLASHYEKLKGSPEDNEQKQLFVEQHKHYLDEIIEQISEFSKRVILADANLDKVLSAYNKHRDKPIREQAENIIHLFTLTNLGAPAAFKYFDTTIDRKRYTSTKEVLDATLIHQSITGLYETRIDLSQLGGDGGPAPGSSGGSGGTAPLEEEYRLFLEAPIQNVTLLEQWKREIPKVWAEINPPGLASTQAPIHVQLLSTALPVRVRQYPITLEAKRSLRETIRKFRAAGILRPVHSPWNTPLLPVRKSGTSEYRMVQDLREVNKRVETIHPTVPNPYTLLSLLPPDRIWYSVLDLKDAFFCIPLAPESQLIFAFEWADAEEGESGQLTWTRLPQGFKNSPTLFNEALNRDLQGFRLDHPSVSLLQYVDDLLIAADTQAACLSATRDLLMTLAELGYRVSGKKAQLCQEEVTYLGFKIHKGSRSLSNSRTQAILQIPVPKTKRQVREFLGKIGYCRLFIPGFAELAQPLYAATRPGNDPLVWGEKEEEAFQSLKLALTQPPALALPSLDKPFQLFVEETSGAAKGVLTQALGPWKRPVAYLSKRLDPVAAGWPRCLRAIAAAALLTREASKLTFGQDIEITSSHNLESLLRSPPDKWLTNARITQYQVLLLDPPRVRFKQTAALNPATLLPETDDTLPIHHCLDTLDSLTSTRPDLTDQPLAQAEATLFTDGSSYIRDGKRYAGAAVVTLDSVIWAEPLPIGTSAQKAELIALTKALEWSKDKSVNIYTDSRYAFATLHVHGMIYRERGWLTAGGKAIKNAPEILALLTAVWLPKRVAVMHCKGHQKDDAPTSTGNRRADEVAREVAIRPLSTQATISAGKRTADGSEFEKRTADGSEFESPKKKAKVE

SEQ ID NO: 1402 - protein, 2096 aa, synthetic construct
MPAAKRVKLDGGDKKYSIGLDIGTNSVGWAVITDEYKVPSKKFKVLGNTDRHSIKKNLIGALLFDSGETAEATRLKRTARRRYTRRKNRICYLQEIFSNEMAKVDDSFFHRLEESFLVEEDKKHERHPIFGNIVDEVAYHEKYPTIYHLRKKLVDSTDKADLRLIYLALAHMIKFRGHFLIEGDLNPDNSDVDKLFIQLVQTYNQLFEENPINASGVDAKAILSARLSKSRRLENLIAQLPGEKKNGLFGNLIALSLGLTPNFKSNFDLAEDAKLQLSKDTYDDDLDNLLAQIGDQYADLFLAAKNLSDAILLSDILRVNTEITKAPLSASMIKRYDEHHQDLTLLKALVRQQLPEKYKEIFFDQSKNGYAGYIDGGASQEEFYKFIKPILEKMDGTEELLVKLNREDLLRKQRTFDNGSIPHQIHLGELHAILRRQEDFYPFLKDNREKIEKILTFRIPYYVGPLARGNSRFAWMTRKSEETITPWNFEEVVDKGASAQSFIERMTNFDKNLPNEKVLPKHSLLYEYFTVYNELTKVKYVTEGMRKPAFLSGEQKKAIVDLLFKTNRKVTVKQLKEDYFKKIECFDSVEISGVEDRFNASLGTYHDLLKIIKDKDFLDNEENEDILEDIVLTLTLFEDREMIEERLKTYAHLFDDKVMKQLKRRRYTGWGRLSRKLINGIRDKQSGKTILDFLKSDGFANRNFMQLIHDDSLTFKEDIQKAQVSGQGDSLHEHIANLAGSPAIKKGILQTVKVVDELVKVMGRHKPENIVIEMARENQTTQKGQKNSRERMKRIEEGIKELGSQILKEHPVENTQLQNEKLYLYYLQNGRDMYVDQELDINRLSDYDVDHIVPQSFLKDDSIDNKVLTRSDKARGKSDNVPSEEVVKKMKNYWRQLLNAKLITQRKFDNLTKAERGGLSELDKAGFIKRQLVETRQITKHVAQILDSRMNTKYDENDKLIREVKVITLKSKLVSDFRKDFQFYKVREINNYHHAHDAYLNAVVGTALIKKYPKLESEFVYGDYKVYDVRKMIAKSEQEIGKATAKYFFYSNIMNFFKTEITLANGEIRKRPLIETNGETGEIVWDKGRDFATVRKVLSMPQVNIVKKTEVQTGGFSKESILPKRNSDKLIARKKDWDPKKYGGFDSPTVAYSVLVVAKVEKGKSKKLKSVKELLGITIMERSSFEKNPIDFLEAKGYKEVKKDLIIKLPKYSLFELENGRKRMLASAGELQKGNELALPSKYVNFLYLASHYEKLKGSPEDNEQKQLFVEQHKHYLDEIIEQISEFSKRVILADANLDKVLSAYNKHRDKPIREQAENIIHLFTLTNLGAPAAFKYFDTTIDRKRYTSTKEVLDATLIHQSITGLYETRIDLSQLGGDGGGGGPAPGGSGGTAPLEEEYRLFLEAPIQNVTLLEQWKREIPKVWAEINPPGLASTQAPIHVQLLSTALPVRVRQYPITLEAKRSLRETIRKFRAAGILRPVHSPWNTPLLPVRKSGTSEYRMVQDLREVNKRVETIHPTVPNPYTLLSLLPPDRIWYSVLDLKDAFFCIPLAPESQLIFAFEWADAEEGESGQLTWTRLPQGFKNSPTLFNEALNRDLQGFRLDHPSVSLLQYVDDLLIAADTQAACLSATRDLLMTLAELGYRVSGKKAQLCQEEVTYLGFKIHKGSRSLSNSRTQAILQIPVPKTKRQVREFLGKIGYCRLFIPGFAELAQPLYAATRPGNDPLVWGEKEEEAFQSLKLALTQPPALALPSLDKPFQLFVEETSGAAKGVLTQALGPWKRPVAYLSKRLDPVAAGWPRCLRAIAAAALLTREASKLTFGQDIEITSSHNLESLLRSPPDKWLTNARITQYQVLLLDPPRVRFKQTAALNPATLLPETDDTLPIHHCLDTLDSLTSTRPDLTDQPLAQAEATLFTDGSSYIRDGKRYAGAAVVTLDSVIWAEPLPIGTSAQKAELIALTKALEWSKDKSVNIYTDSRYAFATLHVHGMIYRERGWLTAGGKAIKNAPEILALLTAVWLPKRVAVMHCKGHQKDDAPTSTGNRRADEVAREVAIRPLSTQATISAGKRTADGSEFEKRTADGSEFESPKKKAKVE

SEQ ID NO: 1403 - protein, 2096 aa, synthetic construct
MPAAKRVKLDGGDKKYSIGLDIGTNSVGWAVITDEYKVPSKKFKVLGNTDRHSIKKNLIGALLFDSGETAEATRLKRTARRRYTRRKNRICYLQEIFSNEMAKVDDSFFHRLEESFLVEEDKKHERHPIFGNIVDEVAYHEKYPTIYHLRKKLVDSTDKADLRLIYLALAHMIKFRGHFLIEGDLNPDNSDVDKLFIQLVQTYNQLFEENPINASGVDAKAILSARLSKSRRLENLIAQLPGEKKNGLFGNLIALSLGLTPNFKSNFDLAEDAKLQLSKDTYDDDLDNLLAQIGDQYADLFLAAKNLSDAILLSDILRVNTEITKAPLSASMIKRYDEHHQDLTLLKALVRQQLPEKYKEIFFDQSKNGYAGYIDGGASQEEFYKFIKPILEKMDGTEELLVKLNREDLLRKQRTFDNGSIPHQIHLGELHAILRRQEDFYPFLKDNREKIEKILTFRIPYYVGPLARGNSRFAWMTRKSEETITPWNFEEVVDKGASAQSFIERMTNFDKNLPNEKVLPKHSLLYEYFTVYNELTKVKYVTEGMRKPAFLSGEQKKAIVDLLFKTNRKVTVKQLKEDYFKKIECFDSVEISGVEDRFNASLGTYHDLLKIIKDKDFLDNEENEDILEDIVLTLTLFEDREMIEERLKTYAHLFDDKVMKQLKRRRYTGWGRLSRKLINGIRDKQSGKTILDFLKSDGFANRNFMQLIHDDSLTFKEDIQKAQVSGQGDSLHEHIANLAGSPAIKKGILQTVKVVDELVKVMGRHKPENIVIEMARENQTTQKGQKNSRERMKRIEEGIKELGSQILKEHPVENTQLQNEKLYLYYLQNGRDMYVDQELDINRLSDYDVDHIVPQSFLKDDSIDNKVLTRSDKARGKSDNVPSEEVVKKMKNYWRQLLNAKLITQRKFDNLTKAERGGLSELDKAGFIKRQLVETRQITKHVAQILDSRMNTKYDENDKLIREVKVITLKSKLVSDFRKDFQFYKVREINNYHHAHDAYLNAVVGTALIKKYPKLESEFVYGDYKVYDVRKMIAKSEQEIGKATAKYFFYSNIMNFFKTEITLANGEIRKRPLIETNGETGEIVWDKGRDFATVRKVLSMPQVNIVKKTEVQTGGFSKESILPKRNSDKLIARKKDWDPKKYGGFDSPTVAYSVLVVAKVEKGKSKKLKSVKELLGITIMERSSFEKNPIDFLEAKGYKEVKKDLIIKLPKYSLFELENGRKRMLASAGELQKGNELALPSKYVNFLYLASHYEKLKGSPEDNEQKQLFVEQHKHYLDEIIEQISEFSKRVILADANLDKVLSAYNKHRDKPIREQAENIIHLFTLTNLGAPAAFKYFDTTIDRKRYTSTKEVLDATLIHQSITGLYETRIDLSQLGGDGGPAPGGSGGGGGTAPLEEEYRLFLEAPIQNVTLLEQWKREIPKVWAEINPPGLASTQAPIHVQLLSTALPVRVRQYPITLEAKRSLRETIRKFRAAGILRPVHSPWNTPLLPVRKSGTSEYRMVQDLREVNKRVETIHPTVPNPYTLLSLLPPDRIWYSVLDLKDAFFCIPLAPESQLIFAFEWADAEEGESGQLTWTRLPQGFKNSPTLFNEALNRDLQGFRLDHPSVSLLQYVDDLLIAADTQAACLSATRDLLMTLAELGYRVSGKKAQLCQEEVTYLGFKIHKGSRSLSNSRTQAILQIPVPKTKRQVREFLGKIGYCRLFIPGFAELAQPLYAATRPGNDPLVWGEKEEEAFQSLKLALTQPPALALPSLDKPFQLFVEETSGAAKGVLTQALGPWKRPVAYLSKRLDPVAAGWPRCLRAIAAAALLTREASKLTFGQDIEITSSHNLESLLRSPPDKWLTNARITQYQVLLLDPPRVRFKQTAALNPATLLPETDDTLPIHHCLDTLDSLTSTRPDLTDQPLAQAEATLFTDGSSYIRDGKRYAGAAVVTLDSVIWAEPLPIGTSAQKAELIALTKALEWSKDKSVNIYTDSRYAFATLHVHGMIYRERGWLTAGGKAIKNAPEILALLTAVWLPKRVAVMHCKGHQKDDAPTSTGNRRADEVAREVAIRPLSTQATISAGKRTADGSEFEKRTADGSEFESPKKKAKVE

SEQ ID NO: 1404 - protein, 2098 aa, synthetic construct
MPAAKRVKLDGGDKKYSIGLDIGTNSVGWAVITDEYKVPSKKFKVLGNTDRHSIKKNLIGALLFDSGETAEATRLKRTARRRYTRRKNRICYLQEIFSNEMAKVDDSFFHRLEESFLVEEDKKHERHPIFGNIVDEVAYHEKYPTIYHLRKKLVDSTDKADLRLIYLALAHMIKFRGHFLIEGDLNPDNSDVDKLFIQLVQTYNQLFEENPINASGVDAKAILSARLSKSRRLENLIAQLPGEKKNGLFGNLIALSLGLTPNFKSNFDLAEDAKLQLSKDTYDDDLDNLLAQIGDQYADLFLAAKNLSDAILLSDILRVNTEITKAPLSASMIKRYDEHHQDLTLLKALVRQQLPEKYKEIFFDQSKNGYAGYIDGGASQEEFYKFIKPILEKMDGTEELLVKLNREDLLRKQRTFDNGSIPHQIHLGELHAILRRQEDFYPFLKDNREKIEKILTFRIPYYVGPLARGNSRFAWMTRKSEETITPWNFEEVVDKGASAQSFIERMTNFDKNLPNEKVLPKHSLLYEYFTVYNELTKVKYVTEGMRKPAFLSGEQKKAIVDLLFKTNRKVTVKQLKEDYFKKIECFDSVEISGVEDRFNASLGTYHDLLKIIKDKDFLDNEENEDILEDIVLTLTLFEDREMIEERLKTYAHLFDDKVMKQLKRRRYTGWGRLSRKLINGIRDKQSGKTILDFLKSDGFANRNFMQLIHDDSLTFKEDIQKAQVSGQGDSLHEHIANLAGSPAIKKGILQTVKVVDELVKVMGRHKPENIVIEMARENQTTQKGQKNSRERMKRIEEGIKELGSQILKEHPVENTQLQNEKLYLYYLQNGRDMYVDQELDINRLSDYDVDHIVPQSFLKDDSIDNKVLTRSDKARGKSDNVPSEEVVKKMKNYWRQLLNAKLITQRKFDNLTKAERGGLSELDKAGFIKRQLVETRQITKHVAQILDSRMNTKYDENDKLIREVKVITLKSKLVSDFRKDFQFYKVREINNYHHAHDAYLNAVVGTALIKKYPKLESEFVYGDYKVYDVRKMIAKSEQEIGKATAKYFFYSNIMNFFKTEITLANGEIRKRPLIETNGETGEIVWDKGRDFATVRKVLSMPQVNIVKKTEVQTGGFSKESILPKRNSDKLIARKKDWDPKKYGGFDSPTVAYSVLVVAKVEKGKSKKLKSVKELLGITIMERSSFEKNPIDFLEAKGYKEVKKDLIIKLPKYSLFELENGRKRMLASAGELQKGNELALPSKYVNFLYLASHYEKLKGSPEDNEQKQLFVEQHKHYLDEIIEQISEFSKRVILADANLDKVLSAYNKHRDKPIREQAENIIHLFTLTNLGAPAAFKYFDTTIDRKRYTSTKEVLDATLIHQSITGLYETRIDLSQLGGDGGGGGGSSEAAAKGGTAPLEEEYRLFLEAPIQNVTLLEQWKREIPKVWAEINPPGLASTQAPIHVQLLSTALPVRVRQYPITLEAKRSLRETIRKFRAAGILRPVHSPWNTPLLPVRKSGTSEYRMVQDLREVNKRVETIHPTVPNPYTLLSLLPPDRIWYSVLDLKDAFFCIPLAPESQLIFAFEWADAEEGESGQLTWTRLPQGFKNSPTLFNEALNRDLQGFRLDHPSVSLLQYVDDLLIAADTQAACLSATRDLLMTLAELGYRVSGKKAQLCQEEVTYLGFKIHKGSRSLSNSRTQAILQIPVPKTKRQVREFLGKIGYCRLFIPGFAELAQPLYAATRPGNDPLVWGEKEEEAFQSLKLALTQPPALALPSLDKPFQLFVEETSGAAKGVLTQALGPWKRPVAYLSKRLDPVAAGWPRCLRAIAAAALLTREASKLTFGQDIEITSSHNLESLLRSPPDKWLTNARITQYQVLLLDPPRVRFKQTAALNPATLLPETDDTLPIHHCLDTLDSLTSTRPDLTDQPLAQAEATLFTDGSSYIRDGKRYAGAAVVTLDSVIWAEPLPIGTSAQKAELIALTKALEWSKDKSVNIYTDSRYAFATLHVHGMIYRERGWLTAGGKAIKNAPEILALLTAVWLPKRVAVMHCKGHQKDDAPTSTGNRRADEVAREVAIRPLSTQATISAGKRTADGSEFEKRTADGSEFESPKKKAKVE

SEQ ID NO: 1405 - protein, 2095 aa, synthetic construct
MPAAKRVKLDGGDKKYSIGLDIGTNSVGWAVITDEYKVPSKKFKVLGNTDRHSIKKNLIGALLFDSGETAEATRLKRTARRRYTRRKNRICYLQEIFSNEMAKVDDSFFHRLEESFLVEEDKKHERHPIFGNIVDEVAYHEKYPTIYHLRKKLVDSTDKADLRLIYLALAHMIKFRGHFLIEGDLNPDNSDVDKLFIQLVQTYNQLFEENPINASGVDAKAILSARLSKSRRLENLIAQLPGEKKNGLFGNLIALSLGLTPNFKSNFDLAEDAKLQLSKDTYDDDLDNLLAQIGDQYADLFLAAKNLSDAILLSDILRVNTEITKAPLSASMIKRYDEHHQDLTLLKALVRQQLPEKYKEIFFDQSKNGYAGYIDGGASQEEFYKFIKPILEKMDGTEELLVKLNREDLLRKQRTFDNGSIPHQIHLGELHAILRRQEDFYPFLKDNREKIEKILTFRIPYYVGPLARGNSRFAWMTRKSEETITPWNFEEVVDKGASAQSFIERMTNFDKNLPNEKVLPKHSLLYEYFTVYNELTKVKYVTEGMRKPAFLSGEQKKAIVDLLFKTNRKVTVKQLKEDYFKKIECFDSVEISGVEDRFNASLGTYHDLLKIIKDKDFLDNEENEDILEDIVLTLTLFEDREMIEERLKTYAHLFDDKVMKQLKRRRYTGWGRLSRKLINGIRDKQSGKTILDFLKSDGFANRNFMQLIHDDSLTFKEDIQKAQVSGQGDSLHEHIANLAGSPAIKKGILQTVKVVDELVKVMGRHKPENIVIEMARENQTTQKGQKNSRERMKRIEEGIKELGSQILKEHPVENTQLQNEKLYLYYLQNGRDMYVDQELDINRLSDYDVDHIVPQSFLKDDSIDNKVLTRSDKARGKSDNVPSEEVVKKMKNYWRQLLNAKLITQRKFDNLTKAERGGLSELDKAGFIKRQLVETRQITKHVAQILDSRMNTKYDENDKLIREVKVITLKSKLVSDFRKDFQFYKVREINNYHHAHDAYLNAVVGTALIKKYPKLESEFVYGDYKVYDVRKMIAKSEQEIGKATAKYFFYSNIMNFFKTEITLANGEIRKRPLIETNGETGEIVWDKGRDFATVRKVLSMPQVNIVKKTEVQTGGFSKESILPKRNSDKLIARKKDWDPKKYGGFDSPTVAYSVLVVAKVEKGKSKKLKSVKELLGITIMERSSFEKNPIDFLEAKGYKEVKKDLIIKLPKYSLFELENGRKRMLASAGELQKGNELALPSKYVNFLYLASHYEKLKGSPEDNEQKQLFVEQHKHYLDEIIEQISEFSKRVILADANLDKVLSAYNKHRDKPIREQAENIIHLFTLTNLGAPAAFKYFDTTIDRKRYTSTKEVLDATLIHQSITGLYETRIDLSQLGGDGGGSSEAAAKGGTAPLEEEYRLFLEAPIQNVTLLEQWKREIPKVWAEINPPGLASTQAPIHVQLLSTALPVRVRQYPITLEAKRSLRETIRKFRAAGILRPVHSPWNTPLLPVRKSGTSEYRMVQDLREVNKRVETIHPTVPNPYTLLSLLPPDRIWYSVLDLKDAFFCIPLAPESQLIFAFEWADAEEGESGQLTWTRLPQGFKNSPTLFNEALNRDLQGFRLDHPSVSLLQYVDDLLIAADTQAACLSATRDLLMTLAELGYRVSGKKAQLCQEEVTYLGFKIHKGSRSLSNSRTQAILQIPVPKTKRQVREFLGKIGYCRLFIPGFAELAQPLYAATRPGNDPLVWGEKEEEAFQSLKLALTQPPALALPSLDKPFQLFVEETSGAAKGVLTQALGPWKRPVAYLSKRLDPVAAGWPRCLRAIAAAALLTREASKLTFGQDIEITSSHNLESLLRSPPDKWLTNARITQYQVLLLDPPRVRFKQTAALNPATLLPETDDTLPIHHCLDTLDSLTSTRPDLTDQPLAQAEATLFTDGSSYIRDGKRYAGAAVVTLDSVIWAEPLPIGTSAQKAELIALTKALEWSKDKSVNIYTDSRYAFATLHVHGMIYRERGWLTAGGKAIKNAPEILALLTAVWLPKRVAVMHCKGHQKDDAPTSTGNRRADEVAREVAIRPLSTQATISAGKRTADGSEFEKRTADGSEFESPKKKAKVE

SEQ ID NO: 1406 - protein, 2098 aa, synthetic construct
MPAAKRVKLDGGDKKYSIGLDIGTNSVGWAVITDEYKVPSKKFKVLGNTDRHSIKKNLIGALLFDSGETAEATRLKRTARRRYTRRKNRICYLQEIFSNEMAKVDDSFFHRLEESFLVEEDKKHERHPIFGNIVDEVAYHEKYPTIYHLRKKLVDSTDKADLRLIYLALAHMIKFRGHFLIEGDLNPDNSDVDKLFIQLVQTYNQLFEENPINASGVDAKAILSARLSKSRRLENLIAQLPGEKKNGLFGNLIALSLGLTPNFKSNFDLAEDAKLQLSKDTYDDDLDNLLAQIGDQYADLFLAAKNLSDAILLSDILRVNTEITKAPLSASMIKRYDEHHQDLTLLKALVRQQLPEKYKEIFFDQSKNGYAGYIDGGASQEEFYKFIKPILEKMDGTEELLVKLNREDLLRKQRTFDNGSIPHQIHLGELHAILRRQEDFYPFLKDNREKIEKILTFRIPYYVGPLARGNSRFAWMTRKSEETITPWNFEEVVDKGASAQSFIERMTNFDKNLPNEKVLPKHSLLYEYFTVYNELTKVKYVTEGMRKPAFLSGEQKKAIVDLLFKTNRKVTVKQLKEDYFKKIECFDSVEISGVEDRFNASLGTYHDLLKIIKDKDFLDNEENEDILEDIVLTLTLFEDREMIEERLKTYAHLFDDKVMKQLKRRRYTGWGRLSRKLINGIRDKQSGKTILDFLKSDGFANRNFMQLIHDDSLTFKEDIQKAQVSGQGDSLHEHIANLAGSPAIKKGILQTVKVVDELVKVMGRHKPENIVIEMARENQTTQKGQKNSRERMKRIEEGIKELGSQILKEHPVENTQLQNEKLYLYYLQNGRDMYVDQELDINRLSDYDVDHIVPQSFLKDDSIDNKVLTRSDKARGKSDNVPSEEVVKKMKNYWRQLLNAKLITQRKFDNLTKAERGGLSELDKAGFIKRQLVETRQITKHVAQILDSRMNTKYDENDKLIREVKVITLKSKLVSDFRKDFQFYKVREINNYHHAHDAYLNAVVGTALIKKYPKLESEFVYGDYKVYDVRKMIAKSEQEIGKATAKYFFYSNIMNFFKTEITLANGEIRKRPLIETNGETGEIVWDKGRDFATVRKVLSMPQVNIVKKTEVQTGGFSKESILPKRNSDKLIARKKDWDPKKYGGFDSPTVAYSVLVVAKVEKGKSKKLKSVKELLGITIMERSSFEKNPIDFLEAKGYKEVKKDLIIKLPKYSLFELENGRKRMLASAGELQKGNELALPSKYVNFLYLASHYEKLKGSPEDNEQKQLFVEQHKHYLDEIIEQISEFSKRVILADANLDKVLSAYNKHRDKPIREQAENIIHLFTLTNLGAPAAFKYFDTTIDRKRYTSTKEVLDATLIHQSITGLYETRIDLSQLGGDGGEAAAKGGSGSSGGTAPLEEEYRLFLEAPIQNVTLLEQWKREIPKVWAEINPPGLASTQAPIHVQLLSTALPVRVRQYPITLEAKRSLRETIRKFRAAGILRPVHSPWNTPLLPVRKSGTSEYRMVQDLREVNKRVETIHPTVPNPYTLLSLLPPDRIWYSVLDLKDAFFCIPLAPESQLIFAFEWADAEEGESGQLTWTRLPQGFKNSPTLFNEALNRDLQGFRLDHPSVSLLQYVDDLLIAADTQAACLSATRDLLMTLAELGYRVSGKKAQLCQEEVTYLGFKIHKGSRSLSNSRTQAILQIPVPKTKRQVREFLGKIGYCRLFIPGFAELAQPLYAATRPGNDPLVWGEKEEEAFQSLKLALTQPPALALPSLDKPFQLFVEETSGAAKGVLTQALGPWKRPVAYLSKRLDPVAAGWPRCLRAIAAAALLTREASKLTFGQDIEITSSHNLESLLRSPPDKWLTNARITQYQVLLLDPPRVRFKQTAALNPATLLPETDDTLPIHHCLDTLDSLTSTRPDLTDQPLAQAEATLFTDGSSYIRDGKRYAGAAVVTLDSVIWAEPLPIGTSAQKAELIALTKALEWSKDKSVNIYTDSRYAFATLHVHGMIYRERGWLTAGGKAIKNAPEILALLTAVWLPKRVAVMHCKGHQKDDAPTSTGNRRADEVAREVAIRPLSTQATISAGKRTADGSEFEKRTADGSEFESPKKKAKVE

SEQ ID NO: 1407 - protein, 2095 aa, synthetic construct
MPAAKRVKLDGGDKKYSIGLDIGTNSVGWAVITDEYKVPSKKFKVLGNTDRHSIKKNLIGALLFDSGETAEATRLKRTARRRYTRRKNRICYLQEIFSNEMAKVDDSFFHRLEESFLVEEDKKHERHPIFGNIVDEVAYHEKYPTIYHLRKKLVDSTDKADLRLIYLALAHMIKFRGHFLIEGDLNPDNSDVDKLFIQLVQTYNQLFEENPINASGVDAKAILSARLSKSRRLENLIAQLPGEKKNGLFGNLIALSLGLTPNFKSNFDLAEDAKLQLSKDTYDDDLDNLLAQIGDQYADLFLAAKNLSDAILLSDILRVNTEITKAPLSASMIKRYDEHHQDLTLLKALVRQQLPEKYKEIFFDQSKNGYAGYIDGGASQEEFYKFIKPILEKMDGTEELLVKLNREDLLRKQRTFDNGSIPHQIHLGELHAILRRQEDFYPFLKDNREKIEKILTFRIPYYVGPLARGNSRFAWMTRKSEETITPWNFEEVVDKGASAQSFIERMTNFDKNLPNEKVLPKHSLLYEYFTVYNELTKVKYVTEGMRKPAFLSGEQKKAIVDLLFKTNRKVTVKQLKEDYFKKIECFDSVEISGVEDRFNASLGTYHDLLKIIKDKDFLDNEENEDILEDIVLTLTLFEDREMIEERLKTYAHLFDDKVMKQLKRRRYTGWGRLSRKLINGIRDKQSGKTILDFLKSDGFANRNFMQLIHDDSLTFKEDIQKAQVSGQGDSLHEHIANLAGSPAIKKGILQTVKVVDELVKVMGRHKPENIVIEMARENQTTQKGQKNSRERMKRIEEGIKELGSQILKEHPVENTQLQNEKLYLYYLQNGRDMYVDQELDINRLSDYDVDHIVPQSFLKDDSIDNKVLTRSDKARGKSDNVPSEEVVKKMKNYWRQLLNAKLITQRKFDNLTKAERGGLSELDKAGFIKRQLVETRQITKHVAQILDSRMNTKYDENDKLIREVKVITLKSKLVSDFRKDFQFYKVREINNYHHAHDAYLNAVVGTALIKKYPKLESEFVYGDYKVYDVRKMIAKSEQEIGKATAKYFFYSNIMNFFKTEITLANGEIRKRPLIETNGETGEIVWDKGRDFATVRKVLSMPQVNIVKKTEVQTGGFSKESILPKRNSDKLIARKKDWDPKKYGGFDSPTVAYSVLVVAKVEKGKSKKLKSVKELLGITIMERSSFEKNPIDFLEAKGYKEVKKDLIIKLPKYSLFELENGRKRMLASAGELQKGNELALPSKYVNFLYLASHYEKLKGSPEDNEQKQLFVEQHKHYLDEIIEQISEFSKRVILADANLDKVLSAYNKHRDKPIREQAENIIHLFTLTNLGAPAAFKYFDTTIDRKRYTSTKEVLDATLIHQSITGLYETRIDLSQLGGDGGPAPEAAAKGGTAPLEEEYRLFLEAPIQNVTLLEQWKREIPKVWAEINPPGLASTQAPIHVQLLSTALPVRVRQYPITLEAKRSLRETIRKFRAAGILRPVHSPWNTPLLPVRKSGTSEYRMVQDLREVNKRVETIHPTVPNPYTLLSLLPPDRIWYSVLDLKDAFFCIPLAPESQLIFAFEWADAEEGESGQLTWTRLPQGFKNSPTLFNEALNRDLQGFRLDHPSVSLLQYVDDLLIAADTQAACLSATRDLLMTLAELGYRVSGKKAQLCQEEVTYLGFKIHKGSRSLSNSRTQAILQIPVPKTKRQVREFLGKIGYCRLFIPGFAELAQPLYAATRPGNDPLVWGEKEEEAFQSLKLALTQPPALALPSLDKPFQLFVEETSGAAKGVLTQALGPWKRPVAYLSKRLDPVAAGWPRCLRAIAAAALLTREASKLTFGQDIEITSSHNLESLLRSPPDKWLTNARITQYQVLLLDPPRVRFKQTAALNPATLLPETDDTLPIHHCLDTLDSLTSTRPDLTDQPLAQAEATLFTDGSSYIRDGKRYAGAAVVTLDSVIWAEPLPIGTSAQKAELIALTKALEWSKDKSVNIYTDSRYAFATLHVHGMIYRERGWLTAGGKAIKNAPEILALLTAVWLPKRVAVMHCKGHQKDDAPTSTGNRRADEVAREVAIRPLSTQATISAGKRTADGSEFEKRTADGSEFESPKKKAKVE

SEQ ID NO: 1408 - protein, 2099 aa, synthetic construct
MPAAKRVKLDGGDKKYSIGLDIGTNSVGWAVITDEYKVPSKKFKVLGNTDRHSIKKNLIGALLFDSGETAEATRLKRTARRRYTRRKNRICYLQEIFSNEMAKVDDSFFHRLEESFLVEEDKKHERHPIFGNIVDEVAYHEKYPTIYHLRKKLVDSTDKADLRLIYLALAHMIKFRGHFLIEGDLNPDNSDVDKLFIQLVQTYNQLFEENPINASGVDAKAILSARLSKSRRLENLIAQLPGEKKNGLFGNLIALSLGLTPNFKSNFDLAEDAKLQLSKDTYDDDLDNLLAQIGDQYADLFLAAKNLSDAILLSDILRVNTEITKAPLSASMIKRYDEHHQDLTLLKALVRQQLPEKYKEIFFDQSKNGYAGYIDGGASQEEFYKFIKPILEKMDGTEELLVKLNREDLLRKQRTFDNGSIPHQIHLGELHAILRRQEDFYPFLKDNREKIEKILTFRIPYYVGPLARGNSRFAWMTRKSEETITPWNFEEVVDKGASAQSFIERMTNFDKNLPNEKVLPKHSLLYEYFTVYNELTKVKYVTEGMRKPAFLSGEQKKAIVDLLFKTNRKVTVKQLKEDYFKKIECFDSVEISGVEDRFNASLGTYHDLLKIIKDKDFLDNEENEDILEDIVLTLTLFEDREMIEERLKTYAHLFDDKVMKQLKRRRYTGWGRLSRKLINGIRDKQSGKTILDFLKSDGFANRNFMQLIHDDSLTFKEDIQKAQVSGQGDSLHEHIANLAGSPAIKKGILQTVKVVDELVKVMGRHKPENIVIEMARENQTTQKGQKNSRERMKRIEEGIKELGSQILKEHPVENTQLQNEKLYLYYLQNGRDMYVDQELDINRLSDYDVDHIVPQSFLKDDSIDNKVLTRSDKARGKSDNVPSEEVVKKMKNYWRQLLNAKLITQRKFDNLTKAERGGLSELDKAGFIKRQLVETRQITKHVAQILDSRMNTKYDENDKLIREVKVITLKSKLVSDFRKDFQFYKVREINNYHHAHDAYLNAVVGTALIKKYPKLESEFVYGDYKVYDVRKMIAKSEQEIGKATAKYFFYSNIMNFFKTEITLANGEIRKRPLIETNGETGEIVWDKGRDFATVRKVLSMPQVNIVKKTEVQTGGFSKESILPKRNSDKLIARKKDWDPKKYGGFDSPTVAYSVLVVAKVEKGKSKKLKSVKELLGITIMERSSFEKNPIDFLEAKGYKEVKKDLIIKLPKYSLFELENGRKRMLASAGELQKGNELALPSKYVNFLYLASHYEKLKGSPEDNEQKQLFVEQHKHYLDEIIEQISEFSKRVILADANLDKVLSAYNKHRDKPIREQAENIIHLFTLTNLGAPAAFKYFDTTIDRKRYTSTKEVLDATLIHQSITGLYETRIDLSQLGGDGGGSAGSAAGSGEFGGTAPLEEEYRLFLEAPIQNVTLLEQWKREIPKVWAEINPPGLASTQAPIHVQLLSTALPVRVRQYPITLEAKRSLRETIRKFRAAGILRPVHSPWNTPLLPVRKSGTSEYRMVQDLREVNKRVETIHPTVPNPYTLLSLLPPDRIWYSVLDLKDAFFCIPLAPESQLIFAFEWADAEEGESGQLTWTRLPQGFKNSPTLFNEALNRDLQGFRLDHPSVSLLQYVDDLLIAADTQAACLSATRDLLMTLAELGYRVSGKKAQLCQEEVTYLGFKIHKGSRSLSNSRTQAILQIPVPKTKRQVREFLGKIGYCRLFIPGFAELAQPLYAATRPGNDPLVWGEKEEEAFQSLKLALTQPPALALPSLDKPFQLFVEETSGAAKGVLTQALGPWKRPVAYLSKRLDPVAAGWPRCLRAIAAAALLTREASKLTFGQDIEITSSHNLESLLRSPPDKWLTNARITQYQVLLLDPPRVRFKQTAALNPATLLPETDDTLPIHHCLDTLDSLTSTRPDLTDQPLAQAEATLFTDGSSYIRDGKRYAGAAVVTLDSVIWAEPLPIGTSAQKAELIALTKALEWSKDKSVNIYTDSRYAFATLHVHGMIYRERGWLTAGGKAIKNAPEILALLTAVWLPKRVAVMHCKGHQKDDAPTSTGNRRADEVAREVAIRPLSTQATISAGKRTADGSEFEKRTADGSEFESPKKKAKVE

SEQ ID NO: 1409 - protein, 2096 aa, synthetic construct
MPAAKRVKLDGGDKKYSIGLDIGTNSVGWAVITDEYKVPSKKFKVLGNTDRHSIKKNLIGALLFDSGETAEATRLKRTARRRYTRRKNRICYLQEIFSNEMAKVDDSFFHRLEESFLVEEDKKHERHPIFGNIVDEVAYHEKYPTIYHLRKKLVDSTDKADLRLIYLALAHMIKFRGHFLIEGDLNPDNSDVDKLFIQLVQTYNQLFEENPINASGVDAKAILSARLSKSRRLENLIAQLPGEKKNGLFGNLIALSLGLTPNFKSNFDLAEDAKLQLSKDTYDDDLDNLLAQIGDQYADLFLAAKNLSDAILLSDILRVNTEITKAPLSASMIKRYDEHHQDLTLLKALVRQQLPEKYKEIFFDQSKNGYAGYIDGGASQEEFYKFIKPILEKMDGTEELLVKLNREDLLRKQRTFDNGSIPHQIHLGELHAILRRQEDFYPFLKDNREKIEKILTFRIPYYVGPLARGNSRFAWMTRKSEETITPWNFEEVVDKGASAQSFIERMTNFDKNLPNEKVLPKHSLLYEYFTVYNELTKVKYVTEGMRKPAFLSGEQKKAIVDLLFKTNRKVTVKQLKEDYFKKIECFDSVEISGVEDRFNASLGTYHDLLKIIKDKDFLDNEENEDILEDIVLTLTLFEDREMIEERLKTYAHLFDDKVMKQLKRRRYTGWGRLSRKLINGIRDKQSGKTILDFLKSDGFANRNFMQLIHDDSLTFKEDIQKAQVSGQGDSLHEHIANLAGSPAIKKGILQTVKVVDELVKVMGRHKPENIVIEMARENQTTQKGQKNSRERMKRIEEGIKELGSQILKEHPVENTQLQNEKLYLYYLQNGRDMYVDQELDINRLSDYDVDHIVPQSFLKDDSIDNKVLTRSDKARGKSDNVPSEEVVKKMKNYWRQLLNAKLITQRKFDNLTKAERGGLSELDKAGFIKRQLVETRQITKHVAQILDSRMNTKYDENDKLIREVKVITLKSKLVSDFRKDFQFYKVREINNYHHAHDAYLNAVVGTALIKKYPKLESEFVYGDYKVYDVRKMIAKSEQEIGKATAKYFFYSNIMNFFKTEITLANGEIRKRPLIETNGETGEIVWDKGRDFATVRKVLSMPQVNIVKKTEVQTGGFSKESILPKRNSDKLIARKKDWDPKKYGGFDSPTVAYSVLVVAKVEKGKSKKLKSVKELLGITIMERSSFEKNPIDFLEAKGYKEVKKDLIIKLPKYSLFELENGRKRMLASAGELQKGNELALPSKYVNFLYLASHYEKLKGSPEDNEQKQLFVEQHKHYLDEIIEQISEFSKRVILADANLDKVLSAYNKHRDKPIREQAENIIHLFTLTNLGAPAAFKYFDTTIDRKRYTSTKEVLDATLIHQSITGLYETRIDLSQLGGDGGGGSPAPGSSGGTAPLEEEYRLFLEAPIQNVTLLEQWKREIPKVWAEINPPGLASTQAPIHVQLLSTALPVRVRQYPITLEAKRSLRETIRKFRAAGILRPVHSPWNTPLLPVRKSGTSEYRMVQDLREVNKRVETIHPTVPNPYTLLSLLPPDRIWYSVLDLKDAFFCIPLAPESQLIFAFEWADAEEGESGQLTWTRLPQGFKNSPTLFNEALNRDLQGFRLDHPSVSLLQYVDDLLIAADTQAACLSATRDLLMTLAELGYRVSGKKAQLCQEEVTYLGFKIHKGSRSLSNSRTQAILQIPVPKTKRQVREFLGKIGYCRLFIPGFAELAQPLYAATRPGNDPLVWGEKEEEAFQSLKLALTQPPALALPSLDKPFQLFVEETSGAAKGVLTQALGPWKRPVAYLSKRLDPVAAGWPRCLRAIAAAALLTREASKLTFGQDIEITSSHNLESLLRSPPDKWLTNARITQYQVLLLDPPRVRFKQTAALNPATLLPETDDTLPIHHCLDTLDSLTSTRPDLTDQPLAQAEATLFTDGSSYIRDGKRYAGAAVVTLDSVIWAEPLPIGTSAQKAELIALTKALEWSKDKSVNIYTDSRYAFATLHVHGMIYRERGWLTAGGKAIKNAPEILALLTAVWLPKRVAVMHCKGHQKDDAPTSTGNRRADEVAREVAIRPLSTQATISAGKRTADGSEFEKRTADGSEFESPKKKAKVE

SEQ ID NO: 1410 - protein, 2093 aa, synthetic construct
MPAAKRVKLDGGDKKYSIGLDIGTNSVGWAVITDEYKVPSKKFKVLGNTDRHSIKKNLIGALLFDSGETAEATRLKRTARRRYTRRKNRICYLQEIFSNEMAKVDDSFFHRLEESFLVEEDKKHERHPIFGNIVDEVAYHEKYPTIYHLRKKLVDSTDKADLRLIYLALAHMIKFRGHFLIEGDLNPDNSDVDKLFIQLVQTYNQLFEENPINASGVDAKAILSARLSKSRRLENLIAQLPGEKKNGLFGNLIALSLGLTPNFKSNFDLAEDAKLQLSKDTYDDDLDNLLAQIGDQYADLFLAAKNLSDAILLSDILRVNTEITKAPLSASMIKRYDEHHQDLTLLKALVRQQLPEKYKEIFFDQSKNGYAGYIDGGASQEEFYKFIKPILEKMDGTEELLVKLNREDLLRKQRTFDNGSIPHQIHLGELHAILRRQEDFYPFLKDNREKIEKILTFRIPYYVGPLARGNSRFAWMTRKSEETITPWNFEEVVDKGASAQSFIERMTNFDKNLPNEKVLPKHSLLYEYFTVYNELTKVKYVTEGMRKPAFLSGEQKKAIVDLLFKTNRKVTVKQLKEDYFKKIECFDSVEISGVEDRFNASLGTYHDLLKIIKDKDFLDNEENEDILEDIVLTLTLFEDREMIEERLKTYAHLFDDKVMKQLKRRRYTGWGRLSRKLINGIRDKQSGKTILDFLKSDGFANRNFMQLIHDDSLTFKEDIQKAQVSGQGDSLHEHIANLAGSPAIKKGILQTVKVVDELVKVMGRHKPENIVIEMARENQTTQKGQKNSRERMKRIEEGIKELGSQILKEHPVENTQLQNEKLYLYYLQNGRDMYVDQELDINRLSDYDVDHIVPQSFLKDDSIDNKVLTRSDKARGKSDNVPSEEVVKKMKNYWRQLLNAKLITQRKFDNLTKAERGGLSELDKAGFIKRQLVETRQITKHVAQILDSRMNTKYDENDKLIREVKVITLKSKLVSDFRKDFQFYKVREINNYHHAHDAYLNAVVGTALIKKYPKLESEFVYGDYKVYDVRKMIAKSEQEIGKATAKYFFYSNIMNFFKTEITLANGEIRKRPLIETNGETGEIVWDKGRDFATVRKVLSMPQVNIVKKTEVQTGGFSKESILPKRNSDKLIARKKDWDPKKYGGFDSPTVAYSVLVVAKVEKGKSKKLKSVKELLGITIMERSSFEKNPIDFLEAKGYKEVKKDLIIKLPKYSLFELENGRKRMLASAGELQKGNELALPSKYVNFLYLASHYEKLKGSPEDNEQKQLFVEQHKHYLDEIIEQISEFSKRVILADANLDKVLSAYNKHRDKPIREQAENIIHLFTLTNLGAPAAFKYFDTTIDRKRYTSTKEVLDATLIHQSITGLYETRIDLSQLGGDGGPAPGGGGGTAPLEEEYRLFLEAPIQNVTLLEQWKREIPKVWAEINPPGLASTQAPIHVQLLSTALPVRVRQYPITLEAKRSLRETIRKFRAAGILRPVHSPWNTPLLPVRKSGTSEYRMVQDLREVNKRVETIHPTVPNPYTLLSLLPPDRIWYSVLDLKDAFFCIPLAPESQLIFAFEWADAEEGESGQLTWTRLPQGFKNSPTLFNEALNRDLQGFRLDHPSVSLLQYVDDLLIAADTQAACLSATRDLLMTLAELGYRVSGKKAQLCQEEVTYLGFKIHKGSRSLSNSRTQAILQIPVPKTKRQVREFLGKIGYCRLFIPGFAELAQPLYAATRPGNDPLVWGEKEEEAFQSLKLALTQPPALALPSLDKPFQLFVEETSGAAKGVLTQALGPWKRPVAYLSKRLDPVAAGWPRCLRAIAAAALLTREASKLTFGQDIEITSSHNLESLLRSPPDKWLTNARITQYQVLLLDPPRVRFKQTAALNPATLLPETDDTLPIHHCLDTLDSLTSTRPDLTDQPLAQAEATLFTDGSSYIRDGKRYAGAAVVTLDSVIWAEPLPIGTSAQKAELIALTKALEWSKDKSVNIYTDSRYAFATLHVHGMIYRERGWLTAGGKAIKNAPEILALLTAVWLPKRVAVMHCKGHQKDDAPTSTGNRRADEVAREVAIRPLSTQATISAGKRTADGSEFEKRTADGSEFESPKKKAKVE

SEQ ID NO: 1411 - protein, 2096 aa, synthetic construct
MPAAKRVKLDGGDKKYSIGLDIGTNSVGWAVITDEYKVPSKKFKVLGNTDRHSIKKNLIGALLFDSGETAEATRLKRTARRRYTRRKNRICYLQEIFSNEMAKVDDSFFHRLEESFLVEEDKKHERHPIFGNIVDEVAYHEKYPTIYHLRKKLVDSTDKADLRLIYLALAHMIKFRGHFLIEGDLNPDNSDVDKLFIQLVQTYNQLFEENPINASGVDAKAILSARLSKSRRLENLIAQLPGEKKNGLFGNLIALSLGLTPNFKSNFDLAEDAKLQLSKDTYDDDLDNLLAQIGDQYADLFLAAKNLSDAILLSDILRVNTEITKAPLSASMIKRYDEHHQDLTLLKALVRQQLPEKYKEIFFDQSKNGYAGYIDGGASQEEFYKFIKPILEKMDGTEELLVKLNREDLLRKQRTFDNGSIPHQIHLGELHAILRRQEDFYPFLKDNREKIEKILTFRIPYYVGPLARGNSRFAWMTRKSEETITPWNFEEVVDKGASAQSFIERMTNFDKNLPNEKVLPKHSLLYEYFTVYNELTKVKYVTEGMRKPAFLSGEQKKAIVDLLFKTNRKVTVKQLKEDYFKKIECFDSVEISGVEDRFNASLGTYHDLLKIIKDKDFLDNEENEDILEDIVLTLTLFEDREMIEERLKTYAHLFDDKVMKQLKRRRYTGWGRLSRKLINGIRDKQSGKTILDFLKSDGFANRNFMQLIHDDSLTFKEDIQKAQVSGQGDSLHEHIANLAGSPAIKKGILQTVKVVDELVKVMGRHKPENIVIEMARENQTTQKGQKNSRERMKRIEEGIKELGSQILKEHPVENTQLQNEKLYLYYLQNGRDMYVDQELDINRLSDYDVDHIVPQSFLKDDSIDNKVLTRSDKARGKSDNVPSEEVVKKMKNYWRQLLNAKLITQRKFDNLTKAERGGLSELDKAGFIKRQLVETRQITKHVAQILDSRMNTKYDENDKLIREVKVITLKSKLVSDFRKDFQFYKVREINNYHHAHDAYLNAVVGTALIKKYPKLESEFVYGDYKVYDVRKMIAKSEQEIGKATAKYFFYSNIMNFFKTEITLANGEIRKRPLIETNGETGEIVWDKGRDFATVRKVLSMPQVNIVKKTEVQTGGFSKESILPKRNSDKLIARKKDWDPKKYGGFDSPTVAYSVLVVAKVEKGKSKKLKSVKELLGITIMERSSFEKNPIDFLEAKGYKEVKKDLIIKLPKYSLFELENGRKRMLASAGELQKGNELALPSKYVNFLYLASHYEKLKGSPEDNEQKQLFVEQHKHYLDEIIEQISEFSKRVILADANLDKVLSAYNKHRDKPIREQAENIIHLFTLTNLGAPAAFKYFDTTIDRKRYTSTKEVLDATLIHQSITGLYETRIDLSQLGGDGGGGGPAPGSSGGTAPLEEEYRLFLEAPIQNVTLLEQWKREIPKVWAEINPPGLASTQAPIHVQLLSTALPVRVRQYPITLEAKRSLRETIRKFRAAGILRPVHSPWNTPLLPVRKSGTSEYRMVQDLREVNKRVETIHPTVPNPYTLLSLLPPDRIWYSVLDLKDAFFCIPLAPESQLIFAFEWADAEEGESGQLTWTRLPQGFKNSPTLFNEALNRDLQGFRLDHPSVSLLQYVDDLLIAADTQAACLSATRDLLMTLAELGYRVSGKKAQLCQEEVTYLGFKIHKGSRSLSNSRTQAILQIPVPKTKRQVREFLGKIGYCRLFIPGFAELAQPLYAATRPGNDPLVWGEKEEEAFQSLKLALTQPPALALPSLDKPFQLFVEETSGAAKGVLTQALGPWKRPVAYLSKRLDPVAAGWPRCLRAIAAAALLTREASKLTFGQDIEITSSHNLESLLRSPPDKWLTNARITQYQVLLLDPPRVRFKQTAALNPATLLPETDDTLPIHHCLDTLDSLTSTRPDLTDQPLAQAEATLFTDGSSYIRDGKRYAGAAVVTLDSVIWAEPLPIGTSAQKAELIALTKALEWSKDKSVNIYTDSRYAFATLHVHGMIYRERGWLTAGGKAIKNAPEILALLTAVWLPKRVAVMHCKGHQKDDAPTSTGNRRADEVAREVAIRPLSTQATISAGKRTADGSEFEKRTADGSEFESPKKKAKVE

SEQ ID NO: 1412 - protein, 2093 aa, synthetic construct
MPAAKRVKLDGGDKKYSIGLDIGTNSVGWAVITDEYKVPSKKFKVLGNTDRHSIKKNLIGALLFDSGETAEATRLKRTARRRYTRRKNRICYLQEIFSNEMAKVDDSFFHRLEESFLVEEDKKHERHPIFGNIVDEVAYHEKYPTIYHLRKKLVDSTDKADLRLIYLALAHMIKFRGHFLIEGDLNPDNSDVDKLFIQLVQTYNQLFEENPINASGVDAKAILSARLSKSRRLENLIAQLPGEKKNGLFGNLIALSLGLTPNFKSNFDLAEDAKLQLSKDTYDDDLDNLLAQIGDQYADLFLAAKNLSDAILLSDILRVNTEITKAPLSASMIKRYDEHHQDLTLLKALVRQQLPEKYKEIFFDQSKNGYAGYIDGGASQEEFYKFIKPILEKMDGTEELLVKLNREDLLRKQRTFDNGSIPHQIHLGELHAILRRQEDFYPFLKDNREKIEKILTFRIPYYVGPLARGNSRFAWMTRKSEETITPWNFEEVVDKGASAQSFIERMTNFDKNLPNEKVLPKHSLLYEYFTVYNELTKVKYVTEGMRKPAFLSGEQKKAIVDLLFKTNRKVTVKQLKEDYFKKIECFDSVEISGVEDRFNASLGTYHDLLKIIKDKDFLDNEENEDILEDIVLTLTLFEDREMIEERLKTYAHLFDDKVMKQLKRRRYTGWGRLSRKLINGIRDKQSGKTILDFLKSDGFANRNFMQLIHDDSLTFKEDIQKAQVSGQGDSLHEHIANLAGSPAIKKGILQTVKVVDELVKVMGRHKPENIVIEMARENQTTQKGQKNSRERMKRIEEGIKELGSQILKEHPVENTQLQNEKLYLYYLQNGRDMYVDQELDINRLSDYDVDHIVPQSFLKDDSIDNKVLTRSDKARGKSDNVPSEEVVKKMKNYWRQLLNAKLITQRKFDNLTKAERGGLSELDKAGFIKRQLVETRQITKHVAQILDSRMNTKYDENDKLIREVKVITLKSKLVSDFRKDFQFYKVREINNYHHAHDAYLNAVVGTALIKKYPKLESEFVYGDYKVYDVRKMIAKSEQEIGKATAKYFFYSNIMNFFKTEITLANGEIRKRPLIETNGETGEIVWDKGRDFATVRKVLSMPQVNIVKKTEVQTGGFSKESILPKRNSDKLIARKKDWDPKKYGGFDSPTVAYSVLVVAKVEKGKSKKLKSVKELLGITIMERSSFEKNPIDFLEAKGYKEVKKDLIIKLPKYSLFELENGRKRMLASAGELQKGNELALPSKYVNFLYLASHYEKLKGSPEDNEQKQLFVEQHKHYLDEIIEQISEFSKRVILADANLDKVLSAYNKHRDKPIREQAENIIHLFTLTNLGAPAAFKYFDTTIDRKRYTSTKEVLDATLIHQSITGLYETRIDLSQLGGDGGGGSGSSGGTAPLEEEYRLFLEAPIQNVTLLEQWKREIPKVWAEINPPGLASTQAPIHVQLLSTALPVRVRQYPITLEAKRSLRETIRKFRAAGILRPVHSPWNTPLLPVRKSGTSEYRMVQDLREVNKRVETIHPTVPNPYTLLSLLPPDRIWYSVLDLKDAFFCIPLAPESQLIFAFEWADAEEGESGQLTWTRLPQGFKNSPTLFNEALNRDLQGFRLDHPSVSLLQYVDDLLIAADTQAACLSATRDLLMTLAELGYRVSGKKAQLCQEEVTYLGFKIHKGSRSLSNSRTQAILQIPVPKTKRQVREFLGKIGYCRLFIPGFAELAQPLYAATRPGNDPLVWGEKEEEAFQSLKLALTQPPALALPSLDKPFQLFVEETSGAAKGVLTQALGPWKRPVAYLSKRLDPVAAGWPRCLRAIAAAALLTREASKLTFGQDIEITSSHNLESLLRSPPDKWLTNARITQYQVLLLDPPRVRFKQTAALNPATLLPETDDTLPIHHCLDTLDSLTSTRPDLTDQPLAQAEATLFTDGSSYIRDGKRYAGAAVVTLDSVIWAEPLPIGTSAQKAELIALTKALEWSKDKSVNIYTDSRYAFATLHVHGMIYRERGWLTAGGKAIKNAPEILALLTAVWLPKRVAVMHCKGHQKDDAPTSTGNRRADEVAREVAIRPLSTQATISAGKRTADGSEFEKRTADGSEFESPKKKAKVE

SEQ ID NO: 1413 - protein, 2096 aa, synthetic construct
MPAAKRVKLDGGDKKYSIGLDIGTNSVGWAVITDEYKVPSKKFKVLGNTDRHSIKKNLIGALLFDSGETAEATRLKRTARRRYTRRKNRICYLQEIFSNEMAKVDDSFFHRLEESFLVEEDKKHERHPIFGNIVDEVAYHEKYPTIYHLRKKLVDSTDKADLRLIYLALAHMIKFRGHFLIEGDLNPDNSDVDKLFIQLVQTYNQLFEENPINASGVDAKAILSARLSKSRRLENLIAQLPGEKKNGLFGNLIALSLGLTPNFKSNFDLAEDAKLQLSKDTYDDDLDNLLAQIGDQYADLFLAAKNLSDAILLSDILRVNTEITKAPLSASMIKRYDEHHQDLTLLKALVRQQLPEKYKEIFFDQSKNGYAGYIDGGASQEEFYKFIKPILEKMDGTEELLVKLNREDLLRKQRTFDNGSIPHQIHLGELHAILRRQEDFYPFLKDNREKIEKILTFRIPYYVGPLARGNSRFAWMTRKSEETITPWNFEEVVDKGASAQSFIERMTNFDKNLPNEKVLPKHSLLYEYFTVYNELTKVKYVTEGMRKPAFLSGEQKKAIVDLLFKTNRKVTVKQLKEDYFKKIECFDSVEISGVEDRFNASLGTYHDLLKIIKDKDFLDNEENEDILEDIVLTLTLFEDREMIEERLKTYAHLFDDKVMKQLKRRRYTGWGRLSRKLINGIRDKQSGKTILDFLKSDGFANRNFMQLIHDDSLTFKEDIQKAQVSGQGDSLHEHIANLAGSPAIKKGILQTVKVVDELVKVMGRHKPENIVIEMARENQTTQKGQKNSRERMKRIEEGIKELGSQILKEHPVENTQLQNEKLYLYYLQNGRDMYVDQELDINRLSDYDVDHIVPQSFLKDDSIDNKVLTRSDKARGKSDNVPSEEVVKKMKNYWRQLLNAKLITQRKFDNLTKAERGGLSELDKAGFIKRQLVETRQITKHVAQILDSRMNTKYDENDKLIREVKVITLKSKLVSDFRKDFQFYKVREINNYHHAHDAYLNAVVGTALIKKYPKLESEFVYGDYKVYDVRKMIAKSEQEIGKATAKYFFYSNIMNFFKTEITLANGEIRKRPLIETNGETGEIVWDKGRDFATVRKVLSMPQVNIVKKTEVQTGGFSKESILPKRNSDKLIARKKDWDPKKYGGFDSPTVAYSVLVVAKVEKGKSKKLKSVKELLGITIMERSSFEKNPIDFLEAKGYKEVKKDLIIKLPKYSLFELENGRKRMLASAGELQKGNELALPSKYVNFLYLASHYEKLKGSPEDNEQKQLFVEQHKHYLDEIIEQISEFSKRVILADANLDKVLSAYNKHRDKPIREQAENIIHLFTLTNLGAPAAFKYFDTTIDRKRYTSTKEVLDATLIHQSITGLYETRIDLSQLGGDGGGSSGGGGGSGGTAPLEEEYRLFLEAPIQNVTLLEQWKREIPKVWAEINPPGLASTQAPIHVQLLSTALPVRVRQYPITLEAKRSLRETIRKFRAAGILRPVHSPWNTPLLPVRKSGTSEYRMVQDLREVNKRVETIHPTVPNPYTLLSLLPPDRIWYSVLDLKDAFFCIPLAPESQLIFAFEWADAEEGESGQLTWTRLPQGFKNSPTLFNEALNRDLQGFRLDHPSVSLLQYVDDLLIAADTQAACLSATRDLLMTLAELGYRVSGKKAQLCQEEVTYLGFKIHKGSRSLSNSRTQAILQIPVPKTKRQVREFLGKIGYCRLFIPGFAELAQPLYAATRPGNDPLVWGEKEEEAFQSLKLALTQPPALALPSLDKPFQLFVEETSGAAKGVLTQALGPWKRPVAYLSKRLDPVAAGWPRCLRAIAAAALLTREASKLTFGQDIEITSSHNLESLLRSPPDKWLTNARITQYQVLLLDPPRVRFKQTAALNPATLLPETDDTLPIHHCLDTLDSLTSTRPDLTDQPLAQAEATLFTDGSSYIRDGKRYAGAAVVTLDSVIWAEPLPIGTSAQKAELIALTKALEWSKDKSVNIYTDSRYAFATLHVHGMIYRERGWLTAGGKAIKNAPEILALLTAVWLPKRVAVMHCKGHQKDDAPTSTGNRRADEVAREVAIRPLSTQATISAGKRTADGSEFEKRTADGSEFESPKKKAKVE

SEQ ID NO: 1414 - protein, 2090 aa, synthetic construct
MPAAKRVKLDGGDKKYSIGLDIGTNSVGWAVITDEYKVPSKKFKVLGNTDRHSIKKNLIGALLFDSGETAEATRLKRTARRRYTRRKNRICYLQEIFSNEMAKVDDSFFHRLEESFLVEEDKKHERHPIFGNIVDEVAYHEKYPTIYHLRKKLVDSTDKADLRLIYLALAHMIKFRGHFLIEGDLNPDNSDVDKLFIQLVQTYNQLFEENPINASGVDAKAILSARLSKSRRLENLIAQLPGEKKNGLFGNLIALSLGLTPNFKSNFDLAEDAKLQLSKDTYDDDLDNLLAQIGDQYADLFLAAKNLSDAILLSDILRVNTEITKAPLSASMIKRYDEHHQDLTLLKALVRQQLPEKYKEIFFDQSKNGYAGYIDGGASQEEFYKFIKPILEKMDGTEELLVKLNREDLLRKQRTFDNGSIPHQIHLGELHAILRRQEDFYPFLKDNREKIEKILTFRIPYYVGPLARGNSRFAWMTRKSEETITPWNFEEVVDKGASAQSFIERMTNFDKNLPNEKVLPKHSLLYEYFTVYNELTKVKYVTEGMRKPAFLSGEQKKAIVDLLFKTNRKVTVKQLKEDYFKKIECFDSVEISGVEDRFNASLGTYHDLLKIIKDKDFLDNEENEDILEDIVLTLTLFEDREMIEERLKTYAHLFDDKVMKQLKRRRYTGWGRLSRKLINGIRDKQSGKTILDFLKSDGFANRNFMQLIHDDSLTFKEDIQKAQVSGQGDSLHEHIANLAGSPAIKKGILQTVKVVDELVKVMGRHKPENIVIEMARENQTTQKGQKNSRERMKRIEEGIKELGSQILKEHPVENTQLQNEKLYLYYLQNGRDMYVDQELDINRLSDYDVDHIVPQSFLKDDSIDNKVLTRSDKARGKSDNVPSEEVVKKMKNYWRQLLNAKLITQRKFDNLTKAERGGLSELDKAGFIKRQLVETRQITKHVAQILDSRMNTKYDENDKLIREVKVITLKSKLVSDFRKDFQFYKVREINNYHHAHDAYLNAVVGTALIKKYPKLESEFVYGDYKVYDVRKMIAKSEQEIGKATAKYFFYSNIMNFFKTEITLANGEIRKRPLIETNGETGEIVWDKGRDFATVRKVLSMPQVNIVKKTEVQTGGFSKESILPKRNSDKLIARKKDWDPKKYGGFDSPTVAYSVLVVAKVEKGKSKKLKSVKELLGITIMERSSFEKNPIDFLEAKGYKEVKKDLIIKLPKYSLFELENGRKRMLASAGELQKGNELALPSKYVNFLYLASHYEKLKGSPEDNEQKQLFVEQHKHYLDEIIEQISEFSKRVILADANLDKVLSAYNKHRDKPIREQAENIIHLFTLTNLGAPAAFKYFDTTIDRKRYTSTKEVLDATLIHQSITGLYETRIDLSQLGGDGGPAPGGTAPLEEEYRLFLEAPIQNVTLLEQWKREIPKVWAEINPPGLASTQAPIHVQLLSTALPVRVRQYPITLEAKRSLRETIRKFRAAGILRPVHSPWNTPLLPVRKSGTSEYRMVQDLREVNKRVETIHPTVPNPYTLLSLLPPDRIWYSVLDLKDAFFCIPLAPESQLIFAFEWADAEEGESGQLTWTRLPQGFKNSPTLFNEALNRDLQGFRLDHPSVSLLQYVDDLLIAADTQAACLSATRDLLMTLAELGYRVSGKKAQLCQEEVTYLGFKIHKGSRSLSNSRTQAILQIPVPKTKRQVREFLGKIGYCRLFIPGFAELAQPLYAATRPGNDPLVWGEKEEEAFQSLKLALTQPPALALPSLDKPFQLFVEETSGAAKGVLTQALGPWKRPVAYLSKRLDPVAAGWPRCLRAIAAAALLTREASKLTFGQDIEITSSHNLESLLRSPPDKWLTNARITQYQVLLLDPPRVRFKQTAALNPATLLPETDDTLPIHHCLDTLDSLTSTRPDLTDQPLAQAEATLFTDGSSYIRDGKRYAGAAVVTLDSVIWAEPLPIGTSAQKAELIALTKALEWSKDKSVNIYTDSRYAFATLHVHGMIYRERGWLTAGGKAIKNAPEILALLTAVWLPKRVAVMHCKGHQKDDAPTSTGNRRADEVAREVAIRPLSTQATISAGKRTADGSEFEKRTADGSEFESPKKKAKVE

SEQ ID NO: 1415 - protein, 2098 aa, synthetic construct
MPAAKRVKLDGGDKKYSIGLDIGTNSVGWAVITDEYKVPSKKFKVLGNTDRHSIKKNLIGALLFDSGETAEATRLKRTARRRYTRRKNRICYLQEIFSNEMAKVDDSFFHRLEESFLVEEDKKHERHPIFGNIVDEVAYHEKYPTIYHLRKKLVDSTDKADLRLIYLALAHMIKFRGHFLIEGDLNPDNSDVDKLFIQLVQTYNQLFEENPINASGVDAKAILSARLSKSRRLENLIAQLPGEKKNGLFGNLIALSLGLTPNFKSNFDLAEDAKLQLSKDTYDDDLDNLLAQIGDQYADLFLAAKNLSDAILLSDILRVNTEITKAPLSASMIKRYDEHHQDLTLLKALVRQQLPEKYKEIFFDQSKNGYAGYIDGGASQEEFYKFIKPILEKMDGTEELLVKLNREDLLRKQRTFDNGSIPHQIHLGELHAILRRQEDFYPFLKDNREKIEKILTFRIPYYVGPLARGNSRFAWMTRKSEETITPWNFEEVVDKGASAQSFIERMTNFDKNLPNEKVLPKHSLLYEYFTVYNELTKVKYVTEGMRKPAFLSGEQKKAIVDLLFKTNRKVTVKQLKEDYFKKIECFDSVEISGVEDRFNASLGTYHDLLKIIKDKDFLDNEENEDILEDIVLTLTLFEDREMIEERLKTYAHLFDDKVMKQLKRRRYTGWGRLSRKLINGIRDKQSGKTILDFLKSDGFANRNFMQLIHDDSLTFKEDIQKAQVSGQGDSLHEHIANLAGSPAIKKGILQTVKVVDELVKVMGRHKPENIVIEMARENQTTQKGQKNSRERMKRIEEGIKELGSQILKEHPVENTQLQNEKLYLYYLQNGRDMYVDQELDINRLSDYDVDHIVPQSFLKDDSIDNKVLTRSDKARGKSDNVPSEEVVKKMKNYWRQLLNAKLITQRKFDNLTKAERGGLSELDKAGFIKRQLVETRQITKHVAQILDSRMNTKYDENDKLIREVKVITLKSKLVSDFRKDFQFYKVREINNYHHAHDAYLNAVVGTALIKKYPKLESEFVYGDYKVYDVRKMIAKSEQEIGKATAKYFFYSNIMNFFKTEITLANGEIRKRPLIETNGETGEIVWDKGRDFATVRKVLSMPQVNIVKKTEVQTGGFSKESILPKRNSDKLIARKKDWDPKKYGGFDSPTVAYSVLVVAKVEKGKSKKLKSVKELLGITIMERSSFEKNPIDFLEAKGYKEVKKDLIIKLPKYSLFELENGRKRMLASAGELQKGNELALPSKYVNFLYLASHYEKLKGSPEDNEQKQLFVEQHKHYLDEIIEQISEFSKRVILADANLDKVLSAYNKHRDKPIREQAENIIHLFTLTNLGAPAAFKYFDTTIDRKRYTSTKEVLDATLIHQSITGLYETRIDLSQLGGDGGGGGPAPEAAAKGGTAPLEEEYRLFLEAPIQNVTLLEQWKREIPKVWAEINPPGLASTQAPIHVQLLSTALPVRVRQYPITLEAKRSLRETIRKFRAAGILRPVHSPWNTPLLPVRKSGTSEYRMVQDLREVNKRVETIHPTVPNPYTLLSLLPPDRIWYSVLDLKDAFFCIPLAPESQLIFAFEWADAEEGESGQLTWTRLPQGFKNSPTLFNEALNRDLQGFRLDHPSVSLLQYVDDLLIAADTQAACLSATRDLLMTLAELGYRVSGKKAQLCQEEVTYLGFKIHKGSRSLSNSRTQAILQIPVPKTKRQVREFLGKIGYCRLFIPGFAELAQPLYAATRPGNDPLVWGEKEEEAFQSLKLALTQPPALALPSLDKPFQLFVEETSGAAKGVLTQALGPWKRPVAYLSKRLDPVAAGWPRCLRAIAAAALLTREASKLTFGQDIEITSSHNLESLLRSPPDKWLTNARITQYQVLLLDPPRVRFKQTAALNPATLLPETDDTLPIHHCLDTLDSLTSTRPDLTDQPLAQAEATLFTDGSSYIRDGKRYAGAAVVTLDSVIWAEPLPIGTSAQKAELIALTKALEWSKDKSVNIYTDSRYAFATLHVHGMIYRERGWLTAGGKAIKNAPEILALLTAVWLPKRVAVMHCKGHQKDDAPTSTGNRRADEVAREVAIRPLSTQATISAGKRTADGSEFEKRTADGSEFESPKKKAKVE

SEQ ID NO: 1416 - protein, 2098 aa, synthetic construct
MPAAKRVKLDGGDKKYSIGLDIGTNSVGWAVITDEYKVPSKKFKVLGNTDRHSIKKNLIGALLFDSGETAEATRLKRTARRRYTRRKNRICYLQEIFSNEMAKVDDSFFHRLEESFLVEEDKKHERHPIFGNIVDEVAYHEKYPTIYHLRKKLVDSTDKADLRLIYLALAHMIKFRGHFLIEGDLNPDNSDVDKLFIQLVQTYNQLFEENPINASGVDAKAILSARLSKSRRLENLIAQLPGEKKNGLFGNLIALSLGLTPNFKSNFDLAEDAKLQLSKDTYDDDLDNLLAQIGDQYADLFLAAKNLSDAILLSDILRVNTEITKAPLSASMIKRYDEHHQDLTLLKALVRQQLPEKYKEIFFDQSKNGYAGYIDGGASQEEFYKFIKPILEKMDGTEELLVKLNREDLLRKQRTFDNGSIPHQIHLGELHAILRRQEDFYPFLKDNREKIEKILTFRIPYYVGPLARGNSRFAWMTRKSEETITPWNFEEVVDKGASAQSFIERMTNFDKNLPNEKVLPKHSLLYEYFTVYNELTKVKYVTEGMRKPAFLSGEQKKAIVDLLFKTNRKVTVKQLKEDYFKKIECFDSVEISGVEDRFNASLGTYHDLLKIIKDKDFLDNEENEDILEDIVLTLTLFEDREMIEERLKTYAHLFDDKVMKQLKRRRYTGWGRLSRKLINGIRDKQSGKTILDFLKSDGFANRNFMQLIHDDSLTFKEDIQKAQVSGQGDSLHEHIANLAGSPAIKKGILQTVKVVDELVKVMGRHKPENIVIEMARENQTTQKGQKNSRERMKRIEEGIKELGSQILKEHPVENTQLQNEKLYLYYLQNGRDMYVDQELDINRLSDYDVDHIVPQSFLKDDSIDNKVLTRSDKARGKSDNVPSEEVVKKMKNYWRQLLNAKLITQRKFDNLTKAERGGLSELDKAGFIKRQLVETRQITKHVAQILDSRMNTKYDENDKLIREVKVITLKSKLVSDFRKDFQFYKVREINNYHHAHDAYLNAVVGTALIKKYPKLESEFVYGDYKVYDVRKMIAKSEQEIGKATAKYFFYSNIMNFFKTEITLANGEIRKRPLIETNGETGEIVWDKGRDFATVRKVLSMPQVNIVKKTEVQTGGFSKESILPKRNSDKLIARKKDWDPKKYGGFDSPTVAYSVLVVAKVEKGKSKKLKSVKELLGITIMERSSFEKNPIDFLEAKGYKEVKKDLIIKLPKYSLFELENGRKRMLASAGELQKGNELALPSKYVNFLYLASHYEKLKGSPEDNEQKQLFVEQHKHYLDEIIEQISEFSKRVILADANLDKVLSAYNKHRDKPIREQAENIIHLFTLTNLGAPAAFKYFDTTIDRKRYTSTKEVLDATLIHQSITGLYETRIDLSQLGGDGGEAAAKGSSPAPGGTAPLEEEYRLFLEAPIQNVTLLEQWKREIPKVWAEINPPGLASTQAPIHVQLLSTALPVRVRQYPITLEAKRSLRETIRKFRAAGILRPVHSPWNTPLLPVRKSGTSEYRMVQDLREVNKRVETIHPTVPNPYTLLSLLPPDRIWYSVLDLKDAFFCIPLAPESQLIFAFEWADAEEGESGQLTWTRLPQGFKNSPTLFNEALNRDLQGFRLDHPSVSLLQYVDDLLIAADTQAACLSATRDLLMTLAELGYRVSGKKAQLCQEEVTYLGFKIHKGSRSLSNSRTQAILQIPVPKTKRQVREFLGKIGYCRLFIPGFAELAQPLYAATRPGNDPLVWGEKEEEAFQSLKLALTQPPALALPSLDKPFQLFVEETSGAAKGVLTQALGPWKRPVAYLSKRLDPVAAGWPRCLRAIAAAALLTREASKLTFGQDIEITSSHNLESLLRSPPDKWLTNARITQYQVLLLDPPRVRFKQTAALNPATLLPETDDTLPIHHCLDTLDSLTSTRPDLTDQPLAQAEATLFTDGSSYIRDGKRYAGAAVVTLDSVIWAEPLPIGTSAQKAELIALTKALEWSKDKSVNIYTDSRYAFATLHVHGMIYRERGWLTAGGKAIKNAPEILALLTAVWLPKRVAVMHCKGHQKDDAPTSTGNRRADEVAREVAIRPLSTQATISAGKRTADGSEFEKRTADGSEFESPKKKAKVE

SEQ ID NO: 1417 - protein, 2090 aa, synthetic construct
MPAAKRVKLDGGDKKYSIGLDIGTNSVGWAVITDEYKVPSKKFKVLGNTDRHSIKKNLIGALLFDSGETAEATRLKRTARRRYTRRKNRICYLQEIFSNEMAKVDDSFFHRLEESFLVEEDKKHERHPIFGNIVDEVAYHEKYPTIYHLRKKLVDSTDKADLRLIYLALAHMIKFRGHFLIEGDLNPDNSDVDKLFIQLVQTYNQLFEENPINASGVDAKAILSARLSKSRRLENLIAQLPGEKKNGLFGNLIALSLGLTPNFKSNFDLAEDAKLQLSKDTYDDDLDNLLAQIGDQYADLFLAAKNLSDAILLSDILRVNTEITKAPLSASMIKRYDEHHQDLTLLKALVRQQLPEKYKEIFFDQSKNGYAGYIDGGASQEEFYKFIKPILEKMDGTEELLVKLNREDLLRKQRTFDNGSIPHQIHLGELHAILRRQEDFYPFLKDNREKIEKILTFRIPYYVGPLARGNSRFAWMTRKSEETITPWNFEEVVDKGASAQSFIERMTNFDKNLPNEKVLPKHSLLYEYFTVYNELTKVKYVTEGMRKPAFLSGEQKKAIVDLLFKTNRKVTVKQLKEDYFKKIECFDSVEISGVEDRFNASLGTYHDLLKIIKDKDFLDNEENEDILEDIVLTLTLFEDREMIEERLKTYAHLFDDKVMKQLKRRRYTGWGRLSRKLINGIRDKQSGKTILDFLKSDGFANRNFMQLIHDDSLTFKEDIQKAQVSGQGDSLHEHIANLAGSPAIKKGILQTVKVVDELVKVMGRHKPENIVIEMARENQTTQKGQKNSRERMKRIEEGIKELGSQILKEHPVENTQLQNEKLYLYYLQNGRDMYVDQELDINRLSDYDVDHIVPQSFLKDDSIDNKVLTRSDKARGKSDNVPSEEVVKKMKNYWRQLLNAKLITQRKFDNLTKAERGGLSELDKAGFIKRQLVETRQITKHVAQILDSRMNTKYDENDKLIREVKVITLKSKLVSDFRKDFQFYKVREINNYHHAHDAYLNAVVGTALIKKYPKLESEFVYGDYKVYDVRKMIAKSEQEIGKATAKYFFYSNIMNFFKTEITLANGEIRKRPLIETNGETGEIVWDKGRDFATVRKVLSMPQVNIVKKTEVQTGGFSKESILPKRNSDKLIARKKDWDPKKYGGFDSPTVAYSVLVVAKVEKGKSKKLKSVKELLGITIMERSSFEKNPIDFLEAKGYKEVKKDLIIKLPKYSLFELENGRKRMLASAGELQKGNELALPSKYVNFLYLASHYEKLKGSPEDNEQKQLFVEQHKHYLDEIIEQISEFSKRVILADANLDKVLSAYNKHRDKPIREQAENIIHLFTLTNLGAPAAFKYFDTTIDRKRYTSTKEVLDATLIHQSITGLYETRIDLSQLGGDGGGSSGGTAPLEEEYRLFLEAPIQNVTLLEQWKREIPKVWAEINPPGLASTQAPIHVQLLSTALPVRVRQYPITLEAKRSLRETIRKFRAAGILRPVHSPWNTPLLPVRKSGTSEYRMVQDLREVNKRVETIHPTVPNPYTLLSLLPPDRIWYSVLDLKDAFFCIPLAPESQLIFAFEWADAEEGESGQLTWTRLPQGFKNSPTLFNEALNRDLQGFRLDHPSVSLLQYVDDLLIAADTQAACLSATRDLLMTLAELGYRVSGKKAQLCQEEVTYLGFKIHKGSRSLSNSRTQAILQIPVPKTKRQVREFLGKIGYCRLFIPGFAELAQPLYAATRPGNDPLVWGEKEEEAFQSLKLALTQPPALALPSLDKPFQLFVEETSGAAKGVLTQALGPWKRPVAYLSKRLDPVAAGWPRCLRAIAAAALLTREASKLTFGQDIEITSSHNLESLLRSPPDKWLTNARITQYQVLLLDPPRVRFKQTAALNPATLLPETDDTLPIHHCLDTLDSLTSTRPDLTDQPLAQAEATLFTDGSSYIRDGKRYAGAAVVTLDSVIWAEPLPIGTSAQKAELIALTKALEWSKDKSVNIYTDSRYAFATLHVHGMIYRERGWLTAGGKAIKNAPEILALLTAVWLPKRVAVMHCKGHQKDDAPTSTGNRRADEVAREVAIRPLSTQATISAGKRTADGSEFEKRTADGSEFESPKKKAKVE

SEQ ID NO: 1418 - protein, 2096 aa, synthetic construct
MPAAKRVKLDGGDKKYSIGLDIGTNSVGWAVITDEYKVPSKKFKVLGNTDRHSIKKNLIGALLFDSGETAEATRLKRTARRRYTRRKNRICYLQEIFSNEMAKVDDSFFHRLEESFLVEEDKKHERHPIFGNIVDEVAYHEKYPTIYHLRKKLVDSTDKADLRLIYLALAHMIKFRGHFLIEGDLNPDNSDVDKLFIQLVQTYNQLFEENPINASGVDAKAILSARLSKSRRLENLIAQLPGEKKNGLFGNLIALSLGLTPNFKSNFDLAEDAKLQLSKDTYDDDLDNLLAQIGDQYADLFLAAKNLSDAILLSDILRVNTEITKAPLSASMIKRYDEHHQDLTLLKALVRQQLPEKYKEIFFDQSKNGYAGYIDGGASQEEFYKFIKPILEKMDGTEELLVKLNREDLLRKQRTFDNGSIPHQIHLGELHAILRRQEDFYPFLKDNREKIEKILTFRIPYYVGPLARGNSRFAWMTRKSEETITPWNFEEVVDKGASAQSFIERMTNFDKNLPNEKVLPKHSLLYEYFTVYNELTKVKYVTEGMRKPAFLSGEQKKAIVDLLFKTNRKVTVKQLKEDYFKKIECFDSVEISGVEDRFNASLGTYHDLLKIIKDKDFLDNEENEDILEDIVLTLTLFEDREMIEERLKTYAHLFDDKVMKQLKRRRYTGWGRLSRKLINGIRDKQSGKTILDFLKSDGFANRNFMQLIHDDSLTFKEDIQKAQVSGQGDSLHEHIANLAGSPAIKKGILQTVKVVDELVKVMGRHKPENIVIEMARENQTTQKGQKNSRERMKRIEEGIKELGSQILKEHPVENTQLQNEKLYLYYLQNGRDMYVDQELDINRLSDYDVDHIVPQSFLKDDSIDNKVLTRSDKARGKSDNVPSEEVVKKMKNYWRQLLNAKLITQRKFDNLTKAERGGLSELDKAGFIKRQLVETRQITKHVAQILDSRMNTKYDENDKLIREVKVITLKSKLVSDFRKDFQFYKVREINNYHHAHDAYLNAVVGTALIKKYPKLESEFVYGDYKVYDVRKMIAKSEQEIGKATAKYFFYSNIMNFFKTEITLANGEIRKRPLIETNGETGEIVWDKGRDFATVRKVLSMPQVNIVKKTEVQTGGFSKESILPKRNSDKLIARKKDWDPKKYGGFDSPTVAYSVLVVAKVEKGKSKKLKSVKELLGITIMERSSFEKNPIDFLEAKGYKEVKKDLIIKLPKYSLFELENGRKRMLASAGELQKGNELALPSKYVNFLYLASHYEKLKGSPEDNEQKQLFVEQHKHYLDEIIEQISEFSKRVILADANLDKVLSAYNKHRDKPIREQAENIIHLFTLTNLGAPAAFKYFDTTIDRKRYTSTKEVLDATLIHQSITGLYETRIDLSQLGGDGGGGSGSSGGGGGTAPLEEEYRLFLEAPIQNVTLLEQWKREIPKVWAEINPPGLASTQAPIHVQLLSTALPVRVRQYPITLEAKRSLRETIRKFRAAGILRPVHSPWNTPLLPVRKSGTSEYRMVQDLREVNKRVETIHPTVPNPYTLLSLLPPDRIWYSVLDLKDAFFCIPLAPESQLIFAFEWADAEEGESGQLTWTRLPQGFKNSPTLFNEALNRDLQGFRLDHPSVSLLQYVDDLLIAADTQAACLSATRDLLMTLAELGYRVSGKKAQLCQEEVTYLGFKIHKGSRSLSNSRTQAILQIPVPKTKRQVREFLGKIGYCRLFIPGFAELAQPLYAATRPGNDPLVWGEKEEEAFQSLKLALTQPPALALPSLDKPFQLFVEETSGAAKGVLTQALGPWKRPVAYLSKRLDPVAAGWPRCLRAIAAAALLTREASKLTFGQDIEITSSHNLESLLRSPPDKWLTNARITQYQVLLLDPPRVRFKQTAALNPATLLPETDDTLPIHHCLDTLDSLTSTRPDLTDQPLAQAEATLFTDGSSYIRDGKRYAGAAVVTLDSVIWAEPLPIGTSAQKAELIALTKALEWSKDKSVNIYTDSRYAFATLHVHGMIYRERGWLTAGGKAIKNAPEILALLTAVWLPKRVAVMHCKGHQKDDAPTSTGNRRADEVAREVAIRPLSTQATISAGKRTADGSEFEKRTADGSEFESPKKKAKVE

SEQ ID NO: 1419 - protein, 2098 aa, synthetic construct
MPAAKRVKLDGGDKKYSIGLDIGTNSVGWAVITDEYKVPSKKFKVLGNTDRHSIKKNLIGALLFDSGETAEATRLKRTARRRYTRRKNRICYLQEIFSNEMAKVDDSFFHRLEESFLVEEDKKHERHPIFGNIVDEVAYHEKYPTIYHLRKKLVDSTDKADLRLIYLALAHMIKFRGHFLIEGDLNPDNSDVDKLFIQLVQTYNQLFEENPINASGVDAKAILSARLSKSRRLENLIAQLPGEKKNGLFGNLIALSLGLTPNFKSNFDLAEDAKLQLSKDTYDDDLDNLLAQIGDQYADLFLAAKNLSDAILLSDILRVNTEITKAPLSASMIKRYDEHHQDLTLLKALVRQQLPEKYKEIFFDQSKNGYAGYIDGGASQEEFYKFIKPILEKMDGTEELLVKLNREDLLRKQRTFDNGSIPHQIHLGELHAILRRQEDFYPFLKDNREKIEKILTFRIPYYVGPLARGNSRFAWMTRKSEETITPWNFEEVVDKGASAQSFIERMTNFDKNLPNEKVLPKHSLLYEYFTVYNELTKVKYVTEGMRKPAFLSGEQKKAIVDLLFKTNRKVTVKQLKEDYFKKIECFDSVEISGVEDRFNASLGTYHDLLKIIKDKDFLDNEENEDILEDIVLTLTLFEDREMIEERLKTYAHLFDDKVMKQLKRRRYTGWGRLSRKLINGIRDKQSGKTILDFLKSDGFANRNFMQLIHDDSLTFKEDIQKAQVSGQGDSLHEHIANLAGSPAIKKGILQTVKVVDELVKVMGRHKPENIVIEMARENQTTQKGQKNSRERMKRIEEGIKELGSQILKEHPVENTQLQNEKLYLYYLQNGRDMYVDQELDINRLSDYDVDHIVPQSFLKDDSIDNKVLTRSDKARGKSDNVPSEEVVKKMKNYWRQLLNAKLITQRKFDNLTKAERGGLSELDKAGFIKRQLVETRQITKHVAQILDSRMNTKYDENDKLIREVKVITLKSKLVSDFRKDFQFYKVREINNYHHAHDAYLNAVVGTALIKKYPKLESEFVYGDYKVYDVRKMIAKSEQEIGKATAKYFFYSNIMNFFKTEITLANGEIRKRPLIETNGETGEIVWDKGRDFATVRKVLSMPQVNIVKKTEVQTGGFSKESILPKRNSDKLIARKKDWDPKKYGGFDSPTVAYSVLVVAKVEKGKSKKLKSVKELLGITIMERSSFEKNPIDFLEAKGYKEVKKDLIIKLPKYSLFELENGRKRMLASAGELQKGNELALPSKYVNFLYLASHYEKLKGSPEDNEQKQLFVEQHKHYLDEIIEQISEFSKRVILADANLDKVLSAYNKHRDKPIREQAENIIHLFTLTNLGAPAAFKYFDTTIDRKRYTSTKEVLDATLIHQSITGLYETRIDLSQLGGDGGEAAAKGSSGGGGGTAPLEEEYRLFLEAPIQNVTLLEQWKREIPKVWAEINPPGLASTQAPIHVQLLSTALPVRVRQYPITLEAKRSLRETIRKFRAAGILRPVHSPWNTPLLPVRKSGTSEYRMVQDLREVNKRVETIHPTVPNPYTLLSLLPPDRIWYSVLDLKDAFFCIPLAPESQLIFAFEWADAEEGESGQLTWTRLPQGFKNSPTLFNEALNRDLQGFRLDHPSVSLLQYVDDLLIAADTQAACLSATRDLLMTLAELGYRVSGKKAQLCQEEVTYLGFKIHKGSRSLSNSRTQAILQIPVPKTKRQVREFLGKIGYCRLFIPGFAELAQPLYAATRPGNDPLVWGEKEEEAFQSLKLALTQPPALALPSLDKPFQLFVEETSGAAKGVLTQALGPWKRPVAYLSKRLDPVAAGWPRCLRAIAAAALLTREASKLTFGQDIEITSSHNLESLLRSPPDKWLTNARITQYQVLLLDPPRVRFKQTAALNPATLLPETDDTLPIHHCLDTLDSLTSTRPDLTDQPLAQAEATLFTDGSSYIRDGKRYAGAAVVTLDSVIWAEPLPIGTSAQKAELIALTKALEWSKDKSVNIYTDSRYAFATLHVHGMIYRERGWLTAGGKAIKNAPEILALLTAVWLPKRVAVMHCKGHQKDDAPTSTGNRRADEVAREVAIRPLSTQATISAGKRTADGSEFEKRTADGSEFESPKKKAKVE

SEQ ID NO: 1420 - protein, 2096 aa, synthetic construct
MPAAKRVKLDGGDKKYSIGLDIGTNSVGWAVITDEYKVPSKKFKVLGNTDRHSIKKNLIGALLFDSGETAEATRLKRTARRRYTRRKNRICYLQEIFSNEMAKVDDSFFHRLEESFLVEEDKKHERHPIFGNIVDEVAYHEKYPTIYHLRKKLVDSTDKADLRLIYLALAHMIKFRGHFLIEGDLNPDNSDVDKLFIQLVQTYNQLFEENPINASGVDAKAILSARLSKSRRLENLIAQLPGEKKNGLFGNLIALSLGLTPNFKSNFDLAEDAKLQLSKDTYDDDLDNLLAQIGDQYADLFLAAKNLSDAILLSDILRVNTEITKAPLSASMIKRYDEHHQDLTLLKALVRQQLPEKYKEIFFDQSKNGYAGYIDGGASQEEFYKFIKPILEKMDGTEELLVKLNREDLLRKQRTFDNGSIPHQIHLGELHAILRRQEDFYPFLKDNREKIEKILTFRIPYYVGPLARGNSRFAWMTRKSEETITPWNFEEVVDKGASAQSFIERMTNFDKNLPNEKVLPKHSLLYEYFTVYNELTKVKYVTEGMRKPAFLSGEQKKAIVDLLFKTNRKVTVKQLKEDYFKKIECFDSVEISGVEDRFNASLGTYHDLLKIIKDKDFLDNEENEDILEDIVLTLTLFEDREMIEERLKTYAHLFDDKVMKQLKRRRYTGWGRLSRKLINGIRDKQSGKTILDFLKSDGFANRNFMQLIHDDSLTFKEDIQKAQVSGQGDSLHEHIANLAGSPAIKKGILQTVKVVDELVKVMGRHKPENIVIEMARENQTTQKGQKNSRERMKRIEEGIKELGSQILKEHPVENTQLQNEKLYLYYLQNGRDMYVDQELDINRLSDYDVDHIVPQSFLKDDSIDNKVLTRSDKARGKSDNVPSEEVVKKMKNYWRQLLNAKLITQRKFDNLTKAERGGLSELDKAGFIKRQLVETRQITKHVAQILDSRMNTKYDENDKLIREVKVITLKSKLVSDFRKDFQFYKVREINNYHHAHDAYLNAVVGTALIKKYPKLESEFVYGDYKVYDVRKMIAKSEQEIGKATAKYFFYSNIMNFFKTEITLANGEIRKRPLIETNGETGEIVWDKGRDFATVRKVLSMPQVNIVKKTEVQTGGFSKESILPKRNSDKLIARKKDWDPKKYGGFDSPTVAYSVLVVAKVEKGKSKKLKSVKELLGITIMERSSFEKNPIDFLEAKGYKEVKKDLIIKLPKYSLFELENGRKRMLASAGELQKGNELALPSKYVNFLYLASHYEKLKGSPEDNEQKQLFVEQHKHYLDEIIEQISEFSKRVILADANLDKVLSAYNKHRDKPIREQAENIIHLFTLTNLGAPAAFKYFDTTIDRKRYTSTKEVLDATLIHQSITGLYETRIDLSQLGGDGGGGGGSSGGSGGTAPLEEEYRLFLEAPIQNVTLLEQWKREIPKVWAEINPPGLASTQAPIHVQLLSTALPVRVRQYPITLEAKRSLRETIRKFRAAGILRPVHSPWNTPLLPVRKSGTSEYRMVQDLREVNKRVETIHPTVPNPYTLLSLLPPDRIWYSVLDLKDAFFCIPLAPESQLIFAFEWADAEEGESGQLTWTRLPQGFKNSPTLFNEALNRDLQGFRLDHPSVSLLQYVDDLLIAADTQAACLSATRDLLMTLAELGYRVSGKKAQLCQEEVTYLGFKIHKGSRSLSNSRTQAILQIPVPKTKRQVREFLGKIGYCRLFIPGFAELAQPLYAATRPGNDPLVWGEKEEEAFQSLKLALTQPPALALPSLDKPFQLFVEETSGAAKGVLTQALGPWKRPVAYLSKRLDPVAAGWPRCLRAIAAAALLTREASKLTFGQDIEITSSHNLESLLRSPPDKWLTNARITQYQVLLLDPPRVRFKQTAALNPATLLPETDDTLPIHHCLDTLDSLTSTRPDLTDQPLAQAEATLFTDGSSYIRDGKRYAGAAVVTLDSVIWAEPLPIGTSAQKAELIALTKALEWSKDKSVNIYTDSRYAFATLHVHGMIYRERGWLTAGGKAIKNAPEILALLTAVWLPKRVAVMHCKGHQKDDAPTSTGNRRADEVAREVAIRPLSTQATISAGKRTADGSEFEKRTADGSEFESPKKKAKVE

SEQ ID NO: 1421 - protein, 2100 aa, synthetic construct
MPAAKRVKLDGGDKKYSIGLDIGTNSVGWAVITDEYKVPSKKFKVLGNTDRHSIKKNLIGALLFDSGETAEATRLKRTARRRYTRRKNRICYLQEIFSNEMAKVDDSFFHRLEESFLVEEDKKHERHPIFGNIVDEVAYHEKYPTIYHLRKKLVDSTDKADLRLIYLALAHMIKFRGHFLIEGDLNPDNSDVDKLFIQLVQTYNQLFEENPINASGVDAKAILSARLSKSRRLENLIAQLPGEKKNGLFGNLIALSLGLTPNFKSNFDLAEDAKLQLSKDTYDDDLDNLLAQIGDQYADLFLAAKNLSDAILLSDILRVNTEITKAPLSASMIKRYDEHHQDLTLLKALVRQQLPEKYKEIFFDQSKNGYAGYIDGGASQEEFYKFIKPILEKMDGTEELLVKLNREDLLRKQRTFDNGSIPHQIHLGELHAILRRQEDFYPFLKDNREKIEKILTFRIPYYVGPLARGNSRFAWMTRKSEETITPWNFEEVVDKGASAQSFIERMTNFDKNLPNEKVLPKHSLLYEYFTVYNELTKVKYVTEGMRKPAFLSGEQKKAIVDLLFKTNRKVTVKQLKEDYFKKIECFDSVEISGVEDRFNASLGTYHDLLKIIKDKDFLDNEENEDILEDIVLTLTLFEDREMIEERLKTYAHLFDDKVMKQLKRRRYTGWGRLSRKLINGIRDKQSGKTILDFLKSDGFANRNFMQLIHDDSLTFKEDIQKAQVSGQGDSLHEHIANLAGSPAIKKGILQTVKVVDELVKVMGRHKPENIVIEMARENQTTQKGQKNSRERMKRIEEGIKELGSQILKEHPVENTQLQNEKLYLYYLQNGRDMYVDQELDINRLSDYDVDHIVPQSFLKDDSIDNKVLTRSDKARGKSDNVPSEEVVKKMKNYWRQLLNAKLITQRKFDNLTKAERGGLSELDKAGFIKRQLVETRQITKHVAQILDSRMNTKYDENDKLIREVKVITLKSKLVSDFRKDFQFYKVREINNYHHAHDAYLNAVVGTALIKKYPKLESEFVYGDYKVYDVRKMIAKSEQEIGKATAKYFFYSNIMNFFKTEITLANGEIRKRPLIETNGETGEIVWDKGRDFATVRKVLSMPQVNIVKKTEVQTGGFSKESILPKRNSDKLIARKKDWDPKKYGGFDSPTVAYSVLVVAKVEKGKSKKLKSVKELLGITIMERSSFEKNPIDFLEAKGYKEVKKDLIIKLPKYSLFELENGRKRMLASAGELQKGNELALPSKYVNFLYLASHYEKLKGSPEDNEQKQLFVEQHKHYLDEIIEQISEFSKRVILADANLDKVLSAYNKHRDKPIREQAENIIHLFTLTNLGAPAAFKYFDTTIDRKRYTSTKEVLDATLIHQSITGLYETRIDLSQLGGDGGPAPAPAPAPAPAPGGTAPLEEEYRLFLEAPIQNVTLLEQWKREIPKVWAEINPPGLASTQAPIHVQLLSTALPVRVRQYPITLEAKRSLRETIRKFRAAGILRPVHSPWNTPLLPVRKSGTSEYRMVQDLREVNKRVETIHPTVPNPYTLLSLLPPDRIWYSVLDLKDAFFCIPLAPESQLIFAFEWADAEEGESGQLTWTRLPQGFKNSPTLFNEALNRDLQGFRLDHPSVSLLQYVDDLLIAADTQAACLSATRDLLMTLAELGYRVSGKKAQLCQEEVTYLGFKIHKGSRSLSNSRTQAILQIPVPKTKRQVREFLGKIGYCRLFIPGFAELAQPLYAATRPGNDPLVWGEKEEEAFQSLKLALTQPPALALPSLDKPFQLFVEETSGAAKGVLTQALGPWKRPVAYLSKRLDPVAAGWPRCLRAIAAAALLTREASKLTFGQDIEITSSHNLESLLRSPPDKWLTNARITQYQVLLLDPPRVRFKQTAALNPATLLPETDDTLPIHHCLDTLDSLTSTRPDLTDQPLAQAEATLFTDGSSYIRDGKRYAGAAVVTLDSVIWAEPLPIGTSAQKAELIALTKALEWSKDKSVNIYTDSRYAFATLHVHGMIYRERGWLTAGGKAIKNAPEILALLTAVWLPKRVAVMHCKGHQKDDAPTSTGNRRADEVAREVAIRPLSTQATISAGKRTADGSEFEKRTADGSEFESPKKKAKVE

SEQ ID NO: 1422 - protein, 2095 aa, synthetic construct
MPAAKRVKLDGGDKKYSIGLDIGTNSVGWAVITDEYKVPSKKFKVLGNTDRHSIKKNLIGALLFDSGETAEATRLKRTARRRYTRRKNRICYLQEIFSNEMAKVDDSFFHRLEESFLVEEDKKHERHPIFGNIVDEVAYHEKYPTIYHLRKKLVDSTDKADLRLIYLALAHMIKFRGHFLIEGDLNPDNSDVDKLFIQLVQTYNQLFEENPINASGVDAKAILSARLSKSRRLENLIAQLPGEKKNGLFGNLIALSLGLTPNFKSNFDLAEDAKLQLSKDTYDDDLDNLLAQIGDQYADLFLAAKNLSDAILLSDILRVNTEITKAPLSASMIKRYDEHHQDLTLLKALVRQQLPEKYKEIFFDQSKNGYAGYIDGGASQEEFYKFIKPILEKMDGTEELLVKLNREDLLRKQRTFDNGSIPHQIHLGELHAILRRQEDFYPFLKDNREKIEKILTFRIPYYVGPLARGNSRFAWMTRKSEETITPWNFEEVVDKGASAQSFIERMTNFDKNLPNEKVLPKHSLLYEYFTVYNELTKVKYVTEGMRKPAFLSGEQKKAIVDLLFKTNRKVTVKQLKEDYFKKIECFDSVEISGVEDRFNASLGTYHDLLKIIKDKDFLDNEENEDILEDIVLTLTLFEDREMIEERLKTYAHLFDDKVMKQLKRRRYTGWGRLSRKLINGIRDKQSGKTILDFLKSDGFANRNFMQLIHDDSLTFKEDIQKAQVSGQGDSLHEHIANLAGSPAIKKGILQTVKVVDELVKVMGRHKPENIVIEMARENQTTQKGQKNSRERMKRIEEGIKELGSQILKEHPVENTQLQNEKLYLYYLQNGRDMYVDQELDINRLSDYDVDHIVPQSFLKDDSIDNKVLTRSDKARGKSDNVPSEEVVKKMKNYWRQLLNAKLITQRKFDNLTKAERGGLSELDKAGFIKRQLVETRQITKHVAQILDSRMNTKYDENDKLIREVKVITLKSKLVSDFRKDFQFYKVREINNYHHAHDAYLNAVVGTALIKKYPKLESEFVYGDYKVYDVRKMIAKSEQEIGKATAKYFFYSNIMNFFKTEITLANGEIRKRPLIETNGETGEIVWDKGRDFATVRKVLSMPQVNIVKKTEVQTGGFSKESILPKRNSDKLIARKKDWDPKKYGGFDSPTVAYSVLVVAKVEKGKSKKLKSVKELLGITIMERSSFEKNPIDFLEAKGYKEVKKDLIIKLPKYSLFELENGRKRMLASAGELQKGNELALPSKYVNFLYLASHYEKLKGSPEDNEQKQLFVEQHKHYLDEIIEQISEFSKRVILADANLDKVLSAYNKHRDKPIREQAENIIHLFTLTNLGAPAAFKYFDTTIDRKRYTSTKEVLDATLIHQSITGLYETRIDLSQLGGDGGEAAAKGGGGGTAPLEEEYRLFLEAPIQNVTLLEQWKREIPKVWAEINPPGLASTQAPIHVQLLSTALPVRVRQYPITLEAKRSLRETIRKFRAAGILRPVHSPWNTPLLPVRKSGTSEYRMVQDLREVNKRVETIHPTVPNPYTLLSLLPPDRIWYSVLDLKDAFFCIPLAPESQLIFAFEWADAEEGESGQLTWTRLPQGFKNSPTLFNEALNRDLQGFRLDHPSVSLLQYVDDLLIAADTQAACLSATRDLLMTLAELGYRVSGKKAQLCQEEVTYLGFKIHKGSRSLSNSRTQAILQIPVPKTKRQVREFLGKIGYCRLFIPGFAELAQPLYAATRPGNDPLVWGEKEEEAFQSLKLALTQPPALALPSLDKPFQLFVEETSGAAKGVLTQALGPWKRPVAYLSKRLDPVAAGWPRCLRAIAAAALLTREASKLTFGQDIEITSSHNLESLLRSPPDKWLTNARITQYQVLLLDPPRVRFKQTAALNPATLLPETDDTLPIHHCLDTLDSLTSTRPDLTDQPLAQAEATLFTDGSSYIRDGKRYAGAAVVTLDSVIWAEPLPIGTSAQKAELIALTKALEWSKDKSVNIYTDSRYAFATLHVHGMIYRERGWLTAGGKAIKNAPEILALLTAVWLPKRVAVMHCKGHQKDDAPTSTGNRRADEVAREVAIRPLSTQATISAGKRTADGSEFEKRTADGSEFESPKKKAKVE

SEQ ID NO: 1423 - protein, 2097 aa, synthetic construct
MPAAKRVKLDGGDKKYSIGLDIGTNSVGWAVITDEYKVPSKKFKVLGNTDRHSIKKNLIGALLFDSGETAEATRLKRTARRRYTRRKNRICYLQEIFSNEMAKVDDSFFHRLEESFLVEEDKKHERHPIFGNIVDEVAYHEKYPTIYHLRKKLVDSTDKADLRLIYLALAHMIKFRGHFLIEGDLNPDNSDVDKLFIQLVQTYNQLFEENPINASGVDAKAILSARLSKSRRLENLIAQLPGEKKNGLFGNLIALSLGLTPNFKSNFDLAEDAKLQLSKDTYDDDLDNLLAQIGDQYADLFLAAKNLSDAILLSDILRVNTEITKAPLSASMIKRYDEHHQDLTLLKALVRQQLPEKYKEIFFDQSKNGYAGYIDGGASQEEFYKFIKPILEKMDGTEELLVKLNREDLLRKQRTFDNGSIPHQIHLGELHAILRRQEDFYPFLKDNREKIEKILTFRIPYYVGPLARGNSRFAWMTRKSEETITPWNFEEVVDKGASAQSFIERMTNFDKNLPNEKVLPKHSLLYEYFTVYNELTKVKYVTEGMRKPAFLSGEQKKAIVDLLFKTNRKVTVKQLKEDYFKKIECFDSVEISGVEDRFNASLGTYHDLLKIIKDKDFLDNEENEDILEDIVLTLTLFEDREMIEERLKTYAHLFDDKVMKQLKRRRYTGWGRLSRKLINGIRDKQSGKTILDFLKSDGFANRNFMQLIHDDSLTFKEDIQKAQVSGQGDSLHEHIANLAGSPAIKKGILQTVKVVDELVKVMGRHKPENIVIEMARENQTTQKGQKNSRERMKRIEEGIKELGSQILKEHPVENTQLQNEKLYLYYLQNGRDMYVDQELDINRLSDYDVDHIVPQSFLKDDSIDNKVLTRSDKARGKSDNVPSEEVVKKMKNYWRQLLNAKLITQRKFDNLTKAERGGLSELDKAGFIKRQLVETRQITKHVAQILDSRMNTKYDENDKLIREVKVITLKSKLVSDFRKDFQFYKVREINNYHHAHDAYLNAVVGTALIKKYPKLESEFVYGDYKVYDVRKMIAKSEQEIGKATAKYFFYSNIMNFFKTEITLANGEIRKRPLIETNGETGEIVWDKGRDFATVRKVLSMPQVNIVKKTEVQTGGFSKESILPKRNSDKLIARKKDWDPKKYGGFDSPTVAYSVLVVAKVEKGKSKKLKSVKELLGITIMERSSFEKNPIDFLEAKGYKEVKKDLIIKLPKYSLFELENGRKRMLASAGELQKGNELALPSKYVNFLYLASHYEKLKGSPEDNEQKQLFVEQHKHYLDEIIEQISEFSKRVILADANLDKVLSAYNKHRDKPIREQAENIIHLFTLTNLGAPAAFKYFDTTIDRKRYTSTKEVLDATLIHQSITGLYETRIDLSQLGGDGGGGGGSGGGGSGGTAPLEEEYRLFLEAPIQNVTLLEQWKREIPKVWAEINPPGLASTQAPIHVQLLSTALPVRVRQYPITLEAKRSLRETIRKFRAAGILRPVHSPWNTPLLPVRKSGTSEYRMVQDLREVNKRVETIHPTVPNPYTLLSLLPPDRIWYSVLDLKDAFFCIPLAPESQLIFAFEWADAEEGESGQLTWTRLPQGFKNSPTLFNEALNRDLQGFRLDHPSVSLLQYVDDLLIAADTQAACLSATRDLLMTLAELGYRVSGKKAQLCQEEVTYLGFKIHKGSRSLSNSRTQAILQIPVPKTKRQVREFLGKIGYCRLFIPGFAELAQPLYAATRPGNDPLVWGEKEEEAFQSLKLALTQPPALALPSLDKPFQLFVEETSGAAKGVLTQALGPWKRPVAYLSKRLDPVAAGWPRCLRAIAAAALLTREASKLTFGQDIEITSSHNLESLLRSPPDKWLTNARITQYQVLLLDPPRVRFKQTAALNPATLLPETDDTLPIHHCLDTLDSLTSTRPDLTDQPLAQAEATLFTDGSSYIRDGKRYAGAAVVTLDSVIWAEPLPIGTSAQKAELIALTKALEWSKDKSVNIYTDSRYAFATLHVHGMIYRERGWLTAGGKAIKNAPEILALLTAVWLPKRVAVMHCKGHQKDDAPTSTGNRRADEVAREVAIRPLSTQATISAGKRTADGSEFEKRTADGSEFESPKKKAKVE

SEQ ID NO: 1424 - protein, 2098 aa, synthetic construct
MPAAKRVKLDGGDKKYSIGLDIGTNSVGWAVITDEYKVPSKKFKVLGNTDRHSIKKNLIGALLFDSGETAEATRLKRTARRRYTRRKNRICYLQEIFSNEMAKVDDSFFHRLEESFLVEEDKKHERHPIFGNIVDEVAYHEKYPTIYHLRKKLVDSTDKADLRLIYLALAHMIKFRGHFLIEGDLNPDNSDVDKLFIQLVQTYNQLFEENPINASGVDAKAILSARLSKSRRLENLIAQLPGEKKNGLFGNLIALSLGLTPNFKSNFDLAEDAKLQLSKDTYDDDLDNLLAQIGDQYADLFLAAKNLSDAILLSDILRVNTEITKAPLSASMIKRYDEHHQDLTLLKALVRQQLPEKYKEIFFDQSKNGYAGYIDGGASQEEFYKFIKPILEKMDGTEELLVKLNREDLLRKQRTFDNGSIPHQIHLGELHAILRRQEDFYPFLKDNREKIEKILTFRIPYYVGPLARGNSRFAWMTRKSEETITPWNFEEVVDKGASAQSFIERMTNFDKNLPNEKVLPKHSLLYEYFTVYNELTKVKYVTEGMRKPAFLSGEQKKAIVDLLFKTNRKVTVKQLKEDYFKKIECFDSVEISGVEDRFNASLGTYHDLLKIIKDKDFLDNEENEDILEDIVLTLTLFEDREMIEERLKTYAHLFDDKVMKQLKRRRYTGWGRLSRKLINGIRDKQSGKTILDFLKSDGFANRNFMQLIHDDSLTFKEDIQKAQVSGQGDSLHEHIANLAGSPAIKKGILQTVKVVDELVKVMGRHKPENIVIEMARENQTTQKGQKNSRERMKRIEEGIKELGSQILKEHPVENTQLQNEKLYLYYLQNGRDMYVDQELDINRLSDYDVDHIVPQSFLKDDSIDNKVLTRSDKARGKSDNVPSEEVVKKMKNYWRQLLNAKLITQRKFDNLTKAERGGLSELDKAGFIKRQLVETRQITKHVAQILDSRMNTKYDENDKLIREVKVITLKSKLVSDFRKDFQFYKVREINNYHHAHDAYLNAVVGTALIKKYPKLESEFVYGDYKVYDVRKMIAKSEQEIGKATAKYFFYSNIMNFFKTEITLANGEIRKRPLIETNGETGEIVWDKGRDFATVRKVLSMPQVNIVKKTEVQTGGFSKESILPKRNSDKLIARKKDWDPKKYGGFDSPTVAYSVLVVAKVEKGKSKKLKSVKELLGITIMERSSFEKNPIDFLEAKGYKEVKKDLIIKLPKYSLFELENGRKRMLASAGELQKGNELALPSKYVNFLYLASHYEKLKGSPEDNEQKQLFVEQHKHYLDEIIEQISEFSKRVILADANLDKVLSAYNKHRDKPIREQAENIIHLFTLTNLGAPAAFKYFDTTIDRKRYTSTKEVLDATLIHQSITGLYETRIDLSQLGGDGGGSSGGGEAAAKGGTAPLEEEYRLFLEAPIQNVTLLEQWKREIPKVWAEINPPGLASTQAPIHVQLLSTALPVRVRQYPITLEAKRSLRETIRKFRAAGILRPVHSPWNTPLLPVRKSGTSEYRMVQDLREVNKRVETIHPTVPNPYTLLSLLPPDRIWYSVLDLKDAFFCIPLAPESQLIFAFEWADAEEGESGQLTWTRLPQGFKNSPTLFNEALNRDLQGFRLDHPSVSLLQYVDDLLIAADTQAACLSATRDLLMTLAELGYRVSGKKAQLCQEEVTYLGFKIHKGSRSLSNSRTQAILQIPVPKTKRQVREFLGKIGYCRLFIPGFAELAQPLYAATRPGNDPLVWGEKEEEAFQSLKLALTQPPALALPSLDKPFQLFVEETSGAAKGVLTQALGPWKRPVAYLSKRLDPVAAGWPRCLRAIAAAALLTREASKLTFGQDIEITSSHNLESLLRSPPDKWLTNARITQYQVLLLDPPRVRFKQTAALNPATLLPETDDTLPIHHCLDTLDSLTSTRPDLTDQPLAQAEATLFTDGSSYIRDGKRYAGAAVVTLDSVIWAEPLPIGTSAQKAELIALTKALEWSKDKSVNIYTDSRYAFATLHVHGMIYRERGWLTAGGKAIKNAPEILALLTAVWLPKRVAVMHCKGHQKDDAPTSTGNRRADEVAREVAIRPLSTQATISAGKRTADGSEFEKRTADGSEFESPKKKAKVE

SEQ ID NO: 1425 - protein, 2098 aa, synthetic construct
MPAAKRVKLDGGDKKYSIGLDIGTNSVGWAVITDEYKVPSKKFKVLGNTDRHSIKKNLIGALLFDSGETAEATRLKRTARRRYTRRKNRICYLQEIFSNEMAKVDDSFFHRLEESFLVEEDKKHERHPIFGNIVDEVAYHEKYPTIYHLRKKLVDSTDKADLRLIYLALAHMIKFRGHFLIEGDLNPDNSDVDKLFIQLVQTYNQLFEENPINASGVDAKAILSARLSKSRRLENLIAQLPGEKKNGLFGNLIALSLGLTPNFKSNFDLAEDAKLQLSKDTYDDDLDNLLAQIGDQYADLFLAAKNLSDAILLSDILRVNTEITKAPLSASMIKRYDEHHQDLTLLKALVRQQLPEKYKEIFFDQSKNGYAGYIDGGASQEEFYKFIKPILEKMDGTEELLVKLNREDLLRKQRTFDNGSIPHQIHLGELHAILRRQEDFYPFLKDNREKIEKILTFRIPYYVGPLARGNSRFAWMTRKSEETITPWNFEEVVDKGASAQSFIERMTNFDKNLPNEKVLPKHSLLYEYFTVYNELTKVKYVTEGMRKPAFLSGEQKKAIVDLLFKTNRKVTVKQLKEDYFKKIECFDSVEISGVEDRFNASLGTYHDLLKIIKDKDFLDNEENEDILEDIVLTLTLFEDREMIEERLKTYAHLFDDKVMKQLKRRRYTGWGRLSRKLINGIRDKQSGKTILDFLKSDGFANRNFMQLIHDDSLTFKEDIQKAQVSGQGDSLHEHIANLAGSPAIKKGILQTVKVVDELVKVMGRHKPENIVIEMARENQTTQKGQKNSRERMKRIEEGIKELGSQILKEHPVENTQLQNEKLYLYYLQNGRDMYVDQELDINRLSDYDVDHIVPQSFLKDDSIDNKVLTRSDKARGKSDNVPSEEVVKKMKNYWRQLLNAKLITQRKFDNLTKAERGGLSELDKAGFIKRQLVETRQITKHVAQILDSRMNTKYDENDKLIREVKVITLKSKLVSDFRKDFQFYKVREINNYHHAHDAYLNAVVGTALIKKYPKLESEFVYGDYKVYDVRKMIAKSEQEIGKATAKYFFYSNIMNFFKTEITLANGEIRKRPLIETNGETGEIVWDKGRDFATVRKVLSMPQVNIVKKTEVQTGGFSKESILPKRNSDKLIARKKDWDPKKYGGFDSPTVAYSVLVVAKVEKGKSKKLKSVKELLGITIMERSSFEKNPIDFLEAKGYKEVKKDLIIKLPKYSLFELENGRKRMLASAGELQKGNELALPSKYVNFLYLASHYEKLKGSPEDNEQKQLFVEQHKHYLDEIIEQISEFSKRVILADANLDKVLSAYNKHRDKPIREQAENIIHLFTLTNLGAPAAFKYFDTTIDRKRYTSTKEVLDATLIHQSITGLYETRIDLSQLGGDGGGGSEAAAKGGGGGTAPLEEEYRLFLEAPIQNVTLLEQWKREIPKVWAEINPPGLASTQAPIHVQLLSTALPVRVRQYPITLEAKRSLRETIRKFRAAGILRPVHSPWNTPLLPVRKSGTSEYRMVQDLREVNKRVETIHPTVPNPYTLLSLLPPDRIWYSVLDLKDAFFCIPLAPESQLIFAFEWADAEEGESGQLTWTRLPQGFKNSPTLFNEALNRDLQGFRLDHPSVSLLQYVDDLLIAADTQAACLSATRDLLMTLAELGYRVSGKKAQLCQEEVTYLGFKIHKGSRSLSNSRTQAILQIPVPKTKRQVREFLGKIGYCRLFIPGFAELAQPLYAATRPGNDPLVWGEKEEEAFQSLKLALTQPPALALPSLDKPFQLFVEETSGAAKGVLTQALGPWKRPVAYLSKRLDPVAAGWPRCLRAIAAAALLTREASKLTFGQDIEITSSHNLESLLRSPPDKWLTNARITQYQVLLLDPPRVRFKQTAALNPATLLPETDDTLPIHHCLDTLDSLTSTRPDLTDQPLAQAEATLFTDGSSYIRDGKRYAGAAVVTLDSVIWAEPLPIGTSAQKAELIALTKALEWSKDKSVNIYTDSRYAFATLHVHGMIYRERGWLTAGGKAIKNAPEILALLTAVWLPKRVAVMHCKGHQKDDAPTSTGNRRADEVAREVAIRPLSTQATISAGKRTADGSEFEKRTADGSEFESPKKKAKVE

SEQ ID NO: 1426 - protein, 2117 aa, synthetic construct
MPAAKRVKLDGGDKKYSIGLDIGTNSVGWAVITDEYKVPSKKFKVLGNTDRHSIKKNLIGALLFDSGETAEATRLKRTARRRYTRRKNRICYLQEIFSNEMAKVDDSFFHRLEESFLVEEDKKHERHPIFGNIVDEVAYHEKYPTIYHLRKKLVDSTDKADLRLIYLALAHMIKFRGHFLIEGDLNPDNSDVDKLFIQLVQTYNQLFEENPINASGVDAKAILSARLSKSRRLENLIAQLPGEKKNGLFGNLIALSLGLTPNFKSNFDLAEDAKLQLSKDTYDDDLDNLLAQIGDQYADLFLAAKNLSDAILLSDILRVNTEITKAPLSASMIKRYDEHHQDLTLLKALVRQQLPEKYKEIFFDQSKNGYAGYIDGGASQEEFYKFIKPILEKMDGTEELLVKLNREDLLRKQRTFDNGSIPHQIHLGELHAILRRQEDFYPFLKDNREKIEKILTFRIPYYVGPLARGNSRFAWMTRKSEETITPWNFEEVVDKGASAQSFIERMTNFDKNLPNEKVLPKHSLLYEYFTVYNELTKVKYVTEGMRKPAFLSGEQKKAIVDLLFKTNRKVTVKQLKEDYFKKIECFDSVEISGVEDRFNASLGTYHDLLKIIKDKDFLDNEENEDILEDIVLTLTLFEDREMIEERLKTYAHLFDDKVMKQLKRRRYTGWGRLSRKLINGIRDKQSGKTILDFLKSDGFANRNFMQLIHDDSLTFKEDIQKAQVSGQGDSLHEHIANLAGSPAIKKGILQTVKVVDELVKVMGRHKPENIVIEMARENQTTQKGQKNSRERMKRIEEGIKELGSQILKEHPVENTQLQNEKLYLYYLQNGRDMYVDQELDINRLSDYDVDHIVPQSFLKDDSIDNKVLTRSDKARGKSDNVPSEEVVKKMKNYWRQLLNAKLITQRKFDNLTKAERGGLSELDKAGFIKRQLVETRQITKHVAQILDSRMNTKYDENDKLIREVKVITLKSKLVSDFRKDFQFYKVREINNYHHAHDAYLNAVVGTALIKKYPKLESEFVYGDYKVYDVRKMIAKSEQEIGKATAKYFFYSNIMNFFKTEITLANGEIRKRPLIETNGETGEIVWDKGRDFATVRKVLSMPQVNIVKKTEVQTGGFSKESILPKRNSDKLIARKKDWDPKKYGGFDSPTVAYSVLVVAKVEKGKSKKLKSVKELLGITIMERSSFEKNPIDFLEAKGYKEVKKDLIIKLPKYSLFELENGRKRMLASAGELQKGNELALPSKYVNFLYLASHYEKLKGSPEDNEQKQLFVEQHKHYLDEIIEQISEFSKRVILADANLDKVLSAYNKHRDKPIREQAENIIHLFTLTNLGAPAAFKYFDTTIDRKRYTSTKEVLDATLIHQSITGLYETRIDLSQLGGDGGEAAAKEAAAKEAAAKEAAAKEAAAKEAAAKGGTAPLEEEYRLFLEAPIQNVTLLEQWKREIPKVWAEINPPGLASTQAPIHVQLLSTALPVRVRQYPITLEAKRSLRETIRKFRAAGILRPVHSPWNTPLLPVRKSGTSEYRMVQDLREVNKRVETIHPTVPNPYTLLSLLPPDRIWYSVLDLKDAFFCIPLAPESQLIFAFEWADAEEGESGQLTWTRLPQGFKNSPTLFNEALNRDLQGFRLDHPSVSLLQYVDDLLIAADTQAACLSATRDLLMTLAELGYRVSGKKAQLCQEEVTYLGFKIHKGSRSLSNSRTQAILQIPVPKTKRQVREFLGKIGYCRLFIPGFAELAQPLYAATRPGNDPLVWGEKEEEAFQSLKLALTQPPALALPSLDKPFQLFVEETSGAAKGVLTQALGPWKRPVAYLSKRLDPVAAGWPRCLRAIAAAALLTREASKLTFGQDIEITSSHNLESLLRSPPDKWLTNARITQYQVLLLDPPRVRFKQTAALNPATLLPETDDTLPIHHCLDTLDSLTSTRPDLTDQPLAQAEATLFTDGSSYIRDGKRYAGAAVVTLDSVIWAEPLPIGTSAQKAELIALTKALEWSKDKSVNIYTDSRYAFATLHVHGMIYRERGWLTAGGKAIKNAPEILALLTAVWLPKRVAVMHCKGHQKDDAPTSTGNRRADEVAREVAIRPLSTQATISAGKRTADGSEFEKRTADGSEFESPKKKAKVE

SEQ ID NO: 1427 - protein, 2098 aa, synthetic construct
MPAAKRVKLDGGDKKYSIGLDIGTNSVGWAVITDEYKVPSKKFKVLGNTDRHSIKKNLIGALLFDSGETAEATRLKRTARRRYTRRKNRICYLQEIFSNEMAKVDDSFFHRLEESFLVEEDKKHERHPIFGNIVDEVAYHEKYPTIYHLRKKLVDSTDKADLRLIYLALAHMIKFRGHFLIEGDLNPDNSDVDKLFIQLVQTYNQLFEENPINASGVDAKAILSARLSKSRRLENLIAQLPGEKKNGLFGNLIALSLGLTPNFKSNFDLAEDAKLQLSKDTYDDDLDNLLAQIGDQYADLFLAAKNLSDAILLSDILRVNTEITKAPLSASMIKRYDEHHQDLTLLKALVRQQLPEKYKEIFFDQSKNGYAGYIDGGASQEEFYKFIKPILEKMDGTEELLVKLNREDLLRKQRTFDNGSIPHQIHLGELHAILRRQEDFYPFLKDNREKIEKILTFRIPYYVGPLARGNSRFAWMTRKSEETITPWNFEEVVDKGASAQSFIERMTNFDKNLPNEKVLPKHSLLYEYFTVYNELTKVKYVTEGMRKPAFLSGEQKKAIVDLLFKTNRKVTVKQLKEDYFKKIECFDSVEISGVEDRFNASLGTYHDLLKIIKDKDFLDNEENEDILEDIVLTLTLFEDREMIEERLKTYAHLFDDKVMKQLKRRRYTGWGRLSRKLINGIRDKQSGKTILDFLKSDGFANRNFMQLIHDDSLTFKEDIQKAQVSGQGDSLHEHIANLAGSPAIKKGILQTVKVVDELVKVMGRHKPENIVIEMARENQTTQKGQKNSRERMKRIEEGIKELGSQILKEHPVENTQLQNEKLYLYYLQNGRDMYVDQELDINRLSDYDVDHIVPQSFLKDDSIDNKVLTRSDKARGKSDNVPSEEVVKKMKNYWRQLLNAKLITQRKFDNLTKAERGGLSELDKAGFIKRQLVETRQITKHVAQILDSRMNTKYDENDKLIREVKVITLKSKLVSDFRKDFQFYKVREINNYHHAHDAYLNAVVGTALIKKYPKLESEFVYGDYKVYDVRKMIAKSEQEIGKATAKYFFYSNIMNFFKTEITLANGEIRKRPLIETNGETGEIVWDKGRDFATVRKVLSMPQVNIVKKTEVQTGGFSKESILPKRNSDKLIARKKDWDPKKYGGFDSPTVAYSVLVVAKVEKGKSKKLKSVKELLGITIMERSSFEKNPIDFLEAKGYKEVKKDLIIKLPKYSLFELENGRKRMLASAGELQKGNELALPSKYVNFLYLASHYEKLKGSPEDNEQKQLFVEQHKHYLDEIIEQISEFSKRVILADANLDKVLSAYNKHRDKPIREQAENIIHLFTLTNLGAPAAFKYFDTTIDRKRYTSTKEVLDATLIHQSITGLYETRIDLSQLGGDGGGGGGGSEAAAKGGTAPLEEEYRLFLEAPIQNVTLLEQWKREIPKVWAEINPPGLASTQAPIHVQLLSTALPVRVRQYPITLEAKRSLRETIRKFRAAGILRPVHSPWNTPLLPVRKSGTSEYRMVQDLREVNKRVETIHPTVPNPYTLLSLLPPDRIWYSVLDLKDAFFCIPLAPESQLIFAFEWADAEEGESGQLTWTRLPQGFKNSPTLFNEALNRDLQGFRLDHPSVSLLQYVDDLLIAADTQAACLSATRDLLMTLAELGYRVSGKKAQLCQEEVTYLGFKIHKGSRSLSNSRTQAILQIPVPKTKRQVREFLGKIGYCRLFIPGFAELAQPLYAATRPGNDPLVWGEKEEEAFQSLKLALTQPPALALPSLDKPFQLFVEETSGAAKGVLTQALGPWKRPVAYLSKRLDPVAAGWPRCLRAIAAAALLTREASKLTFGQDIEITSSHNLESLLRSPPDKWLTNARITQYQVLLLDPPRVRFKQTAALNPATLLPETDDTLPIHHCLDTLDSLTSTRPDLTDQPLAQAEATLFTDGSSYIRDGKRYAGAAVVTLDSVIWAEPLPIGTSAQKAELIALTKALEWSKDKSVNIYTDSRYAFATLHVHGMIYRERGWLTAGGKAIKNAPEILALLTAVWLPKRVAVMHCKGHQKDDAPTSTGNRRADEVAREVAIRPLSTQATISAGKRTADGSEFEKRTADGSEFESPKKKAKVE

SEQ ID NO: 1428 - protein, 2095 aa, synthetic construct
MPAAKRVKLDGGDKKYSIGLDIGTNSVGWAVITDEYKVPSKKFKVLGNTDRHSIKKNLIGALLFDSGETAEATRLKRTARRRYTRRKNRICYLQEIFSNEMAKVDDSFFHRLEESFLVEEDKKHERHPIFGNIVDEVAYHEKYPTIYHLRKKLVDSTDKADLRLIYLALAHMIKFRGHFLIEGDLNPDNSDVDKLFIQLVQTYNQLFEENPINASGVDAKAILSARLSKSRRLENLIAQLPGEKKNGLFGNLIALSLGLTPNFKSNFDLAEDAKLQLSKDTYDDDLDNLLAQIGDQYADLFLAAKNLSDAILLSDILRVNTEITKAPLSASMIKRYDEHHQDLTLLKALVRQQLPEKYKEIFFDQSKNGYAGYIDGGASQEEFYKFIKPILEKMDGTEELLVKLNREDLLRKQRTFDNGSIPHQIHLGELHAILRRQEDFYPFLKDNREKIEKILTFRIPYYVGPLARGNSRFAWMTRKSEETITPWNFEEVVDKGASAQSFIERMTNFDKNLPNEKVLPKHSLLYEYFTVYNELTKVKYVTEGMRKPAFLSGEQKKAIVDLLFKTNRKVTVKQLKEDYFKKIECFDSVEISGVEDRFNASLGTYHDLLKIIKDKDFLDNEENEDILEDIVLTLTLFEDREMIEERLKTYAHLFDDKVMKQLKRRRYTGWGRLSRKLINGIRDKQSGKTILDFLKSDGFANRNFMQLIHDDSLTFKEDIQKAQVSGQGDSLHEHIANLAGSPAIKKGILQTVKVVDELVKVMGRHKPENIVIEMARENQTTQKGQKNSRERMKRIEEGIKELGSQILKEHPVENTQLQNEKLYLYYLQNGRDMYVDQELDINRLSDYDVDHIVPQSFLKDDSIDNKVLTRSDKARGKSDNVPSEEVVKKMKNYWRQLLNAKLITQRKFDNLTKAERGGLSELDKAGFIKRQLVETRQITKHVAQILDSRMNTKYDENDKLIREVKVITLKSKLVSDFRKDFQFYKVREINNYHHAHDAYLNAVVGTALIKKYPKLESEFVYGDYKVYDVRKMIAKSEQEIGKATAKYFFYSNIMNFFKTEITLANGEIRKRPLIETNGETGEIVWDKGRDFATVRKVLSMPQVNIVKKTEVQTGGFSKESILPKRNSDKLIARKKDWDPKKYGGFDSPTVAYSVLVVAKVEKGKSKKLKSVKELLGITIMERSSFEKNPIDFLEAKGYKEVKKDLIIKLPKYSLFELENGRKRMLASAGELQKGNELALPSKYVNFLYLASHYEKLKGSPEDNEQKQLFVEQHKHYLDEIIEQISEFSKRVILADANLDKVLSAYNKHRDKPIREQAENIIHLFTLTNLGAPAAFKYFDTTIDRKRYTSTKEVLDATLIHQSITGLYETRIDLSQLGGDGGEAAAKGGSGGTAPLEEEYRLFLEAPIQNVTLLEQWKREIPKVWAEINPPGLASTQAPIHVQLLSTALPVRVRQYPITLEAKRSLRETIRKFRAAGILRPVHSPWNTPLLPVRKSGTSEYRMVQDLREVNKRVETIHPTVPNPYTLLSLLPPDRIWYSVLDLKDAFFCIPLAPESQLIFAFEWADAEEGESGQLTWTRLPQGFKNSPTLFNEALNRDLQGFRLDHPSVSLLQYVDDLLIAADTQAACLSATRDLLMTLAELGYRVSGKKAQLCQEEVTYLGFKIHKGSRSLSNSRTQAILQIPVPKTKRQVREFLGKIGYCRLFIPGFAELAQPLYAATRPGNDPLVWGEKEEEAFQSLKLALTQPPALALPSLDKPFQLFVEETSGAAKGVLTQALGPWKRPVAYLSKRLDPVAAGWPRCLRAIAAAALLTREASKLTFGQDIEITSSHNLESLLRSPPDKWLTNARITQYQVLLLDPPRVRFKQTAALNPATLLPETDDTLPIHHCLDTLDSLTSTRPDLTDQPLAQAEATLFTDGSSYIRDGKRYAGAAVVTLDSVIWAEPLPIGTSAQKAELIALTKALEWSKDKSVNIYTDSRYAFATLHVHGMIYRERGWLTAGGKAIKNAPEILALLTAVWLPKRVAVMHCKGHQKDDAPTSTGNRRADEVAREVAIRPLSTQATISAGKRTADGSEFEKRTADGSEFESPKKKAKVE

SEQ ID NO: 1429 - protein, 2096 aa, synthetic construct
MPAAKRVKLDGGDKKYSIGLDIGTNSVGWAVITDEYKVPSKKFKVLGNTDRHSIKKNLIGALLFDSGETAEATRLKRTARRRYTRRKNRICYLQEIFSNEMAKVDDSFFHRLEESFLVEEDKKHERHPIFGNIVDEVAYHEKYPTIYHLRKKLVDSTDKADLRLIYLALAHMIKFRGHFLIEGDLNPDNSDVDKLFIQLVQTYNQLFEENPINASGVDAKAILSARLSKSRRLENLIAQLPGEKKNGLFGNLIALSLGLTPNFKSNFDLAEDAKLQLSKDTYDDDLDNLLAQIGDQYADLFLAAKNLSDAILLSDILRVNTEITKAPLSASMIKRYDEHHQDLTLLKALVRQQLPEKYKEIFFDQSKNGYAGYIDGGASQEEFYKFIKPILEKMDGTEELLVKLNREDLLRKQRTFDNGSIPHQIHLGELHAILRRQEDFYPFLKDNREKIEKILTFRIPYYVGPLARGNSRFAWMTRKSEETITPWNFEEVVDKGASAQSFIERMTNFDKNLPNEKVLPKHSLLYEYFTVYNELTKVKYVTEGMRKPAFLSGEQKKAIVDLLFKTNRKVTVKQLKEDYFKKIECFDSVEISGVEDRFNASLGTYHDLLKIIKDKDFLDNEENEDILEDIVLTLTLFEDREMIEERLKTYAHLFDDKVMKQLKRRRYTGWGRLSRKLINGIRDKQSGKTILDFLKSDGFANRNFMQLIHDDSLTFKEDIQKAQVSGQGDSLHEHIANLAGSPAIKKGILQTVKVVDELVKVMGRHKPENIVIEMARENQTTQKGQKNSRERMKRIEEGIKELGSQILKEHPVENTQLQNEKLYLYYLQNGRDMYVDQELDINRLSDYDVDHIVPQSFLKDDSIDNKVLTRSDKARGKSDNVPSEEVVKKMKNYWRQLLNAKLITQRKFDNLTKAERGGLSELDKAGFIKRQLVETRQITKHVAQILDSRMNTKYDENDKLIREVKVITLKSKLVSDFRKDFQFYKVREINNYHHAHDAYLNAVVGTALIKKYPKLESEFVYGDYKVYDVRKMIAKSEQEIGKATAKYFFYSNIMNFFKTEITLANGEIRKRPLIETNGETGEIVWDKGRDFATVRKVLSMPQVNIVKKTEVQTGGFSKESILPKRNSDKLIARKKDWDPKKYGGFDSPTVAYSVLVVAKVEKGKSKKLKSVKELLGITIMERSSFEKNPIDFLEAKGYKEVKKDLIIKLPKYSLFELENGRKRMLASAGELQKGNELALPSKYVNFLYLASHYEKLKGSPEDNEQKQLFVEQHKHYLDEIIEQISEFSKRVILADANLDKVLSAYNKHRDKPIREQAENIIHLFTLTNLGAPAAFKYFDTTIDRKRYTSTKEVLDATLIHQSITGLYETRIDLSQLGGDGGPAPAPAPAPGGTAPLEEEYRLFLEAPIQNVTLLEQWKREIPKVWAEINPPGLASTQAPIHVQLLSTALPVRVRQYPITLEAKRSLRETIRKFRAAGILRPVHSPWNTPLLPVRKSGTSEYRMVQDLREVNKRVETIHPTVPNPYTLLSLLPPDRIWYSVLDLKDAFFCIPLAPESQLIFAFEWADAEEGESGQLTWTRLPQGFKNSPTLFNEALNRDLQGFRLDHPSVSLLQYVDDLLIAADTQAACLSATRDLLMTLAELGYRVSGKKAQLCQEEVTYLGFKIHKGSRSLSNSRTQAILQIPVPKTKRQVREFLGKIGYCRLFIPGFAELAQPLYAATRPGNDPLVWGEKEEEAFQSLKLALTQPPALALPSLDKPFQLFVEETSGAAKGVLTQALGPWKRPVAYLSKRLDPVAAGWPRCLRAIAAAALLTREASKLTFGQDIEITSSHNLESLLRSPPDKWLTNARITQYQVLLLDPPRVRFKQTAALNPATLLPETDDTLPIHHCLDTLDSLTSTRPDLTDQPLAQAEATLFTDGSSYIRDGKRYAGAAVVTLDSVIWAEPLPIGTSAQKAELIALTKALEWSKDKSVNIYTDSRYAFATLHVHGMIYRERGWLTAGGKAIKNAPEILALLTAVWLPKRVAVMHCKGHQKDDAPTSTGNRRADEVAREVAIRPLSTQATISAGKRTADGSEFEKRTADGSEFESPKKKAKVE

SEQ ID NO: 1430 - protein, 2093 aa, synthetic construct
MPAAKRVKLDGGDKKYSIGLDIGTNSVGWAVITDEYKVPSKKFKVLGNTDRHSIKKNLIGALLFDSGETAEATRLKRTARRRYTRRKNRICYLQEIFSNEMAKVDDSFFHRLEESFLVEEDKKHERHPIFGNIVDEVAYHEKYPTIYHLRKKLVDSTDKADLRLIYLALAHMIKFRGHFLIEGDLNPDNSDVDKLFIQLVQTYNQLFEENPINASGVDAKAILSARLSKSRRLENLIAQLPGEKKNGLFGNLIALSLGLTPNFKSNFDLAEDAKLQLSKDTYDDDLDNLLAQIGDQYADLFLAAKNLSDAILLSDILRVNTEITKAPLSASMIKRYDEHHQDLTLLKALVRQQLPEKYKEIFFDQSKNGYAGYIDGGASQEEFYKFIKPILEKMDGTEELLVKLNREDLLRKQRTFDNGSIPHQIHLGELHAILRRQEDFYPFLKDNREKIEKILTFRIPYYVGPLARGNSRFAWMTRKSEETITPWNFEEVVDKGASAQSFIERMTNFDKNLPNEKVLPKHSLLYEYFTVYNELTKVKYVTEGMRKPAFLSGEQKKAIVDLLFKTNRKVTVKQLKEDYFKKIECFDSVEISGVEDRFNASLGTYHDLLKIIKDKDFLDNEENEDILEDIVLTLTLFEDREMIEERLKTYAHLFDDKVMKQLKRRRYTGWGRLSRKLINGIRDKQSGKTILDFLKSDGFANRNFMQLIHDDSLTFKEDIQKAQVSGQGDSLHEHIANLAGSPAIKKGILQTVKVVDELVKVMGRHKPENIVIEMARENQTTQKGQKNSRERMKRIEEGIKELGSQILKEHPVENTQLQNEKLYLYYLQNGRDMYVDQELDINRLSDYDVDHIVPQSFLKDDSIDNKVLTRSDKARGKSDNVPSEEVVKKMKNYWRQLLNAKLITQRKFDNLTKAERGGLSELDKAGFIKRQLVETRQITKHVAQILDSRMNTKYDENDKLIREVKVITLKSKLVSDFRKDFQFYKVREINNYHHAHDAYLNAVVGTALIKKYPKLESEFVYGDYKVYDVRKMIAKSEQEIGKATAKYFFYSNIMNFFKTEITLANGEIRKRPLIETNGETGEIVWDKGRDFATVRKVLSMPQVNIVKKTEVQTGGFSKESILPKRNSDKLIARKKDWDPKKYGGFDSPTVAYSVLVVAKVEKGKSKKLKSVKELLGITIMERSSFEKNPIDFLEAKGYKEVKKDLIIKLPKYSLFELENGRKRMLASAGELQKGNELALPSKYVNFLYLASHYEKLKGSPEDNEQKQLFVEQHKHYLDEIIEQISEFSKRVILADANLDKVLSAYNKHRDKPIREQAENIIHLFTLTNLGAPAAFKYFDTTIDRKRYTSTKEVLDATLIHQSITGLYETRIDLSQLGGDGGGSSGGGGGTAPLEEEYRLFLEAPIQNVTLLEQWKREIPKVWAEINPPGLASTQAPIHVQLLSTALPVRVRQYPITLEAKRSLRETIRKFRAAGILRPVHSPWNTPLLPVRKSGTSEYRMVQDLREVNKRVETIHPTVPNPYTLLSLLPPDRIWYSVLDLKDAFFCIPLAPESQLIFAFEWADAEEGESGQLTWTRLPQGFKNSPTLFNEALNRDLQGFRLDHPSVSLLQYVDDLLIAADTQAACLSATRDLLMTLAELGYRVSGKKAQLCQEEVTYLGFKIHKGSRSLSNSRTQAILQIPVPKTKRQVREFLGKIGYCRLFIPGFAELAQPLYAATRPGNDPLVWGEKEEEAFQSLKLALTQPPALALPSLDKPFQLFVEETSGAAKGVLTQALGPWKRPVAYLSKRLDPVAAGWPRCLRAIAAAALLTREASKLTFGQDIEITSSHNLESLLRSPPDKWLTNARITQYQVLLLDPPRVRFKQTAALNPATLLPETDDTLPIHHCLDTLDSLTSTRPDLTDQPLAQAEATLFTDGSSYIRDGKRYAGAAVVTLDSVIWAEPLPIGTSAQKAELIALTKALEWSKDKSVNIYTDSRYAFATLHVHGMIYRERGWLTAGGKAIKNAPEILALLTAVWLPKRVAVMHCKGHQKDDAPTSTGNRRADEVAREVAIRPLSTQATISAGKRTADGSEFEKRTADGSEFESPKKKAKVE

SEQ ID NO: 1431 - protein, 2098 aa, synthetic construct
MPAAKRVKLDGGDKKYSIGLDIGTNSVGWAVITDEYKVPSKKFKVLGNTDRHSIKKNLIGALLFDSGETAEATRLKRTARRRYTRRKNRICYLQEIFSNEMAKVDDSFFHRLEESFLVEEDKKHERHPIFGNIVDEVAYHEKYPTIYHLRKKLVDSTDKADLRLIYLALAHMIKFRGHFLIEGDLNPDNSDVDKLFIQLVQTYNQLFEENPINASGVDAKAILSARLSKSRRLENLIAQLPGEKKNGLFGNLIALSLGLTPNFKSNFDLAEDAKLQLSKDTYDDDLDNLLAQIGDQYADLFLAAKNLSDAILLSDILRVNTEITKAPLSASMIKRYDEHHQDLTLLKALVRQQLPEKYKEIFFDQSKNGYAGYIDGGASQEEFYKFIKPILEKMDGTEELLVKLNREDLLRKQRTFDNGSIPHQIHLGELHAILRRQEDFYPFLKDNREKIEKILTFRIPYYVGPLARGNSRFAWMTRKSEETITPWNFEEVVDKGASAQSFIERMTNFDKNLPNEKVLPKHSLLYEYFTVYNELTKVKYVTEGMRKPAFLSGEQKKAIVDLLFKTNRKVTVKQLKEDYFKKIECFDSVEISGVEDRFNASLGTYHDLLKIIKDKDFLDNEENEDILEDIVLTLTLFEDREMIEERLKTYAHLFDDKVMKQLKRRRYTGWGRLSRKLINGIRDKQSGKTILDFLKSDGFANRNFMQLIHDDSLTFKEDIQKAQVSGQGDSLHEHIANLAGSPAIKKGILQTVKVVDELVKVMGRHKPENIVIEMARENQTTQKGQKNSRERMKRIEEGIKELGSQILKEHPVENTQLQNEKLYLYYLQNGRDMYVDQELDINRLSDYDVDHIVPQSFLKDDSIDNKVLTRSDKARGKSDNVPSEEVVKKMKNYWRQLLNAKLITQRKFDNLTKAERGGLSELDKAGFIKRQLVETRQITKHVAQILDSRMNTKYDENDKLIREVKVITLKSKLVSDFRKDFQFYKVREINNYHHAHDAYLNAVVGTALIKKYPKLESEFVYGDYKVYDVRKMIAKSEQEIGKATAKYFFYSNIMNFFKTEITLANGEIRKRPLIETNGETGEIVWDKGRDFATVRKVLSMPQVNIVKKTEVQTGGFSKESILPKRNSDKLIARKKDWDPKKYGGFDSPTVAYSVLVVAKVEKGKSKKLKSVKELLGITIMERSSFEKNPIDFLEAKGYKEVKKDLIIKLPKYSLFELENGRKRMLASAGELQKGNELALPSKYVNFLYLASHYEKLKGSPEDNEQKQLFVEQHKHYLDEIIEQISEFSKRVILADANLDKVLSAYNKHRDKPIREQAENIIHLFTLTNLGAPAAFKYFDTTIDRKRYTSTKEVLDATLIHQSITGLYETRIDLSQLGGDGGEAAAKGGSPAPGGTAPLEEEYRLFLEAPIQNVTLLEQWKREIPKVWAEINPPGLASTQAPIHVQLLSTALPVRVRQYPITLEAKRSLRETIRKFRAAGILRPVHSPWNTPLLPVRKSGTSEYRMVQDLREVNKRVETIHPTVPNPYTLLSLLPPDRIWYSVLDLKDAFFCIPLAPESQLIFAFEWADAEEGESGQLTWTRLPQGFKNSPTLFNEALNRDLQGFRLDHPSVSLLQYVDDLLIAADTQAACLSATRDLLMTLAELGYRVSGKKAQLCQEEVTYLGFKIHKGSRSLSNSRTQAILQIPVPKTKRQVREFLGKIGYCRLFIPGFAELAQPLYAATRPGNDPLVWGEKEEEAFQSLKLALTQPPALALPSLDKPFQLFVEETSGAAKGVLTQALGPWKRPVAYLSKRLDPVAAGWPRCLRAIAAAALLTREASKLTFGQDIEITSSHNLESLLRSPPDKWLTNARITQYQVLLLDPPRVRFKQTAALNPATLLPETDDTLPIHHCLDTLDSLTSTRPDLTDQPLAQAEATLFTDGSSYIRDGKRYAGAAVVTLDSVIWAEPLPIGTSAQKAELIALTKALEWSKDKSVNIYTDSRYAFATLHVHGMIYRERGWLTAGGKAIKNAPEILALLTAVWLPKRVAVMHCKGHQKDDAPTSTGNRRADEVAREVAIRPLSTQATISAGKRTADGSEFEKRTADGSEFESPKKKAKVE

SEQ ID NO: 1432 - protein, 2096 aa, synthetic construct
MPAAKRVKLDGGDKKYSIGLDIGTNSVGWAVITDEYKVPSKKFKVLGNTDRHSIKKNLIGALLFDSGETAEATRLKRTARRRYTRRKNRICYLQEIFSNEMAKVDDSFFHRLEESFLVEEDKKHERHPIFGNIVDEVAYHEKYPTIYHLRKKLVDSTDKADLRLIYLALAHMIKFRGHFLIEGDLNPDNSDVDKLFIQLVQTYNQLFEENPINASGVDAKAILSARLSKSRRLENLIAQLPGEKKNGLFGNLIALSLGLTPNFKSNFDLAEDAKLQLSKDTYDDDLDNLLAQIGDQYADLFLAAKNLSDAILLSDILRVNTEITKAPLSASMIKRYDEHHQDLTLLKALVRQQLPEKYKEIFFDQSKNGYAGYIDGGASQEEFYKFIKPILEKMDGTEELLVKLNREDLLRKQRTFDNGSIPHQIHLGELHAILRRQEDFYPFLKDNREKIEKILTFRIPYYVGPLARGNSRFAWMTRKSEETITPWNFEEVVDKGASAQSFIERMTNFDKNLPNEKVLPKHSLLYEYFTVYNELTKVKYVTEGMRKPAFLSGEQKKAIVDLLFKTNRKVTVKQLKEDYFKKIECFDSVEISGVEDRFNASLGTYHDLLKIIKDKDFLDNEENEDILEDIVLTLTLFEDREMIEERLKTYAHLFDDKVMKQLKRRRYTGWGRLSRKLINGIRDKQSGKTILDFLKSDGFANRNFMQLIHDDSLTFKEDIQKAQVSGQGDSLHEHIANLAGSPAIKKGILQTVKVVDELVKVMGRHKPENIVIEMARENQTTQKGQKNSRERMKRIEEGIKELGSQILKEHPVENTQLQNEKLYLYYLQNGRDMYVDQELDINRLSDYDVDHIVPQSFLKDDSIDNKVLTRSDKARGKSDNVPSEEVVKKMKNYWRQLLNAKLITQRKFDNLTKAERGGLSELDKAGFIKRQLVETRQITKHVAQILDSRMNTKYDENDKLIREVKVITLKSKLVSDFRKDFQFYKVREINNYHHAHDAYLNAVVGTALIKKYPKLESEFVYGDYKVYDVRKMIAKSEQEIGKATAKYFFYSNIMNFFKTEITLANGEIRKRPLIETNGETGEIVWDKGRDFATVRKVLSMPQVNIVKKTEVQTGGFSKESILPKRNSDKLIARKKDWDPKKYGGFDSPTVAYSVLVVAKVEKGKSKKLKSVKELLGITIMERSSFEKNPIDFLEAKGYKEVKKDLIIKLPKYSLFELENGRKRMLASAGELQKGNELALPSKYVNFLYLASHYEKLKGSPEDNEQKQLFVEQHKHYLDEIIEQISEFSKRVILADANLDKVLSAYNKHRDKPIREQAENIIHLFTLTNLGAPAAFKYFDTTIDRKRYTSTKEVLDATLIHQSITGLYETRIDLSQLGGDGGGGGGGSPAPGGTAPLEEEYRLFLEAPIQNVTLLEQWKREIPKVWAEINPPGLASTQAPIHVQLLSTALPVRVRQYPITLEAKRSLRETIRKFRAAGILRPVHSPWNTPLLPVRKSGTSEYRMVQDLREVNKRVETIHPTVPNPYTLLSLLPPDRIWYSVLDLKDAFFCIPLAPESQLIFAFEWADAEEGESGQLTWTRLPQGFKNSPTLFNEALNRDLQGFRLDHPSVSLLQYVDDLLIAADTQAACLSATRDLLMTLAELGYRVSGKKAQLCQEEVTYLGFKIHKGSRSLSNSRTQAILQIPVPKTKRQVREFLGKIGYCRLFIPGFAELAQPLYAATRPGNDPLVWGEKEEEAFQSLKLALTQPPALALPSLDKPFQLFVEETSGAAKGVLTQALGPWKRPVAYLSKRLDPVAAGWPRCLRAIAAAALLTREASKLTFGQDIEITSSHNLESLLRSPPDKWLTNARITQYQVLLLDPPRVRFKQTAALNPATLLPETDDTLPIHHCLDTLDSLTSTRPDLTDQPLAQAEATLFTDGSSYIRDGKRYAGAAVVTLDSVIWAEPLPIGTSAQKAELIALTKALEWSKDKSVNIYTDSRYAFATLHVHGMIYRERGWLTAGGKAIKNAPEILALLTAVWLPKRVAVMHCKGHQKDDAPTSTGNRRADEVAREVAIRPLSTQATISAGKRTADGSEFEKRTADGSEFESPKKKAKVE

SEQ ID NO: 1433 - protein, 2098 aa, synthetic construct
MPAAKRVKLDGGDKKYSIGLDIGTNSVGWAVITDEYKVPSKKFKVLGNTDRHSIKKNLIGALLFDSGETAEATRLKRTARRRYTRRKNRICYLQEIFSNEMAKVDDSFFHRLEESFLVEEDKKHERHPIFGNIVDEVAYHEKYPTIYHLRKKLVDSTDKADLRLIYLALAHMIKFRGHFLIEGDLNPDNSDVDKLFIQLVQTYNQLFEENPINASGVDAKAILSARLSKSRRLENLIAQLPGEKKNGLFGNLIALSLGLTPNFKSNFDLAEDAKLQLSKDTYDDDLDNLLAQIGDQYADLFLAAKNLSDAILLSDILRVNTEITKAPLSASMIKRYDEHHQDLTLLKALVRQQLPEKYKEIFFDQSKNGYAGYIDGGASQEEFYKFIKPILEKMDGTEELLVKLNREDLLRKQRTFDNGSIPHQIHLGELHAILRRQEDFYPFLKDNREKIEKILTFRIPYYVGPLARGNSRFAWMTRKSEETITPWNFEEVVDKGASAQSFIERMTNFDKNLPNEKVLPKHSLLYEYFTVYNELTKVKYVTEGMRKPAFLSGEQKKAIVDLLFKTNRKVTVKQLKEDYFKKIECFDSVEISGVEDRFNASLGTYHDLLKIIKDKDFLDNEENEDILEDIVLTLTLFEDREMIEERLKTYAHLFDDKVMKQLKRRRYTGWGRLSRKLINGIRDKQSGKTILDFLKSDGFANRNFMQLIHDDSLTFKEDIQKAQVSGQGDSLHEHIANLAGSPAIKKGILQTVKVVDELVKVMGRHKPENIVIEMARENQTTQKGQKNSRERMKRIEEGIKELGSQILKEHPVENTQLQNEKLYLYYLQNGRDMYVDQELDINRLSDYDVDHIVPQSFLKDDSIDNKVLTRSDKARGKSDNVPSEEVVKKMKNYWRQLLNAKLITQRKFDNLTKAERGGLSELDKAGFIKRQLVETRQITKHVAQILDSRMNTKYDENDKLIREVKVITLKSKLVSDFRKDFQFYKVREINNYHHAHDAYLNAVVGTALIKKYPKLESEFVYGDYKVYDVRKMIAKSEQEIGKATAKYFFYSNIMNFFKTEITLANGEIRKRPLIETNGETGEIVWDKGRDFATVRKVLSMPQVNIVKKTEVQTGGFSKESILPKRNSDKLIARKKDWDPKKYGGFDSPTVAYSVLVVAKVEKGKSKKLKSVKELLGITIMERSSFEKNPIDFLEAKGYKEVKKDLIIKLPKYSLFELENGRKRMLASAGELQKGNELALPSKYVNFLYLASHYEKLKGSPEDNEQKQLFVEQHKHYLDEIIEQISEFSKRVILADANLDKVLSAYNKHRDKPIREQAENIIHLFTLTNLGAPAAFKYFDTTIDRKRYTSTKEVLDATLIHQSITGLYETRIDLSQLGGDGGGGSEAAAKPAPGGTAPLEEEYRLFLEAPIQNVTLLEQWKREIPKVWAEINPPGLASTQAPIHVQLLSTALPVRVRQYPITLEAKRSLRETIRKFRAAGILRPVHSPWNTPLLPVRKSGTSEYRMVQDLREVNKRVETIHPTVPNPYTLLSLLPPDRIWYSVLDLKDAFFCIPLAPESQLIFAFEWADAEEGESGQLTWTRLPQGFKNSPTLFNEALNRDLQGFRLDHPSVSLLQYVDDLLIAADTQAACLSATRDLLMTLAELGYRVSGKKAQLCQEEVTYLGFKIHKGSRSLSNSRTQAILQIPVPKTKRQVREFLGKIGYCRLFIPGFAELAQPLYAATRPGNDPLVWGEKEEEAFQSLKLALTQPPALALPSLDKPFQLFVEETSGAAKGVLTQALGPWKRPVAYLSKRLDPVAAGWPRCLRAIAAAALLTREASKLTFGQDIEITSSHNLESLLRSPPDKWLTNARITQYQVLLLDPPRVRFKQTAALNPATLLPETDDTLPIHHCLDTLDSLTSTRPDLTDQPLAQAEATLFTDGSSYIRDGKRYAGAAVVTLDSVIWAEPLPIGTSAQKAELIALTKALEWSKDKSVNIYTDSRYAFATLHVHGMIYRERGWLTAGGKAIKNAPEILALLTAVWLPKRVAVMHCKGHQKDDAPTSTGNRRADEVAREVAIRPLSTQATISAGKRTADGSEFEKRTADGSEFESPKKKAKVE

SEQ ID NO: 1434 - protein, 2093 aa, synthetic construct
MPAAKRVKLDGGDKKYSIGLDIGTNSVGWAVITDEYKVPSKKFKVLGNTDRHSIKKNLIGALLFDSGETAEATRLKRTARRRYTRRKNRICYLQEIFSNEMAKVDDSFFHRLEESFLVEEDKKHERHPIFGNIVDEVAYHEKYPTIYHLRKKLVDSTDKADLRLIYLALAHMIKFRGHFLIEGDLNPDNSDVDKLFIQLVQTYNQLFEENPINASGVDAKAILSARLSKSRRLENLIAQLPGEKKNGLFGNLIALSLGLTPNFKSNFDLAEDAKLQLSKDTYDDDLDNLLAQIGDQYADLFLAAKNLSDAILLSDILRVNTEITKAPLSASMIKRYDEHHQDLTLLKALVRQQLPEKYKEIFFDQSKNGYAGYIDGGASQEEFYKFIKPILEKMDGTEELLVKLNREDLLRKQRTFDNGSIPHQIHLGELHAILRRQEDFYPFLKDNREKIEKILTFRIPYYVGPLARGNSRFAWMTRKSEETITPWNFEEVVDKGASAQSFIERMTNFDKNLPNEKVLPKHSLLYEYFTVYNELTKVKYVTEGMRKPAFLSGEQKKAIVDLLFKTNRKVTVKQLKEDYFKKIECFDSVEISGVEDRFNASLGTYHDLLKIIKDKDFLDNEENEDILEDIVLTLTLFEDREMIEERLKTYAHLFDDKVMKQLKRRRYTGWGRLSRKLINGIRDKQSGKTILDFLKSDGFANRNFMQLIHDDSLTFKEDIQKAQVSGQGDSLHEHIANLAGSPAIKKGILQTVKVVDELVKVMGRHKPENIVIEMARENQTTQKGQKNSRERMKRIEEGIKELGSQILKEHPVENTQLQNEKLYLYYLQNGRDMYVDQELDINRLSDYDVDHIVPQSFLKDDSIDNKVLTRSDKARGKSDNVPSEEVVKKMKNYWRQLLNAKLITQRKFDNLTKAERGGLSELDKAGFIKRQLVETRQITKHVAQILDSRMNTKYDENDKLIREVKVITLKSKLVSDFRKDFQFYKVREINNYHHAHDAYLNAVVGTALIKKYPKLESEFVYGDYKVYDVRKMIAKSEQEIGKATAKYFFYSNIMNFFKTEITLANGEIRKRPLIETNGETGEIVWDKGRDFATVRKVLSMPQVNIVKKTEVQTGGFSKESILPKRNSDKLIARKKDWDPKKYGGFDSPTVAYSVLVVAKVEKGKSKKLKSVKELLGITIMERSSFEKNPIDFLEAKGYKEVKKDLIIKLPKYSLFELENGRKRMLASAGELQKGNELALPSKYVNFLYLASHYEKLKGSPEDNEQKQLFVEQHKHYLDEIIEQISEFSKRVILADANLDKVLSAYNKHRDKPIREQAENIIHLFTLTNLGAPAAFKYFDTTIDRKRYTSTKEVLDATLIHQSITGLYETRIDLSQLGGDGGGGSGGSGGTAPLEEEYRLFLEAPIQNVTLLEQWKREIPKVWAEINPPGLASTQAPIHVQLLSTALPVRVRQYPITLEAKRSLRETIRKFRAAGILRPVHSPWNTPLLPVRKSGTSEYRMVQDLREVNKRVETIHPTVPNPYTLLSLLPPDRIWYSVLDLKDAFFCIPLAPESQLIFAFEWADAEEGESGQLTWTRLPQGFKNSPTLFNEALNRDLQGFRLDHPSVSLLQYVDDLLIAADTQAACLSATRDLLMTLAELGYRVSGKKAQLCQEEVTYLGFKIHKGSRSLSNSRTQAILQIPVPKTKRQVREFLGKIGYCRLFIPGFAELAQPLYAATRPGNDPLVWGEKEEEAFQSLKLALTQPPALALPSLDKPFQLFVEETSGAAKGVLTQALGPWKRPVAYLSKRLDPVAAGWPRCLRAIAAAALLTREASKLTFGQDIEITSSHNLESLLRSPPDKWLTNARITQYQVLLLDPPRVRFKQTAALNPATLLPETDDTLPIHHCLDTLDSLTSTRPDLTDQPLAQAEATLFTDGSSYIRDGKRYAGAAVVTLDSVIWAEPLPIGTSAQKAELIALTKALEWSKDKSVNIYTDSRYAFATLHVHGMIYRERGWLTAGGKAIKNAPEILALLTAVWLPKRVAVMHCKGHQKDDAPTSTGNRRADEVAREVAIRPLSTQATISAGKRTADGSEFEKRTADGSEFESPKKKAKVE

SEQ ID NO: 1435 - protein, 2091 aa, synthetic construct
MPAAKRVKLDGGDKKYSIGLDIGTNSVGWAVITDEYKVPSKKFKVLGNTDRHSIKKNLIGALLFDSGETAEATRLKRTARRRYTRRKNRICYLQEIFSNEMAKVDDSFFHRLEESFLVEEDKKHERHPIFGNIVDEVAYHEKYPTIYHLRKKLVDSTDKADLRLIYLALAHMIKFRGHFLIEGDLNPDNSDVDKLFIQLVQTYNQLFEENPINASGVDAKAILSARLSKSRRLENLIAQLPGEKKNGLFGNLIALSLGLTPNFKSNFDLAEDAKLQLSKDTYDDDLDNLLAQIGDQYADLFLAAKNLSDAILLSDILRVNTEITKAPLSASMIKRYDEHHQDLTLLKALVRQQLPEKYKEIFFDQSKNGYAGYIDGGASQEEFYKFIKPILEKMDGTEELLVKLNREDLLRKQRTFDNGSIPHQIHLGELHAILRRQEDFYPFLKDNREKIEKILTFRIPYYVGPLARGNSRFAWMTRKSEETITPWNFEEVVDKGASAQSFIERMTNFDKNLPNEKVLPKHSLLYEYFTVYNELTKVKYVTEGMRKPAFLSGEQKKAIVDLLFKTNRKVTVKQLKEDYFKKIECFDSVEISGVEDRFNASLGTYHDLLKIIKDKDFLDNEENEDILEDIVLTLTLFEDREMIEERLKTYAHLFDDKVMKQLKRRRYTGWGRLSRKLINGIRDKQSGKTILDFLKSDGFANRNFMQLIHDDSLTFKEDIQKAQVSGQGDSLHEHIANLAGSPAIKKGILQTVKVVDELVKVMGRHKPENIVIEMARENQTTQKGQKNSRERMKRIEEGIKELGSQILKEHPVENTQLQNEKLYLYYLQNGRDMYVDQELDINRLSDYDVDHIVPQSFLKDDSIDNKVLTRSDKARGKSDNVPSEEVVKKMKNYWRQLLNAKLITQRKFDNLTKAERGGLSELDKAGFIKRQLVETRQITKHVAQILDSRMNTKYDENDKLIREVKVITLKSKLVSDFRKDFQFYKVREINNYHHAHDAYLNAVVGTALIKKYPKLESEFVYGDYKVYDVRKMIAKSEQEIGKATAKYFFYSNIMNFFKTEITLANGEIRKRPLIETNGETGEIVWDKGRDFATVRKVLSMPQVNIVKKTEVQTGGFSKESILPKRNSDKLIARKKDWDPKKYGGFDSPTVAYSVLVVAKVEKGKSKKLKSVKELLGITIMERSSFEKNPIDFLEAKGYKEVKKDLIIKLPKYSLFELENGRKRMLASAGELQKGNELALPSKYVNFLYLASHYEKLKGSPEDNEQKQLFVEQHKHYLDEIIEQISEFSKRVILADANLDKVLSAYNKHRDKPIREQAENIIHLFTLTNLGAPAAFKYFDTTIDRKRYTSTKEVLDATLIHQSITGLYETRIDLSQLGGDGGGGGGGGTAPLEEEYRLFLEAPIQNVTLLEQWKREIPKVWAEINPPGLASTQAPIHVQLLSTALPVRVRQYPITLEAKRSLRETIRKFRAAGILRPVHSPWNTPLLPVRKSGTSEYRMVQDLREVNKRVETIHPTVPNPYTLLSLLPPDRIWYSVLDLKDAFFCIPLAPESQLIFAFEWADAEEGESGQLTWTRLPQGFKNSPTLFNEALNRDLQGFRLDHPSVSLLQYVDDLLIAADTQAACLSATRDLLMTLAELGYRVSGKKAQLCQEEVTYLGFKIHKGSRSLSNSRTQAILQIPVPKTKRQVREFLGKIGYCRLFIPGFAELAQPLYAATRPGNDPLVWGEKEEEAFQSLKLALTQPPALALPSLDKPFQLFVEETSGAAKGVLTQALGPWKRPVAYLSKRLDPVAAGWPRCLRAIAAAALLTREASKLTFGQDIEITSSHNLESLLRSPPDKWLTNARITQYQVLLLDPPRVRFKQTAALNPATLLPETDDTLPIHHCLDTLDSLTSTRPDLTDQPLAQAEATLFTDGSSYIRDGKRYAGAAVVTLDSVIWAEPLPIGTSAQKAELIALTKALEWSKDKSVNIYTDSRYAFATLHVHGMIYRERGWLTAGGKAIKNAPEILALLTAVWLPKRVAVMHCKGHQKDDAPTSTGNRRADEVAREVAIRPLSTQATISAGKRTADGSEFEKRTADGSEFESPKKKAKVE

SEQ ID NO: 1436 - protein, 2096 aa, synthetic construct
MPAAKRVKLDGGDKKYSIGLDIGTNSVGWAVITDEYKVPSKKFKVLGNTDRHSIKKNLIGALLFDSGETAEATRLKRTARRRYTRRKNRICYLQEIFSNEMAKVDDSFFHRLEESFLVEEDKKHERHPIFGNIVDEVAYHEKYPTIYHLRKKLVDSTDKADLRLIYLALAHMIKFRGHFLIEGDLNPDNSDVDKLFIQLVQTYNQLFEENPINASGVDAKAILSARLSKSRRLENLIAQLPGEKKNGLFGNLIALSLGLTPNFKSNFDLAEDAKLQLSKDTYDDDLDNLLAQIGDQYADLFLAAKNLSDAILLSDILRVNTEITKAPLSASMIKRYDEHHQDLTLLKALVRQQLPEKYKEIFFDQSKNGYAGYIDGGASQEEFYKFIKPILEKMDGTEELLVKLNREDLLRKQRTFDNGSIPHQIHLGELHAILRRQEDFYPFLKDNREKIEKILTFRIPYYVGPLARGNSRFAWMTRKSEETITPWNFEEVVDKGASAQSFIERMTNFDKNLPNEKVLPKHSLLYEYFTVYNELTKVKYVTEGMRKPAFLSGEQKKAIVDLLFKTNRKVTVKQLKEDYFKKIECFDSVEISGVEDRFNASLGTYHDLLKIIKDKDFLDNEENEDILEDIVLTLTLFEDREMIEERLKTYAHLFDDKVMKQLKRRRYTGWGRLSRKLINGIRDKQSGKTILDFLKSDGFANRNFMQLIHDDSLTFKEDIQKAQVSGQGDSLHEHIANLAGSPAIKKGILQTVKVVDELVKVMGRHKPENIVIEMARENQTTQKGQKNSRERMKRIEEGIKELGSQILKEHPVENTQLQNEKLYLYYLQNGRDMYVDQELDINRLSDYDVDHIVPQSFLKDDSIDNKVLTRSDKARGKSDNVPSEEVVKKMKNYWRQLLNAKLITQRKFDNLTKAERGGLSELDKAGFIKRQLVETRQITKHVAQILDSRMNTKYDENDKLIREVKVITLKSKLVSDFRKDFQFYKVREINNYHHAHDAYLNAVVGTALIKKYPKLESEFVYGDYKVYDVRKMIAKSEQEIGKATAKYFFYSNIMNFFKTEITLANGEIRKRPLIETNGETGEIVWDKGRDFATVRKVLSMPQVNIVKKTEVQTGGFSKESILPKRNSDKLIARKKDWDPKKYGGFDSPTVAYSVLVVAKVEKGKSKKLKSVKELLGITIMERSSFEKNPIDFLEAKGYKEVKKDLIIKLPKYSLFELENGRKRMLASAGELQKGNELALPSKYVNFLYLASHYEKLKGSPEDNEQKQLFVEQHKHYLDEIIEQISEFSKRVILADANLDKVLSAYNKHRDKPIREQAENIIHLFTLTNLGAPAAFKYFDTTIDRKRYTSTKEVLDATLIHQSITGLYETRIDLSQLGGDGGPAPGGGGGSGGTAPLEEEYRLFLEAPIQNVTLLEQWKREIPKVWAEINPPGLASTQAPIHVQLLSTALPVRVRQYPITLEAKRSLRETIRKFRAAGILRPVHSPWNTPLLPVRKSGTSEYRMVQDLREVNKRVETIHPTVPNPYTLLSLLPPDRIWYSVLDLKDAFFCIPLAPESQLIFAFEWADAEEGESGQLTWTRLPQGFKNSPTLFNEALNRDLQGFRLDHPSVSLLQYVDDLLIAADTQAACLSATRDLLMTLAELGYRVSGKKAQLCQEEVTYLGFKIHKGSRSLSNSRTQAILQIPVPKTKRQVREFLGKIGYCRLFIPGFAELAQPLYAATRPGNDPLVWGEKEEEAFQSLKLALTQPPALALPSLDKPFQLFVEETSGAAKGVLTQALGPWKRPVAYLSKRLDPVAAGWPRCLRAIAAAALLTREASKLTFGQDIEITSSHNLESLLRSPPDKWLTNARITQYQVLLLDPPRVRFKQTAALNPATLLPETDDTLPIHHCLDTLDSLTSTRPDLTDQPLAQAEATLFTDGSSYIRDGKRYAGAAVVTLDSVIWAEPLPIGTSAQKAELIALTKALEWSKDKSVNIYTDSRYAFATLHVHGMIYRERGWLTAGGKAIKNAPEILALLTAVWLPKRVAVMHCKGHQKDDAPTSTGNRRADEVAREVAIRPLSTQATISAGKRTADGSEFEKRTADGSEFESPKKKAKVE

SEQ ID NO: 1437 - protein, 2096 aa, synthetic construct
MPAAKRVKLDGGDKKYSIGLDIGTNSVGWAVITDEYKVPSKKFKVLGNTDRHSIKKNLIGALLFDSGETAEATRLKRTARRRYTRRKNRICYLQEIFSNEMAKVDDSFFHRLEESFLVEEDKKHERHPIFGNIVDEVAYHEKYPTIYHLRKKLVDSTDKADLRLIYLALAHMIKFRGHFLIEGDLNPDNSDVDKLFIQLVQTYNQLFEENPINASGVDAKAILSARLSKSRRLENLIAQLPGEKKNGLFGNLIALSLGLTPNFKSNFDLAEDAKLQLSKDTYDDDLDNLLAQIGDQYADLFLAAKNLSDAILLSDILRVNTEITKAPLSASMIKRYDEHHQDLTLLKALVRQQLPEKYKEIFFDQSKNGYAGYIDGGASQEEFYKFIKPILEKMDGTEELLVKLNREDLLRKQRTFDNGSIPHQIHLGELHAILRRQEDFYPFLKDNREKIEKILTFRIPYYVGPLARGNSRFAWMTRKSEETITPWNFEEVVDKGASAQSFIERMTNFDKNLPNEKVLPKHSLLYEYFTVYNELTKVKYVTEGMRKPAFLSGEQKKAIVDLLFKTNRKVTVKQLKEDYFKKIECFDSVEISGVEDRFNASLGTYHDLLKIIKDKDFLDNEENEDILEDIVLTLTLFEDREMIEERLKTYAHLFDDKVMKQLKRRRYTGWGRLSRKLINGIRDKQSGKTILDFLKSDGFANRNFMQLIHDDSLTFKEDIQKAQVSGQGDSLHEHIANLAGSPAIKKGILQTVKVVDELVKVMGRHKPENIVIEMARENQTTQKGQKNSRERMKRIEEGIKELGSQILKEHPVENTQLQNEKLYLYYLQNGRDMYVDQELDINRLSDYDVDHIVPQSFLKDDSIDNKVLTRSDKARGKSDNVPSEEVVKKMKNYWRQLLNAKLITQRKFDNLTKAERGGLSELDKAGFIKRQLVETRQITKHVAQILDSRMNTKYDENDKLIREVKVITLKSKLVSDFRKDFQFYKVREINNYHHAHDAYLNAVVGTALIKKYPKLESEFVYGDYKVYDVRKMIAKSEQEIGKATAKYFFYSNIMNFFKTEITLANGEIRKRPLIETNGETGEIVWDKGRDFATVRKVLSMPQVNIVKKTEVQTGGFSKESILPKRNSDKLIARKKDWDPKKYGGFDSPTVAYSVLVVAKVEKGKSKKLKSVKELLGITIMERSSFEKNPIDFLEAKGYKEVKKDLIIKLPKYSLFELENGRKRMLASAGELQKGNELALPSKYVNFLYLASHYEKLKGSPEDNEQKQLFVEQHKHYLDEIIEQISEFSKRVILADANLDKVLSAYNKHRDKPIREQAENIIHLFTLTNLGAPAAFKYFDTTIDRKRYTSTKEVLDATLIHQSITGLYETRIDLSQLGGDGGGSSGGSGGGGGTAPLEEEYRLFLEAPIQNVTLLEQWKREIPKVWAEINPPGLASTQAPIHVQLLSTALPVRVRQYPITLEAKRSLRETIRKFRAAGILRPVHSPWNTPLLPVRKSGTSEYRMVQDLREVNKRVETIHPTVPNPYTLLSLLPPDRIWYSVLDLKDAFFCIPLAPESQLIFAFEWADAEEGESGQLTWTRLPQGFKNSPTLFNEALNRDLQGFRLDHPSVSLLQYVDDLLIAADTQAACLSATRDLLMTLAELGYRVSGKKAQLCQEEVTYLGFKIHKGSRSLSNSRTQAILQIPVPKTKRQVREFLGKIGYCRLFIPGFAELAQPLYAATRPGNDPLVWGEKEEEAFQSLKLALTQPPALALPSLDKPFQLFVEETSGAAKGVLTQALGPWKRPVAYLSKRLDPVAAGWPRCLRAIAAAALLTREASKLTFGQDIEITSSHNLESLLRSPPDKWLTNARITQYQVLLLDPPRVRFKQTAALNPATLLPETDDTLPIHHCLDTLDSLTSTRPDLTDQPLAQAEATLFTDGSSYIRDGKRYAGAAVVTLDSVIWAEPLPIGTSAQKAELIALTKALEWSKDKSVNIYTDSRYAFATLHVHGMIYRERGWLTAGGKAIKNAPEILALLTAVWLPKRVAVMHCKGHQKDDAPTSTGNRRADEVAREVAIRPLSTQATISAGKRTADGSEFEKRTADGSEFESPKKKAKVE

SEQ ID NO: 1438 - protein, 2092 aa, synthetic construct
MPAAKRVKLDGGDKKYSIGLDIGTNSVGWAVITDEYKVPSKKFKVLGNTDRHSIKKNLIGALLFDSGETAEATRLKRTARRRYTRRKNRICYLQEIFSNEMAKVDDSFFHRLEESFLVEEDKKHERHPIFGNIVDEVAYHEKYPTIYHLRKKLVDSTDKADLRLIYLALAHMIKFRGHFLIEGDLNPDNSDVDKLFIQLVQTYNQLFEENPINASGVDAKAILSARLSKSRRLENLIAQLPGEKKNGLFGNLIALSLGLTPNFKSNFDLAEDAKLQLSKDTYDDDLDNLLAQIGDQYADLFLAAKNLSDAILLSDILRVNTEITKAPLSASMIKRYDEHHQDLTLLKALVRQQLPEKYKEIFFDQSKNGYAGYIDGGASQEEFYKFIKPILEKMDGTEELLVKLNREDLLRKQRTFDNGSIPHQIHLGELHAILRRQEDFYPFLKDNREKIEKILTFRIPYYVGPLARGNSRFAWMTRKSEETITPWNFEEVVDKGASAQSFIERMTNFDKNLPNEKVLPKHSLLYEYFTVYNELTKVKYVTEGMRKPAFLSGEQKKAIVDLLFKTNRKVTVKQLKEDYFKKIECFDSVEISGVEDRFNASLGTYHDLLKIIKDKDFLDNEENEDILEDIVLTLTLFEDREMIEERLKTYAHLFDDKVMKQLKRRRYTGWGRLSRKLINGIRDKQSGKTILDFLKSDGFANRNFMQLIHDDSLTFKEDIQKAQVSGQGDSLHEHIANLAGSPAIKKGILQTVKVVDELVKVMGRHKPENIVIEMARENQTTQKGQKNSRERMKRIEEGIKELGSQILKEHPVENTQLQNEKLYLYYLQNGRDMYVDQELDINRLSDYDVDHIVPQSFLKDDSIDNKVLTRSDKARGKSDNVPSEEVVKKMKNYWRQLLNAKLITQRKFDNLTKAERGGLSELDKAGFIKRQLVETRQITKHVAQILDSRMNTKYDENDKLIREVKVITLKSKLVSDFRKDFQFYKVREINNYHHAHDAYLNAVVGTALIKKYPKLESEFVYGDYKVYDVRKMIAKSEQEIGKATAKYFFYSNIMNFFKTEITLANGEIRKRPLIETNGETGEIVWDKGRDFATVRKVLSMPQVNIVKKTEVQTGGFSKESILPKRNSDKLIARKKDWDPKKYGGFDSPTVAYSVLVVAKVEKGKSKKLKSVKELLGITIMERSSFEKNPIDFLEAKGYKEVKKDLIIKLPKYSLFELENGRKRMLASAGELQKGNELALPSKYVNFLYLASHYEKLKGSPEDNEQKQLFVEQHKHYLDEIIEQISEFSKRVILADANLDKVLSAYNKHRDKPIREQAENIIHLFTLTNLGAPAAFKYFDTTIDRKRYTSTKEVLDATLIHQSITGLYETRIDLSQLGGDGGGGGGGGGTAPLEEEYRLFLEAPIQNVTLLEQWKREIPKVWAEINPPGLASTQAPIHVQLLSTALPVRVRQYPITLEAKRSLRETIRKFRAAGILRPVHSPWNTPLLPVRKSGTSEYRMVQDLREVNKRVETIHPTVPNPYTLLSLLPPDRIWYSVLDLKDAFFCIPLAPESQLIFAFEWADAEEGESGQLTWTRLPQGFKNSPTLFNEALNRDLQGFRLDHPSVSLLQYVDDLLIAADTQAACLSATRDLLMTLAELGYRVSGKKAQLCQEEVTYLGFKIHKGSRSLSNSRTQAILQIPVPKTKRQVREFLGKIGYCRLFIPGFAELAQPLYAATRPGNDPLVWGEKEEEAFQSLKLALTQPPALALPSLDKPFQLFVEETSGAAKGVLTQALGPWKRPVAYLSKRLDPVAAGWPRCLRAIAAAALLTREASKLTFGQDIEITSSHNLESLLRSPPDKWLTNARITQYQVLLLDPPRVRFKQTAALNPATLLPETDDTLPIHHCLDTLDSLTSTRPDLTDQPLAQAEATLFTDGSSYIRDGKRYAGAAVVTLDSVIWAEPLPIGTSAQKAELIALTKALEWSKDKSVNIYTDSRYAFATLHVHGMIYRERGWLTAGGKAIKNAPEILALLTAVWLPKRVAVMHCKGHQKDDAPTSTGNRRADEVAREVAIRPLSTQATISAGKRTADGSEFEKRTADGSEFESPKKKAKVE

SEQ ID NO: 1439 - protein, 2098 aa, synthetic construct
MPAAKRVKLDGGDKKYSIGLDIGTNSVGWAVITDEYKVPSKKFKVLGNTDRHSIKKNLIGALLFDSGETAEATRLKRTARRRYTRRKNRICYLQEIFSNEMAKVDDSFFHRLEESFLVEEDKKHERHPIFGNIVDEVAYHEKYPTIYHLRKKLVDSTDKADLRLIYLALAHMIKFRGHFLIEGDLNPDNSDVDKLFIQLVQTYNQLFEENPINASGVDAKAILSARLSKSRRLENLIAQLPGEKKNGLFGNLIALSLGLTPNFKSNFDLAEDAKLQLSKDTYDDDLDNLLAQIGDQYADLFLAAKNLSDAILLSDILRVNTEITKAPLSASMIKRYDEHHQDLTLLKALVRQQLPEKYKEIFFDQSKNGYAGYIDGGASQEEFYKFIKPILEKMDGTEELLVKLNREDLLRKQRTFDNGSIPHQIHLGELHAILRRQEDFYPFLKDNREKIEKILTFRIPYYVGPLARGNSRFAWMTRKSEETITPWNFEEVVDKGASAQSFIERMTNFDKNLPNEKVLPKHSLLYEYFTVYNELTKVKYVTEGMRKPAFLSGEQKKAIVDLLFKTNRKVTVKQLKEDYFKKIECFDSVEISGVEDRFNASLGTYHDLLKIIKDKDFLDNEENEDILEDIVLTLTLFEDREMIEERLKTYAHLFDDKVMKQLKRRRYTGWGRLSRKLINGIRDKQSGKTILDFLKSDGFANRNFMQLIHDDSLTFKEDIQKAQVSGQGDSLHEHIANLAGSPAIKKGILQTVKVVDELVKVMGRHKPENIVIEMARENQTTQKGQKNSRERMKRIEEGIKELGSQILKEHPVENTQLQNEKLYLYYLQNGRDMYVDQELDINRLSDYDVDHIVPQSFLKDDSIDNKVLTRSDKARGKSDNVPSEEVVKKMKNYWRQLLNAKLITQRKFDNLTKAERGGLSELDKAGFIKRQLVETRQITKHVAQILDSRMNTKYDENDKLIREVKVITLKSKLVSDFRKDFQFYKVREINNYHHAHDAYLNAVVGTALIKKYPKLESEFVYGDYKVYDVRKMIAKSEQEIGKATAKYFFYSNIMNFFKTEITLANGEIRKRPLIETNGETGEIVWDKGRDFATVRKVLSMPQVNIVKKTEVQTGGFSKESILPKRNSDKLIARKKDWDPKKYGGFDSPTVAYSVLVVAKVEKGKSKKLKSVKELLGITIMERSSFEKNPIDFLEAKGYKEVKKDLIIKLPKYSLFELENGRKRMLASAGELQKGNELALPSKYVNFLYLASHYEKLKGSPEDNEQKQLFVEQHKHYLDEIIEQISEFSKRVILADANLDKVLSAYNKHRDKPIREQAENIIHLFTLTNLGAPAAFKYFDTTIDRKRYTSTKEVLDATLIHQSITGLYETRIDLSQLGGDGGEAAAKPAPGGSGGTAPLEEEYRLFLEAPIQNVTLLEQWKREIPKVWAEINPPGLASTQAPIHVQLLSTALPVRVRQYPITLEAKRSLRETIRKFRAAGILRPVHSPWNTPLLPVRKSGTSEYRMVQDLREVNKRVETIHPTVPNPYTLLSLLPPDRIWYSVLDLKDAFFCIPLAPESQLIFAFEWADAEEGESGQLTWTRLPQGFKNSPTLFNEALNRDLQGFRLDHPSVSLLQYVDDLLIAADTQAACLSATRDLLMTLAELGYRVSGKKAQLCQEEVTYLGFKIHKGSRSLSNSRTQAILQIPVPKTKRQVREFLGKIGYCRLFIPGFAELAQPLYAATRPGNDPLVWGEKEEEAFQSLKLALTQPPALALPSLDKPFQLFVEETSGAAKGVLTQALGPWKRPVAYLSKRLDPVAAGWPRCLRAIAAAALLTREASKLTFGQDIEITSSHNLESLLRSPPDKWLTNARITQYQVLLLDPPRVRFKQTAALNPATLLPETDDTLPIHHCLDTLDSLTSTRPDLTDQPLAQAEATLFTDGSSYIRDGKRYAGAAVVTLDSVIWAEPLPIGTSAQKAELIALTKALEWSKDKSVNIYTDSRYAFATLHVHGMIYRERGWLTAGGKAIKNAPEILALLTAVWLPKRVAVMHCKGHQKDDAPTSTGNRRADEVAREVAIRPLSTQATISAGKRTADGSEFEKRTADGSEFESPKKKAKVE

SEQ ID NO: 1440 - protein, 2094 aa, synthetic construct
MPAAKRVKLDGGDKKYSIGLDIGTNSVGWAVITDEYKVPSKKFKVLGNTDRHSIKKNLIGALLFDSGETAEATRLKRTARRRYTRRKNRICYLQEIFSNEMAKVDDSFFHRLEESFLVEEDKKHERHPIFGNIVDEVAYHEKYPTIYHLRKKLVDSTDKADLRLIYLALAHMIKFRGHFLIEGDLNPDNSDVDKLFIQLVQTYNQLFEENPINASGVDAKAILSARLSKSRRLENLIAQLPGEKKNGLFGNLIALSLGLTPNFKSNFDLAEDAKLQLSKDTYDDDLDNLLAQIGDQYADLFLAAKNLSDAILLSDILRVNTEITKAPLSASMIKRYDEHHQDLTLLKALVRQQLPEKYKEIFFDQSKNGYAGYIDGGASQEEFYKFIKPILEKMDGTEELLVKLNREDLLRKQRTFDNGSIPHQIHLGELHAILRRQEDFYPFLKDNREKIEKILTFRIPYYVGPLARGNSRFAWMTRKSEETITPWNFEEVVDKGASAQSFIERMTNFDKNLPNEKVLPKHSLLYEYFTVYNELTKVKYVTEGMRKPAFLSGEQKKAIVDLLFKTNRKVTVKQLKEDYFKKIECFDSVEISGVEDRFNASLGTYHDLLKIIKDKDFLDNEENEDILEDIVLTLTLFEDREMIEERLKTYAHLFDDKVMKQLKRRRYTGWGRLSRKLINGIRDKQSGKTILDFLKSDGFANRNFMQLIHDDSLTFKEDIQKAQVSGQGDSLHEHIANLAGSPAIKKGILQTVKVVDELVKVMGRHKPENIVIEMARENQTTQKGQKNSRERMKRIEEGIKELGSQILKEHPVENTQLQNEKLYLYYLQNGRDMYVDQELDINRLSDYDVDHIVPQSFLKDDSIDNKVLTRSDKARGKSDNVPSEEVVKKMKNYWRQLLNAKLITQRKFDNLTKAERGGLSELDKAGFIKRQLVETRQITKHVAQILDSRMNTKYDENDKLIREVKVITLKSKLVSDFRKDFQFYKVREINNYHHAHDAYLNAVVGTALIKKYPKLESEFVYGDYKVYDVRKMIAKSEQEIGKATAKYFFYSNIMNFFKTEITLANGEIRKRPLIETNGETGEIVWDKGRDFATVRKVLSMPQVNIVKKTEVQTGGFSKESILPKRNSDKLIARKKDWDPKKYGGFDSPTVAYSVLVVAKVEKGKSKKLKSVKELLGITIMERSSFEKNPIDFLEAKGYKEVKKDLIIKLPKYSLFELENGRKRMLASAGELQKGNELALPSKYVNFLYLASHYEKLKGSPEDNEQKQLFVEQHKHYLDEIIEQISEFSKRVILADANLDKVLSAYNKHRDKPIREQAENIIHLFTLTNLGAPAAFKYFDTTIDRKRYTSTKEVLDATLIHQSITGLYETRIDLSQLGGDGGPAPAPAPGGTAPLEEEYRLFLEAPIQNVTLLEQWKREIPKVWAEINPPGLASTQAPIHVQLLSTALPVRVRQYPITLEAKRSLRETIRKFRAAGILRPVHSPWNTPLLPVRKSGTSEYRMVQDLREVNKRVETIHPTVPNPYTLLSLLPPDRIWYSVLDLKDAFFCIPLAPESQLIFAFEWADAEEGESGQLTWTRLPQGFKNSPTLFNEALNRDLQGFRLDHPSVSLLQYVDDLLIAADTQAACLSATRDLLMTLAELGYRVSGKKAQLCQEEVTYLGFKIHKGSRSLSNSRTQAILQIPVPKTKRQVREFLGKIGYCRLFIPGFAELAQPLYAATRPGNDPLVWGEKEEEAFQSLKLALTQPPALALPSLDKPFQLFVEETSGAAKGVLTQALGPWKRPVAYLSKRLDPVAAGWPRCLRAIAAAALLTREASKLTFGQDIEITSSHNLESLLRSPPDKWLTNARITQYQVLLLDPPRVRFKQTAALNPATLLPETDDTLPIHHCLDTLDSLTSTRPDLTDQPLAQAEATLFTDGSSYIRDGKRYAGAAVVTLDSVIWAEPLPIGTSAQKAELIALTKALEWSKDKSVNIYTDSRYAFATLHVHGMIYRERGWLTAGGKAIKNAPEILALLTAVWLPKRVAVMHCKGHQKDDAPTSTGNRRADEVAREVAIRPLSTQATISAGKRTADGSEFEKRTADGSEFESPKKKAKVE

SEQ ID NO: 1441 - protein, 2098 aa, synthetic construct
MPAAKRVKLDGGDKKYSIGLDIGTNSVGWAVITDEYKVPSKKFKVLGNTDRHSIKKNLIGALLFDSGETAEATRLKRTARRRYTRRKNRICYLQEIFSNEMAKVDDSFFHRLEESFLVEEDKKHERHPIFGNIVDEVAYHEKYPTIYHLRKKLVDSTDKADLRLIYLALAHMIKFRGHFLIEGDLNPDNSDVDKLFIQLVQTYNQLFEENPINASGVDAKAILSARLSKSRRLENLIAQLPGEKKNGLFGNLIALSLGLTPNFKSNFDLAEDAKLQLSKDTYDDDLDNLLAQIGDQYADLFLAAKNLSDAILLSDILRVNTEITKAPLSASMIKRYDEHHQDLTLLKALVRQQLPEKYKEIFFDQSKNGYAGYIDGGASQEEFYKFIKPILEKMDGTEELLVKLNREDLLRKQRTFDNGSIPHQIHLGELHAILRRQEDFYPFLKDNREKIEKILTFRIPYYVGPLARGNSRFAWMTRKSEETITPWNFEEVVDKGASAQSFIERMTNFDKNLPNEKVLPKHSLLYEYFTVYNELTKVKYVTEGMRKPAFLSGEQKKAIVDLLFKTNRKVTVKQLKEDYFKKIECFDSVEISGVEDRFNASLGTYHDLLKIIKDKDFLDNEENEDILEDIVLTLTLFEDREMIEERLKTYAHLFDDKVMKQLKRRRYTGWGRLSRKLINGIRDKQSGKTILDFLKSDGFANRNFMQLIHDDSLTFKEDIQKAQVSGQGDSLHEHIANLAGSPAIKKGILQTVKVVDELVKVMGRHKPENIVIEMARENQTTQKGQKNSRERMKRIEEGIKELGSQILKEHPVENTQLQNEKLYLYYLQNGRDMYVDQELDINRLSDYDVDHIVPQSFLKDDSIDNKVLTRSDKARGKSDNVPSEEVVKKMKNYWRQLLNAKLITQRKFDNLTKAERGGLSELDKAGFIKRQLVETRQITKHVAQILDSRMNTKYDENDKLIREVKVITLKSKLVSDFRKDFQFYKVREINNYHHAHDAYLNAVVGTALIKKYPKLESEFVYGDYKVYDVRKMIAKSEQEIGKATAKYFFYSNIMNFFKTEITLANGEIRKRPLIETNGETGEIVWDKGRDFATVRKVLSMPQVNIVKKTEVQTGGFSKESILPKRNSDKLIARKKDWDPKKYGGFDSPTVAYSVLVVAKVEKGKSKKLKSVKELLGITIMERSSFEKNPIDFLEAKGYKEVKKDLIIKLPKYSLFELENGRKRMLASAGELQKGNELALPSKYVNFLYLASHYEKLKGSPEDNEQKQLFVEQHKHYLDEIIEQISEFSKRVILADANLDKVLSAYNKHRDKPIREQAENIIHLFTLTNLGAPAAFKYFDTTIDRKRYTSTKEVLDATLIHQSITGLYETRIDLSQLGGDGGEAAAKGGSGGGGGTAPLEEEYRLFLEAPIQNVTLLEQWKREIPKVWAEINPPGLASTQAPIHVQLLSTALPVRVRQYPITLEAKRSLRETIRKFRAAGILRPVHSPWNTPLLPVRKSGTSEYRMVQDLREVNKRVETIHPTVPNPYTLLSLLPPDRIWYSVLDLKDAFFCIPLAPESQLIFAFEWADAEEGESGQLTWTRLPQGFKNSPTLFNEALNRDLQGFRLDHPSVSLLQYVDDLLIAADTQAACLSATRDLLMTLAELGYRVSGKKAQLCQEEVTYLGFKIHKGSRSLSNSRTQAILQIPVPKTKRQVREFLGKIGYCRLFIPGFAELAQPLYAATRPGNDPLVWGEKEEEAFQSLKLALTQPPALALPSLDKPFQLFVEETSGAAKGVLTQALGPWKRPVAYLSKRLDPVAAGWPRCLRAIAAAALLTREASKLTFGQDIEITSSHNLESLLRSPPDKWLTNARITQYQVLLLDPPRVRFKQTAALNPATLLPETDDTLPIHHCLDTLDSLTSTRPDLTDQPLAQAEATLFTDGSSYIRDGKRYAGAAVVTLDSVIWAEPLPIGTSAQKAELIALTKALEWSKDKSVNIYTDSRYAFATLHVHGMIYRERGWLTAGGKAIKNAPEILALLTAVWLPKRVAVMHCKGHQKDDAPTSTGNRRADEVAREVAIRPLSTQATISAGKRTADGSEFEKRTADGSEFESPKKKAKVE
